United States Patent Application Publication US 2006/0134663 A1 - sequence listing, part 76

SEQ ID NO: 201508 - DNA, 1000 bp, Homo Sapiens
tgtatgtattcatttgtgtagataataaatgattcatattatttagtaaattatatgagaagtattattgtcagttacatttatgggtatgttattgatataaatgttccaaacttgtatgaaaatcttaaaaatctgatatgacatcagaaataattctggttattatgttgtatccataaaaaataaccaaagtcccctgtcaattgctaattaaacttccattagatttttaaccattgctattttaagtctctgtcacccacagttattgtttttctttttcagtaaaagtatttgcactcagattgatggaaaaaagtctaagtatacttaaatataagtttctaataactctaagatttatgaacataataaaaattttccagaactctaagaaagaaattaatgggttcctgcaactgcaaattaagatcaaacaaaatttaaaaattaattatatgatatgaaataacatctgaagataacatttttataacttttatttgaaacattcttggttcttcggtgttctgtttttcacatttagggaaattttctctcttaagctatctattgtttacatcagtttggcaaagcacatttttatgaacaaagctggaaacatttgctttttctccttacttgatcttccaaaattcaaaagttatccatgagtattatttttttggggggacaaaatcattattttcagaagtttaataagaatctacattctttataacaagatacaattggaaacactggtgacattaccaaggttttgattaaaatgttatatctgagaacgtgcattgaatgtctaacttcaagaattcataaccctacagtgaatgaataaaaactgtcaattcctggcatgcccagaaaccttaagactctgggtagaatctaaagtctgttttgctttggctttctagcctctagaggcctcttaaaaacctcctgaggtttttaaatctgagattcctatatgatc

SEQ ID NO: 201509 - DNA, 1000 bp, Homo Sapiens; identical to SEQ ID NO: 114923

SEQ ID NO: 201510 - DNA, 1000 bp, Homo Sapiens
tttactgtgtctagtcagctattaaacacattctagagtttttaattcatgtattttatatttttcagttctagaatgtttcatttgatttttatattgattctaattgtatgttaaaattgtcttttctttcattccgctcatcgtttattctcttttatttaaatttattcgttagttattttaaagcttttatctgtttagtccaatgatatccatagctagggagaagaggaagtgtccttatatcatctaattttttttcattttctttcgttacgttttccagtttattcagatgcctcgtttctatacatgttagaactatagagagagagaggttgatgttactttcctctcaaacaagattttcccttttctcttatgcaggtagactgagaacgaatcatctcagtacaactgggaatttagccacataggggttggattccaccgcaagtaaaaagttagtccttctctaaagtacagacatgccctgtgtttgttgcagacccctccctctagagggactttatcttttaagcatttcaagaaacaggagttccttctctgctttgcaccaccttagcactcatgtctggggctcctttagattcccctgccagtgtccaccgaaagctctgagggtttctgtttctcctagaggagttctttgcttaaatcaagcttaatctttactatgtgcacagatttggcaaatgctgccatgaagaaaactgttggtctcatctttcccaagaaatattccatctctggaaacagttcatttagtcctctttgcatcctccctacttcgatgtcttacaaacttgactttgggatgtatgcatttttttctatttgttgaagtgggagttgtaacttgtaccctgccttcttcattccactcagtggttaaaatagaccaaaattttaatgagtttattaccttttattggtcctgactggtacaaatactgataaaaaggattttaagatc

SEQ ID NO: 201511 - DNA, 1000 bp, Homo Sapiens
cattcggcgatcagagtttttaagaataatttggtgggtggaggaagccagtgagtcgagagtgctgattggttgggtcagagatgaaatcacagggagtcaaagctgtcttcctgcgctgagtcaattcctgggtgggagccacagatcagatgagctggtttcttgatctgggtggtgccagctgatccatcaagtgccaggtctgcaaaatatctcaagcgctgatcttaggagcagtttggggggtgggagatcagaatcttgtagcctccagctgcatgactcctaaatcataatttctaatcctgtggctaatttgttagtcctacaaaggcatctagttcccaggaaagaaggagggttcttctggaatgcgctgttattgtcttcatttttaactacaaactataaattaacttcttcccaaaattagttcagcctatgcccaggaatgaccaaggacagcttggaggttagaagcaagatgcagttggttaggttagatctctttcactgtctcagttgtaattttgcagcggcagtttcaaaagtcctagcttcaggagtccctgtagaactgacctgaagcctcaaggaatccaggtgaataaccccaaaaatcaaccaaatatggggtcatcagcagaagctcaagaacaatggatgaggctggaatctaataacaggtgtgctgtagctgttttgaaacataatttttctctctccagtttatttttactaaagacaagaccaatttatttgcaaaataagcttgccttattatactttgcctaattatttacataaagtgcagcaagaataattattggccatataggctctttttttctaactggctttgctggaatttttttcataaggaatctcagattagaccttttaaaagtctcttgagcccagccaaggatttatttgtgcctgcagatacttgtatgaattgggtgaattcctttcttcttgaggtcccaacaaagct

SEQ ID NO: 201512 - DNA, 1000 bp, Homo Sapiens
ccctggcaactttgaggttctaactcaggtccgttatccggatcgaggacagtgtatggtgggtagtttgactggggcggtctcctcctaaagagtaacggaggagtacgaaggtgcgctcagaccggtcggaaatcggtcgtagagtataaaggcaaaagcgcgcttgactgcgagacagacacgtcgagcaggtacgaaagtaggtcttagtgatccggtggttctgtatggaagggccatcgctcaacggataaaaggtactccggggataacaggctgataccgcccaagagttcatatcgacggcggtgtttggcacctcgatgtcggctcatcacatcctggggctgaagccggtcccaagggtatggctgttcgccatttaaagtggtacgcgagctgggtttagaacgtcgtgagacagttcggtccctatctgccgtggacgtttgagatttgagaggggctgctcctagtacgagaggaccggagtggacgaacctctggtgttccggttgtcacgccagtggcattgccgggtagctatgttcgggaaagataaccgctgaaagcatctaagcgggaaacttgcctcaagatgagatctcactgggaccttgagtcccctgaagggccgtcgaagactacgacgttgataggcagggtgtgtaagcgctgtgaggcgttgagctaacctgtactaattgcccgtgaggcttgaccatataacacccaagcaatttgtgaactcgagagagaccagattgcggtgtgtgaagacgaaacgaaccgaaagttcgaatctcacaaaacaccgaagctatcacatacccaatttgctgaagcgaggccgctggccacgactcagtacccgaatttcttgacgaccatagagcattggaaccacctgatcccatcccgaactcagcagtgaaacgatgcatcgccgatggtagtgtggggtttccccatgtgagagtaggtcatcgtcaagatt

SEQ ID NO: 201513 - DNA, 1000 bp, Homo Sapiens
gagcgacgtctgagcggagacctccatgaagaggtcagcagggagaaggagacacaggcagctgggcagagctgaaggcaggccaggctgggcagcgcctgcatcccgcctgaggcgtccaggtccgttcggggaagtgggtggagagtgggtgagtgctgactggcaggtgctgactgttgcagatcggatcaacatcaagaggaagggagcgtggccctccaccctcctgtccgtgcagaacgtcatcgactgcggtaacgctggctcctgtgaagggggtaatgacctgtccgtgtgggactacgcccaccagcacggcatccctgacgagacctgcaacaactaccaggccaaggaccagggtaggctgctgcccgtgcccccactccaccctcctgccctccactccctcttccacaggccttcgtggctgaggacccagcctgaccccgtgctcctcacattggctggtggctggggagctgcgggagggcagaggttgcagcccccaggggcgctggtgctcttgaccattaggggtagtgttcccagtgccagctccagcctctcgctgcagaagccccctctgctatcttgcacccgcttgggctggggatcagaaaactggaccccgtagtccctgttgagaagcccaacgaaaaagcctgctgcaggagcggtctgaagagcatccttggccacgcgcgtggtggctcatgcctgtaatctcagcactttgggaggccgagacaggcagatcactggaggtcaggagttcaagaccagcctggccaacacggtgaaatcccgtccctaccaaaagcacaaaaattagctgggtgtggtggtgcacacctgtaatcccaggtactcgggcagctgaggcaggagcattgcttgacccgggaggcagaggttgcagtgagccaagatcgcgccactgcactctagcctgggtgacagagcaagactacggctcaaaaaaaaaaaaaaaaaa

SEQ ID NO: 201514 - DNA, 1000 bp, Homo Sapiens; identical to SEQ ID NO: 115006

SEQ ID NO: 201515 - DNA, 1000 bp, Homo Sapiens
ccacgggccaggttcgacgtccactaccttcctcggctgttcactgctgagtggcggatccaggtaggcccatggcaagaagcaccgagctgccaggggcagcacgtgacagaggaaggcatgcagggcctccaacggtccacctctgagttcttatgagtccaagcctggctttgtagagcagcctgttaggaaggggaccgttgcgggggaaatcctgtacagttaagcaactacaaggcggcagttccttaaaggctcgattttggtggttcctacgaggtccctcccaaccccagacctgagtattcacctaataatcaccccaaggcagccactctctccttactgcagaatctgggcagcaaatatgcccagaaagaagaaagaagggaatgagcatggcccactgaaggccaaagggggagtaccacagacctcagactcgccaagtcttaccacaaagttcacttctcagcagacaaaattcacattttattaaactgctaaaactaaacccttgagagtctaaaatttactcagaaactaccaaatgttattgcttttagagactatcaaaattaaaactgctgcttctagggaattagaatttgtgtggtattgacttaaattctatttggaaatactttgatcttccagatggcaagtggtagattttctattcctcctgtaaaactgagaccaggctcctaatttgatggaaaggttctcttattagaaacaggtgagcttctgagcagaaacatggagacttttcctaatcaagaaaaagacaattgaaaaaaaaaattctgtaaacgagggctatatctctttctttccacaggacatcttgattgattttgggaaagaagctacagctcccatatttcacacctgcacttgtgtcatgtccatgctgacatggaacttctttaaaaagccatgtggagccactgtgtggccatgtggtattagctctctggagcgccctagctgt

SEQ ID NO: 201516 - DNA, 1000 bp, Homo Sapiens; identical to SEQ ID NO: 114959

SEQ ID NO: 201517 - DNA, 1000 bp, Homo Sapiens
gctaacacaacagacttttgttaaacaattaagaggaaaaaaatgcatacaatatagcatttgctatataaccataacctctcccattcctggtgtcccactctgaattctacttgattcaacaacttaagatgcaatggaaataataatgtctattccagcagattaaaaaatacaaggcagcagtaaatgttatgaccaccagctaatgggctatggtggagaagcatccactgtggattaagctctcaagtactcaataacttttaaaaatgccttaaatcacccacaaaatgcagtatacatggctttgtgtatacaactgttaagtgtacaaatatacatcaggtgcaggaaatcaaaagcagcctttgtgaaaacttagttttatagtacttattactacaaactagacataaaggtgctgaataaaataattaagaaaaaggaaatagcaactttgaacaatcttataaatcattttatataagttagttatccttagagtatgtatactataattctgagttaaatatttatataatacaatttttgtaactgaaacaggatctcactttgtcatccagtctagagtgcagttgcacgatcatggcctactgcagccttgatctcccaggctcaaaggatcctcctgcctcatctacctgagtagctgggaataaaggcatgcaccgccatacccagtgaatttttttttctggtagagatggtgtcttactacattgcctagactggtcttgaactcctgaactcaatggatcctcctgcctcagcctccccaaatgctggaatgacatatgtgagccactgtgcctggtccatataagattttagagtattactctaagagattaaccctaccctggggaatcgatgtcaaaagttgggaatatctttcctaggtgaaataatagaaataacgaactctttagagctgactatgtagcaggtgcttctgagtgccatacccagggtaact

SEQ ID NO: 201518 - DNA, 1000 bp, Homo Sapiens; identical to SEQ ID NO: 114788

SEQ ID NO: 201519 - DNA, 1000 bp, Homo Sapiens
aaagtgctgggattacaagtgtgagccactgtgcccagctaaatacagatatttttcactggtgaacatactttcaatcggtgccttggtttagtaccagtcttttgctattataaaaaatgctgaaatgaatgatagtgttttatgtcatttgaacatatgcactggtaattttgatgggtactgccaaactgccctccatagaaatggccctaaccccttctcccacaatgtgtgtgagtgctgacagcctactgcttaatgttgggttttgctaatttgacaggtaaaaatagtactgcattgtggttttaatttgctttttttcttactgtgagtgaagataaacatctttttatgtttaaggtctattttatattattctgtgccatatttgttcatgtcctttggccattttttctactgagtaataacacaaataggcatgccattcatttatatgtgtgtctgtgtatttctgcagacaaagataaaacaatgttcattgttggtatgtgggtgaaaaaataagtgattgtgtgttttctgttttctccggtgaatccttttaaagtaaacatttttatatattagaattaaaacaatgtgttactgaacattgggaaggttttctggtttgcctacaatcagcttgtttctgtgaaacatgttcttttggaaaccaagtagagaatcctacttgtaaacaaagcaagaccaaccagacttaagaaagatcaaatttaatttagatctactccttgattctcatgaattgattgaatctctttagggcaaatacctggcctctatagagaaatctggaatgatttctgcactgggagaggaaactttcagatcactaagggctttgtggggctgatatcaccagccgaggtactgggcaatgtctcctgtggtttcacacttcttagcgatttccttccccaactgcaagctgggctgccccgaacttcagcaatgtagagagagaatgcag

SEQ ID NO: 201520 - DNA, 1000 bp, Homo Sapiens
agtgattgaattaggctatggtgtaacagagaactctaagacagtagcttaaacaagattttttttttaacccctgagtcttgctgcctttttcacaaagacaaagctttttcagaaactcccagcttatgtctcatttgccacaactgcgtaacatggctatcttttagctgtaagagatgctgagaaacatagtttttttgctgggcatattgtcactgagcaaaatcaaagttttatttggattattgtacttacaattcaccttttatggcaatttaagtagtcatttgtcatagattggaggatttcctggaagggtgaagaacttctatataggttacttattctgactaacataaattatcctaccaccacaatcccataactctaaacttacagagatgtcatagaaaacaacaaatatacacacagctaaccacaaaagaaaaaggaaatcccagctgccagaagtgaagaaaaaacagccagaatagtgaactcagcagctgaaggtacactgacctaggtggatgatagtgttggctgtgggtctcaccaatggaccctgagactttaacagcaagagatatggcctgactatacagggaagctgggactgagacctacacaaagccaagaccttagaaggtgctccagcctcaggaaggaggatgagcaaacttttacacaataacccagggaagctacaaagttgtctgaacccaagactttagggtggagaaagaggaaggtgtctgtgagaaagagttgaagtttacatttcagttttgctttcagaatatccatgcttagcttaaaaatgtgaggcacattaagttactggctttaataaaggaatgaatgaaatgtacagaagtatgtgttctcggggcctcttttaaagtcattaggggaaagaattggcatatattcagacgcatttgaagaaattatatatttttggagatggagtcttgctctatcgcatggcatgatc

SEQ ID NO: 201521 - DNA, 1000 bp, Homo Sapiens
aaatatttttgatccatgaatcttttcaatttgaaaaatatattttttcaatgtttttcaaatatatttgaatccatggatgcagaacccatgggcaaagagggctgactatgtatccagaaatggaattgccagatcatgtggtaattctatgtttaattgcttggagaactgacatactgtttttcatacgggatgcaccatttaacattcccaccaacagtacacaagtgttcctatttcttcacattctcaccaacacctgctattttctttttttttttaagtaatagccatactaataggtatgaaatatgaaattatatctcattgtggttttaattggtatttctctaatccttagtgatgttgagtatcttttcatgtgcttattggccatctgtgtaacctctttgaagaaatatctgttcaaattcctttgcccatttctaaattgaattttggggtggggaggttgttattgagttatagtttttttttaatatatctttatcagacatatggtttacaaatatttttcccattctatgactgtctttttactctgttgatagtatcctttgatgtacaaagatttacattttgatgaagtccaatttatttttttcttttgttgcctatacttttggtgtcatacccaagaaatcactgccaaatcaaatatcataaagcttttcctctatattttcttctaagaattttctacttttagtttttacatttaggcttttgatccattttaggtaatttttgcatgtggtgtaaggtaagagtccaccctttttgcatatgttttcccagaccatttgttgaaaagactttcctttccccattgaatgtcttggcaatcttgtcaaaaatcgtttgaccatctatgtgggggtatatttctgggctcactcttctatttcattggtctatttgtctgtctttctgtcagtactacactgttttgattactgtagctttgtagtaagct

SEQ ID NO: 201522 - DNA, 1000 bp, Homo Sapiens
gcagcgccctctgtgaattgtcttctataaatctacgttttccttcctcccttctgttgctttgtttttccttgcttctttctttcgttactccgtgcatttcgttcaattttttgttcaacaggccaagaacctggacaactctatcaggtaacagtggggcagaagatacgggctttcacaagtccctctgcagagagccatcctgcgtttctgagcttgcagactctcatgatcaaagcagtttgctagcgggggagatgcctatgtgtgttcccccggtgagaagcagcccatctcattgtaatcttcagcaccaggcactgctattaaagggagctcaattctaaataacaggaaagggacttgtccctcaacacccaacgaaagaagtgctgccatttataacaaactaatgcttctcagtcacttctgcaggaggaaccaagaattctatattctgttgccagctctagcccgagctttgccactcgcttgccttgcgatgcagagagcagttgcctgggaataaagaccagagttcagatgctgacactggcacaaactctccatgcctctcagaattcacttaaccttctgggttttagcatctcttgtttattaagaaagggaactaggtgattatttcaacaggagtttgctatgtgattaacattacggctatgaaggttgagacatcatctctcatggctacttttaaggagtgaacaagcatttagaccactgcaatgtggtgtcaggttctggggagaattctgagcaaaggacttggagcatgcacacaggagagagtaaatctgcctaagttgccccaccgtgagatttcttttcattctgaccccatgaattgactgcttaactctcactccatgttggagcctggggttgggtctagattcctcctctcggtcgcagtatcccctccatgctgactatgcatgtgccaggtccacctctcttgtgccattattgtcaagct

SEQ ID NO: 201523 - DNA, 1000 bp, Homo Sapiens
ggaaatgcttgagacttcgattgccgtattgttcttttgtttgcttgtttttttgttttgttttgttttttaatttttaaaaatttttttacttagaggcaaggaatagagtagattcagcatcagaggaattgacttgatggggacacagtgtgggacacagactgacatggaaagttcgaacacagaatttactgaccttgaataaatccttgtggatcatttaaaaattacctgcaaggctgagatacacctttcttcaatatttcatcatgcatggtaagcatttggcaatacagattttttttaaagtcttgaatcctagaataacttttttaaagaacaaattacttcgcttggaaatcagaactgtggaaacgagtcacgtgcatccgggcctcgtgctccctggctctccaccgagggattcagcctggctgcgttccgttttgggaaatggccctcctcaatttcaagttcatttggctttttcaatgatagggtttcaattcaaacagataacaatgctgagaactaaaaatttcaccatctaattagccgggggggaatctcagtatggcctttctttcctagtatcatctgcagtttgaaaatgacttgatgaaggctttttataaaaaccctttacttttcctggtacaagaacaattgtagtgaaagatactggtacaatgcaatgggcataggaggataaaaaaaaatgtgtgcataaaaagaagcagaggaaaccaggacaaataagagatcagagaaaagagtgtggctgaaggtttcaaaatgcaatttaggttgaaaaaaaggaagacacgatccaacatctatatcaggcattttaatggagtatgaatccctggttaatctgggtaaggacaagtgggagccggggggtgagggaatgcagatagtcacaaggttgaaaggaagcaaaaaaggcctggactgttgcagctttcgatactggtgtgttcttctgaagatc

SEQ ID NO: 201524 - DNA, 1000 bp, Homo Sapiens
tcccccagacccagaggcctgtgcagattccaactcctccataaaacagcagccagacgggtgtagctgcttcttgcgttaccccgccttgtttgtaaatcagccacaaggctaccaggggaccgatggcattactgggaaaaataaaaagagaaaagattaactatatatgcaagcggcaatgtacatgatacaggtgactttgttttattgtgcttcactttatcacactccacagatatgatgtttttctttctttttttttgagacagagtcttgctctgttgcccaggcttgagtgcagtggtgtgatctcggctcactgcaacctccacctctccggttcaagcgattctcctgcctcagcctcctgagtaattgagactacagccgcgggccaccacacccagctaatttttgtatttttagtagagatggggtttcaccatgttggccaggctggtctcgaacccctgaccttgtgatctgcccaccttggcttcccaaagtgttgggattacaggcatgagccactgtacctggccttcagataggatgttttttatgaatttgaggtttgtggcacccccacaccaagcaagtccgctggagcgactttccagcagtatgtgctcacgtcatgtctctgtgtcacattttggtaattctcacagtattcccgaatttttcattattatcatatctgttatggtgatctgtgatcagtgatcttttatgttactattataattgttttggggtgccatgaactgttcccatatgagacggtgagcttcactgataaatgctgtgtgtgttctccctgctccactgaccggccactgccttgtctctctccctctcctccagcctatttcctgagatattgctatattgaaattaagccaataaattaccgtacagtgccctctaagtgttcaactgaaaggaagagttgcatgtctctcagtttaaataaaaaactggaaatgattaagct

SEQ ID NO: 201525 - DNA, 1000 bp, Homo Sapiens
ctcaatgattagatacacagagtggtctgctgatgtgttggaatcataatgcacagtacattgagtgtataaaagaggaactttgcagcagcatttataggctagatggctggaacaatgatcctaaaatattcatttggaattctagggctggaaggaactccagacatctttcatcccaaaatattcatttaataaatgagcatattggggcccaaaatctgtatgtaacttgcccatttcatttagctatggaagggcttttctccctcagcactactgaaattttgagctgggtaattctttgctgcgggggcctgccccatgcactatcaggtgtttagcagcagccctgcagatcctataccggtactgccctcccctagttgtgacatccaaaaatgtctccaaactttgtcaaatgtcacctaagggacaaaatcatccttcagttgagaagcatggctatagagtgacagctacaatgacagccgaggcttcctgaatgttaggcaaatgctttttccattaggacagagctatgagttcagggtacccaccatgtcatgaaatatatggaatagggggaaataaaaaactagtaagggggaccgggcatggtgggtcacacctgtaatcccagcactttgggaggctgaggcaggtggattgcttgaggtcaggagttcgagaccagcctggccaaaatggtgaaacaccatctttactaaaaattagccaggtgtgatggcacgtgactgtaatcccagctactcgggaggctgaggcatgaaaatcacttgaactgggaaggcggaggttgcagtgagccaagatcacactactgcactccagcctgggccatagaatgagattcagtctcagaaaaacaaacaaacaaacaaacaaacaaaacactagtaaggggtatggtggcagacacctgtagccctagctacttgggatgctgaggcaggaggattgcttaagcccaggaatt

SEQ ID NO: 201526 - DNA, 1000 bp, Homo Sapiens
  misc_feature (23)..(23): n is a, c, g, or t
gtgtatgggtccctgctcagtantctctctcttcctctcagaggattgctgctgcctccatgccacatgccctcagctactttggccgaagtgtggatggtcggctagatctggatggagatgatctggtcgatgtggctgtgggtgcccagggggcagccatcctgctcaggtgaggggtcccagctcaggtggtggtggacagcatagcatagctgttaaaggcaagggccttaaagtcacagatggagatttggttttcttggtcaacttactctgtgcctccattcttagtttataaaatgacagtagtaatagtacctaccttataggtttattgtgaagattaaatgagataatccatataatgatttgaacacagtgcctagcatgtaagtgcgtattgaagtgaatctagggctgggtacagtggctcacacctgtaatcccagcactttgggaggcgaaggtaggaggatcatttgaggccaggagttcaagaacagcctgaccaacatggtgaaaccccgtctctactaaaaatacaaaaaaattagctgagcatggttgtgggcaccagtaatcccagctactcgggaggctgaggcaggagaatcacttgaacccaggaggcagaggttgcagtgagctgagatcgccccactgcactccagcgtgggccacagagtgaaactccatctcaaaaaaaaaaaaagatcaatgacatgaatctattatcttacttctgtcagagggttcgggggagggtgacatgtgcattcagcccctccttctttgttttgaccatggggaagcaagcactgggcttgcacttctcagagggcttacctcctactgctagaatttcttttccacactgttcccagctcccggcccattgtccatctgaccccatcactggaggtgaccccacaggccatcagtgtggttcagagggactgtaggcggcgaggccaagaggcagtctgtctgactgcag

SEQ ID NO: 201527 - DNA, 1000 bp, Homo Sapiens
gcgcgggtgcacatcgactaccacgtcgtaaccgctccataaaccccgtcctggcggacgggttttttcaggaagcagaggcagaagctggcgagcagttccacggcagcagcgcttcgtaatcctcgacgcggctcgccgctggcaggcgttcaaggatgtggcgcaaccaggcgtaaggctcttgcccgttggctttggcagtttcgatcaggctgtagatctgcgcgctggcggtagcgcctttcggcgtgtcgctgaacagccagttcttgcggccgatgacgaagggacggatggcgttctcggcgcggttgttgtcgatcggtagatgcccgccttcgatgtagcgcaccagcctgctccagttgctggccaagtagtttaccgccttgcccagggccgtctgcccagcgacctgcggttgggttttgtccagccaggccttgagttggtcgatcaggggctggctgcgttgctggcggacgtcgaggcgttcgctatggtcagcgtccttcaggtcacgctcgatgccgtagagcttgttgatcaggctcagcgccacgtcggcacgcccagtcttgcccttgggctgcaccttttgggcttcgatgaacttgcgtcgcgcatgcgcccagcagcccaggcgttcgatgccgtcgcgtgcagccacggcgttgtagccggcgtagtcgtcggtcatcaggtagccgcggtagccatcgagcaggcgtagcggcacctcctgcgcgcggctggctgtgtagtcgaaaaggatcaccggcttgtccggcggcccaccgctttgcacccacatccaggattgtgccgaggggtcgcgtcccggttcatgcagcacctgcaagcgcgtttcgtcgcagtgcagcacggggtagtccagcagcttgtcgcgcatcaggttgagcaacggttgcagttgctcgccactttggatcacccaacgcgccagggtctggcgtgggatgtcgacgccgtggcg

SEQ ID NO: 201528 - DNA, 1000 bp, Homo Sapiens
gtcccaagtcatgcaccctgtgccccgggaagtgggcggtgaccctatgctggtggtgtggcatcacaggcccggggcagggagtgctgtgtaaacctgggatgtagagccgcattcccccactccctgtgcatgctgggcttggccccacattatgccaagggaagcgggacctcttttgtcattggccatcctagccacccctccctgccttgtgcctgcatgaggttgggagacttgatgaataaagaatccctgaaggactctgttccttcttcaaaagctttaaggaagcatggtttgtatgagaaatggctaatcagaaagggatgatgtttcataggtatgaaagatgggcaaaagatactatttcatggagaaggagatcaggagcctgagctggagcctggtgatgtcataattgtgcttgatcagaaggatcatagtgtctttcagagacgaggccatgacttgatcatgaaaatgaaaattcagctttctgaagctctttgtggcttcaagaagacgataaaaacattggacaatcgaattcttgttattacatccaaagcaggtgaggtgataaagcacggggacctgagatgcgtgcgcgatgaaggaatgcccatctacaaagcacccctggaaaaagggattctgatcatacagtttttagtaatctttcctgaaaaacactggctttctctggaaaagcttcctcagctggaagctttactccctcctcgacagaaagtgaggattacagatgacatggatcaggtggagctgaaggagttttgtcccaatgagcagaactggcgtcagcacagggaggcctacgaggaggacgaagacgggccccaggctggagtgcagtgccagacggcatgacgtggtgcggggcagcgtggccccaccggactagcacatgatgaatgtaaagttggcacaatgaaaatgacatcgctttaatggcaaaaaaaaaaaaaaaaaaaaaaaa

SEQ ID NO: 201529 - DNA, 1000 bp, Homo Sapiens
agagcttcataatcagcccaagaccacatagagcaaacatgaatgatatttcccaaaaggctgagattaaagaaatgcttgcttctgatgatgaggaagatgtatcttctaaagtagaaaaggcttatgttccaaaattaacaggaactgtgaagggtagatttgctgaaatggagaaacaaagacaagaggaacaaaggaagagaacggaggaggaacgaaaacgcagaattgagcaggatatgttagaaaagaggaaaatacagcgtgaattagcaaaaagggctgaacagattgaggacataaacaatacgggaactgaatcagcatcagaggaaggagatgattcactacttataactgtggtacctgtcaaatcatataaaacatctggaaaaatgaaaaagaattttgaggatctagaaaaagaacgtgaagagaaagaaaggatcaagtacgaggaagataaaagaataagatatgaagaacaacgaccatctctcaaggaagcaaagtgtctttcattagttatggatgatgaaatagaaagtgaagcaaaaaaagaatcactttctcccagaaaattgaaactaacttttgaagaactggagcgacaaagacaagaaaaccgaaagaagcaagctgaagaggaagcaagaaaacgtttagaagaagagaagcgtgcttttgaagaagcaaggcggcaaatggtaaatgaagatgaggaaaaccaagacacagcaaaaatttttaaagggtaccgccctggtaaactcaaactcagttttgaagaaatggaaaggcaaagaagagaagatgaaaaaagggaagcagaagaagaagccagaaggagaatagagggagaaaagaaggcgtttgctgaagcaaggagaaatatggtagtagatgatgacttcccaaagatgtattagacaatctctcaagaatttcttacaccggaactgaatattgagatattaacaaaaaaaaaaaaaaaaaa

SEQ ID NO: 201530 - DNA, 1000 bp, Homo Sapiens
cttgggtgctgaaagaggtgactagtgtcttgggtattatgtatattttgctgggatggaaaatattaattcggtttcccgtgcagcctggtggacatcttgctaaatggcaaatcttctgcctatcgtacaatcaaacataataggactattcgtattaatcaagggcattgccccgccactcaatatgtgatagttgataggagcatcaaaacccgctgcgtctttcttatcatgcatccaccaacgggactcttatgtttatctgctgcaataactgcgttactttctggcaccacatttctgcgttcgtctttgctacctctcatggtctctgttgctgcgaagtcaaacactctttaagcgatgattctatattgcgtgtcattctaatcggcacagcacctattgtattgtacatgtctatagtagctcatttcgcataatttacgccatacgatgttcgctggatcattttgtggtcgcacttgtgctgtcatatttattcacgatatgcgaatcacgattattattccgtcgcttaacgtccttagtcgtatgtatggctgtgatataagtggtacaacttctctctctcgtaagataattggatcgtgtaccttactatggttgcacgatattctacgtgtctctgactttccgggaatcttctggcatatagtcggtcctcctccgttgtgctcgttccgtctctcatactctcgtaacgtacctactatgcgttgacgtttatgcgacgtctaagggttttgtgttggctgcgagttacgctatgcgagtcacatcgttcgctggtcacatttttgagtcattgaatatatctcgagcgtgcaatagttgactcgcgttgcagaatgcttcctttgtaacataactgctgtggtggtactacttcgtgccgcggtgatgtcatctgtggcgctaaatgtatgaggtgcgatggtaatgataacttggctgtgtaatatgtatgctggag

SEQ ID NO: 201531 - DNA, 1000 bp, Homo Sapiens
catgttgtgaccaaaaagtgaggttgccatgccaaagataatctgtccttgggaaacagaaatcatatctggagtttataaggaagaacatgatatgtactacaacagagagatgaattaccctaactcctctttcccttggagatatattatccaactaactgcctgtgctctgtttagttttataaaaccaaatgagatcatccatattcaggcttgttcaactctactctctcaagtagcaatcaaacagctgtcttcagttgcaactttgtgactcataatacattcatcccaaaatgcccttgtacatcttgtggaccatatcatcataatcataataatagtaacacttaagcattgtgtacagtctttttcatcttcaaagcttgtttaaattctataatgcactgcaaacgtgacaagttgaaaaggtatggagagttttttattgttataggaaaagggtgttgaatgctgcaaccctgattatagtgtgcaaacccctgagagggtctgcaagttggcagtgtgcatgcaaaataaaacttcagagctgaaaattatcaggttgaaattacctctccctttagtgtaaatagaataaaaatcttagctgttgaagaagtaccaactggtaatgtgattattttctgaaagcgtagtactaagtcaccgtctaagctaagtatctcattaaacgtcttttaaacaaatgaatgttttgctgctcatttacaaaacctgtatgcactcttacatgatcatcttttggaaatagttctatatattcaagctacatttaaaattgtagttacactgttattcttaccaatcacctgactccgctgcacattaatctgtctgcaggctccacttgctgtagcttaaatgacactttttttttttgtctaatgtattcttggagcttcattattttagttgtttttggctctcattttgaaaaatcaaaattgtcccaaatttccttagctggatc

SEQ ID NO: 201532 - DNA, 1000 bp, Homo Sapiens
atctgggtggagacccttacctcttttgggggaaaacaccaacacctcatggagctggcagtaaagaggaaggatcttgaactttagggctagagagacctggtatcaaatcccagctctattgctgttaatcagctatgtgacccagacaagtcacgtgacatctccatgcctcaagcgcagtaataactgacatgccaggaatactatctaccccgtacagctgcggctgcgaggattccatgagtaatgcatagtccaaggtgccacatagtaggcttgaaattcagacaaattccttacaagtgggaggaagccagctgggaaatcagacagacctggatttgaatcccagactagctcctttgctctgtgaccttcagcaagtcgcggcatctctctggcccattattgtctcatccataaaatgagaacctaataatgggtgttttgcagggctctggggctgcgggcaggattggtgataaaacacgctgagggcctgctttggagggggctctcatctgggattgcagtcagggatcagtgtccttctcataattatgcattttcccctctctcctttgtctcccctgctctttccccgctgctgcgcaggtttgcggaggccagtgttgactgttccacaatggcttggaggggaggacagtggcagggagcagagcggtgcccaggagccaccaatccatggcagtcaggcagccttctagcctcctgctgcccgagagtcagctgaccttgatcttagttcaggggagcagagagcagtctggcttctctgaccttatccagccatcagcacctccggtgctcagaaactccccttctggggagaagtggttaagtgagagggctggagtcacagaggccctaagtttgaagtgtagctttagtacttacctgctgaggaaatgaactgcttcatcctcagttgccttacctgtaaaatgggtggtaagaattcctgcctcctgagatc

SEQ ID NO: 201533 - DNA, 1000 bp, Homo Sapiens
gagaccccagcctgcttcaaacttgctacgcagaccagactctctggcgccacctcaggccattctcactcacaatgccgactgttcagccatggatagtcctttgctttatctgcttctaaattacaactccaaaactctaagagcccaatggattccaggtgttctaaaatgtaaagtatgtgatttctgttttcccaacttcttgagtttgaaccccatatttctatacacctaatattattacaaagaggaaaaaaaaattaggagtaattattattgttagtatattttttcatttatttaaaaacagggccttgctgttgcccaggcaggagtaaaacggtgcaatcatcgctcactgcagccacgaattcctgggctcgagcaatcctcccactttagcctcccaagtagctgggactacaggcatgtgccatcacactcgcctgaatttttaatttttttgtagagatggggtctcactttgttgcccagactggtctagaactcctgagttcaagcaatcctcctgcctcagcccctcaaagtgctgggattataggtatgagccaccatgcctggcctagaagtaaatttttaatgccacatggaaaacaaagaaaacccaacagttacaaaataggtcaatacaaatatgtatatgtgtatacagacatcatgtttaaagtatgtacacacaccacacatacaggagagtaggagagacagagaagaaaaaaagaagaaattgcacattgtgtttctgatacatgatgctgggggttccgtacatgaataacaaataaatgcattccaaattatattaagatatgtgttcttgtcatgcatttttgctttcaatatagatcttccatgctgcaatggttcattgccagcaggccacagatatattccacatgaccagaaaggaatagattgtgatggaatgcgagtgggtaaagatagtaactctatgtatctgcaatatgttcaagct

SEQ ID NO: 201534 - DNA, 1000 bp, Homo Sapiens
gagaagtctggaacagcatgtgagaaagtggaacagtgtgtgagaaggctggaatagagtgtcagaaggcagaacagagtttaagaaggcgaaacagagtgtgagaaggcagaacagtgtgtgagaaggtgaatcagagtgtgagaaggctggaacatgtgtgagaaggctggaacatgtgtgagaaggctggaacatgtgtgagaaggcagaacaatttgtgagaagatgaaacagtgtgtgagaaggctggaacagtgtgcgagaaggcggaacagtgtgcgagaaggcggaacagtgtgtgagaaggcagaacagtgtgtgaggaggctggaacagtgtgtgagagggaggaacagtgtgtgagaaggcaaaacagtatgtgagaaggcggaacagagtgtgagagggtggaacagtgtatgagaaggcagaacagtttgtgagaggatggaacagtgtatgggaaggtggaacagtgtgtgagaaggcagaacagtgtgtgagagggaggaactgtgtgggaaggcaaaacagtgtgtgagaaggcagaacagagggtgagagggtggaacagtgtgtgagaaggctggaacagtgtgtgagaaggcagaacagagtgtgagagggtggaacagtgtgtgagaagggtgaaacagtgtgtgagaaggcagaacagagtgtgagaaggtggaacagtgtatgagaaagtgacactgtgtgtgagagggcagactagagtgtgagaaggtagaacagtgtgtgagagggcagaacagagtataagagggccagagaaggaagcgctggctcactgcagaagtaaaaggaggccacatagcagggagaagtgaaaggggagggttccccaggatgaggatggtgtgaggagggggccaggccacagggcctcagagcctgtggagagggcttgggcttatttgaggcacctgggcccccccagtgctcagggatgtgaaatggagtcctctgggaagct

SEQ ID NO: 201535 - DNA, 1000 bp, Homo Sapiens
ctaggaatctatcctatggaaataacaaaaatgacaaagagaagggtgcccattccagagtttgttgtgtgtgtggttttttttaaataatggggagaatttggaaaatagctagttattcatagaaggggaaatggaagataattatgctttttgcagcacagaaatagataaatctattgtcttctgtacactcagttgaacattatgcagccattatgtgtggtatttgaaaaaaaagtattggcagagggtaatgcttatgaaatagaatgtgaaaaatagaatacaaaattatatttatgatatgatctcaattgtatatatgggtgtttaagttcacaaacttaaggtttccagatataaggacctaggttggtttgttcactgctcagccaccagcctggaacatagtaagtactctataaatacttgggaagtgcttgaaaaacgtatataaaaagctgaaaataaatacatcattactagttgtaagattgcagaatatttgatttcctctttttctttttcacatctcctacagggggcgtgtaatcactctgtgactggtggctgcaggctctcctaatggatatttcctatttacagggctaccaactgccaagcatccaagcagtccctaggcagcaatccagcagctgacagggttaccggcgtcaactgccacagatgctaggctggtttgccatatttacatggatttgatcagcaatgagcacaaaagatagagattgtttctttctttcttttttttgaggtggagttttactcttgttgcccacgctggagcgcaatggtgagatcttggctcactgcaacctccacctcccaggtacaagtgattctcctgtctcagcttcacaagtagctcggattacaggcatgcaggaccatgtccagctaatttttttgtatttcgtagagacggggtttcaccatattagtcaggctggtggcaaactcctgacctcaagtgatc

SEQ ID NO: 201536 - DNA, 1000 bp, Homo Sapiens
ctttgtcttcatctctccacctttcagataaggccctgcctctggggagtttacgttctagtgatagagacagacaataaaccagcagttacacacatcatcacactgttgtggtttataagataaatgtcggctttccccaatgaattatcactattgctctcatgaaaaggcattccttatgtacttcgttgcacataaggctgtaaaagaaaaccctaccaaatacttgatcctgtgaacttatttaagaagcagttgtaatcttggccatgttcaaaaaagctgttgcgacggtgactgttttcttgacacatctacatatcaggccaatgaaagaagctgctacccagagtttaagacaactgtgtttagctacttagtattaaccacttggcgcatgcaaatgactcccaccctcactccctctacccatgcaaatgccaaaaaagactggtctcctttcagtctttcctatttctgaaaacagcacctccatccacccagtcattcaagttccaaacgcaaaagttattcctgtccttccctcgccatccccctacctccaccccagccagcagcgagacttgtcaatgccactcctcaaatagcctggatgggaccccttctcatcacctccctgctgtagccctgctctaaaacagtaccttctctggccaagactggccataaaagctcccacatgctctgcctgcgataagtcctgctgcacctcattctctcacagcagcagagtattcttgttaaatctgaagccaggtcatgtcacatccctgctgtaaaccctccagctccttttccaacacacttaggataaaagtcaagagtctcaccctggatttcaaagtctgaactgacctctgcctctctcttgtcctactttcatcttgagccacaatccctttgcccagcatacacccggcatggccaccatcttcccggttttgaaacatcaccatgcttgctctgccttgaagct

SEQ ID NO: 201537 - DNA, 1000 bp, Homo Sapiens
accctttcctacccgtgaacacgtgggggaaatggctgcaactttctgagcctcagtttcatggtctgtatcgtagagtgagccatacctacttgagaaggtgtgagaattaaatgagatgatgtttgccaagtgcctggcacagtagatgtttaattcacagaagctgttgttattgtttgccttgtagaaagtggttttcatctggtctgcatttttcactgtcaaatgaaacgagacctcaacgatgagaacattgagatgaagcacagagcatttatatcggtggagaggatggcctgggtcagcaagacattacttgggtagtcactggccagggtgacaagcctgtcttaagaatctctgttacaatattaaaacttcagctcaatggcctagaaagcttaactttactaccctccttgttggtttaaatttctatagcattaggtcaaatgccagcaatgggcccagaaggagggaaccgcagtctattttgatgtccagggtcaggctgaggagagagactgacacattatctgtctggctgactgtccactccccccaaccacagtggtgactcatcagagggcgagaaagacccgtctccgcctgtctgaacagtgattctgccggtgattcattgttgcccaccagaaagcccccttcttaatgtcctctttctgagctcttcaattagcatttgaggccaaaggatatttagagggaagggagggtagaaagatccgccagtcggaccgagtgtggcttcactcagtggcagtgggacacagggagggagaagaggaagtgctgggtacggcttgctcccagagtaggaacttggaaacagctagagaaaaaatatatatataataaatggtgaatatttataacattgcagaggtccttaggggtgaaggaatctcaccaaagacaggaagaagggccaaaactttatagaaattagaaatctttttggatgacattgcatgaagct

SEQ ID NO: 201538 - DNA, 1000 bp, Homo Sapiens
gaattctttgtgcataaaacactgcctagaacatcatgggcactcgatacatattttgcacatgaaatgaataaatacacaaataattctgccccagtttaagaacaaaacaaacaaacaaaaacccgtcagagcaaagctatagtcacagccctctgtgacttagggctgagtgtcttcaaagacagagacggaggagggggaggtggcctattggccacaaagaccctgcttggggagcacacacttggagcaggtctagatataaggccaagctcctggagctcagagctctggagggagctgagaataaactgtgggagggaagatgcacatagcttcagatacctcagaaggtgctgtctgcctgaccttcttagtgtagaagaatttggagctcagctcctgcttggtggaaactaaaagagcatccacagataagtaagtccatttccttgctgctcaggaaaatacccagatctgcagaggagcaagacctgcccaagccacaaggagaggtaaggagagggaggtaccaggactgcagagaaagtttagaatcacatttatttgtcagaaggtcattcttactggccttttcgttcacacccctgttactaaaattgcagcattgtctttcaaaacagccccttgaatgctgcagcatcctttactgtatggtggctcaaagctgtctctgggactacccaggttgctccagtgttggctatcaggaagcattctcctctgcccaaccctcaacaagaactcattcgttcaaaagtaatttcctgagcatccctcctgtctgaaggatgcagacacagaggaataagatgctgtccatgatcttgaggagttcacagtccagcaatggaggcaaacatgggggacagcttcaccctgatggcaataggtggaaagacatttgtggggtttctaacaaccaaagaaatctttatagagttagagaaacggaggcagttggtctaaagaagct

SEQ ID NO: 201539 - DNA, 312 bp, Homo Sapiens
  misc_feature (29)..(29): n is a, c, g, or t
  misc_feature (40)..(40): n is a, c, g, or t
  misc_feature (53)..(53): n is a, c, g, or t
  misc_feature (82)..(83): n is a, c, g, or t
  misc_feature (224)..(224): n is a, c, g, or t
cggcgccgggggctttggtgactctaganaacctcgggcngatcgcacgcccnccgtggcggcgacgacccattcgaacgtnngccctatgaactttcgatggtagtcgcgtgcctaccatggtgaccacgggtgacggggaatcagggttcgattccggagagggagcctgagaaacggctaccacatccaaggaaggcagcaggcgcgcaaattacccactnccgacccggggaggtagtgaccaaaaataacaatcaggactctttcgaggcctgtaattggaatgagtccactttaaatcctttaaca

SEQ ID NO: 201540 - DNA, 1000 bp, Homo Sapiens
gtgctaacacagtaatcaaagcagcaaatcgaacctgaaagggataaaagagcaaagaaataaaaagtagtgttactgtatttattatcttaagagctgtactgacttgagacaagctctaactttttaaacattagttcacacgcgtttattcacttcattatgttcattaagctttcatcttagaataccagtttcaccatttgggagctgtttgtaatatgtgcaaccttataaatagtgttttccaaactgtgtcccaggactgcaaatctttaatgtgaaatgtctttttataatctcttcctttaaaaaaaaccaataaaataaaatgccacatgcaaactcaagtgtgtcaccagattttacttcattggcgctcgccagcccgccaggctggcaataaagtgcctccagccacctctggcaggtctcctcacccacagcccctgactggtcaccactatagttgtatgaggggccaggacaatcgcttgggataaactcccatctcagcactgaataaaaaacattctgtgtcacaatatcctagttttggggctttaaaaacgtctaggtgttcctcacatgccttgtctataataaggaaagcaagcagtagttgggtattgttagcttttgaaacaaaagccctactggtcttctaattttggatattttaattaaagaatatctggacagtacaaagtgaattattaaaaaaccatttgtaactacctagattcaatcaggatttccttgatttgtgcaaagtaaaatattacaataaatttgatactgctacttgtataaaaacctatggtttaaaatgtggggggtcatcataatagtctcattgttagcatatcctaataaagaatttgaactaataaatcctattaataaaattctgctttggtctgttatagccagtaaagttctaatacaatcattagtttgagaaatggtgactcattgctaaaacagtttgaaatttgta

SEQ ID NO: 201541 - DNA, 1000 bp, Homo Sapiens
ccaaccccagagctctgcaatgagctccactcccaaggaattcatccactggtgggtggggctagagaaggggggccaccttgggcttgaaggcgatgattttgagcaccatctcaatagtgaagaggccagtgaagaccatgttgaggatgtccatggcatagttgaagggagcagtctgctcatagtgctgcaggagaaaatcaggttgagatggagcctgaggcagagatgccgccacacccaaccaaatattccctggcctgggctgaggcgagtctggggacttgattgcactgtgtattggtcaaacctcttgcactgtctgcctcccattatggatactggaaagtttagttcttgattactagcttttcttgtagttaggcaaggccaggttgactagtgagacataaacataaatctgctgttggttagcagcttgtgtaaaaaaaattttgctttccgatgaaaggatcaaataaggagaggccccaggtgcagctctccctgccttgagtgtggttttgatgcctggagctgtgatcatgaaacaacaatcatgaaaatgaatgccaacttgctaagaatggtgaagcagaaagatagagcatgggtcccggatgaacaatgaacaaacagcctacctctgcacttctcaatacatgaggtaattaccacagttcattgactccaggaggcacatctttttacattttagaatctctgaaattggggcgcattttataacaaatggcaacttacaatggccactggctacttttttttttttttccacattcttacatctccgaaatcagaatgcaacttacaagtactggccatagacttaaagaaatgtggcaaatgtctttatagcttaagttgctgttagttggcagggggtttgttatttgcagccttaaatgttcccaatggttcccaagggattatgtggagataatagggtcaggagtctggcgggggtcaggcagggatc

SEQ ID NO: 201542 - DNA, 1000 bp, Homo Sapiens; identical to SEQ ID NO: 114773

SEQ ID NO: 201543 - DNA, 1000 bp, Homo Sapiens
aggtggtcaggtgaattgtacctcaaaaccaaatagaaacatcctaaaggcagagccacaggaaaattcttgcaggaattccatgcctctgttcatcttcttcctgctagttagaacatccttcccaccttgtcacctggtcaaccatggctcatccttcacctcccagctcaagtatcacctactcagtagtctcctgactcctcaccagatgcagtaactttctactttgtgcaacctaccactgcattttgtacacatttctaacataaatcagataacaatgtaatttgcttacttttcttctcaatttcaaactgaattacctaaaagcagaatgttgctttcgtttttgaaaaccctacaactgagagtgcctggtccacaaataatggtttttgagcaagtggagttcaaaaagatttcatacctagcactgatctttcacaactctattcattaggagatgtgaaaaataacttccattataaaaataaaaccacgaagtatcactcagtcacttacataatcaaaaaggaggaggccgggcgcagtggctcacgcctgtaatccagcgctttgggaggccaaggcgggcggatcacgaggtcaggagtttgagagcagtatggccaacatggtgaaaccccatctctactacaaatataaaaaaaaattagccgggcacagtggtgggcgcctgtaattccagctactcaggaggctgaggcaggagaatcacttgaacccggcaggcagaggttgcagacagccaagaatgcaccattgcgctccagcctgggcaacaagagtgaaactccgtcccaaaaaaaaagaggagagagggagaataaacagaaacagaaacaaaccaaaagtggttatccagtattatttgggattagcttcttaatttgaagacagacaagtgcaccaccaattaaagataatagacacctagcggaatctaggtgtctacttcttggtctacaataagctt

SEQ ID NO: 201544 - DNA, 1000 bp, Homo Sapiens
cagtttttgagggcagtacaaccttgataacaaaacctaaaaaaaaaacaacaaaaaaacccataaagctatagaccaaagtctcatagatttagatgcaaaatcctaaaattgaaaaaaacatctagccatatccataaactatatcatcaccaagagatgtttattagggcaatcaaaagatttattattttaaaaaaatcagtgtggacttccattcctctttcttttgattcccccctttgacttttcatgtatctctcctgccttccttccccagagtggaggagttagacttgcctcgtgggatgagaggagttgtggctttgtgtctgctggcaccaagagggctgagggtgaggtgtggaagggacagggggaggagatgggcagcattgttgagagattggtaacactgagcaaataaatatgttgagaatgatgacagcaagatttctccattagagaaggtatttataaaaataggaatgaggagagctagaaaacctggagtgtggcattagaatagaactcatatcttttaaatatataggaacaaataaataaattgttgtgtgtgcacatatgcatatattttgtgttcattctactgagaggacctaaacacaatgacacctcagtaacagtaagcacaccaactgccaagttattagttcctaaatactatccacaaaaaaggggaacagggatgattcctagtcagagattgggagaaatacaagatgagcctgaatcatctcatgtacctgacagtaagaaaatactctggctggtctcagtggctcatgtctgtaattctagcatgttagaaggtcaaggtgggtgggttgcttgagctcaggagtttgagaccagcctgggcaacatggcacaattgtctctacaaaaaatacaaaaattagccaggcatggtggcatgcacctgtagtccgaggtactcaggaggcagagacgtgggaggatcccgataagctggatc

SEQ ID NO: 201545 - DNA, 1000 bp, Homo Sapiens
gaatgaagagatggtgaaatgaagccagcctccaggaaggtgcactgtgccttaatgggacctggggatgggaaggccaacacagaggtgtcagcgggacaaacacaaagtgtttctaacaagagcaaagatttccagtcttctctttatttccaaacactctgtaggtaaagcagagcctcagtaaacccaagaagcagaaaacctggcctcctgcctggggcagcttcagtttagacttttcttcattcctaacagcataaagaggctgtgcaaatgggaggcactcagcagagcctgaagaactctggggtcttagctcctgggaggccacacatgcttggtggcaccctgccggtcacggtgcctccaaaagctcccaatgatcagtggcctttcttttttttcttttttttcttagacagggtctcactctttgccaggctgcagtggcgggatcttggttcagtgcaacctctgcctcccaggtccagggagtcctcctatctcagcctcccaagtagctaagaccacaggcaagcaccaccacgcccggcaaattttttgtatttttagtagagctggggttttgccatattgtccgggctggtctcgaactcctggcctcaagtgatccacccgcctccgcctcccaaagtgctgggattacaagcaagagtcaccccactcggccagtgtggcccttcttcaggtcatcacttgccagccgcaggcggtggctctgcccctcaccggacacgacgtcacagccgggatgtgaacagcagattctgatctccaactccagacaatcactgatttacttctgcaaaccggagctgtccggtcttgcagggtcggaccatgtaaacaagcctgctgccaggcaactgaagacagaaacacgaataaagatgccccataaggaatgaaaaacaaaactcctcttgggaaacccagatttgggattcggaaacgggcttgagatcaacctgaagct

SEQ ID NO: 201546 - DNA, 1000 bp, Homo Sapiens
aattctgagatacatgtgcagaacacgcaggtttgttacataggcatacatgtgccttggtggtttgctgtatatatcaacccatcatctaggttttaagccccccatgcattaggtatttgtcctaatactctccctccccttgctccccaccccctgacaggccccggtgtgcattgtttccctctctgtgtccatgtgttctcagtgttcaactcccacttctgagtaagaacatgcggtgtttggttgtctgttcctgtgttagtttgctgagaatgatagcttccagcttcatccatgtccctgcaaaggacatgatctcattcttttttagtatttcatagtattccatgatgtgtatgtgccacattttctttatccagtcgatgatagcattttagatctatttagatgttaattcctcctctgatttttctcttatgctcactgtgaactttctgcttgtccagaaactttaatcccctaattattagtaatgcctttgttttctaagcttccatctggagaagaattaacaatatcattgagaaatatttgatgaataaatacataaatgaatgccttcaccagttaatcataacctataaaattgatgatgggaatccagaagtggactagaaagcttccttaaagtttcagcactgctatgtgcctggagaaaccttggccttaaatggagaggaggatgaacatgaagtccagaaggacaatttttaatctcaaggtaagctaaacagagagagacctttcagaacacagacagagatggtggatgagaaacggggtgggaacagagaaaaggagttgggggaaaaaggggaaagctggtgtaaaaggaaaccaaagagcccaaagctaaggtcccacactcagaggggctgaaggtggttaccaggggtgggttaggccatgagagtgaattgaagggaggataatatagcatcaactatctgcatctgtaatggtggtccaagct

SEQ ID NO: 201547 - DNA, 1000 bp, Homo Sapiens
tggtaagattttaggatccccagcactaaaaagaaacgaaatactgatacaggctccaacatggatgaattttgaaagcattactatactaagtgaaagaagccagtcacaaacaagcacatattggatgattccatttctaggaagtgttcagaacaggcaaatttatagagacagaaagtagattgattagtggttgcctgaggctggggagcgggggaagggaggtgactaccaatgtgtatggagtttttccagggtgagagggtgatgaaaatgttctaaaatagattgtgttgatggttgtgccactcagaatatactaaaaaccatttgaattgtgcacttgaaacagatgaattgtacggtatgtgaattctatatcaataaatctgtaatttaaaaaaaaaattaggtcgggtgcagtggctcacacctataatcccagcactttgccagactgaggcaggaggatcacttaagcccaggagttcaagaccagcctggggaacacagcaagacctcgtctctactaaaaaattttaaattacaaaaaaaaaagtaaaaaaaatagaatcctaatagtacctatctcataggattgtggaaaatagtagtaatgtatgtaaaatatttagcacatagtaggcacaaagaaatgacattattattaagagacctgggagagctgtgcccagcctatcgtgggaggccttgacctttggactcaaaagtggcagcaggtccacccccccatacacccttgtcaccaaggaagcgtccacagcttaaaggagctatattaaagcaccccaagtcaagaggactgaaccagatctggaactcactcacctcccctctcacctcactgccctcaccagccagcctcttgtcaagtgatcaggctgtcaaccaacttctctaggataaggtttcaggtcagcccgtgtgtataagaccagtgccaagccagaagcagcagagacaacagtgaatgaca

SEQ ID NO: 201548 - DNA, 1000 bp, Homo Sapiens
ttactgttgttcatatgccaactggaaaagccacctgttccttcagaaagccaactggaattccttcctgtaccattatgattccaatctactgctccactatttgaaagccaaccacctccagaattactatggttgtgaaaccaagtcgaggagcctcctgcaacacccttatgccacccggaacgtcctcttggtccaccaccattcctcaaagaatgtggaaagctgtttttcctagtattattaaagccatctttttcccatttccaatcccgctgtggaggtccacgatgatgccatgcaggctgactgtaactctctctgtcttggtaaggaattcggtcttctcgtctccattggggtcgtctgtcatcagagtttatttcttggttgctattggaaggttcatcttgtcgactttgttctttcctttgttttattaactgaatgagttccttgtcaaaataatcttcttcctcttcctctccttttccatcatcttctctttcctgggcatcaacgttatctttgtgcaactggccagaaatgtgctttgcatatgcagaaagacccacttctgtgaccccgcacactcggcactcatgactaatgtccctagggaaagagggagatgagggacattcaattctccccactggcatggcacactcaccagatctgttattgtttcctctgaaggacactgcacactttggcacagtgaaaaattagtgctaattaatttcaatgctcctttcatcacttttaataagtttgtttataagttacttttgaaatgattttaagattcttttccagcaatcaagaggcaatagacttcagataaatgtcgtttaggaggagaaatcttcttgaattgctgtacttaaaatcttgtcagaggaaacatggtgaaaggggaggcagggcagggggctcagagcaagcagaagttgctctggagcacacccatggtgccagctgcactcccccgcgt

SEQ ID NO: 201549 - DNA, 1000 bp, Homo Sapiens
cttgtagcaaaggtacttaacccagtccatgggtctcccctactctgggagggcatctggagcaaatggcctttaagtgaggacctgacaggtaagatggtgccaacttggggaaggtaaagacttttccaggagagggcccagcagctgcagagacccagaggtgcaggagagtgtgatgttttcaaaggactggaaggttatagcatggagtgagatgcaggggatggtgagagtggaaccagagaaggtataattgataatcacattctgcagagtgccgtaggtcacagtgaggagttcaggccttccctgctgctgttgagaaggcattccatggccttaaccaaggaataacatgaagaacaggagcacaggttttcgtgacatccttggggtgttaactaggatcaaacagcagaagttcagtgctgtaacaaagtgtatcccagtgtaatgacttaaatatgtttcatcctgcgatgcctgaattgtgtgactgattgggactgctgtgaaggcgggagacttgctggtggggtgcacataggacgagcataggaccgtgtgttcctgccagcaccgctccggcctcctgttcgtggctggaccgctctagctttagtttcattttctttcctcctatactgtcagtggatgttaccttggtatgtttatgcatccttgtaagttcattaagaataaggtacagaattaaatattttgtagtttaatgtttgcgttactggggtagtgatgtgtccttgtttctatcgagtcaacacaaaatgaatgatctttcttttagattgaagatggatacgtgacaatcccagggaccgctgcactgacttcatttccttagacaagacacagtgtagggcccggcccgtgttggccccaggactcctttggaatatagctgtggacaatgaatcctgcgagcgatgggggcacatcagagagcatttttgacctggactatgcatcctgggggatc

SEQ ID NO: 201550 - DNA, 1000 bp, Homo Sapiens
tacctgtaaatgagtcgtctcactggtatctcgcagtcatttgttttccatggttagaagaagctgtgtatgaagattttccacaaactgtatcccagcagtcccaggctcagcagtcccaaaatgacaacaaaacaatagataatgatctacgtactacttcgacactgtctttgagtgcagaggattcccaaagtaccgagtcgaatatgtcagtaccaaagaaaatgtgtaaaaggccatgtattcttatactagactccttgaaagctgcttctgtacaaaacacagttcagaatttacgagagtatttagaggtagagtgggaagttaaactaaaaactcatcgtcaattcagcaaaacaaacatggtggatctatgccctaaagttcctaaacaggacaatagcagtgattgtggagtatatttattgcagtatgtggaaagcttcttcaaggatcctattgttaactttgaacttccaattcatttggagaagtggtttcctcgtcatgtaataaagaccaaacgggaagatattcgagagctcatcttgaaacttcatttacagcaacagaagggcagcagtagctagttaatctgtacaaacatgacacagatgttctctaagattactggaaagcctcttaccagcatttgtgttagccagctcacagagaagaaaataacttgcagtagttttataataagtcattggaacattatttaaaatatgtaggacacattattagaattgttgggatctcatagatggaatgggaatgggggtgatatagataaacttactagatataaattaaaattttataaatatttcatatttttctgagtaaatatgattggattatgcaacagcatatgtaatatgggaatgttttgtagataataaaacttacatgatctgtacttccacgtgactgggttctgaggggagttaaagcctcccgggtgccagccccagtgcttgtccaaatttgc

SEQ ID NO: 201551 - DNA, 1000 bp, Homo Sapiens; identical to SEQ ID NO: 115008

SEQ ID NO: 201552 - DNA, 1000 bp, Homo Sapiens
gacagaagaagctcgtgagagcggacatcgaggagagagggaatcaagtggtgaaccattagagtttacgagcagactgaattaaccattgacagagcttcaaccaactaacattcactacaggacagtgtaacgcatgagcccaggatttacagagaactgcacaaaacccgtgtaggcgccttcacaaatcgaggattacccctttatcagacttcgcgagagacattgtatatagaacgtcacattgtgtagaccgcagctactgcaggacatcaacgagtacacatgtcactcacagacgcagctatttcaacagtgtggtagccaacaagaggtgagcgcagtatcaggtgtagcggtgcgcccaagcacgatggaagacgtcagcgtgcactcaacgacacgaccagctagctgctgaaggacagtagctcgatgagccgccaagagtgagtgacggagactgtagacatgatacagacctcagtctgaagcagtagcagggcttcgatagtgtgtgagaatacgcacggagaaagcgacagacatgagacgccatgagagatcacgagaatcatgcgcacgcagcaacggcaaagagcatcaggagtatgtgacagccagcatggtcagacacaacgtctattgtcaacaagagcggcagcacgcacactcggtgcgtgcacactcaggattatatgcacaagatggcagctgtaactctacagagcaggcgcgtgagcacactgtattgaccacgacacgcgctgcgtgtatcgtaacaaaacaacagcgatacacatcatagtatcgcatggcgcgtcacgacacgatagtgtttcagaggtgcacacacacacactaacacacgtacgtacacacgtagaaacaacgatgggcgacaaaagacggtgagctacaacagactggcagtctgaaaaggccacattcagatgagtcaagtggcctaatcctcaagcaatagcaaacaaaaata

SEQ ID NO: 201553 - DNA, 1000 bp, Homo Sapiens
  misc_feature (815)..(815): n is a, c, g, or t
tacataattgtgctcagagtgtatctcttgctttgtagtttcctaaatgtaacaatatgttgtaaacactatcagtgctgttgcagattgctcaaagctattatgttatgtatttttaattgaggtataatttcaccagaaatggtgagtagagctatgagttttgacaaatgcatacaattgtgtaattgtcagcaaatcaagatctggaatatttctatcaccccacaaaaactcctttggctgcttccttttcccgtcagcacttgttaaccatcaatctgttttctgtttttacattttggcctgtttcaagcatatcaaataaatggaaccattgagtttggttcttttactttgtataatgcatttgagcttcatccaagttgtgtttctttttattgctgagtggagttgtgtggacatatcacactttgtttattcattctcctcttgaagggcacttggattgttcccaagttttggtaattatgaataaaaccagtataagcattggcatacaggtttttatgtgaatgtaaattttaatttcccttggataaatgcctaagaatgagattgctgagttatttgataaatatatggttaactgtctaagcaaaggccaaattggcttccaaggaagctgtaccattttgccatttcaccagcaatacatgagagctccagtcctctgcggcattgtcagcacttaataatgactgtagctttaattttaagcaatttaataagtatttagaagcacctaataagggtttaaaaaattggagattgaaggccgccatgtttcccgnataagggggtttgtgaatccataaaaaattctccacaccaacttttttttagtaaaaagggcacttttttgttgaggcgcgcccccccacacaaaaaaaatagtttttgaataaaactcgacagttcccgccttcataaaagtagcaatcctttgggggccgaattttggacttggaaggggccc

SEQ ID NO: 201554 - DNA, 1000 bp, Homo Sapiens
gaaaagagtgttatgcatttaattctccccactgcataaaaactttaatgatatggatatttgtgtatttgtgtgttaagaagaattaaatatgtatgtatatatagtcattcaagtagtgctttcattactaagaacatatgtaaatgtattagtcaatggtgaaaattattaaaaagtcagaatcctgggatttataagactgttcataaaaatctggactgttttctattatcattattttaattgtatattttacaaagaaagaaatagttctcaaaggaagtgaaagtgaaataccttagggctaatctggatggaatcataatttgtgttacaagcgccagaaaaaggataaacggcatacacagtgtatagcttttcaaaggaggaaaaagaaaaagaaaacatcaacttacaaagtactctcccagaaacacttaagattgttgaaaattaagcacaatagattgcagaggatttgatttctgtgttaatttttactacattgattttttttcctcatgagctacttcacctcaaactttactgtttgagagcaattttttgtagtctgatttcatgactgattttgtcctgccacagtatttggttgacattttctacaggccatatcgagaacagttctatcagataaaaacaatggcactcggctcatttttctgaggatattgttcaagcagtagagagtcacagcagattcaggctcgctgattccattagtctcagtaccagcccctgtgattctggaatctatccatccctcctagcctaccagttgttgccagccaagtcttcgtaaagcacagatctgaccaggtcaccccatcctctctgaaactctcaatggcttcctatgacacaaataagattcaaattctttagagtttgatgccctctatttttaaaacacccatccctgatccagttagactgagttgctctccattccctaactttgccttgaattttctgtctt

SEQ ID NO: 201555 - DNA, 1000 bp, Homo Sapiens
gggcagctttggctttgaaattaacctacaagagaaccaaaatgccctcaaattccttgcttctctcctggagcttccagaattccttctcttcttgcaacatgctatctctgtgccagaagatgtggcaagagatttaggtgatgtgatggaaacggtactcagctcccagacctgtgagcagacacctgaaaggctatttgtcccatcatgcacgacagaaggaagctatgaggatgtccaatgcttttccggagagtgctggtgtgtgaattcctggggcaaagagcttccaggctcaagagtcagaggtggacagccaaggtgccccacagactgtgaaaagcaaagggctcgcatgcaaagcctcatgggcagccagcctgctggctccaccttgtttgtccctgcttgtactagtgagggacatttcctgcctgtccagtgcttcaactcagagtgctactgtgttgatgctgagggtcaggccattcctggaactcgaagtgcaatagggaagcccaagaaatgtaagtctgttgggtattcaatctgtaggttccctgagtctctctttaggccctgacccaatgcagtacagtaatagaaatccactcctggccaatgcttacacttcagttaaggacaaaattgactgcttatattaaaaattatccaggaatgcctagataatgttaatcagacctaggagtaaatggggagatttgtctggccttaaagaactgccacatttctgcagtgctgatcaccaactgatgtcaatggtgctgatttagtcatggggcaatgcctatctagatattatttacaaatttaagcttcatggtatttctatggctatataaggttttagacggagtttggacagttaagtggttttatcttggtctttccagtttgttaaatttcttaaactgaaacacctgctcattgttcctccccaggccccacgccctgtcaattacagtctgagcaagct

SEQ ID NO: 201556 - DNA, 1000 bp, Homo Sapiens
ctatggccacgatttactgacatcagctctgcaattgagaggtcctgtctccagggggaggctcgctgggcttgctcctgacgaggggacccccattgagggtcagttcccagaggagagtggggtgggtctggaaacccccgaggggcaaggtggaggagctctcctgtcgtagcggctggtcagggccagttctgctccctggctccactgagctcgcctgagcctgtgaggttgccaggggttccctgtggcacggcaggcacttctggatgcagaggtggaggttgaggccgtgactccaggggcatgtttggtggtgcttggggctgttcctgtgaacagagcagagtgggaggcaggcatcatagttgctgcagaacagtccatactgtggggctggggggtttcctgccacacctgccatctgcccggaccccatagggaaggccacacaggcaaattcctgagaagggtcagccagctcacaaaggtggccattctagagaaatctcagaggagaggaagtgctttgtcaggaactaggcctcaggtctttccctggaggccacttcttcctacattgatttaggatggggggggtggggggtggaggggagcaggttgacctcccatccagcgctgtatctgagtgtagttcattttatatccatagcccaagccaacttgtatcttggtgatatggtttggctgcgtcacgacacaaatctcaccttgaattgtaataatccccacgtgtcgtgggaaggacccagtgggaggtaattgaatcatgggggcgggtcttcccatgctgttctcgtgatagtaagtctcatgagatctgatggttttataaaggggagtttccctgcacatgcccttttgcctgtgtcatgtaagatgtggctttgctcttcctttgccttctgccatgactgtgaagcctcccccgccatgtgaaactgtgagtccattaaacctctttcctttataaatt

SEQ ID NO: 201557 - DNA, 1000 bp, Homo Sapiens
aacctgacatgcaacaacagcaagaacaagacgctggtgacacagaacagcggtgtggaggctctcatccatgccatcctgcgtgctggtgacaaggacgacatcacggagcctgccgtctgcgctctgcgccacctcactagccgccaccctgaggccgagatggcccagaactctgtgcgtctcaactatggcatcccagccatcgtgaagctgctcaaccagcccaaccagtggccactggtcaaggtactgctgttaggcgaggggaggagctccctgcagcaggcttaggtgctgtattggtataggcaaagccgctgtagcaaagaagccctaaatacagtggctcgaataagacagaagtttatttctctctcgtgtaatagtttagacctcaacaatggctctgctctaaaattccagaattgggatttctatcttgtagctctaccagcccctagggcagagctcagagttcaaaatgcacatgagtaccctgggtggtttcattaaattgcaggttccagggccaggcacggtggctcatgcctgtaatcccaacactttgggaggcaaaggtaggaggattgcttgaggccaggaatttgagaccagtctggacaacatagcaagacctgtctcgacaacaataacaacaacagaaattagccaggtgtggtggtgcacgcctgtggtcccagctactggggaggggaggctcaggttggaggatcgcttgagcacaggagttggaggttacagtgagctatgattgcatcagtgcactccagcctgggtgacagagcaagaacccgtgtcttaaaagaaaagaaaaacaggaggctgggtgcagtggctcacatctgtagttccagcactttgggaggtgcaggcagaggcggaagcggaaggatcacttgaggccaggagtttgagaccatcatgggtaacatagtgagacacccatctcttacaaaaaatttggaaaaaaaaaaaa

SEQ ID NO: 201558 - DNA, 1000 bp, Homo Sapiens
cgtagtcccagttactcgggacactgaggtgggaggatcccttgagcgggaggtcgaggctgcagtgagctgtgatcacgccgctgcactccagcctgagcaacacagcgagaccgcgtgtccaaaagaaatttagaaaaaaatgtcctctgccttttgccacacgccttaagatgattgctctgccagcctggccagcagaagtggctttgtaggcactcagacagcgtacacacgtatgcttaactctgggacttatcttgagagtattttcaaaagtaaaacggcaagtttacatttatccatggaagtgatcgaatatagcagccctgtggagcgcacgttcccaatcacggttgtctgttttcagtgtgaaatatgagttggcgaggaagatcgacctattatcggcctagaccaagacgctacgtagagcctcctgaaatgattgggcctatgcgggtgagtgcttaaacgttaattcgatgttttctattagtagaaattaatttttgtgatagcgttgttgcattagtgtggaaatgctgataaaggtctttcctgctcataaaaaatgaggatggcatctcatgaaggaaacattgattctggaggattttttttttcctctcgtgttcttcagcttttgcccatgacttctttctccggctttgtttgttaatgacagattgtacacatgtattccaacacagagtataatagcccccaaagtcctcgtgcgtcacttttctcacagtaacctccctgtgggtggagtaaccttattgggcatagagcatagagttggagaaatgtctttaggcttagttatgaccagaaatagctatgtattctgtgtatatatgtaaaattttgtatcaataacgaaacttattttctatttgcacacccacacgtattccccagcccgagcagttcagtgatgaagtggaaccagcaacacctgaagaaggggaaccagcaactcaatgtcaggatc

SEQ ID NO: 201559 - DNA, 1000 bp, Homo Sapiens
tttctggaggttgccgtgtgccgtgctttaaagggctatgagtaccagatgggaaggcccatgcacatgtgtgtatgcacaggagtgtgagggggtgtgcattgtgtgagcaggtgtgtatgcatgtatgcacatgtgtgtatgcacacgtgattgtgagggcgtatgtgtgtgcaggcgtgtgtgtgccttgagtgcacatgtgcagacgtgtgtgtccctgtgtgcatgtgacggcaggtgcacgtacttgtgggtgtgtgtgcacatgtgcatgcctgcatgtgtgtatgtgtgtgacatgtgcacgtgtgtgtgtgcatatggcatgtgcacgtgtgtgtgtgcgtgcatgtgtgttgtgcatgggtgcatgtgcatatttaatcacataatgatagactgggccctgtgcagatattacaaaggaaaagcaagcccatgttcactggggctaataattaccctacaacacttttagcctaattgcaacataaaagcatttccattaacgttgaattataactaaaagtatgccacagaagtcagagcttgcatagttgccttttagtgactgcacacctccacttcagacacttgttttgtattcaaaggttcagtgcttgaaatccagaacaaagagataagaactgaggccgtgttctcctgagtgaagtgtgtttatttgattaggaagtcgacggcattgatggattaataatttagttacacttttaaggtcgatgccttaattaatggttagactgagaattgaagaattcattttaattatttataggataattacattagtcactttagaagtttatggtaaatcttgcctcaaataatttttattggtattcaaggtagcaactcatacttgatataaagtgtgaaagaccttgtcagtagatctttggatatattttcaaaccagaatatttcacgactgtctaggcttcaagaaagggaacaaattcatcaaaagtaaggaatt

SEQ ID NO: 201560 - DNA, 491 bp, Homo Sapiens
ttcatggggaagcagatttgggtaccacccaagtattgactcacccatcaacaaccgctatgtatttcgtacattactgccagccaccatgaatattgtacggtaccataaatacttgaccacctgtagtacataaaaacccaatccacatcaaaaccccctccccatgcttacaagcaagtacagcaatcaacccccaactatcacacatcaactgcaactccaaagccacccctcacccactaggataccaacaaacctacccacccttaacagtacatagcacataaagccatttaccgtacatagcacattacagtcaaatcccttctcgtccccatggatgacccccctcagataggggcccttgaccaccatcctccgtgaaatcaatatcccgcacaagagtgctactctcctcgctccgggcccataacacttgggggtagctaaagtgaactgtatccgacatctggttcctacttcagggc

SEQ ID NO: 201561 - DNA, 1000 bp, Homo Sapiens
gtatttatagacccatggtcaggccaaagaagctgttgaggagttaatagtatgaagtgtctcccttagtaatgtcatattttgatgattttcaacccaataccattctggcattaggtggcaatttattatatttatttaggatttctgccctgactacatccaggaggaacatagaacaacacagaaattaaaacatagagcaattagaaataaatgcaggacagggaccatccagtggaaatgaaatcgatattactaggcatgtgagatactagacactgaagttttctctttcttttcttctgtgtccctccttcccaaagacaagcacgataagttacatcgttgacatcttctggccaaaaaacgtgttcagatgcaaaagaaaaccctggctctgtctatgctaaatcttctggcccttccactgccctccctttggtctggccttacctgtggccacctgtgactcagcactgaatattcccaggttgaaatcatgatctttcctgtttagctttgagaatggtgagagacaggtaggcaagagagttcctgccatccaaattctcaactctgtcaagctattcttttccttgggtcctgtaccccagtaatacacaataataacagagtttccttatcttacattcctctgtattgaataattgtaccaccatggacccagatgtcaaagcccaaattctaagagacaccatgcatttcttgctcccccttacctgcagtccacccctgctggcctagatcatttcagttggtaacattcctagcaactacctgcttatctttcagccatgagcttttcctgaagcctccccgatcctctggtaaaattggcttctggctctattgtatggtccttgagggcattgactgcacttgttcaatatttttgttctcacatctgctgtgtgccaggcaggcactgtgttgggtggatgctggggttaaagcagtgaatacaaaagtcatgatc

SEQ ID NO: 201562 - DNA, 1000 bp, Homo Sapiens
gttgaagccatggccggttggctcaggtggctgtggtgaggtggccccagacacagcctggcctgcccaggagctctgaaatgcaggttcttgggcccttcccgacagagcctgttggcctttggcccacccattgctcttggccaccgtgtcatcccaataagggggcccacctccagggtgggtggggggtgtgaggacagagcagttaggctgtgcctggctcatggagcccacggcatgatgccgtggttggagggatgctggtccctgtggtgctgtctggtgacaccacgccctgtgcctgccaggccggctgcgtgcacttttcctacaaagcatcgtgtgagatccgcgtgcttatgctcctgtactcttcagagaagaaaatcttcattggcctcatcccccatgaccagggcaactttgtcaacggcatccggcgtgtcattgccaaccagcagcaggtcctgcagcggaacctggagcaggagcaacagcaacgaggggtgaggtggccggcctccagggctgctcagtctccctccacccccgctgcctgctcaccactggcctctgatttctcgccgtagatgggggggtagtggttaccccgggctgggcccctccaggagtcacagatgaggcccccgcagagactggtgagtggtgaccctgtcatgtacaggagggaccctggggcatgtggggggggtggggttgggaaagaagcagggcgaccttggccttggggagagcagagcagagggagaggcagcagtcccagcggtcctaggctgtcgggaaactgcagcccagcctcagggccatgggaggtggtatccaggcctgggtggggccaggcctctgctcacagggatgtggggtcagtgcttgggagcctgtggccagcagcccccactgcacccctgcccccaggacacgcttctgagcaggggcccctggggacttcaactgcccagcaacatggaggatggtg

SEQ ID NO: 201563 - DNA, 1000 bp, Homo Sapiens
gaagttttaatcttgctcctgatgtttatgcttgtttctttttcctctgtaaccataaacactcagggtggtctcttggtgatttagcatgacaagacctagttgttctgctgggcctgggtatgaaatctgtccatgttcagagtttctaatatttttcattctattttcattttcattgcagggaaggacattgataatgctttctagccatgtgtgaagttttgctgcaaagaggtaaaaaggacttacaattacagtatatttcaataatatattttctgaggcataaacttttgtgggacagaaatatgtactaaatttatttattttaataaactagcagaattaaaggattgcaggaattaaaacaaataaaacccaagcgatcatgtcctagaatttggcatgtccataaataacttttaaaaagaaggcaaaatatacatattacaatatatctcatagaaaagactttagggatatccaacattctccaaccactggtcatctctgcctgagtgacaggaggactcttattttttgttgtctcattttaaaattattgatttgtataatttttaaatgtacataaagccccacccttaaacccaaggcaggacaaatagctaagggatgatgaatattactcaatgaggaggcagctaacacgtgaatgcttttgtgggacacaagccatgcagcctgtggcactgcagtggtggcacatgtgttggaggtaaggggagcccgtacttatcccaactcttgagttaccaagaaactctgttctaacttggtacaaaccaactttgggggaagtgtggtatggtcaaatagtttcctattctattgtaggggtaatggctaagcagaggcccctgtgtttttctaataaaaagcccagggcacaataatcagattgttgccaacccaaataattagttctaacatttccgacttacctattttgagaaagactggaggaagaatagagatc

SEQ ID NO: 201564 - DNA, 1000 bp, Homo Sapiens
tactggtggcttaaaccaggacagaaatagtgggcatggtcagaagtggtcagatttgggatatgttttaaagttagagccgacagcatttgctgataaattgggagtggaaatgggaaagagctgaatcaaggatgatgccaaggtttttggcctgagtaactaggaaaatggtaaggtctttaaaaaaaatgagtatattagagattatcagcagcagcagcagcatcttgacattcaaccctatttaatgactatttggaacagtatggaggagataagagttccaaggtcattaccaggcttagtagaaaagtgggagttgactgattagctctttctgccatgagcacaggagcagagctaggtgttttatgtcctgaatagttatcaacctgggcctatagcagtgtttctcaaagtgtggcccagcagtgtcagcatcacctggcaacttgtcagaaacgcacattctcaggccccaccccagacctgccgaatcagaaactctgggagggaaatgcgctgagaactctgttttaacaagccttccaggtgattctgatgcatgctcaagtgtgagaaccactagcctaaggtgtttctatgctgatgggcacctgtagaatgctgcaatgtttcccagggatgggtcattacaatgtgtgttcctagaaggtctgtgtgacaagagatctctgcttggaaagggaagggaaaggaaagaaagtgggggaaaacctaggaatctagaaaagatattgtttcgggcattagagtcctgaaaaataggcccatgagccaagtgaagaatcagctagaatagaatcagaatcctttacttgataaacatgacttgcttaatatttgtgtaaggggtagggtgggggagtggggagttgtatccgttttcccttgtttgttcctagaattttagagagatttctttttgaaaattcatgactttcacagcagcctgcatggttaaaaggaagggatc

SEQ ID NO: 201565 - DNA, 1000 bp, Homo Sapiens
cgaagatgattagagaccattgtagtccacactgcaaacgatgacacccatgaattggggagtttttggtcgtaggcgtggtcgggcttgattatattatttttcatcccgttcctcgtctcgccaatgaatatattaaatttacgtgcatattctttttggtcttcgtttttttacggcgaggacctttaacgggaatatcctcagcacgttatctgacttcttcacgcgaaagctttgaggttacagtctcaggggggagtacgttcgcaagagtgaaacttaaagaaattgacggaatggcaccacaagacgtggagcgtgcggtttaatttgactcaacacggggaactttaccagatccggacagggtgaggattgacagattgagtgttctttctcgatcccctgaatggtggtgcatggccgcttttggtcggtggagtgatttgtttggttgattccgtcaacggacgagatccaagctgcccagtaggattcagaattgcccataggatagcaatcccttccgcgggttttacccaagggggggcggtattcgcttgtatccttctctgcgggattccttgttttgcgcaaggtgagattttgggcaacagcaggtctgtgatgctcctcaatgttctgggcgacacgcgcactacaatgtcagtgagaacaagaaaaacgactcttgtcggacctacttgatcaaaagagtgggaaaaccccggaatcacgtagacccacttgggaccgagtattgcaattattggtcgcgcaacgaggaatgtctcgtaggcgcagctcatcaaactgtgccgattacgtccctgccatttgtacacaccgcccgtcgttgtttccgatgatggtgcaatacaggtgatcggacagtcgagtgcttcacttgaccgaaagttcaccgatatttcttcaatagaggaagcaaaagtcgtaacaaggtagctgtaggtgaacctgcagaaggatcaagctt

SEQ ID NO: 201566 - DNA, 1000 bp, Homo Sapiens
tcattctcataatgttaaggatacaatctatattaattactctaggggttagaggattgtctaattggtttaaacagctacgttgactttaaaataaactgccattcccctgataaggttaagcccattggattcattctttttctttattttagagctgtatgttaagaaaacagtctttccaatcataaaacagaaaatactctttagaggaaaatccacaatgcatgtaactaattattttttaatccttttttaaaaaaattgtgagccataacatacagaaaattacaaattgcaaatatgcagtatgacgcatttttaaatgagtatctatggaaacatcacccatgtgaatatagccagtatcccaacagccccttctcccaagcacatgctcctctgagtaacttagaggtaatcattgttctgatttttctttagttttactatctatttatatattcctaaaacatttaagtttcaagtttttttctgtttttgaactttatcaatctgtatgtattttttatcttgtttctttcacctctctgtaacattcttccaacattcttccaagttactgcatttttcaagttactgcattcttccaaattagtagtagaacattcttccaagttactgcatttatctctagttcattcattcttgttactctataactctatgaccctgtgtagggccaggcacggtggcttacacctgtaatcccagcactttgggaggctgacgtgggtggatcacgaggtcagaagttcaagatgagcctagccaaaatggtgaaacccagtctctactaaaaatacaaaaattagccaggcgtggtggcgggtgcctgtaaggccagccactcaggagactgaagcagagaattacttgaacccagaaggtggaggttgcagtgagctgaaatcacaccactgcactctagcctgagcgacagagcaagactccatctcaaaaaaaaaaaaaaaaaaaa

SEQ ID NO: 201567 - DNA, 1000 bp, Homo Sapiens
tgataagttagaaaataatgatagactgtggtagaatgtcatgtatttcaagtatttcatctgtgttactctgcaatatattttctgtgtgtatttgtcaatgttatatatttataaggtaaatccataaagcatacattctagaatctcctaacttaggtccttaagagatatgctccttataaccttcttggcactcttgaagtgttaaatatttccattgaagaaggttgcatatggtttctgagatgaagtctagacaggttacgattattttttgttccttttgcccacacagcacccactgtcccctccctttgttattagcctttatctgataccctagatgaagccaccttctgtccttcagttttggcgggggggctgatttcacccccagtttcaggagtaagcacaggacagctactaacaagtatgttgttcactcaaggaagaaacccagctaagggagaaaggggggctgaaatccggcctgcatgctcttctccaagccacatgccccgatacagggctgcatctaactgcagaaagggtagccattttctaatacttgcaaaggcactgtgtggacagtgcaaactctgtatgagctcatgacacaggcctggccaataaatatacttctaatcctggcacagatcagactagagacggacgtgaaatccaagcgtcacacccaaagtcaatctctagtctcttattgagactattagaagtgtttctgtgtttgctttattctggggctgtggaactaaggaagtgtaaactggaggagtgatgatggccacattgcagaacaaagggaaaacttgtctgagaataaagtcaatggggaagaaaaaagcaagaaagctgagaagagctaagtcctgagtccctacgttcagccattctgaagctacaccctggatttttccattatacgagtccacaaattaatatttttttttttggcttagaccagtttgagtttgaattc

SEQ ID NO: 201568 - DNA, 632 bp, Homo Sapiens
gccttcagccctctgtggtcccctctccccggggggctttgggattcttgtcaagctccttcaagagcctgcaagcacttaaccgtgagtagctagcccagtgatggacaaaagccaggtgataggcagggagcggggaggactgggggtggagaagatagaaacccccacatccattccatccatgtctcttttctgaaggcggatggaccagggagagtggcagcattgacccttgaaacctccatctgcaggaattttctacagaaaagaggtccccgggactgatctggtttttggactcagagttcaggggagggaagttatgtgccaaaaagtaccaggccaggcaggcgcgatggctcacgcctataatcccagcactttgggaggccaaggtgggagggtcacttgaggtcaggagttcaagaccagcctggccaacatggtgaaaccccatatctactaaaaatacaaaaattagctgggtatgatggctcgtgcctgtagtcctagctactcaggaggctgaggcaagagaatcgcttgaacccggaaagcagaagttgcagtgagctgagatctcaccactgcactccagcctggcgacagagcgagattctgtctaaaaa

SEQ ID NO: 201569 - DNA, 1000 bp, Homo Sapiens
agagagagaattccgaattggggaacacacgatacctgtttttcttttccgttgctggcagtactgttgcgccgcagtttggagtcactgtagttaagtgtggatgcatgtgcgtcaccgtccactcctcctactgtattttattggacaggtcagactcgccgggggcccggcgagggtatgtcagtgtcactggatgtcaaacagtaataaattaaaccaacaacaaaacgcacagccttgcctgcaggtggacttgtgcctggctcccaccgtttctgccagcaggagtggcgggggccacctcatgtccaggtccctgtccttctcctggcaccagaacccatggggcccgtttcacagaggaggatactgaggccccggcaggggaagaggacttgtctggtcacgcgtgtggcctttgccactgcaggtctccagcatttgttcagctgagacctacagtgcagggagcaggcagctccatccgttccctgcccgtggcccagcctgggttggggagaccatcacagaaatgggcagatgccacatagagctctcagggccatgatgcaggaagctcagggcataatgggagcccaggtggtcagtgagggaagggacggagccgcctgctccctttcaaatccagaacataatttgagtttttgtttttttgttttgttttgttttgtttttgagacgaagtctctgtcacccaggctggagtgcagtggcatgatctcggctcaccgcaacctcagcctcctgggttccagtgattctgctgcctcagcctcctgagtagctgggattacaggggtgcgccaccatgcccagctaatttttgtatttttagtagagatgggtttcatcatgttagccaggctggtctcaaactcctgacctcaggtgatccacctgcctcggcctcccaaagtgcaaggattacaggcatgagccactgtgcccagcccctaatttgtgtatttttagtaga

SEQ ID NO: 201570 - DNA, 1000 bp, Homo Sapiens
tcttatttgtttgctggaagaaaaaagcgataccttcagcagagacagttctggtaggatgccaggtttaatgtaagagagaaagggatagaaaccctttctctgagataggatcatgcagacttcttcatatgtgagacctaagtgtataacttagccccttttttgcctttcttagctgcatgtcatatgttttagggtgtttgtctagaacacagtagctatggtcccattagcatgtcaccataacatgacatgacctgcagtatcacagaattccatgtgagctgtgtcgaaaaagatcagtcctttctagtggtcagttgcctacagaggcctctgttgcactttttactccacgattgaaacttttttagaatttactgatcccatgtagcatcttggatattagactctgtttaagccaaatagagaatacttacagaaagcatgaagctgtgattttgaaccactgctcatggttgggcctgaagttagaggaatggttatgagcgcacttattcagagcggtagcctcagcaccagcactcttacaggtgcaccatgatacttttaatcagtgggcaatatttgtcaaggtcccactgtgccatagccttgcttaggtgctgtaggtgaggtgaccatatgatttatcaccagagtcactttgagaaggagagggagctgttaataactatactgaatcataaacgcagcgtgtccccggtaaaccaaatggatgattggctcagctatgggctctataggagtgctgttcatatccttggtccccattctaaaggatacttataaccctgctaaagggctaatactcatacactaaaccagtggtccccaacctttttggcaccagcgagcagttttttggaagacagtttttccatggaccagggagggggacatggtttcaggatgaaactgttccacctcagataatcaggccttagttagattctgttaaggagcttgcaaccta

SEQ ID NO: 201571 - DNA, 1000 bp, Homo Sapiens
acctacccaaataaaccaggatataaaccatcttaagatgctcagtcacctctacgaggtcccttttgctcgcaggtgccaggagttgggacttggacatctttaggggaggccattcttctgtccaccacaccaccccatgattccatttccatgtcaccactgtctctaagtgtgtctaacccacggctcaagagtcaaaggtgcatcacagcagtgagaactcacaggttcgggtttgctttcttcctgtggttgatttctaggctttggaactgcgacataactagcgatggctgctgcgatctcacaaagcttctccaagaaaaatcaagcctgttgtgtttggatctggggctgaatcacataggagttaagggaatgaagttcctgtgtgaggctttgaggaaaccactgtgcaacttgagatgtctgtggttgtggggatgttccatccctccgttcagttgtgaagacctctgctctgccctcagctgcaaccagagcctcgtcactctggacctgggtcagaatcccttggggtctagtggagtgaagatgctgtttgaaaccttgacatgttccagtggcaccctccggacactcaggttgaaaatagatgactttaatgatgaactcaataagctgctggaagaaatagaagaaaaaaacccacaactgattattgatactgagaaacatcatccctgggcagaaaggccttcttctcatgacttcatgatctgaatccccccgagtcattcattctccatgaagtcatcgattttccaggtgttggtgaactgcctgtgactcctctcctccccggcccctacccctcagggataatgagttcattgctgggctagatgttttagccatgattctgcctctgttttatacctgcacacatccttatctttgttacatatgaaatatctgtatcacgggtatattgagagaaataaaggtgagagcattcaaaaaaaaaaaaaaaaaa

SEQ ID NO: 201572 - DNA, 1000 bp, Homo Sapiens
gtcatgtgcatgtgtatttttctcccattatggcaagtgaattttacccttatacaaatgatctgttgacttgaaatatcatgggaaaactttgacctagaacattttcaaagaggttactggaaagacaagaaagctaaggacacttggcaaggggttatattacatgctttacataacattcttcttcctcagatttttcaattttaaatttggtttctcaatttcctgtaactaaatttcaagcaccctaactgacatttaaggccttcctttatctggtcccaattgtcctcttcactggtttcatatcccattgattttcatgtattctttcctctggctattctagacaactgactatttcccttagacttcttatttccccaggagtaaaggacatgccctgtggacacagagggactttacctttctatctctgaaggtgcttgattcctttttatagattcacattgatgcatcttctcttatttgacttgtaagggacagctacaagtctaacaagacgaagtgttacttggctaacaccttgtcttcttactttttaaacaaaattaggaccttaatttccttctgggaagacatatcccacacatggaattgttaatcatgatgttccacaccaagcaataaatagctccaggttcaaaactagaaaaattgaatagtgctttctccctaaacttttaattctatgtaagtgactaaaagattgataatggttaggaatgtttattggcagccagatgcgtttctcaagaattagtggctgatatttactgagtgcttgtcaaattgctctaaccataaaattctacttgcaaatgtatcagggctacattttagtatttatttgattgttttctagctgtttcccatcctctcttcttccttatttacattcagctggtcattgttctaccctaagtaagttcataaccactcaagaacaaagattcaaaaaagatcgagaattctc

SEQ ID NO: 201573 - DNA, 1000 bp, Homo Sapiens
cttcctactttccctccctccttcctttcttcccttctacatttatccagctcctattatgccccaggtagttttgggttttggaactacaaaggtgaagccctcaagatgtttccatgtatcgcagggatcaggagagtataagaagtgctgtgatagagaagaatgtgacgggatcatagaggagggttatttccatcttaggggtgagggagcatggaaggagccagaaaagcttccctcaggaaagatcattgagctgcctttaaaagctgagtaggaattccctagctgaagagggagggaaaagccttccagcaggaggagcagcacaggagaagaggtgggacatgaaacacaccatctgtgccccgagaaccaccagcaggtgcagtgtggagaggtgtggggtgggcaggaggccaactaagaagatccttgggtgctgagctaaggaaatccagcttgattctgagagcgataaaaatcctctgaggacccaggcagggagtgaggtgaccaggcactcgttttagaaagatccctaacagtttgagaccagcctgggcaacatagcaagaccctatttctccaaaataataaaatgaaataattagcttggcatagtagcatgtgcctgtggtcccagctactcaggaggctgaggcaggaggattgcttgagcctgggaggtcgaggctgcagcaagctatgattgcaccactgcactccatgggtgacagagggagacctcatctcttaaaaagagaaaaaaagaaagatccccagcagccatgagaaggaaggccacaggagctagcctgcaggtgtggtggccgtgaggagtgactcctggaggattagagcctctactgtccccacctccaccccacacttgtagataagcgtgcacaacagagcctgtgcatgctaactgcttgacacccaagatctcctttagcatttatagtaattcttcaatagcggaagaactgaagct

SEQ ID NO: 201574 - DNA, 1000 bp, Homo Sapiens
gttagagctgacccgtatgatcttattttaccttaattacctctttaaaggttctatctccaaatataatcacattctgaggtactgggggttaaaacttcaccatgtgaattttgaagggacacgattcagcccctaacccaccagaatggcaatgtctgtcttcaggagaaacttacgcacctaggcacctggagctatgtatatgtacaggaacattcataactggggctggacacagtggctcacgtctgtaatcctagcactttgggaagccaaggcaaaagggttgcttgagcccaggagttcgaggccagcctgggcaacatagccagagcctgtatcaacaaaaataaaaaataaaatatttagccaggtacggtggtgtacacctgtagtcccagctactcaggaagatgaagtggaagattcacttgaacctggaaggttgaggctgcagtgagccgtgattgcaccgttgcagtgagccatgattgcaccactgcactctggcttggggaacagagtgagaacctgcttcaagaaaaaaaaatattcataactgcatgtttgttataacaaatgtctgccactgttgaaagtgttaacaaattatagtagatgcatacaatgtgatcctgtctagcagatacaacaaatgaaagacagttatatgcaacaacataaattaatctcaggagtatcacttttggccaaaaataaatcaagtcagaatgatacatgcaatgcaagataaagttcaaaatcaaatgaaactaagcaatataatgtttaaaaatacatatgtgtgttaaacttaaagaaaatcaaaggaatatcaaacataaaaatagaatagtgattagtcctgggagagagaggaaagggatatattttttaaaaataaacttgagtggtaataatgtgagtgatgttattctttttatcttacacatactttataaatattttctatttactattttatttaaaaatgatc

SEQ ID NO: 201575 - DNA, 1000 bp, Homo Sapiens
tactccgaggagtccctaccacccatctcatcactttccagcccagcactcttcatgctcattcatttaaagcattcaacattgtgtaaatgaatcttggaaggccaaagctactgaatttagcgaatttgtggaggcattgccacaaatcagccaggtgaagtttcacacaatcgaagactgcacaactcctagaaggcagcactatgctgcaaacccagacggccactcttctcacccctcgtccgtttgctgttctggataatgaggttcaaaagtcacctaggcaactgccaaaatagctgaaatggagaaagggcttcaggctggtgactagcagaggtccacctgacccccgtaagctgctgaacaagtagggctgccagaaatgtcccactagggaatttggtagagacgaagacatgctcaccggacaagggttcctcccaggatacgcccgagcggaagaagcgggctctgagccacgccctttcaccctcctctaccccgccctgggctggtgaaggtgcgtgccaggatgtggactactgagccctgaagaaataagtccttccactttgaccccatggaggattgcctgtgaggaacttaaacgagtctaccagtgtctagacacgggagcacgtctgtccggcacagcagctccctcaaggaggagaagagtgaggagaaaggaaactcaagtctcaccattctgtcctgggagagaagaggaggatctcatctctcatctgtccaaacaaggcaaggagactttctctcatctttccaagcaaggcaaggagactttttatcattaggaaacaaaaagaatttagaaggaatgaaagcagcccgtaagttgaattcctaaggactgcccattgaaactgacaaaattgcccttgtttgatgagaggaatgagcagagcattgatgtggtgaacaaggatctagtgagactttcccagcatgtttctaccaaagctttatctaagct

SEQ ID NO: 201576 - DNA, 1000 bp, Homo Sapiens
tcgccatcgcgtcgatcctgttcggtaacctgctggcactgacccagagcaacctcaagcgtctgctgggttactcgtccatcgcccacttcggctacctgctgatcgccctgatcgccagcaagggcctggccgtggaagccatcggcgtgtacctggtcacctacgtgatcaccagcctcggcgccttcggcgtgatcaccctgatgtcctcgccgtacaacggccgcgacgccgacgccctgtacgaataccgcggcctgttctggcgccgtccgtacctgaccgccgtgctgaccgtgatgatgctgtccctggccggcatcccgctgaccgccggcttcatcggcaagttctacatcatcgccactggcgtcgaggctcaccaatggtggctggtcggctccctggtgctgggcagtgccatcggcgtgttctactacctgcgcgtcatggtcaccttgtacctgatggaaccgaacctgcgtcgccacgacgccgagttgcactgggaacagaaggcaggcggcgtgatgctgctggccatcgccgtactggcgttcttcctcggtgtgtacccgcagccgttgctgaccctggttcagcaggctggcttgacgggctgatcgtgtagcggtagatcgtagaaaacagaaacggcacctttgggtgccgttttttttttaggccagtgccatggacgttagccttggacactatttattcagttacccgatatagctcatgactcaggcccgccacggtgcaagcgccccttcgaaaagtgaaaaggctccatgcaggaaacggttgaagcgagcggcatcacgccgcagccctgcctgctgaccaccaatcaggcacagatgggccacctgaccaatcacttctgcttgccctggcatatggaccaggcggcggcacgtccgtatcgcgaaatccagtcgtcttgtgtcaacacgctgctgaaactcgcctaccaacggatcgtgcagcgacc

SEQ ID NO: 201577 - DNA, 1000 bp, Homo Sapiens
aagcattcttaatggaaaggaagaggcgaaattgtctctggttactgatgacatgatttttatatgtggaaaaccctacagactccaccacaaaaaaaaaaaaaaaaagaaaaacctatccaagctgattaacaaactcagtaaagttgaaggatacaaaatacccttacaaaaatcaggagcctttctacatactatgaatgaactacccaaaaagaaaaatcaagaaaacaaccccatttataacagcaacaaaaataatatatttggtgtaaattcagccaagtaggtaaaagacctgtatgctgaaaactatagaacactgattaaagacattgaagaaaacacaaataaatggaaagatagctcatgttcataaattgaaagaattaatgtttttcaatctccatactacccaaagtgatctacagatttaatgaaaaccttaccaaaataccaatgacatttttcagagaaatagaaaaaagactatttaaaaaaaattaattagcacagagggtattggtgccagaagagataaacaaatggcattgaatagagagttcagaaatagatataggtttataagacaattgatttgtgactaaagtagcaccaaagactttctggcaaatacaggcttttcaataaatggttgtaggacaatttgctattttcaaaatttatacaaaattaaattgtaaccttacccatagtatacaaaaatgtattacaggtggattgaagatctaaatatgaaaggcagaatgataaagcctgtacaatagaaatgaacttcttcacagagtaagagaatattacttaaacttacacaaagtgataacctataaaggaagcaactgttaaaacagactacattaaaattcagatctctgttcattaaaagatgcaagaaagtgagtaaacaacaaataccgaatggtagacgtttgtcacacatcatacgtatatctgataaagaaacattatccaaagaatt

SEQ ID NO: 201578 - DNA, 1000 bp, Homo Sapiens
  misc_feature (8)..(8): n is a, c, g, or t
  misc_feature (12)..(12): n is a, c, g, or t
  misc_feature (56)..(56): n is a, c, g, or t
  misc_feature (153)..(153): n is a, c, g, or t
  misc_feature (155)..(155): n is a, c, g, or t
  misc_feature (184)..(184): n is a, c, g, or t
  misc_feature (192)..(192): n is a, c, g, or t
  misc_feature (239)..(239): n is a, c, g, or t
  misc_feature (260)..(260): n is a, c, g, or t
  misc_feature (285)..(286): n is a, c, g, or t
  misc_feature (326)..(326): n is a, c, g, or t
  misc_feature (364)..(364): n is a, c, g, or t
  misc_feature (412)..(412): n is a, c, g, or t
  misc_feature (415)..(415): n is a, c, g, or t
  misc_feature (444)..(444): n is a, c, g, or t
  misc_feature (457)..(457): n is a, c, g, or t
  misc_feature (462)..(462): n is a, c, g, or t
  misc_feature (505)..(505): n is a, c, g, or t
  misc_feature (514)..(515): n is a, c, g, or t
  misc_feature (528)..(535): n is a, c, g, or t
  misc_feature (537)..(537): n is a, c, g, or t
  misc_feature (540)..(547): n is a, c, g, or t
  misc_feature (550)..(550): n is a, c, g, or t
  misc_feature (552)..(553): n is a, c, g, or t
  misc_feature (556)..(557): n is a, c, g, or t
  misc_feature (562)..(565): n is a, c, g, or t
  misc_feature (575)..(575): n is a, c, g, or t
  misc_feature (577)..(578): n is a, c, g, or t
  misc_feature (624)..(625): n is a, c, g, or t
  misc_feature (638)..(638): n is a, c, g, or t
  misc_feature (704)..(704): n is a, c, g, or t
  misc_feature (708)..(709): n is a, c, g, or t
  misc_feature (719)..(720): n is a, c, g, or t
  misc_feature (723)..(724): n is a, c, g, or t
  misc_feature (775)..(780): n is a, c, g, or t
  misc_feature (785)..(786): n is a, c, g, or t
  misc_feature (865)..(865): n is a, c, g, or t
  misc_feature (899)..(899): n is a, c, g, or t
  misc_feature (911)..(911): n is a, c, g, or t
ttctctcncttnctctcctttcttcttctctcctcttctctccctcctctttcttntttctccctctctctctcctctccttcccctttctcctcctccttcccccttctttctctcccttttcttctcccctctccttcctttcctcctccntntccctctccttcctctcttcttctccttncttccctntttcccctctctccctctcctcccctctttctccccctcttcctttntccccccccttctgtcccctncgttctcgcttgctctctccttggnngtcgttcttctctgtgccgctcgcgcttcccgtcggtttncgcccttcgttgtctccccgccctttcttctctcctcntcgcttgtctccgcgctgggccccgtcgcgcttgtcctctgctgtggntgngtcgcgcttctcttcctcctctctccttnctctcccctggtnttttngctgctgccctgttccctcccgctctgctgtctgtcctctctngtgtgcgtnnttttccccccccnnnnnnnncnccnnnnnnnntcncnnctnnccccnnnnccccctctcncnngcgcgtcctctctgcctcccgctctctcctgctccccccggagcgnngcgcactcggtantcggcgcagcgcaaggttctaccgccgtcccccttttcacgtccgctcatcctatacccgcagcgntctnngtttcccagnnctnntttccctcctcgcctctgtgttacgacgcgtctgtacgtgatgtggttttnnnnnntgttnnatacgctccacccctgactatacgtcctgcttcgtactcactatctgcgtaactcatttcctcttcctgataatcgtantgtcgtcccggtaccgccgcagcttcgcctttcntgagctgccctnatgcccctgttcacccgacgttttctggtgatcactgctcgtgcttatactacaatatccgagttgtgtttactcttcccagtacgtcc

SEQ ID NO: 201579 - DNA, 1000 bp, Homo Sapiens; identical to SEQ ID NO: 114747

SEQ ID NO: 201580 - DNA, 1000 bp, Homo Sapiens
ggcgttttgcaagaagtgatgagttaaccaggcacttccgaaagcacaccggggccaagccttttaaatgctcccactgtgacaggtacgtgcctgaggacaatgctgggcaaggagcgtggggccttgggaatgtgatgaccagggttgagtacggtgtgcagggcacattcgaaggaaggcatgcagtttcctatgtgtgaacatttcttttcaagcctgggactttttagaaagtttctggtgtgctcattgtccatggttaggaagaactgttccacatacacctgacattggagtcagtttattgatatgtttggagattggcctttcaacagttttcatatttgaagaattagaaatgaagtccgttcagattctccaaagaacctccagccactggtgggggacattcttaattcacattcctatcagttggtatctcctgtccctgaagacactgatgaggcttgggaggagaatcccacctttccctgcagggggttaggctgggcagggcagggaggtgagggcgctggtccaaaacactggcaagggatgggaacctaacttcttctgtgcttctgatttgcccttgcaggtgtttttccaggtctgaccacctggccctgcacatgaagaggcacctctgagggagcagagaggtggatcctgtaggctaaaaggcttccaggctgagagccggccgtggaaggagggatgcgtgttccagccaaagcatgccgttctgcaccctacccaattgcctccagggcctctccttggaaggtcttttgagggctaaaaaggtcctgtaagaagcggcatagcacccgtggtgcatggtatgtgggtgaccctggactcgccactggtacccgcccttccgagcggcgcctaagcctttgccgtgagcatgcacactgagaatgctaatggttgggttgattgtatgtgaggatctattactgaccgtatgatgaggccaactttttttttt

SEQ ID NO: 201581 - DNA, 1000 bp, Homo Sapiens
caccatgattgtgaggcctctccagccatgtggaactttaagtccaataaacctctttcttttgtaaattgcccagtctctgatatgtctttatcagcagcataaaaatggactaataccatcttgtatactgtttggttaataaatgcccttctgggagacaggcctcacaacatccacaaaagctgggctgctttctggggcagaaagagcttaatgaagattaatatctttgtgttgagtgaactctgagatggctccctgtggtccctgactcctggtgttcacacccttgtgtaatgtccccaattgtgtgcaggcaggaccttcgatttggttttaacaaacagagaagagcaaagatgataggatgtcacctctgtaaatataagatgacgacttgtgtcttggtggcagactctctcctttataagctttcataaagcaagttgcttgattggggaggcccacaaggcaagaaacacagggtgccttctgggaaaaaacacctaggaatcaaggccctttgttcaactgcctaaaagcaattgagtcatgtcaacgaccaaaaagtgagcttggaagcagattctccgcagttgggcctttcgataagattcaaccttgcctgacaccttgagtgtggtcttgtgagagaccataaaatggaggaaccagctgagctgtgtccagattcctgacctacagaaactgtgagaaaacgtgtgtgtgtgtgtgtgtgtgtgtgtgtgtgtgtgtgtgtgtgtgagagccagaatcttgctttgtcacccaggctggaatgcagtggcatgatcatagctcactgcatccttgaactcctgggctcaagtgatcctcctgccttagccttctgagtagctaggatggcaggcacacatcaccatgaccagctaatttaacaacttttattttttggtagagatggtatctcactatgttgctgaggctggtctcaaactgctgggctcaagtgatc

SEQ ID NO: 201582 - DNA, 1000 bp, Homo Sapiens
taagcctcttgcgggcatcatctcatctcactgtcatcacaaaccccatgccacagcgtagcttgaccactaaaagtaatgcatctgcaagcatactgccaggttttggatagtttgtaccaacagttaccttatcaaggtaaatcccagactctaaaagagttggtgctgtgtcactacatgcataactttaaataaatttcctgccgggcgcggtggctcacgcctgtaatcccagcagtttgggaggccgaggcaagtggatcacttgaggtcaggagtttgagaccagcctggccaacgtggtgaaaccctgtctctactaaaaatacaaaaattagccaggcgtgtggtggcaggcacctgtaatcccagctacttgggaggatgaggcaggagaatcatttgaatcctgcaggcggaggttgcagtgagccaagatggcgtcattgcactccagcctgggcgacaagagcgagactccgtattaaaaaaaaaaaaaaaaaaaaaattcctctcctgtttgagctttcccttacctgtaaagaggggagaatatgtatttacttcaaagagttcagggaaatgactctcactagtttgagattctaggtataaaaatacattcttatataattttaacaccaatgtgagagattattattcttgctaaaccaattcagttttatttgctgtctaaaatgtgtgaataagtaattgtccattattttctgaagtgttttggaactcaacacatgattgtgaggaggatttgttgctaaacatctttctggttattcaagctcgtgtatactgtgctctgttgagacatgcagagttactttctgtctgggtcacaggtcagttcttgatagttttcggacaattaaccagttttcatttgcccatgaccacctttattctttttcctcaactgcacccatcttttataaggtctttcagtttattgcagagaagatggtggagaaaagccggaatt

SEQ ID NO: 201583 - DNA, 105 bp, Homo Sapiens
aaggtgcgtcgacagtgtgggggagtctcttcttcttttcccctctcttttattagggggtggtgtgggaagaagaagccccttactgttcggccattctgaaaa

SEQ ID NO: 201584 - DNA, 1000 bp, Homo Sapiens
atccatcaccttaagcatttatcctttgtgatgcaaacaacccaattatgctcttagttatttctaaatgtacaataattatttttggctaggtgcagtggctcccgcctgtaatcccagcactttgggaggccgaggcaggcggatcacgaggtcaggagatcgagatcaccctggctaacacggtgaaaccccgtctctactaaaatacaaaaaattagccaggcgtggtggggggtgcctgtagtcccagctactcgggaggctgaggcaggaaaatggtgtgaacctgggaggtggagattgcagtgagccgagactggccactttacttcattctgggcgacagagcgagactgtttcaaaaaattagtattgtttgtcgatcggtaccctgttgtactagcgaattctaaggactattattttttttttatatatcaatgctttcgctttttcttgtaacttccatgatttacttatttgtggttgttgttgtcgcagatcctatttgtcttttcttatttatgatgattttggatcggcgttggtactcttgattgtctatggtgacggggattggattcgataattgttttcccctatctactgttgctaattattttttagaattgatttcattcgctgtcgtgaacggtcgtattctgaatatttttcgtcctctgttgtgttagacatttcgtgttaattgtctcgtgcagtgtgagtatgtgctgtacatttgctcttatcacgctatgtgcacttgactctgttactctctctatgcgttgttctatagtatcgatatgatcttgattttctagcgggtcagtggttggtgagttcatacgtgtatgcttctctatcgatgtctggtcgagtgtgtcgttctctgtttggagactcctttgtgaatgtcatattggcatatgaagatgatgctgtaaggtaagtatattctactacttgctatgtgatatacgacagagtgaacgtg

SEQ ID NO: 201585 - DNA, 1000 bp, Homo Sapiens
acaaattccaaccaatgatgtttatagcttattgatggcagaattttcaggctggccagaggcttgttttgacatttactgacttgtactttcagaaagatcaagaggagccaggcgtagtggctcacgcctgtaatcctagcactttgggaggatgaggtgggtgggtcaccttagatcaggagttccagcccagcctggtcaacatgttgaaaccccatccctactaaaaatacaaaaattaactgggcatggtagcaggtgcgtctaatcccagctacttgggaggccgaggcaagagaatggcttgagcccgagaagcgttggttgcagtaagccgagatcgcgccagtatactccagcctgggtgacggagcaagactccatctcaaaaaaacaaagaccaagggagaatttgttagggccagttggccctgattttcagttaggataatgagtggtgtgagcccaggcaaagtgaccatatccctgagtgtgtaattgatgagtgtccagggcctgccagttcagcttggggatgggggcagaaagttcctgctgctaagcccctctggaaggtcattacgttcaggttagggatcatgatgttattctctatttttcctgtcacctcactcttatcaagacttctgtgtgcggtaacacaggggaacacaggcttagagaagctggatctggaaggggcctgtgtttatccattgggcctgccaaccataggcatcagaattatctggcatactggctcaaaatacagattcttgattccaactcttgacctgctcaactggcttctctgaaccaagttattcctcaagttattcttacgtacactaaaattagatatccactcttttcatccagcttatttattttctataggaagaaaatgaaacccagagaagtaaagtgacttccctaacatcacacagctagtttgcaagaggagatgattccactgtgctgtcaggagtgctgaatt

SEQ ID NO: 201586 - DNA, 1000 bp, Homo Sapiens
agcacagccctcgtgatgggggccgtctgccccacctgctccgtccacggctgcctcttctggtcccccacccgtagatgggcttcccagcctcctggttactgtgcactctcacgttgtggctctgccagtagcagggaggcccctgcttgttgatttcctcgctgcttcctggtgttttgactgctgaatggagcttcatcaggcctgttctggtcacccctgtgtcccccagtgtccagcacatgcctggcagggtaggtgctcagtaatgttgaacaagcgagtcgggcaaatgggactggagcaaaaggcgagcacgtggcagtgtgtggagtgtgtccccgtgcagcgtgttcacgtggagcgtgttcacatgcaccctgggagcctggacagggcacacaccccgcacaggccccagagaactttcctagggcaagagaggcctgctctccgtgagaatgttgacgctgaaattcttcctctctgagcaactccctccctgctgcccacagctgacctcttctgtgaaagggctgggtagttgatgctgttggctttggactgctgttggctgcatggacagttggtagtgaatggatgtagctgtactccagtgaagttttattcacacaaacaggtctccctrtctggcctgtgagctttggtttgttgacccctgccatgaggttctgcagccttccccaccccccgtcccgggaggccctctcaggaatctcagccactgtccgtcacctggctgccaccaccaaccacagggaccattagcaaagcgaagctctggggccacagcttcctgaggcagcccagagccctttctgcgggacgggctgagcctgccctgtggcaaggggtggcgcgcccggctggggggccttgtggtgatccgtgccttccctcacaggctccgccgcttctgccactacatcgtgaccatgaggtacttcgaggtggtcattctcgtggtcatcgcctt

SEQ ID NO: 201587 - DNA, 1000 bp, Homo Sapiens
ccaacccctaaagactgacaatatccttcgagctcctttgaaagcaccctaaacagccatttccattttaatagttggatgcggattgtacccttcaatctgaaagtcttcagctttgaagtcatcaattttctcaacttttcgaagaatcctgagctttgggaaaggtctgggttctcgctgaagctaaaaacaaaataaggccattactttgccataattgtacgacctgttgtaattgctcctcatgtccgtgaaacaagtacacaggatgtgatcaacaaagttctattttacaggagtatgatcctgtcgataccttgccgtaggttatgtaacatgattggagcgcaaccagctgttctcttgcacagatcgagagtgaggggtattttgtgacattacacagcatcaggagcctggtgcctcatcaggtgtaagttcttataaccactcttggcaaatttattaaagacaggaacacagtcaatctgtaactcatagtagctctacgtttacttgaattccacaatccctaacccatctgtccctggcagaaagaaggaaagatgacatgcatggacagtgaacagaaagggatgaaagccaggattcctgggatgaacagacagtggcaattaggatgtgaagacaggtcacaacctattactatgtctaaaaacgaccagagcagagagccagagagaataagcctgaagtcacctccactcaaaagcagccaaactccctcaaaggagtaacttttaaaacctggatctaacctggaaggggctaaaaagtgtctggttctgagtttttttccttaaggctcatgaagcagatgaacttacatttttattgccatttcatatcaattgttggctgctataacttagggatttcaacagacttttgaagtttggacctaaatattgtacttaatgtaaaattaacaaaaaatatttatggccagggtggtggcttatgcctgtaattccag

SEQ ID NO: 201588 - DNA, 1000 bp, Homo Sapiens
agagtcccaaggcagtgcagggcatcacatggtgagggggctgagtgtgccagctcaggtttctcttcctcttcttataaagccatcagtcccactcccatgataactcattcatccattaccccactaatccattaatccatgaatggattaatccatttatgagagcagagacctcatgacccagtcacttggtaaaagtcccacctctcaacactgccacattgaggattaagtttcaatgtgaattctggaggggacaaatattcaaaccatagcacctcccattctttaagacacagtttagcatgcagtaggtgcttaatacatgcttgttaaattacctgaaataacttttccattattgcaatctaagatcctatttatttttgattcatatcaaagctatactatccatgtggataggaaacatatctctggctcatagcacctggctacacaatcaaaatacattaatttaataaatgaacaagagccatgcatgaccaaatatcaactagatcttcttctctgaattactaagcttcatcctttagtgaaaatgatgtgacactaaatgtggggttttaatttatctctcttgaattttatcttatcagtgcactatagctctctgtcaggattgctctgaattttgttcttccagttttgagtgagaaacaaacaggtaagctggacttctgggtctccatccagagcatggatagaaatgtccatcagcacccttgttatcatgttaaaagcccaacctgctgcagggctcccataaggacatttctgtgtaccaaatgctttggagaataccttccccaaagcagtcccatccctccagctctgatcctcctattttaatatgtctaattcctcaacacctgaagacagagatgtttccagtcctacttgcagtaacctaaaattgcaggacttcctgcagggatcccttttcattctccagtggatcattcaattaaaagaagct

SEQ ID NO: 201589 - DNA, 1000 bp, Homo Sapiens
caaaggcgggaaaaagaagtgcgtggcctcctgccccagatttggtggtagggtcagtggtgctgacctcagtgctgtgtgataccagccccccagcctttgcctggttcatgtcccacatcgcctatcggtccccgctccttcagtctgggaccttggcctgctcagtccttctgtggggagccacatccattcacagtgactgttgagtctaatgacagacacccaagtgctgcaaagccagagcagcagcccctgaaagggtgactctggggtctcaccccatccccactcctgccctgtcctctggtgagggcttccctcctgctgcctcagactgtcctgtctaccctcagagaccctgttgggaggcttccctccaacaaggcaccgtccccagaggagaagggagcccagcactcctgggactgtggggtccttggtccactcaccactgccacatgcctcagggagccctcagagcaggggctgagctggggccccagggttcccatgccctgggcgagcatggtgccctcttacagcctgggctgcccgagtgttccaggcatcctgtcattcagcagagatctttcctcggtgccttctctggattgggtgggctgctgagctctggggctgctgcagtgaattatttaatagatgggtgcttccctgctctccagggtccccctctgggagagccagcacaggagctaaccagtcagaggagaaggcggtgtagaccaactggtgcagggagaccatgggggtgctgggcaagacagggacttggcggaacacatgagatgaggtagctgggaggttgtctttaagctgagacctgaagggtgattgatagagagccaggccggctgcagcgtgggaaagcctgcgcacctgtccccaaaccccagcggtccctcccatcccacccaccctctgcaggctcgtggaggagttcatgctcttggccaacatggcagtggcccacaagatc

SEQ ID NO: 201590 - DNA, 1000 bp, Homo Sapiens
aaaattgcacacaaaacacaacactgggaacgcctctttaaagttttctgccttcattagatattccaaacaggaagttttggaatgagggacggaggggaagaagagggtgactaacattaattgaaattcaatcatcattataatctcaagccagaatcttaaaatctaatcaggatatttcatctccatctactccaccctacacagaccttgcatccatcagcaaaccttcatatgtctcaattgtgtccatttatctttatctctaacaaaagcctacaccaggtaccactggcaggtgccatgcacgtgaacgcggagtctgctgttggaaatgtgttgggaagggagagttcccggtaagaattatgtatttaggagctttccaaatactgatggcatgttgagccatcagactggataaaatcacacgaaagaggtgctagtattgggcccttgggtggttcagcgcctggaagtcaaggagaagagaaagagagcaaaggggactgagagggagcaggcagtgaggtctgagggaccgcaggagagcatggggacccaaatgcaagggaagaaagggtgtcagctccatcacgtgttctcctccagacagagacagtactgtatatgcaggtttctccaaacttcttcctttctaggtttcccttaatgctttctctacctataatccaagacttttacccaaaaagacttttaccacggatatcagataaattcaccaccccttaatggcttcctattgccttgagggaaaaaaaactccacagcttcccccaccagctctgcagatctggtccctgcctaactccagcctcaagtcctggcaagcccttcactgaggcatctgaactccagccttctctctgacctagagccttcagccctggggttccccttgcctagcacctcctttctcattctcttcaagaacttggcttctgttctgagagtggtttaaaacccctagttccct

SEQ ID NO: 201591 - DNA, 1000 bp, Homo Sapiens
gcccaagggagctgagagtccactgtcataatcctacattctagaggaagaagaaaaagtttccaatcctaggcctctgtgcatttaattgcatccattggctccatgccatttaattgcatttgttggctccatatataatctccaaagtcattaaattttgtcactttccaatttaaaaaggaagaaatggaaatgttcacaaatccttcttgggcacaactccttgaaccgtttaattaatctacaccccgagattctttgcataaaggctcacaggaggtatacactaatgtcaacccaatttacaattggaaaatctttatacattgaaaaaagcaacttttcctccccctctcaataggtacaagaatgcgggtttataaaaggacacagttgaggcaagagaccggacccaaaagttatgtgctctttagtgcctcaagttttccaagcatctctggtaacataaggagtagaaattattttcaaaaacaaaataatcactggttccagaccagtgattattaaccctttttgaattatgaacccctttaaaacctaatgaaatttaaggaccctctcccccaaaatatacatataaaaaaacaaggcagtctatggacctactgagtaactctcaagatagtaagtaaggagagaaagatctatgtttccctctttgataagtatgaaatatttggaggagatgctaatttttgcacgtttatgatatttgcaatctttcatttttgtagcagattatactcaaaaatttgatccagaacttggcccctattcttttatcagcactttaacttgtaaactgaaaagtttaccatcatctgtatgacatcctaatgaggttaaaaagataaaatgcagttatgattatgataggtataactgtatccaggtttccacagcaaaaacaaaacaaaacatacaccatgttctggggttattgacagcctcctaaaaaaaaaaaaaaaaaaaaaaa

SEQ ID NO: 201592 - DNA, 1000 bp, Homo Sapiens
tctctattcagtaaatggcaaatgcttttccagctatccccgttaaaaaaaatcctagagtcatcaaacccattggcagatcgtgttagttccccatcagtttctatttaaagtctgatcacatgtcacttcctccatcattccttcatggtccacgctatcatcatctcttggcttaattgactacaactgtctcctagttgctccccttgattctgccattacacaaccccagtctattctatacccagcagcccaagtgatccttctaaagtgtcagtcatgtgatgtgcctcctctgctcaaaagtctctaaagtctttctatcttacacaggacaagagccaaagtactaagtacaaattagccgggcgtggtgatgtgcacctgtagtcccagctactcgggaggctgaggcaggagaatctcttgaacccgggagggggaggttgcagtgagctgagacttacaggtcaccatgacttacaaggcgtgataggattggctccctgctacctctttcacctcattttctcctccaactctctctcatccactttactttagccacactggcctcctgcaaattccttgagcaatccaaacactgtcttgcctcagggcctttgcacctcctccctctgcctgaaatcggtttcctccagataaccgcatgaatgttgtcttccttcattcaggacctcactgaaatatctccttatgagaggggccttgtatggtgcctcatgcctggaatcccagtgctttgaaagactgaggcgggaggatcacttgatcccaggagttcaagtctacattgagctatgatcaagccactgtactccagcctgattgacagggcaagaccctgtctcaaaaaagaaaaaaaaacccacacaaaataaacatagaaaagaggagccttggcagaacatcctgtataacatagcaaacttcctcttacctttaccttgctttatttttcttcatagtatagatc

SEQ ID NO: 201593 - DNA, 1000 bp, Homo Sapiens
gattataactgttatgcctacttataaaggttacagaatatttttccataattttcttgtatagcagtgcagctttttcctttgtggtgtaaatagcaaagcaagcaagagttctattactaaacacagcatgactcaaaaaacttagcaattctgaaggaaagtccttggggtcttctacctttctcttcttttttggaggagtagaatgttgagagtcagcagtagcctcatcatcactagatggcatttcttctgagcaaaacaggttttcctcattaaaggcattccaccactgctcccattcatcagttccataggttggaatctaaaatccacaaacaattagaatcagtagtttaacacattatacacttaaaaattttatatttaccttagagctttaaatctctgtaggtagtttgtccaattatgtcacaccacagaagtaaggttccttcacaaagatcaagtccaaaccacattctaaagcaatcgaagcagtagcaatcaacccacacaagtggatctttcctgtataattttctattttcatgcttcatcctcagtaagcacagcaagcatatgcagttagcagacattttctttgcacactcaggccattgtttgcagtacattgcatcaacaccaggatttaaggaagaagcaaatacctcagttgcatcccagaagcctccaaagtcaggttgatgagcatattttactccatcttccattttcttgtacagagtattcattttcttcattttttcttcatctcctcctttatcaggatgaaactccttgcatttttttaaatatgcctttctcatcagaggaatattcccccaggcactcctttcaagacctagaaggtccattagctgcaaagattcctctctgtttaaaactttatccatctttgcaaagctttttgcaaaagcctaggcctccaaaaaagcctcctcactacttctggaatagctcagaggccgaggcg

SEQ ID NO: 201594 - DNA, 1000 bp, Homo Sapiens
  misc_feature (231)..(231): n is a, c, g, or t
  misc_feature (255)..(255): n is a, c, g, or t
  misc_feature (264)..(264): n is a, c, g, or t
  misc_feature (760)..(760): n is a, c, g, or t
gcggtggccgggagagagtcgggagtcccacccgctctccctcgcttcgattctctcttcgccactgccggatctgaggctccaaggtgcccgagcatgaggagctactgggctccgggtgtgtttgtgagcgcactcgtgtgttgagcgtttgtctcccatctccccatttggtttcctgtcatttctaagaagctaaagctgcacccgccaacctcgcagtggggccgnaagttcggattgcatttcaggggncgagaaggnaaatttccgacttcgagtaacacttgggcgaaggtacctagcctagtgcgcatcttactgacccggggagagtctgcactcgctgaggcagcggccgctggactgcaccgattctcctctttggaacacttcctcagcatagcctcctaatagcgaggttaatttttgcgtgtttttaaacggcgggggcgggcggacagttgactccagcagcagaattcacttgtctacttcgcggtgtgcgtgctggaattgagatcctgttctgcatgcttgtgcgtgtgtccgactctccttgcacgcatttggaagtggtagaggcagcagggatttgggaactgcatccatatggataggtttcaagaatgcaaacctttcatttgtctgcaagtgttactggaacctgtccaaaggctgtaaggatatgtcccctcgatccccgccagtgtccgtgtttgcaatgtgaaagggcggccctctttaggacaaaaatgtntttatcaaagcgatgtgtggttaagaacactggttatttcaccatatgctttgcacagacttttcctttctctcttgccctctgagttccaagacagataacctgtcccctccccccattttgacctttgtaggttactatttgaaaaataattttttaactgggtgcagtgattatatagtccagataattttcatattgtgagatcgttatatcgcatgaaccattcatcattatttc

SEQ ID NO: 201595 - DNA, 1000 bp, Homo Sapiens
tgaagctagaacctgatatagtgggtgcccaagagatgtaggtctgcagaaagttcttataaggaagatccagtgaaggaagaaaaagatctttcaagctactgcattgtgactcaagtaggatcctgagccagactcatactgtgttaagacatatactctagttagtccccttttcttcaaaggagagtgatttgtctcttatgtagctggaaaaatatttttctttagaaagacaaactcgccgtccttttcagaattagcctgaaacctgttctgatgaacattgttggctctcaggaagccagggctgagctttgggctggtgcactgcccatctttaatatgccttgtgttttgcataataaaaaaataccccatgcactcttaactgtgtgcacctcatcctctgtttggttatttgacagagatgatggctacagaaatccagagcccctcaggcaggctgttctttgaggtttgggtgggctgcttttggaatggccccccagcaatgtgcctcttctgtaggaggtgccgctgccagagaagtggtcacttagaagcagtcctcactcccaagccattttcttccctgcagtgcatttgcaagataccccaatggagtggtcgtccattacttctgttccaaagaggtaaacccagctgacacttgagcccagcatcctggggatccagcggatggacagcttggctctcccagagaggtgaaggagcacctggccttaggaatcctggctgccaccaccacaaggctccccatttggacattactggctatcttgtgccctggaacaactctgaattaattagactcatggtctggcattgccagctttttaatgggaaaagagattagttataccttataccattatgttgtgggcaattccagagaattcagtacctgcttggtcaggaggatgtgcaccatcttgcctttgcacaccagtcacctgaacaaggaaacttgtcacaa

SEQ ID NO: 201596 - DNA, 1000 bp, Homo Sapiens
tattcgcctacacaattctccgatccgtccctaacaaactaggaggcgtccttgccctattactatccatcctcatcctagcaataatccccatcctccatatatccaaacaacaaagcataatatttcgcccactaagccaatcactttattgactcctagccgcagacctcctcattctaacctgaatcggaggacaaccagtaagctacccttttaccatcattggacaagtagcatccgtactatacttcacaacaatcctaatcctaataccaactatctccctaattgaaaacaaaatactcaaatgggcctgtccttgtagtataaactaatacaccagtcttgtaaaccggagatgaaaacctttttccaaggacaaatcagagaaaaagtctttaactccaccattagcacccaaagctaagattctaatttaaactattctctgttctttcatggggaagcagatttgggtaccacccaagtattgactcacccaccaacaaccgctatgtatttcgtacattactgccagccaccatgaatattgtacggtaccataaatacttgaccacctgtagtacataaaaacccaatccacatcaaaaccccctccccatgcttacaagcaagcacagcaatcaaccttcaactatcacgcatcaactgcaactccaaagccacccctcacccactaggataccaacaaacctacccacccttaacagtacatagtacataatgccatttaccgtacatagcacattacagtcaaatcccttctcgtccccatggatgacccccctcagataggggtcccttgaccaccatcctccgtgaaatcaatatcccgcacaagagtactactctcctcgctccgggcccataacacttgggggtagctaaagtgaactgtatccgacatctggttcctacttcagggtcataaagcctaaatagcccacacgttccccttaaataagacatcacgatg

SEQ ID NO: 201597 - DNA, 1000 bp, Homo Sapiens
tattcgcctacacaattctccgatccgtccctaacaaactaggaggcgtccttgccctattactatccatcctcatcctagcaataatccccatcctccatatatccaaacaacaaagcataatatttcgcccactaagccaatcactttattgactcctagccgcagacctcctcattctaacctgaatcggaggacaaccagtaagctacccttttaccatcattggacaagtagcatccgtactatacttcacaacaatcctaatcctaataccaactatctccctaattgaaaacaaaatactcaaatgggcctgtccttgtagtataaactaatacaccagtcttgtaaaccggagatgaaaacctttttccaaggacaaatcagagaaaaagtctttaactccaccattagcacccaaagctaagattctaatttaaactattctctgttctttcatggggaagcagatttgggtaccacccaagtattgactcacccatcaacaaccgctatgtatttcgtacattactgccagccaccatgaatattgtacggtaccataaatacttgaccacctgtagtacataaaaacccaatccacatcaaaaccccctccccatgcttacaagcaagtacagcaatcaaccctcaactatcacacatcaactgcaactccaaagccacccctcacccactaggataccaacaaacctacccacccttaacagtacatagtacataaagccatttaccgtacatagcacattacagtcaaatcccttctcgtccccatggatgacccccctcagataggggtcccttgaccaccatcctccgtgaaatcaatatcccgcacaagagtgctactctcctcgctccgggcccataacacttgggggtagctaaagtgaactgtatccgacatctggttcctacttcagggccataaagcctaaatagcccacacgttccccttaaataagacatcacgatg

SEQ ID NO: 201598 - DNA, 1000 bp, Homo Sapiens; identical to SEQ ID NO: 114739

SEQ ID NO: 201599 - DNA, 1000 bp, Homo Sapiens
tattcgcctacacaattctccgatccgtccctaacaaactaggaggcgtccttgccctattactatccatcctcatcctagcaataatccccatcctccatatatccaaacaacaaagcataatatttcgcccactaagccaatcactttattgactcctagccgcagacctcctcattctaacctgaatcggaggacaaccagtaagctacccttttaccatcattggacaagtagcatccgtactatacttcacaacaatcctaatcctaataccaactatctccctaattgaaaacaaaatactcaaatgggcctgtccttgtagtataaactaatacaccagtcttgtaaaccggagatgaaaacctttttccaaggacaaatcagagaaaaagtctttaactccaccattagcacccaaagctaagattctaatttaaactattctctgttctttcatggggaagcagatttgggtaccacccaagtattgactcacccatcaacaaccgctatgtatttcgtacattactgccagccaccatgaatattgtacggtaccataaatacttgactacctgtagtacataaaaacccaacccacatcaaaaccctacccccatgcttacaagcaagtacagcaatcaaccttcaactgtcacacatcaattgcaactccaaagccacccctcacccactaggataccaacaaacctacccacccttaacagtacatagcacataaagtcatttaccgtacatagcacattacagtcaaatcccttctcgtccccatggatgacccccctcagataggagtcccttgaccaccatcctccgtgaaatcaatatcccgcacaagagtgctactctcctcgctccgggcccataacacttgggggtagctaaagtgaactgtatccgacatctggttcctacttcagggccataaagcctaaatagcccacacgttccccttaaataagacatcacgatg

SEQ ID NO: 201600 - DNA, 1000 bp, Homo Sapiens
tattcgcctacacaattctccgatccgtccctaacaaactaggaggcgtccttgccctattactatccatcctcatcctagcaataatccccatcctccatatatccaaacaacaaagcataatatttcgcccactaagccaatcactttattgactcctagccgcagacctcctcattctaacctgaatcggaggacaaccagtaagctacccttttaccatcattggacaagtagcatccgtactatacttcacaacaatcctaatcctaataccaactatctccctaattgaaaacaaaatactcaaatgggcctgtccttgtagtataaactaatacaccagtcttgtaaaccggagatgaaaacctttttccaaggacaaatcagagaaaaagtctttaactccaccattagcacccaaagctaagattctaatttaaactattctctgttctttcatggggaagcagatttgggtaccacccaagtattgactcacccatcaacaaccgctatgtatttcgtacattactgccagccaccatgaatattgtacggtaccataaatacttgaccacctgtagtacataaaaccccaacccacatcaaaaccctccccccatgcttacaagcaagcacagtaatcaaccttcaactgtcacacatcaactgcaactccaaagccacccctcacccactaggatatcaacaaacctacgcacccttaacagtacatagcacataaagccatttaccgtacatagcacattacagtcaaatcccttctcgtccccatggatgacccccctcagataggggtcccttgaccaccatcctccgtgaaatcaatatcccgcacaagagtgctactctcctcgctccgggcccataacacttgggggtagctaaagtgaactgtatccgacatctggttcctacttcagggccataaagcctaaatagcccacacgttccccttaaataagacatcacgatg

SEQ ID NO: 201601 - DNA, 1000 bp, Homo Sapiens
attcgcctacacaattctccgatccgtccctaacaaactaggaggcgtccttgccctattactatccatcctcatcctagcaataatccccatcctccatatatccaaacaacaaagcataatatttcgcccactaagccaatcactttattgactcctagccgcagacctcctcattctaacctgaatcggaggacaaccagtaagctacccttttaccatcattggacaagtagcatccgtactatacttcacaacaatcctaatcctaataccaactatctccctaattgaaaacaaaatactcaaatgggcctgtccttgtagtataaactaatacaccagtcttgtaaaccggagatgaaaacctttttccaaggacaaatcagagaaaaagtctttaactccaccattagcacccaaagctaagattctaatttaaactattctctgttctttcatggggaagcagatttgggtgccacccaagtattgactcacccatcaacaaccgctatgtatttcgtacattactgccagccaccatgaatattgtacggtaccataaatacttgaccacctgtagtacataaaaacccaatccacatcaaaacccccccccccatgcttacaagcaagtacagcaatcaaccttcaactatcacacatcaactgcaactccaaagccacccctcacccactaggataccaacaaacctacccaccctcaacagtacatagtacataaagccattcatcgtacatagcacattacagtcaaatcccttctcgtccccatggatgacccccctcagataggggtcccttgaccaccatcctccgtgaaatcaatatcccgcacaagagtactactctcctcgctccgggcccataacacttgggggtagctaaagtgaactgtatccgacatctggttcctacttcagggtcataaagcctaaatagcccacacgttccccttaaataagacatcacgatg

SEQ ID NO: 201602 - DNA, 1000 bp, Homo Sapiens
attcgcctacacaattctccgatccgtccctaacaaactaggaggcgtccttgccctattactatccatcctcatcctagcaataatccccatcctccatatatccaaacaacaaagcataatatttcgcccactaagccaatcactttattgactcctagccgcagacctcctcattctaacctgaatcggaggacaaccagtaagctacccttttaccatcattggacaagtagcatccgtactatacttcacaacaatcctaatcctaataccaactatctccctaattgaaaacaaaatactcaaatgggcctgtccttgtagtataaactaatacaccagtcttgtaaaccggagacgaaaacctttttccaaggacaaatcagagaaaaagtctttaactccaccattagcacccaaagctaagattctaatttaaactattctctgttctttcatggggaagcagatttgggtaccacccaagtattgactcacccatcaacaaccgctatgtatttcgtacattactgccagccaccatgaatattgtacggtaccataaatacttgaccacctgtagtacataaaaacccaacccacatcaaaccccccccccccatgcttacaagcaagtacagcaatcaaccttcaactatcacacatcaactgcaactccaaagccacccctcacccactaggataccaacaaacctacccacccttaacagtacatagtacataaagtcatttaccgtacatagcacattacagtcaaatcccttctcgtccccatggatgacccccctcagataggggtcccttgaccaccatcctccgtgaaatcaatatcccgcacaagagtgctactctcctcgctccgggcccataacacttgggggtagctaaagtgaactgtatccgacatctggttcctacttcagggccataaagcctaaatagcccacacgttccccttaaataagacatcacgatg

SEQ ID NO: 201603 - DNA, 1000 bp, Homo Sapiens
  misc_feature (914)..(914): n is a, c, g, or t
  misc_feature (977)..(977): n is a, c, g, or t
  misc_feature (989)..(989): n is a, c, g, or t
tataatttacagtattagtctattctcactctgctaataaagacataccaggccaggcgcagtggcttacacttgtaatcccagcactttgggaggccaaggtgggcatatcacttgaggtcaggagttcaagaccagcctggccaacatgagaaaaccccatctcttctaaaaataaaaaaatttgccaggtgtggtggtgcatgcttgtaatcccagctactcaggaggctgaggcaggagaattgcttgaacccaggaggtggaggttatattgagccaagatcatgccactgcactaaagcctgggtgacagagcaagactccgtctcaaaaaaaaaaaaaaaaaaaaaaaaaaaaaaaaaaaaaaaaaaaaaggttgtccccaaaactgtttttaaaaaaaaaaaggttaaagggactcacagtccccctgggttggaaaggcctcacattcttaccaaaatgcaagggaggaccccaggccctttttacttggcacaagccaaaaccttgtgtccagggaacctgccttttttaaacccttcaaatgtcttgaggttttttcccttttccaaaaacattttagaaaaaccccccccccataattaaattttttcccttggagcccctccatgacccggggggtttccaaggcctccagttaaaaataaaaatggggtgacaccttacccaacccttttaaacattgcattccatttaaacctgaaaactaaaaactcccctcaaaattatccttttacataaaaatccaaaaatcggcccctaaaagactctcaggtaatttttaaatttaaagcaaaaaggaacctttttttgagctttttaaaaccaaaaatcccccttcccaaattttcggagacccctcccatacggcgcctagaagggaaatnttatactcttaatgcctacctccaaaggtttacaagaattccctttgtaaagttgtcctcccncttaaagaaatnttagaatcaaa

SEQ ID NO: 201604 - DNA, 1000 bp, Homo Sapiens
tagatggagtctcactctgttgcccggcctggagtgcagtggcgcaatctcggctcactgcaagctccgcctcccgggttcatgctattctcctgcctcagcctctgaatagctgggactacaggcgcccgccaccatgcctggctaattttttgtatttttagtagagacagggtttcaccgtgttagccaggatagtcttgagaccctgaccttgcactaccatatcccatgtctggctaatttcttattttttatagagatggggtctccctatattgcccaggctggccttgaactcgtggactcaagcgatcctcccaccccagcctcccaaactgctgagattacaggtgtgagccaccacaccaggacaacctcttgtatcttaaaaatgactggcaaggccgggcgcagtggctcatgctgataatcccagcactttgggaggccataggtgggcggatcacgaggtcaggagatcgagaccagcctggctaacacggtgaaaccccatctctactaaaaatacaaaaaattagctgggcatggtggcatgcgcctatagtcccagctatcgggaggctgagtcaggagaattgcttgaacccgggaagcagaggttgcagtgagccgagaccgtgccactgcactccagcctgggcgacagagggagagtccgactccgtctcaaaacaaataaacaaacaaacaaaaatctgactggcaaaacctaggggtctttctccctctataagctgaatctttattcattcattcattcactcactccgtgaatattcatcaaactcctgcatccagcattgtacacatcattttattgaatcttcaccacagcacgatgttgtggctattttcttccagttttgcagatgagaaaactgaggctcacaggaatagttacttcctggagtttccccagctttggggtttgaacacaggtctgtttgactccaaatctgagtttgctgagggcctc

SEQ ID NO: 201605 - DNA, 1000 bp, Homo Sapiens
tgactgattaaaatggggtctagctctgttgcccaggctggagggcagtagtaggatcatagctcactgcagtctcccaagtagctaggacaacaggcttgtgccactacgcccagctaatttttacttttttgtagagatggagttttgctgtgttgcccatgctggttttgaactcctggcctcaagtgatcctccctccttggcctcccaaagcattgaaattacaggtgtgagtcactgcacccagcctactttcccctatttatatatcccaggacatagcatttcccttttgtagaggaggagcagccaggaaaatgccttaaaaaggaggaaaggtttggattccttagaaaaatgacataggctggatttggttaggttgaagacggggagggctgagcaaacactgacatttttgagcacctgctgtgtgcctgtgccatgctttacaaatgctgtcttatttaaccctgtaactatcctgtgcaagtagggtttaaaatccccatttaccggccggccgggtgtggtggctcatgcctgtaatcccagcacttttgggaggctgaggcgggtggatcaccagaggtcaggagttcgagaccagcctgaccaacatggagaaaccccgtctctactaaatatacaaaattagctgggtgtggtggcacatgcctgtaatcccagctacttgggaggctgaggcggaagaatcatttgaaacggggaggcagaggtcgcattgagccgagatcacaccattgtactccagcctgggcaacaagagcgaaactgcatctcaaaaaataaataaataaaataaaataaaatcgccatttaccaatgaagacactgggcatcagaataggcaattttttcaaagcctcacagcttttcaatggattgagctgggatgttaagccatcatctgtcagattgcagatcccaggctgttttttttttttttttttttttgggaaagggattcccgctc

SEQ ID NO: 201606 - DNA, 1000 bp, Homo Sapiens; identical to SEQ ID NO: 114765

SEQ ID NO: 201607 - DNA, 1000 bp, Homo Sapiens
agtaagttggccgcagtgttatcactcatggttatggcagcactgcataattctcttactgtcatgccatccgtaagatgcttttctgtgactggtgagtactcaaccaagtcattctgagaatagtgtatgcggcgaccgagttgctcttgcccggcgtcaatacgggataataccgcgccacatagcagaactttaaaagtgctcatcattggaaaacgttcttcggggcgaaaactctcaaggatcttaccgctgttgagatccagttcgatgtaacccactcgtgcacccaactgatcttcagcatcttttactttcaccagcgtttctgggtgagcaaaaacaggaaggcaaaatgccgcaaaaaagggaataagggcgacacggaaatgttgaatactcatactcttcctttttcaatattattgaagcatttatcagggttattgtctcatgagcggatacatatttgaatgtatttagaaaaataaacaaataggggttccgcgcacatttccccgaaaagtgccacctaaattgtaagcgttaatattttgttaaaattcgcgttaaatttttgttaaatcagctcattttttaaccaataggccgaaatcggcaaaatcccttataaatcaaaagaatagaccgagatagggttgagtgttgttccagtttggaacaagagtccactattaaagaacgtggactccaacgtcaaagggcgaaaaaccgtctatcagggcgatggcccactacgtgaaccatcaccctaatcaagttttttggggtcgaggtgccgtaaagcactaaatcggaaccctaaagggagcccccgatttagagcttgacggggaaagccggcgaacgtggcgagaaaggaagggaagaaagcgaaaggagcgggcgctagggcgctggcaagtgtagcggtcacgctgcgcgtaaccaccacacccgccgcgcttaatgcgccgctacagggcgcgatggatcc

SEQ ID NO: 201608 - DNA, 585 bp, Homo Sapiens
aacgaacgggactctggctacctggttgatcctgccagtagcatatgcttgtctcaaagattaagccatgcatgtctaagtacgcacggccggtacagtgaaactgcgaatggctcattaaatcagttatggttcctttggtcgctcgctcctctcctacttggataactgtggtaattctagagctaatacatgccgacgggcgctgacccccttcgcgggggggatgcgtgcatttatcagatcaaaaccaacccggtcagcccctctccggccccggccggggggcgggcgccggcggctttggtgactctagataacctcgggccgatcgcacgccccccgtggcggcgacgacccattcgaacgtctgccctatcaactttcgatggtagtcgccgtgcctaccatggtgaccacgggtgacggggaatcagggttcgattccggagagggagcctgagaaacggctaccacatccaaggaaggcagcaggcgcgcaaattacccactcccgacccggggaggtagtgacgaaaaataacaatacaggactctttcgaggccctgtaattggaatgagtc

SEQ ID NO: 201609 - DNA, 634 bp, Homo Sapiens
tctgtggacattgggtattccatatcagttacgccaatcattctcatcaatttcttaagagagaaaacgactattcctgtcacaggctgtatagcacagcttggctctgatgtcatgtttggaaccacagagtgcttcctgctggtcactatgtggctatctgctctcccctgctttactccatccaaatgcccccagtcgtctgcttcctcctactgggagcctcctacctgggtggatgcctgaacgcttcgtcttttacaggctgtttgatgaacctgtccttctgcggtccaaataaaatcaaccactttttctgtgacctcttcccactcttgaagctttcttgtggccatgtttacattgctgaaatatcccctgccatctcctctgcatctgtccttatcagcacgctgtttaccataatcgtgtcctacatctacatccttcactccatcctgaaggtgtgctctactgagggaaggaagaaggctttctccacctgcgcttcccacctcactgcagtcactttgttctatgggaccattttgtttgtttatgtgatgcccaagtcaagctattcagcggatcaggtcaaggtggcatttgtgatctacacggtggtgattcccat

SEQ ID NO: 201610 - DNA, 1000 bp, Homo Sapiens
ttgaggtcaggggttcaagaccagcctggccaacatggtgaaaccccttctctattaaaaatacaaaaattagccgggcatggtggtgggcacctgtaatcccagcaactggggaggctgaggcaggaaaatcacttgaacccgggaggcggagtttgcagtgggccaagatcgtgcccctgcactccagcctgggtgacagagcaagactccacctcaaaaaaaaaaaaaaaaaaggagcagcaaggaggccagtgtggtggagagggtggggaaggaggaaaaggtgggtggaagttgacgtcaggagatggacggaggggcacatggcgcagggccaggtaaggcactgccgagactgtggctttgaggggcagggtgctgtgaaaggcgaataacggccccccagtgacgtctacatcctaatcccctgtgaatgttacgttatatgacaaaagaatgcagccatgattaagttcaggatcgtgctttggggagattatcctggattgccctggcaggctctttatgtaatcacacagatccttataatcgagaaggacacaggaagcgtgagtcagaggggctgtgacaacaaaggaagcaaagccctttgaagacgggagaaggagctgaaagtcaagcagcacttcagagtcagaatgattgagtgtgagagagtccatgggccatcgtgagtgttgaagacggaagggggccttgagctaaggaatgcaagaaacttctagaagctggaggagggccaagctcagtggctcacgcctgcagtcccagcactttgggaggccaaggtgggaggatcgcttgaggccaggagttggagaccagcctgggcaacatagcaagaccccgtctctacaaaaaaaaaaaaaaaaaaaaacagaaccgagggtggtggctcatgcctggaatcccagcactttgggaggccgagacagggggatcacctgaggtcaggagttcaagaatcagcctggcc

SEQ ID NO: 201611 - DNA, 1000 bp, Homo Sapiens
tccgggaaggggttgtaagccggaaacccagaaatttccgtcagccgatcaacatggcttgtctcgcgcttggtcgatgagttcctgcatcgcccgcatgacttcttcgtgggtgtacgacttggcgttggggtcgtcggcctctcggagagcttcctcgacctcgcgggtcatccgcgcatattcttccggccacagcgcttgctccatgcgcagcgacgcctgcccaagcaggtgcagcaggccgaacagccgcatgtcattggtggcgacgacgtgctctcgaatccgctcctggatcacctcgcaggcccgatgcgcctctggcgtcgccgtgccctcgtagccggctgggagttctgcttcttcagcgattcgcgcccaagcgatagccagcgcctcgatggtggacaggttcatttgctcatccacttgcgcagcagacgctttttcagggaggcgcgctcttgcggattgcgtcccttgtggttggcaatgcgatccgccgtggcggcctggcgcttgatgggccagtaggagcggccatccttacccatcgaccagacgttgctgacctggttttccagtagaggcagatgggcgcatagagcttccggcgacgcgctggccagcgcggtgcgctcgtgagttcgccagcgctgatgccagagtttcttgtcctcgcgctcgctacggcaggtcgtgtgcccaacgatgggcgttttgcggcggctgcggctcatgatgtggttgtctccaagaacattcaggacaggctttctgggtagagcgccgtcaaccgggacagggtttcttgcacttgttccagcgaggtcatcagatgatcaacctgatcctgaagatccacggcgagatcaaatagctcagccactcggctgcgtgatccctcgttgaacgcggccattgccagttgatgcagcttcaacaggtcggtgcgcagttgcggaggtgcgccgtctgcgctgtcattcaaatcgcc

SEQ ID NO: 201612 - DNA, 1000 bp, Homo Sapiens
ttactggttgcccggagactggggtacaggttccttaactctgggccagtgctctgcctactgtacaggctgtcatttggactttgagctgctttcggtgggagggtgatatcaaaccccctttctttgactcttggccaactgtccccgcccctgccttcgagcccccatgcttggctcccacactccctggcatatttcaactctcccgggctcccgcaacacctctgctctagccccatctgcgtctctcgcttcgacagggacgtctgggcatgtgagtgtcagtgtggttgccactccaagtgcgtctcacacccaagctgctgccatccaagtcctgtccccaaggagagagaaagtcagagggaaagacagacagacacagaagtagactggagtaggcgagcgacagcacctggaagtgaggcaaggaccaaggagggagggagggaggagagaggcagatagagaagagagagagaaatgtggagaaagtgggagagactgatgggagtggagagaaagactcataaatgggagatagattgagaggaagacccagatggggaaaaataaagacagacatggatgacgatatgttctgtgggctgtggggaaacaggcattcttgtacattgctagtgggagtgcaaactgcaaagggaacttggcaatacctcacaaaaccacatatgcaatttgacccagcaataccacttctaggaatctgtcttgaagatgtatttccaacaacgggaatatatatatgcgctcaaggttattcactgcagcatttctggaattacaaatctaagtgctcattcatgggagactgaataaactatggtttgtctataaaatggagtaccaagcatctctatcaaagaacgagaaagacaatgtaaaactgacatggagtgctcaccaggatatactatttagtgaaaaaataacaagcaagagcccatctgtagtaagctactgtccatgtaagaaa

SEQ ID NO: 201613 - DNA, 1000 bp, Homo Sapiens
gtatagtgcttttagggagaagcagtgtgagaatttctagcatctggtcccagacattgttgggattgttttattcatctttattagttttattctgaatgtgcacctgaagttttctggatcagagatttatttatttatttatttatttatttattaccttacaataaataagcatgtgattctcccttactttagtccttacctctggggtgatatgatgaaagccaggtggaaaaatcttgtatatgagtagctaaatagtttctcagtgagaaaaatgaattctcttcttccatacaggaggaagagacagctgtttcccccttccctccagaaagggggaaaaacctttgccctgcagagatggagtgcaaaggatcctgagtactcactctcaccttctggaatgcacatacatctttacaggggctgcataagccttgcatatctctctggttttttgtaagctatggatttctccaaggtcctgggactcattttctcttaaaatgtaaactacccagagttagctaaatctctctggacttctctcactatctactccactgtaaattaacttcccaagcctggctcttatcccaagatgctgagttttcaggaaatatattcagaaagcccagacagtgcagaaacaaaaatatttcctctacatcccacagcttcatggttgctgattagaagcatgagtgtttttattagataagattttgtgatgtgttggactgtatattttcagactctaactttcttaggatcttagagagtctatgaactacataatattctatgataaattacttttgtagttaaagtagccaaagtagattcttttgtgtttgcaactaagattccaagcagataaagataacatttgaataatattctaaaacatgcaaataaagctacacattatatattggaaaatacatattcagtaaaactatgaaaacgtgtggtaataataaacatcgaattc

SEQ ID NO: 201614 - DNA, 1000 bp, Homo Sapiens
agggatgtgcccgtcgattctagccaatcgcccgggtttgggtgggtgaagacgacaaaggcgccggaaggcgcctttgtcggttgcgaccgtcgctttgccgcggagtgtcagcggatcctgccgtcggccagttgcagttcctccttggcgaagtcgtcgacgtcgatcaccttgcgccgtgccgcttcggcctggtgcagggcctgcgcctgctcggcgctcagcacgccggcggcggcgccggcatcgatcgggttctgccccgcttgcggctggaccctgccttccttgatcgccttgtgcagggttttctccagcgcggcgctttcgcgtaccgcgtcgaaggcgtgggcgagggcaccgaccgggtcctgcgggtctttcggcaggaacgcgccggcgaggatcgcctgcaacgccgggtcgtcgtccggacggccgaggatttccgcgatctcggcgtccagttcgtcgcccggccctttgtgccggcggccgaacggcagtaccaggaccttcagcgcgcagccgaagaagcggctggggaagttgttcagcaggtcctccagcgccgcctcggccttgccgaggttttcctccatggcccagcgcagcagcggatgcaggtagtccgggttgcccaggtcgtggtagcgcttgagcgccgccgagcccaggtagagatagctgaggacatcgccgagacgcgcggagaggcgttccttgcgcttcagttcgccgcccagcagcatcatgctgaagtcggcgagcagggcgaaggacgccgccaggcggttcagcgcgcggaagtagggacggctgatgcggtcgccgggcgcgttgccgaggtggccgcagctgagactgaggaggaagctgctggcggcgttgccgacggcgaagccgatgtgcttcaccagcagcgcgtcgaactcgcgggcggcctggtccttgtcctcgcgctgggccagttccatttccttgagcacgtacggat

SEQ ID NO: 201615 - DNA, 1000 bp, Homo Sapiens
ttctcctcatcacagtatattttgaatacatctgtcttcataaaatacaccatgtccaaaatctaaaagggccaattccaaattattccaccagctttgaagggaattgaagcaagaataacaagagtaagttctgtgtgaaaagacctactttagatacttcaaaggttgtctcattaatccttgcggcaaccctgcaaagccagcgttattatacctgctttatagatgaggagcctggggctcagctgtgtccagtatcttgcgcagcaaagcggtagagttcaattggaactcaagttggtctgtccccatattctgtacttctgtgttctggacagactgaagttagccagtgttcctcttgcgttccagtttcttcattgttccctttctccccaaaataagcatatcatgctgatttccagcctgccagttctttcctcctacctgtaatgtgccatcttcatttccctctgtgtatctttcaaatgccagtttaactggtttttccaagtctccagtgttagcctgaagttttgtagtacttatgtatcatgttatatttagcaatggattaattcatagtaattaaccatttgtattaatgtgtcctcaggagctcaggggtgaactatttgaggacagggatgagtcgaagcataactgacttgagttcacccccttcctccagaaccagaatgtgtagcttagtgccaccctgtagcaggcattcctgctgcttcaggatctgttagactcttacagagcatcctcacaaacttcatggtttttctgtgcactgtaactttgactttctgttgaccacgtctttgcagcagaagaatagaaggaaggtgataggatgtgatgatagaatttgtgatagccaagcaacaacttttcctaattcggcatgttaaaaaataaggtacgctattcttttcttaaacatacacgttatttgactcatgaaatgtattttaattcagccatttga

SEQ ID NO: 201616 - DNA, 1000 bp, Homo Sapiens
acacacacacacacacacacacacaggcgcgcgcgcggcgatgaggggaagtcgtgcctaaaataaatatttttctggccaaagtgaaagcaaatcactatgaagaggtactcctagaaaaaataaatacaaacgggctttttaatcattccagcactgttttaatttaactctgaatttagtcttggaaaagggggcgggtgtgggtgagtgagggcgagcgagcagacgggcgggcgggcgggtgagtggccggcgggcggtggcagcgagcaccagaaaacaacaaaccccaagcggtagagtgttttaaaaatgagacctaaatgtggtggaacggaggtcgccgccaccctcctcttccactgcttagatgctcccttccccttactgtgctcccttcccctaactgtgcctaactgtgcctgttccctcaccccgctgattcgccagcgacgtactttgacttcaagaacgattttgcctgttttcaccgctccctgtcatactttcgtttttgggtgcccgagtctagcccgcgttcgctatgttcgggcgggacgatggggaccgtttgtgccactcgggagaagtggtgggtgggtacgctgctccgtcgtgcgtgcgtgagtgccggaacctgagctcgggagaccctccggagagacagaatgagtgagtgaatgtggcggcgcgtgagcgatctgtattggtttgtatggttgatcgagaccattgtcgggcgacacctagtggtgacaagtttcgggaacgctccaggcctctcaggttggtgacacaggagagggaagtgcctgtggtgaggcgaccagggtgacaggaggccgggcaagcaggcgggagcgtctcggagatggtgtcgtgtttaaggacggtctctaacaaggaggtcgtacagggagatggccaaagcagaccgagttgctgtacgcccttttgggaaaaatgctagggttggtggcaacgttactaggtcgac

SEQ ID NO: 201617 - DNA, 1000 bp, Homo Sapiens
tacttgtaccccctaaatttatttttaaaaaaggaaaaataaaagtatcatgaaaaaacctatttttttttccactgtccttccactactcccataacaaacttatccatggttggtaaaattttacatatttctatccttgaaatgaaggcttcttttaaattccaaagaagtcatggaggcctgtgcatttgaattgtatatgctagtgaggaaaagatttagacatttcaagagcagggttggccaggcgcggtggctcacacctgtaatcccagcactttgggaggccgaggagggcggatcacgaggtcaggagatcgagaccatcctggctaacacagtgaaaccccatctctactaaaaaaaaaaaaaaaaaaaaaatgggctgggcgtggtggtgggcacctgtagtcccagctactcaggaggctgaggcaggagaatggcgtgaacctgggaggcggagcttgcagtgagccgagattgcgccactgcactccagcctgggcgacagaggagactctgtctcaaaaaaaaaaaaaaaaaaaaagagcagggtcataatcacacagcagtgccttatatagttgccataagacttcagtgcagtacaacataattttacagctacatatcagggcatattctatatggtgtatttgtgttagaataacacattaaatgtctttaaacataaaaataagaatgtttgcatgtttcagttttcaagaaccaaatgagtaattagctatagattccactggccttaaacatacaattaagtgtatacatgatatagtgcacacacaaaagccacctttaattattgaaataacctgtattctttttggaaatcatttaagtttggtattgaagtactatattttttgtgcatcaatgtatttttctatttacaagcctatgtaaaagtgaagtgtatcttcagtgaaccatgtgccaattaagctgtaataaaaaagtggtctagtctgtcaaa

SEQ ID NO: 201618 - DNA, 666 bp, Homo Sapiens
aagttgcgtaaatagagccctctaaaggatgcaaaagtcgtaacacggtttccgtaggtgaacctgcggaaggatcattcacacaattcgcacgcctggaacgcgctgctggttttacaggtttcaagcattcgctttgcctgggtggccagcagcaggtagtcgtcggtgttgttggaaagaaaaatttagtccatcgcaacccttgaatctgtttttctctgcaacggtttttctactttttaaaaattgaaggaattttttgctgctgcaaggatatatcgcagtagtatgtacgtgggcgatcgggggggtggtggcgcatgcacgggctcgcgtggggcctgtcggtggcagccccagcgcgccggcgccagccccgtgatcgtcgatcgcgcacgtacgtggaggggattatgagaggagaagacgcgcacggggctgtgtcgtatgcagagcgctcgcggctcgggcgattgttccgtgttgtgtgctctgctgcatgctggtgtgtgcgttctgtctctctctctctccgttacatgctgcttggaactttgcttcagcaagaaacctttgctcactaaggtgaatcgaatcacttttgttgatgagcagaaggaagaataggtagaaagcggaaaaaactttcagcaatggatgtct

SEQ ID NO: 201619 - DNA, 1000 bp, Homo Sapiens
tggtggtgggcacctataatcccagctactcgggaggctgaggcaggaggatttcttgaacccaggaggtggaggctgcagtgagccaagatggtgccattgcactgggcaacaagagcagaagtccgtctcaaaaaaaaaaaaaagattgatttaacatttgaacatcaatcaatataattcatcatattaacagaataaaggagaaagttatatgataatctcaatagatgcagaaaaagggtgtgatgaaactcaacacccattcatgataaaaactctaacaactgggaataaaaggaaactttctcaatctgataagggatatgtttttaaaaagtatagctaacagtgttacataatctgctataatatataaaatattatataatatataataatgttatataataatataaaactatagctagcataataatggtaattgaaaactttacccttaacatcaggtctgaagcaagaatgttcactctgaccatttctattatgctgtggttctagtcagtacaataaggcaagaaaaagaagtaaaaggcttacagattgcaaaggaagaaggaaaattgtctttatttacaaacaacatgattggatgtgtaatctataaaaaatctactgaactaataagtgagtttatcaaggtcacaggacacttggtcagatattatatatttcaatagactagcaaaaaaaaaaaaaaggaaatggaagataaaagaaaatactacttagaataaaaacagggccgggtgcggtggctcatgtctgtaatcccagcattttgggaggccgaggcgagtggatcacgaggtcaagagatcaagaccatcctggccaacaaggtgaaaccccgtctctactgaatatacaaaaaattagccgggtgtggtagcgggcgcctgtagtcccaggtactctggaggctgaggcaggagaatggcatgaacccgggaggcggaggttgcagtgaaccgagatc

SEQ ID NO: 201620 - DNA, 1000 bp, Homo Sapiens
aatcatccgctaccttcacgccaatggcgcctcaatattctttatctgcctcttcctacacatcgggcgaggcctatattacggatcatttctctactcagaaacctgaaacatcggcattatcctcctgcttgcaactatagcaacagccttcataggctatgtcctcccgtgaggccaaatatcattctgaggggccacagtaattacaaacttactatccgccatcccatacattgggacagacctagttcaatgaatctgaggaggctactcagtagacagtcccaccctcacacgattctttacctttcacttcatcttgcccttcattattgcagccctagcaacactccacctcctattcttgcacgaaacgggatcaaacaaccccctaggaatcacctcccattccgataaaatcaccttccacccttactacacaatcaaagacgccctcggcttacttctcttccttctctccttaatgacattaacactattctcaccagacctcctaggcgacccagacaattataccctagccaaccccttaaatacccctccccacatcaagcccgaatgatatttcctattcgcctacacaattctccgatccgtccctaacaaactaggaggcgtccttgccctattactatccatcctcatcctagcaataatccccatcctccatatatccaaacaacaaagcataatatttcgcccactaagccaatcactttattgactcctagccgcagacctcctcattctaacctgaatcggaggacaaccagtaagctacccttttaccatcattggacaagtagcatccgtactatacttcacaacaatcctaatcctaataccaactatctccctaattgaaaacaaaatactcaaatgggcctgtccttgtagtataaactaatacaccagtcttgtaaaccggagatgaaaacctttttccaaggacaaatcagagaaaaagtctttaact

SEQ ID NO: 201621 - DNA, 1000 bp, Homo Sapiens
ttagttacccgaaaacatttccaaatgggtttttaaaaaaaaccagatatatgattttgaatagctgtctacatcaaactcttaacgctagtatagataagtaggtagcagcaaattgtatattcagttgtggttgttttttaattttgttttgatgtaaggtcttgctatgttgcccaggctgtctcagactcctaggctctagtgatcctctgcctcagttttctgagtaattgggactacaggcacacatcaccacagccttataattaacctattagatcctataagtgaatccgtgtaagtagattataacagttactaggaattttgcagattaaatatgttagagaaatgtaattcaaattgaaatgagtcaatataaaaatatgaaagcacagactattacagcaaattacttacatatgaatcatggccagctgtatttcactatgtgaccttggtaagttattaaacctctaagtgccagtttcccacactgaaaatggggaagataaaaatgcctactcttcataggattaattagaatagtacctgcatacactagtattcagtaagtgttaactattataattggaaccaaactgtggacgtctgtttaccaagccagatttttttcaggaaaactggcttgaaggaattccgagtaattcaagtgtcctgaatctaattaaattgcacaaatacacacacctcctcagtctcagtacatcccaggctgtactttccagaaaggtaggtaccattatagttacatctattttaaggcaatacttactatatgcatattcatctctctaacaataattctttacactgtaggcttgagttttgtgggttttttttttttctcattccagagtgaaaggaataaaattcgtgatgtgagatttttacaaaagcagagtggaagaagccaaaagttataaatcctccatcgcagtcctagttaaatatattgctgctaggctctagacag

SEQ ID NO: 201622 - DNA, 1000 bp, Homo Sapiens
gacctcaggtgatctgcccgccttggcctcccaaagtgctgggattacaggcgtgagccaccacacctggccttcagtcccaggtatcttttatagcagcgtgaaaacaagtaatacaccaggaaaactgtttcttatgaatattttgtttcaaactagtcatgtgcactgacttgtcactgattgtatttgtctctttgcttttgctattctctaggtcctagccaaatttgtgggtcactttctaccactgtacacagattgtacactccatatacactttgtacattaactttactcatagctttatgtgtatcttggattatgttcagctctatgatctgtctcagttttttccagtgatacaataatagatgtgtcctgatttagatagagaaagtaggtaggcagagattctggccatggcatcagagattcataatgccaaccacagacttactcttgactccacaaaaaccatttcacaaattcctattgttgcccaaaagaggtgaaaataaaagtatatgactggctgagtgtaacaaaactacatgacaggaattacgactcacatacagcctggagtcacctttctgttacaccctgttcatcagtgatggaaaggcagcttcctatgtgctgaaagttcatctctcttattgcaggtatgatttccactggtattaatgagcttgaaatatgaaggccacttaaatttcccagaggtgtcaagtgatgtggggatttcagagcatgtatcaactcacttcagcaatattagcatttttgtttgaaatacccagttagacaggaaacttgaaagataattgtttcaattatttgtatcatcatactgaaaattgcttaaaacgttctggttgttccttgaagacattaaaagaatagatcctattaatgccccataggttatttgatccttttggaaatgaaaagattgactgatgattgattgaattttctgctttttattaaattg

SEQ ID NO: 201623 - DNA, 1000 bp, Homo Sapiens
aagggcctgaaactgggagttgctttcaagaataggggtccaaactgggtgtggtggtccaggcctgtagtcccagctaccgaagaggctgatgagggagtattgcttgagcccaggaatttgaggccaccctgggcaacatagtgaaatctcatctcaaaaaaaaagaaaaaaagaaaaaagaaaaaaaaaaaaaagaaagaggccgggtgcagtagctcatgcctgtaattctagcactttgggaaactgagacgggtggatcacgaggtcaagagatcgagacaatcctggccaacatggtgaaatcccgtctgtactaaaaatacaaaaattagccaggtgtggtggcacgcacctgtagtctcacctactcgggaggctgaggcgggagaatttcttgaacctgggaggcagaggttgcagtgagctgagatcgtgccactgtactccagcctggtgaaacagcgagactctttctaaaaaaaaaaaaaaaaaaaaaaaaaaaaaaaaaaaaaagccaggcgcggtggctcacacctgtaatcccagcactttgggaggctgaggtgggcggaacacggggtcaggagatcaagaccatcctggccaacatggtgaaaccccatctctactaaaatacaaaaatttagccgggcatggtggcacgcacctgtagtcccagctacttgggaggctgaggcaggggaatcacttgaacctgggaagcggaggttgcagtgagccgagatggcaccactgcactccagcctggtgacagagcaagactccgtctaaaaaacaaaaacaaaaaacagaattggggtccatttgagagatctccactaagggtggggatgaaagtcatgaaaactgccctttgaccaagtgggatgttctaagattgtctggagacagtaagtggccaacgcgctgtgtctaaaccagccttctgggcaccgttttgcccctgcagcaacatgcccactgctcttcctaa

SEQ ID NO: 201624 - DNA, 1000 bp, Homo Sapiens
gctggaaaaaagacaaaagaatgggaaaaagtggattgagtatataagcacaaatgcagtgctaagccattgattttaagtgaatgtagagagagtcaatttgggctgtagtatcctggactaggaaggacatctccctggactaggtagggtagctgctgtttagctccagcagaattttcacatgcggggataaaccagaaatctgcattttttaatgaggaatcttccaattttaaaatgtttgcaaataacacaaaatgcttttaaaacattatacagacaacatgtgagtgggcctcactgagccattgggcttccactttgtggcctttggagtagaccaatggttttccaagtatgggtcctgaccagcagcatcagcatcacttgagaacttgttagaaatgtaaatccatttccaagtgaattagaaaccctgggggtgtcagcaatctcttttaataaaccctttagcgattctgatgcatgctaaagtttgagaaccagtgaaacagagtattttggaacctcgcttggtgcctaaatcatactagtctcaaaatttttgtcgaagagtagttgaaagtgaactgagggatataaatttggatgatggttgataccagattatgaattacattaaatactttttttttttttttttgagatggagtcttgctttgtcacctaggttggagtgcagtggtgcgatgttggctcactgcaatctccgtttcctgggttcaagcgattctcctgcttcagcttcccaagtagctgggactacaggcgcaccaccatgcctggctaattttttgtgtttttagtagagacggggtttcactgtgttagccaggatggtcttgatctcctgacctcgtgatctgcccgcctcggcctcccaaagtgctgggattacaggcttgagccaccgtgcccagcctaaatactatttttaatgagtcagacttaacgtacaatgagaagccattgaatg

SEQ ID NO: 201625 - DNA, 1000 bp, Homo Sapiens
atttaagaaaaatcataaaccatcctcacccaaatttgtattatgccacctgccacatgggtctaaaattccattattatagatatttcccccgatctgggcagtggcttctgaagacccctacgaaaaacacacagttgcctgggagaatgtgcatgtcaacacattggtgaaagtttcctaacctgcaatctagcttcttcttcaataaagaagaatggtctggaactcaggacaagtaaattttgataggactggggttcttaaagggccagagcacaggcctcttcctttcaggaggtacacatagaatgtatggacagcagaaagacaccaaatgggcatgggacctactaagaatgtccactgggccatctgtgatttagggagctgagacaatgagacaattctaactttcagttcaccttgatattgactctacctaggtcttgtaccttccagcacagacttgcatcctcccaagagcaatgatgtacttgggcaagaggtagagaggcgatactagtgtctgagtagtctgagcagcgacatccaggtctcagtgactgagaccaagcagctctgtctctgaccaacacaatcatgacagcagctaaaggtctccactctgggttggggtcaaggaaatgagcaactaagagtgtgctctgcagatcactgggactctagagggtcttttagttggtccaaaagtccacccagaatccgtcgtccaaacacacgtgactggtttgtgttttgttttttgttttgttttgtttttgagatagtcttgctctgtcgcccaggctagagtgcagtggcgcaatcttgcctcactgcaacctctgcctcccaggttcaagcaattctcctgcctcagcctccctagtagctgggattacaggcacctgccaccacgcccagctaatttttgtatttttagtagaaatggggtttcaccatcttggccaggctggtgtcgaactcctgacatcat

SEQ ID NO: 201626 - DNA, 1000 bp, Homo Sapiens; identical to SEQ ID NO: 114797

SEQ ID NO: 201627 - DNA, 1000 bp, Homo Sapiens
tatatttaaaaaataaaaataaaagctgaccccaaagacaaataagattcctctggcattgtgtattgttgacagctccacactagctcttaggaattgtagattccaccccagtatccatttgataacctaatgtgaatatgggcctgctgctccatttcagctcactcactcttttaccttggtccctttgtgaaaactcatttctcatcttccatttggagtttataccatttggccaggcacagtggcttacacctgtaatcctagcactttgggaggctgaggcaggaggattgcttgagcccaggagttcaaaaccagactgggcaacataatgagaccccgtctctacaaaaaattttaaaaattaattgggcatggtgacatacacttgtggtcccagctactcagaaggctgaggtgggagaatcccttgagcccaggagattgaggctgcagtgagctatgatcacaccactgcacttcagcctggatgacacagcaagaccctgtcttaaaaaaaataagtcttaatgccatttttattacaagtattgttacagttcaaataccaaagcatttactattagaaagaaaccaagggaaaaaactagttactatgtcttaattaccaactaccattttaaggtataatttgaaaattaaattgattgaataaatgaaaaataaatcagttgttcaggaaactgcctttgttgtagggcagtgtgaaccgaatcaggctgcagtgtgatgcagaggtagttggttgtttccactttagtgagtgtcagtttttagaaggatagattttgaccagagaacaggaaaactggccacacctccctctccccaaggcaaacatccactttatagtttaccatcacattttcatttaacaaacatccaagtagcattcacaaagtgtaaagccctgtggtggggaggggcacaaagataaacaagttctgtacagaccctcacagagagaaagaag

SEQ ID NO: 201628 - DNA, 1000 bp, Homo Sapiens
accaccacgaagtctcaacacaagatgaagagtagactcctgttaatggaagaatgaagcaagctttcatgattccactaagaatgggcacacccaacattatgcattttctaattaaaagcagtagcagcacacaataacatttgagggaatcttgcagcccccaaacccaataaagtatctgattcttaactgacagtttatagggacattaaagaatgcattacattacaccatgggatacaacttgcaaaattcataatgggagaactatagcagtgcttctcaagtatcagtataggagttacctaaaaatctactgctattcgaatgccattttccctttttgtgtgtcaaaatgtccagaatacaccacatggagtggctcacgtctgtaatcccagcgctgggaggccacggtgggaagatcacttaagcccaggagtttgagaccagcctgggcatggtggcgggtgcctatagttccaactacaggaggctgaggtgggaggaccacctgagtctgagaggtggaggttgcagtgactgcgccactcactccaccctaggtgacagagtcagagcctgtctcaaaaaaagtaaaataaaaaatttccaaaataacattttttttttaaaagaggctgctcttcccctagacagaccttttgaatattgtagtcagacaaagtacgtccatcttccagctgcttgccagcaaagatcagtctctgctgatcaggaggaattcctaatgacaaaaaacaaaaattaagtcacagcacaccaagcctgtgatgtgctccagacttataaggtaacaccccttaatcaaatacatgatactaaaggctgacaataagcccttactagaggttaggcatggttctaaatctttacatgtcacattttaccgcatttaatattagggacaatacttggttgtctgcagtggctgacacctgtaataccaatactttgggaggtcgaggtgggcaga

SEQ ID NO: 201629 - DNA, 1000 bp, Homo Sapiens
gctcctcccacaatgctgaatatacagcaggtgctcaataaatgattcttagtgactttacttgtaatattactattgtggttattataccttataagaacaaataaatgggcttttgggaaggatttcataattaaataattttaaaaattaagcatttaaatttagagaatgcagaaaacttagcaaacagaaagactgctgcaaaaaacaacagcaaaacaaaaactactgtcacacctctgcaaagatcaccaatgtcaatattttggtttgttgtgtaatctttttgtaaagaatatattatagcttaacatcattattcatcagataaatgcaaattaagataccacaataagataccaccatacacttaccagaatgattaaaaaagactgacagtgccaagcattggcaaggttatggagcaactggatctcttatttaaaaaaactgtttgggccgggcgcagtggctcacacctagaatcccagtgcttcgggaggctgaggcaggagatcacttgaggccaagggttcaagaccagcctggccaacatggtgaaatctctactaaaaatacaaaaattagctgggcatggtggtgcacgcttgtaatcccagctacttggaaggctgaggtgggaggatcacttgaacccaggaggcagaggttgcagtcagctgagatcataccactgtactccagcctcttccagggtgacagtgagattcatctcaaataaatacataaataaaaaactgtttggtaatatcttctaaagatgcctaccttcatggctacctcatgacccagtaattctattcctggacatgttctcgagagaaatgagttcatatttccactgaaaaaggcataagaatgttctacacagtggctcacacctataatcccagcactttgggaggctaaggcaggaggacggcttgagcccaagagtgtgagaccagtttgggcaacatagcgagactcttatctc

SEQ ID NO: 201630 - DNA, 1000 bp, Homo Sapiens
tcttatcacaacttgctacttagtgtctaccaagtcctccacctctttgctcctcaaagagctgtgaaaaatgatggcaggagccggtacaacaccacagacttagagaagggcacagtgctgctttattgaatgatctaccaaggtaaaattttgccgggtcaagaaatagcaatttaatccatttaaaggaatgaatataatttgaaacattaacttatttcaagactaacatctcaaagtgttgagaccttttttaaaagagctttctggattttgagcatactttcactggctgtgatttataagaatttgtggtttgtggagtactgtcctaaatgccagggtaaaataaggcagtcccatgccttacctgccctgggctcagggcctcacatccttttggtacgcacatcttttctcttctcccttgttctgctctcccgcagcatatacctcctagccccaggcaattacttgtctaatatctatctctatatatttgcctattctggcttttagctttttttttttttttcctgagggagacagggtctggctttgtcccccatgctggagtgcagtggtacagtcatggctcactgcagtctcaaactcctgggcttaagcagtcctcctgcctcaccctcccaagtagctggaactacaggtgtgtgccactgcgcccagctaatttttatattgttttgtagatatgaggttttgtacgttgcccaggactcctgggcttaagcagtctgcccgcctcagcctcccaaagtgcttggatcacagctgtgagccaccacacccagcaattctttttatccaagaattttatcacctgagttttgaggtcattctgtgccatatcagagacacttaagaatttcccattccagttgctcctggctagcatccaagtggccctgccatcctcctccagcccttccttggcccagcagggaactgcttggccatcaggtctgtaggctgagtt

SEQ ID NO: 201631 - DNA, 1000 bp, Homo Sapiens
gccagggccatgggtcttgccctgaagaccctccctcagggaccacgcgccctgaccctcattgcctcaccatattataaaacactaaaaccgcttaagttcttccccacagagttggggaactaattgtaaacagaatacacgtctacatatcagccctgagacagctggccccgctgcacacgcagcctgctggccccagcaagacacggtcagagctggtaagtgctctacagcattcagaaatctgaccacagcgtacacacagctcacaagtcagtgcaaacagaagctaatgacatcctccaagaaaattccatacagttatgacaatggaaaacctgttatacattgtaaccatacatcattagcaatgtttaatacatcttactataaacactgaatttctaagtacatgatactcctagcagcttaatccagaaaataacgatgtgaatccctccaatactgtaaacacaagaccaagtgctgcccatgagagtgccccgtgccacccgcgggcaccaccggcctctgaggacccctgagccacacactgctgctgcttcagggaagcatccatgtcacaggacttccccaggggcctgatttctgccacagctgcaccaactacccagagatatgctgtccgcccacagatccagacgctcccatgccatggttgctggggacgggcgctgcacacacggctgctgtgggggggggcggggggcgggggcgcagtgattattttgacagcaactctgaagaaacaggtgctgactctcgcgcggggttcctctcaccagaacgaccacacacaggaggagggatgcctgggcccaccacttctctcctctgaagggaaaaattcagaccgccagatgggaaatggctgaaatcactgcacttctattgggtggaagggttcaaacatcggggactcaggtactcagattcccttgccgcctccctctgaaacacgaaccttcctttatga

SEQ ID NO: 201632 - DNA, 1000 bp, Homo Sapiens
ctctgaagatgccttggaaaaaaaaccaggtttctgggtgaagactagtgggtggacagctccttcccctatgctctgcccccgaccaccaccacactgcaccctagctgggtggagccgacttaccatgtcactgagttccagaaggccacaaatgagagaagtccagagcccaggatgaaagctgtcctcctcatagagccccagatgtgtccctcctggaggagggcagggaagtgtcagaccccagcaagcctcctgcctttacacccagctcactgctgaggcacagcgggagtgctgtaggatcagcatctcaaccaaccaggaaggcacatctgcgttttccagctggccttttccagcttctgtgggagcctcttccttatcaggagctctcaggctgtacatgggtgtgtttatgaaaattagagctcaagttgggggagggaagggaattagcctgactccagagaaactagcaggcaattctgtcagtcagaggacaggcgagcctctatcagccataggatttcatcaccagtcctcttggcaaatggagatacccattatctgcacattgaaatcacctgggagcttaaaaaaagtcccaatacccagggtcccctccaatccaattacataaagagtccctgggggtgggacctgggctccccagttaattccaatgggcaggcaaggttgagatagtcatcatagcagcatctgccaaaaccatgatgaggaaatcctttcccagtcatacaggcttcactgtgtgcataggccaggcccatttcttccatccctaccctcctcttattttagaaggaaagagtgaattgtacacgttttctgactttttttgtttttttgttttttgagacagagtctcgctctgtcgcccaggctggagtgcagtggcacgatcttggctcactgccagctccgcctcccgggttcatgccattctcctgtctcagcctcctaagtagctggc

SEQ ID NO: 201633 - DNA, 1000 bp, Homo Sapiens; identical to SEQ ID NO: 114821

SEQ ID NO: 201634 - DNA, 1000 bp, Homo Sapiens
caactgggaggaagccctcagcacaggtgtgtgaggtgggaggcggtgtcctgtccccgggaggctccagagaataatttgcaggctgcctggctgggtgagcccacctccaaccacgcgagacaacagctccggcctgggtgacgtgagcggtgcccattgatggggaacatcttccccctcttccttgccccaccagtttgtcttcccgggttatttgcagataggaaaataaataaagccggcattcgttaaccctcttctggcgcaaactgctgtttgctctggatgaatcatggtcctttggcgacgccaggctccgggagagcaaagcaccgtgtcagggccatgatccggggtggcctttcactgggatcgtggggacctggaggccgccttataggacacccatgacgcccacctctggatttcaggtgcacgtgactggacttaacttcaaaccccagggtggaggcaggtagtgggagtgccctgggaaggtgtcctcggaccttggtcactgctcctgaacccatctgtgaggctggtttgtcctcatcccaagctaagtggaagctcaggtcccaagccaccgatgggtgctacttgtcagctgcaggttgaatctccgtggcctttatgaagcacctgctgtctacccttcctgccttgtagagcactcctcccagggctcaacagtggggccggggtggtcggtgtgttggctccacaggcgcctgccctgggaggaaggtggggtgtggagggaaacgcttggcccctgtaggtctccaccagcctctcccctgagggtgggggctccgggagccttcctcgagggagtcctatattgagtgggtgggggagcctgcaaggtgcccctgacaggtcacatcagaaagagctcaagggacagtcggagccagaggtgacactggtggccactcgggtggctcacaaggcccagctcctccttgctcctgggcaaattactctgaag

SEQ ID NO: 201635 - DNA, 1000 bp, Homo Sapiens; identical to SEQ ID NO: 114790

SEQ ID NO: 201636 - DNA, 1000 bp, Homo Sapiens
caactatatttagctgtgatcccttcacattaggcttcctaatacatcaggggtcctcaaactacaggccatcagaatcatctgagagcttgtaaaagttgcagattctcatcatcaaagattggaattatgcagtcagaccccagctaagggcagttccaggagctgcattcggactgtggcccaagggccagtttgagaaacacgggctgtgacccccagcacgtgccgaagtgaaagctcaattcctctaaggcagtatttatcaccttacattggctccgtacccatgcgggttttagcaataaataaccaatgtccaagggacaggtacccttcgctcgtttttacagatctggaaacacttgaccatcccttcctctccgcttcccctccgttcccgcaaatttacgtggttcccgccaggataaaagacaggtaaaaagtacgcagagctaccaagaaaaagaagggacgctcaaggcacactagggtccaggccggacacctccgccaagtaaatgccttgtgacctttgcctttgcacccggggccaatagttggcgacttttcggcgcttcccgctgggaacgtggaggcccgtgggggaaacattccagccttcggcggaggaggcgcggggcggggcggggaggaggagggaaccgagggaaccgagggggcgggacagaggagaggcggggcctgggcggggcggggctagagggcggcctgaggctgcggccacgaggaagaggggcggggggcggagcctgggaatggggcggggccggagaacagcccgtcgctaaggcctgcgacccagacagcggggaggaggcggtgccgcccgctctggccccgcccctcggggggtgggcccagcgggagggcccggctggcggagcgcgcgggagacagttcgctccgactgcccgagcgagggcgcttcgctcccagccaggacatggccgcacctctccgcatcaggagcgccggc

SEQ ID NO: 201637 - DNA, 1000 bp, Homo Sapiens
tcccttttaatagttatatatacagatatacaactgttagctttaattggcagctctcttcttttttcttcttttcactggctttttacttggtgctttttcttgttttgcactggtggtctgtgttctgtgaataaagcaaagtaagaatttactaagagtatgttaagttttggattattgaaataagaggcatttcttagttttccagtaggatctaaaatgtgtcagctatgagtaagactggcatccaagaagtttatattatagatttaggtcctaatttttataaatcacaaggtaaaaaaatcacagaacagatggatctctaatgaaaaagggatgtctttttgtttatagtcatgtggcaagatgagagtaaaaccagagagcaaacctctataagtgttgagtatatgtatacatttgaaataaaccagaaatttgttaccttattttctttggattcttgtctggttccaaaatgatcatttcttcttcttcactatctgagagtattatgggagcatctttgtttttttattaatttaaaaaaaaaaaaaaaagttaagcaatctcttgcaaaatttatttctacatgaatttatttctatcagacgttctaaactcttatttctggggctgggcgtggtggctcacacttttaatacccacattttggtaggctgaggcaggtggattacctgaggtcaggaactcgagtccagtctggccaacatggtgaaaccccagctctattaaaaataatagaaaaattagccaggcgtggtggcatgtgcttgtaggcccagctactcgaggctgaggcatgagaatcgcttgaacccatggaggtggaggttgcagtgccactgcactccagtctgggtgacagagcaagactccatcccaaaaaataaaaataaaactctaggtggaggcttaatcttttctttaaatcagcttcttagagcactctagaactcatctgtaacatttg

SEQ ID NO: 201638 - DNA, 1000 bp, Homo Sapiens
gttgcccaggctggagtgcagtggcatcataactcactgcagcctcgaactcctgggttccagtgagcctccacctcagcctccaaagtagctgtgattacaggtgtgtgccaccttgcctagctgagtcccttgaattgataaaaggtatatacaaaaatccctcagtaaacattagttaatagtgaaatattagaagtgtctcttttaaaatcaagaacaagagtgcctgctattactacttgtattcaacattgtactgaaagtgtcaacacagtaaagcaaggaaaatgaaaaagcatgaaaaaaaggcatatggaagaaacaaaactgtcattctttaaaggttagatgattgtatgtatggaaatccaatatcatctataagcagattattagaattaagagtttagcaaatttgcgagctaaaacatcaacatttaagtttttctaagtaccagcaacagaattaaaaaatagaattttaggctgagtgcagtggctcacaactgtaatcccagcactttgggaggccaaggagggaggattgcttgagtcctaggagttcaagaccagcctgggcaacatagtgtaagaccctgtctctataaaaataaattttaaaaaagaaaatggaattttaaatatatataatatttaatcataactaaaaatataaagtttctagaaataaatctaataaaaatatgcaagacctttttggagaaaattacaaagctttattgtaagaagcagagtttaacccttttcccatttagaaaaaaaaagtgcagctcactgccagcgctcatttaattttacgtaaacacactcttggaggctgaagcaaatcttactgattttcaatgtgaaaataaaatataaaaactattcttggagttatttctaaacagaactaacatcagaatcatctgaatcatcagaatcatctctttcagaaaaatcggactcatcgaatgaatcttcggctaactgttga

SEQ ID NO: 201639 - DNA, 1000 bp, Homo Sapiens
gtggcctctctggaaccttgtggaggtgggagcagccagggagcttctgaccaccccgtcccaccctctctccgcaggtggcctgtttgtaccggaagcaaagtcagattcagaaccaacaaggcgaggactcaggctctgaccctgaagatacctactaagccctcgccctcctagggcctgggtacagggcatgagttggacggaccccagggttattattgcctttgctttttagcaaatctgctgtggcaggctgtggattttgagagtcaggggaggggtgtgtgtgtgagggggtggcttactccggagtctgggattcatcccgtcatttctttcaataaataattatcggatagctactttgtgacagggtctgtgctgggctctgggggcaaagctgtcatgggtgtcacctgcatagcatgtagccatgtagccatggcctaggaactgccagagccagtgccagccatggaactgcctgcagtggtgggcgtcttctctatctgctctgtgcagtgtgaccgccactggccacctgcaatgcccgagcccttgacaggtggccagcatgacagaggatgcgaatttgttttgttttgttttgttttgattttgttttgagacagagtctcgctctgttgcccaggctggagtgcgatgatgagatctcagctcactgcaacctccaccttccgggttcaagtgattctcttgcctcagcctcccatgtagctgggattacaggaatgtgacaccacgcctggctaatttttgtatttttagtagagatggggtttcgccatgttggccaggctgatcttgaactcttggcctcaagcgatccaccctcctcagcccccctaagtgctgggattacaggcgtgagccaccacacccagccataccaaatattttatttaattgtattggacagcagtagtctaaaatctttacatacatatatttttttaacttgtttaaccttccagcc

SEQ ID NO: 201640 - DNA, 1000 bp, Homo Sapiens
tgtaccaatcgcttgcagggggcctttggtaccctgggctcagcactgaggaattcaggtttagcaagtgaggccaacagacagtgccagcttggcctaggcaggacctacatctccttagctgtgtggagcctcagggtgggtggtataggatccgaggaagccagggggctgtagtggggccaggctggacctctgtgccctgagcatggctttcttgtttttcagttttggaactccccaaagagctgtcagaaatctttgatcccacacgaggtaggctgctgcattcctccctgaggctaggggtaagggacacagctcattgggtcctatggctgttttcttgcccttttgaggaccttgttgtggcgcttatggtaactggggcaaagggtgaagttcctgatgggcaggtggggttccctttcctgggctttggtgggtggagaggtgggagctggaatgttagtaactgagctccctccattcccagagtgcatgagctcggagctgctggaggagttgatgtcctcagaaggtgggtggccctggaaggtgggagtgggtgtgggcaggggttgggctgctgctaggggagccctggcccagggcctgagactagtgctctctgcagtgtttgcccctctgcttcgtctttctccacccccgggagaccacgattatatctacaacctggacgagagtgaaggtgtctgtgacctctttgatgtgcctgttctcaacctctgactgacagggacatgccctgtgtggctgggacccagactgtctgacctgggggttgcctggggacctctcccacccgacccctacagagcttgagagccacagacgcctggcttctccggcctcccctcaccgcacagttctggccacagctcccgctcctgtgctggcacttctgtgctcgcagagcaggggaacaggactcagcccccatcaccgtggagccaaagtgtttgcttctccctttctg

SEQ ID NO: 201641 - DNA, 1000 bp, Homo Sapiens
ttccaatttattttgtttgttcggcatacaaataatacctatatcttaattgtaagcaaaactttggggaaaggatgaatagaattcatttgattatttcttcatgtgtgtttagtatctgaatttgaaactcatctggtggaaaccaagtttcaggggacatgagttttccagcttttatacacacgtatctcatttttatcaaaacattttgtttaattcaaaaagtacatatttcttccatgttgatttaattctaagatgaaccaataaagacataattcttgtgacttttggacagtagatttatcagtctgtgaagcgaagccagcttcaaaacatatccccaagatttgtacttatattttcaaaagggcctggccagttatataaacctgtttttgaattataatgattaattaaaattgcaagtaggtgttttttccagtgtagttagtaaaatacttgtattttacagtgttgcataaactctagtgcttaactaactttactctaaaaattactgttgaacatcttaaatatttttctatattttctactttcatagccatattttaaccttttcaacttactggtgaccaagcttttaggtgataaagaataaaagagggaagggaagagtaaggaagctataagaaaaatagatctgattctttgttcctttacctgttagacttacaaaaagtttgtttttctaataaaatttgtatcaactttggggcatattaggttgaggccttggctcctgcctgtagtcccagctacttaggaggctgagagaggaggatcgcgtgaacctggaagtttgaggctgtagtgagctatgattgcaccagtgcactccagcttggatgacagagtaagaccctacctctaataaaaatttttaaaattgtaaaacattataaaattaatcagttattttaatctgaagccaagaacatgtagaatgttatgattagagtttatcacatattaa

SEQ ID NO: 201642 - DNA, 1000 bp, Homo Sapiens
tcgtcaaaagcggcggttatttctggaacagcggcatgttcctgttccgcgccagccgcttcctcgaagagctgaaaaagcacgatccggacatctacgacacctgcgtgctgaccctggagcgcagtgaacagaccgccgacaccgtgacgttggacgatgccaccttcgcttgctgcccggacaactccatcgactacgccgtgatggaaaaaacccagcgtgcctgcgtggtgccgctgagtgccggttggagcgacgtgggttgctgggcctcgctgtgggccgtcaacgacaaggacatccacggtaacgtcagcaaaggggacgtggtcatccaggacagccgcaactgcatgatccacggcaacggcaaactggtgtcggtgatcggcctggacaacatcgtggtggtggaaaccaaagacgcgatgatgattgcccacaaggacaaggtccagggcgtcaagcagatggtctcgaccctcaacgaccagggccgcagcgaaacccagaaccactgtgaagtctatcgtccgtggggctcctacgactcggtggacatgggcgggcgtttccaggtcaagcacatctcggtcaagccgggcgcctgcttgtccctgcagatgcaccaccaccgcgccgaacactggatcgtggtcagcggcacggccgaagtcacctgtgacgagaacgtgttcctgctcacggagaaccagtccacctacatcccgatcgcctcggtgcatcgcttgcgcaacccgggcaagatcccgttggagatcatcgaagtgcaatcgggtagttatttgggcgaagacgatatcgaacgctttgaagatatctacggtcgctcgacaccggttgaacgtggcgtttcggtgaaaactatcgcgcagtaaaacagtcgtacaagaagccctcacccagcccattgcgtcccctatccgcagtgggttgggtgggggcttttttacttcaacgcccgcttactttgacg

SEQ ID NO: 201643 - DNA, 1000 bp, Homo Sapiens
taggaggccccattaagcatacctgttaaactcttcttgcctccaactcctggcaactacaaaactccttttgtctctatggatttacctattctgaatatttcttataaatgggatcatacaatatgtgaccttccgtgtctggcttctttcaccaagtgtagtgttttgggggttcattcctgctgcagcatgtatcagtacctcatttcattttatggctgaatcatattccattgtatgaatatactggaaattgctcgtctactcatccagtgatgaacatcgagttgttttttggcttaaaattattcatagtgttctcatataaatataaatatgtaattattatttttatccatatttattacattatttatatttttatatttttattgtattataataattttataatattatactatgataatataacagactgactcctatggtctgtcagtgtgctcttccactggcgtgctcccttccgctggggtgccccgctccacgtccagttcctccgatgagttcctctggacatagagccgcttgtgtgtctgcctgctagggtctcagggttttcataggcaaaggatgggggcgtggcgggacagggtggtcttgggatatgcaacatttgggcgtgaaggaaggagtgcctgtcctcacctaggtccagtgggcacaggcccaggggagggcccttaccagggacccgcctttgtctacccaacacttccctgcccctcttctctatcattgcgtttcagttacctttgccttggttcagcactcacttggttgctgtaaaactttcttactgtttcccagagttcccacgaagtcaattctggcagcttttgcttatttttctgtgtttctatataggaatgggccctgcgagctcactactgtgccacttttgctattatcttttgttgttgttgttgttcaatttgttttgttttagggcaggatggtcaaatgcttatgatgt

SEQ ID NO: 201644 - DNA, 1000 bp, Homo Sapiens
tgcatgggcggcgatataaaatgcaaggtgctgctcaaaaaatcaggcaaagcctcgcgcaaaaaagcaagcacatcgtagtcatgctcatgcagataaaggcaggtaagttccggaaccaccacagaaaaagacaccatttttctctcaaacatgtctgcgggttcctgcataaacacaaaataaaataacaaaaaaaaaaacatttaaacattagaagcctgtcttacaacaggaaaaacaacccttataagcataagacggactacggccatgccggcgtgaccgtaaaaaaactggtcaccgtgattaaaaagcaccaccgacagttcctcggtcatgtccggagtcataatgtaagactcggtaaacacatcaggttggttaacatcggtcagtgctaaaaagcgaccgaaatagcccgggggaatacatacccgcaggcgtagagacaacattacagcccccataggaggtataacaaaattaataggagagaaaaacacataaacacctgaaaaaccctcctgcctaggcaaaatagcaccctcccgctccagaacaacatacagcgcttccacagcggcagccataacagtcagccttaccagtaaaaaaacctattaaaaaacaccactcgacacggcaccagctcaatcagtcacagtgtaaaaagggccaagtacagagcgagtatatataggactaaaaaatgacgtaacggttaaagtccacaaaaaacacccagaaaaccgcacgcgaacctacgcccagaaacgaaagccaaaaaacccacaacttcctcaaatcttcacttccgttttcccacgatacgtcacttcccattttaaaaaaaactacaattcccaatacatgcaagttactccgccctaaaacctacgtcacccgccccgttcccacgccccgcgccacgtcacaaactccaccccctcattatcatattggcttcaatccaaaataaggtatattattgatgatg

SEQ ID NO: 201645 - DNA, 901 bp, Homo Sapiens
ctctcttaatctgtggttgtctattatttcttttgatgtgcagaagctttttagtttaattaggtcccatttatgtatttttgtttttgttgcatttgcttttggggtcttagacatgaattctttgcttgggctgattattagacgaacatttattgagcaccaaccatatacgacaaacgatgtactaggtgttgggaatacaatggagaacttacatgaatcaccagtcacacaaatctcttttatcttttttttttttttttgccttacttgagaatttgggtttttgagtaaacgccattattctctctttttttaagcacacttttgcatctcaaccacctaacacactgcatccctgagcaacccggaggggccggttcctgcacccaggccaacacaacttaaaccccaacacaccagaagaggaataaaggccaaccaacttccgcccacccactacaaacgtcgagagaaattcgtagatgaggccttgtcaaaattcagaggcgtcctacgtctgctttcccaatgagacagttcctttttgtttgtctcagagactggggtttttttttttttaaaagactgtaggcagaaaaaacaccccaaccggctgttgtgacaatcaaacgtgtctaagaaaattcagccaatgagagtgcgagagtgcatcttgtgttggccaatgagaacagcgacccgtgcgcagggccgcccaatggggcgcaagcgacgcggtatttgaatcctggaacaaggctacagcgtcgaagatccccagcgctgcgggctcggagagcagtcctaacggcgcctcgtacgctagtgtcctcccttttcagtccgcgtccctccctgggccgggctggcactcttgctttccccgtccctcatg

SEQ ID NO: 201646 - DNA, 1000 bp, Homo Sapiens
agctgaatatttcaagtatcattggatattatcttgtattcacaggctttgtcttttcatgttttcattatcttaacaatgtctgatccttcctggtcacatgttaaaaaagcgaaaaagatttctattgatcagcactcactctcaataggctttccctctgacattcagacgtagctgagaagaaatacgtgcatgtttctaattccacaatagtggcagttttacacaactgtttagccctgctgcccacggctttgcattttccctcaggttccacttaaaagcatagcaggagggagcctcactgctggaacatatttcaatatgtttgctgtggttttagcaaacaattaggaaacctaaatggggtgcatcattctacctgtgaacattaagtgtatgggaacctctgtaccgttatgtttggcttttaaaccagacttcacttattagaagctgacttctgtgtaaatggatttggaggctgggggctggagttgaactggtgtaggtgggtcagctttaggagtggcctgcaggggatgattgttgttgacacagtgtttgttcagagtggacaaagaaggttattttaagactgctcctgtggagacgtctcccaagaacaacccccaagctcctatttgcttcgagttaagaatgattggaggagagtactaccaattactttgagcgtgggtcctctgccttcagagctaccttcccaagtctgtgtccttttggcatctttagtatttccatctttcctgactttttccttcagccttcaaattgaaaatcttcaccaatgaaaacaaaatccaaatagataatctccagcagtctttgaacggctcctagatgtgttgttttttaggctctcatttatattgacttggccagccaaacttctccagtacttggactacagcagctgcttttctttgcacactattttttcctaatttcaaatacgtcttctgcatccatcattctt

SEQ ID NO: 201647 - DNA, 1000 bp, Homo Sapiens
acttgtttaacttggcactgttagtttttattaataaaacgcgcatgggcattttaaacaagctgtgtttctctaattcaggattattatctagaaatttgtctgtcttgttggttttactttatacttgagtgagaaagtaggttgttaggcccagacgcggtgggcccgggtggtccctgtgggtgcaaaccccaccaccacatgttgtctgaggcacatcctccgggagcccaccctgaaaaggtggaaggtggccaagggtggaggtcttggtggacacagggcaaagaggcaccttccttttcggtgcctgtggtgcagagaaagataagccaagttccttggccttttttcacaatgaaaattgagacaaaatttaaaagtttgactttgagaacaagaataagattgagaggattctgggaagatggtggaatagggagcaccaggaatctggctgcccaggtagatgtctacctcgcgggcaggatctgcctgatgcagctgttctgtaactacggaatctactgaaggcttaaagctttcaagggaggcttggtcagcacattgcagttaattttggtccatttcagctttctaccccgacctctgttccttcatttttctctttccccttttgggagccagacattgaagactaggacgtataaaaacaactgtgttgtatatatggggctgcccagggagaggctcagaaaagacccgagaagaccttacgtttacacctcaggctgaaccatggcacaggtacagcctagagctgtcaaaaaagcaataaacacagcaataacaaaaatggcaaatccgggggaacaggagacttcttttcagagttgtaccacagtaatagattcagatgtccagttttcaacaaacagtgacaaggcataccaagaaatggcaaagtatggcccatttaaagggaaaaaaataaaaacaaactgtccttgaaaaggatctgttggcaggtacacta

SEQ ID NO: 201648 - DNA, 1000 bp, Homo Sapiens
cttatctgacacgaaaatcgctgtgcgagattcgttacagagacggacacagggaggtggcggctttcatggcttacgaatccggtaagtagcaacctggaggcgggcgcaggcccgccttttcaggactgatgctggtctgactactgaagcgcctttataaaggggctgctggttcgccggtagcccctttctccttgctgatgttgtacgggcatgaacaacctgacttcaggaaggtcgtttcccttcaggaacggggatgaacgcgcgcctgcggcgcccgttcttttcccccgccttctctggttatggcctgtcagaaatcacatcaccttccctgtgattattctctttttcttcctgctctgattctgactactgcagtgttgtcctgtctgccgggcgcaccttcggctcccggctgcctggcggcatccggtcgtcaggcccgactccgacaggcagttgctggcgcacccgccagtctccgccgaacccgctggcgcggtttcgggctgtcgctacggtccgatgcgtgaaaaccccgggcttgcagcgaccgttccggtcgcgccgcctctgtcgcgccgtggcctgcgctccaggcatcccagcaaaaggccgcagggatgtaaggcgcaacgcagtttcgcaaaccgcgcttcacgtcgttgcggcgggtccctgcccgttgttgtgtccgctgccattcacctgtttaagcccctgtcgccgggggcatagacagccacaaccgtctccgccagtccaggggtgaaatgcacatcccgccaaactttttgcccagaagcaggcaaaaacttttgcggtctgcccccggacagtcgtttccggccgtggcagtgatgccccttgcggcgaaggttctcaaacaggtgatggttaataccggagggaacaaagagcaggtccccgcaaaacgtcaaaaccgcggctcccgaaactcaacagatgatgggggctgaaaaccagagag

SEQ ID NO: 201649 - DNA, 1000 bp, Homo Sapiens
aggctgaatgtaccctaagatgaaagacaggaaaagcatcgatttaaaatgacggctatgttgcccaggctggtctcaaaactcctgggctgaagcaatcctcctgcctcagcatccctaataggtggggctacagttgcatgtcaccacaaccagttaatttttaaaattttttttctgtagagacgaggtcttgccatgttgcccaggctggtctcaaaatcctggcctcaagtgattcttccacctcagcctcccaaagtgctgggattacaggcgtgagccacagtacgtggcctagtcttgaaagtcttaacactgtagatttcaccaaatgtcactttgaaaaccaggcacagataactggccccttgagtacaaaggaatctgtaagagctagttagggaatgaaagaagtcccagagacagagtctagtacccatgagacctaaaaccaggagtggtaagggttctttgtcgaagattcaaatttatttttctctgcaacagtcacgaagtcacctgcagctgaggatgagaaaacacagttaagtcctcacttaacatcactaatacggtaagtcctcacttaacatcattgatagggtcttggaaactgggacttaaagggaaaagacatataatgaaactaatttatttttgtcatcaaccttataacaaaatgtgctttcacttaagataacagtttccaacctatctaggacattgaggacttacagtgttaagaaagtagaatctgtactggtttcaaaggcgcttacttctcttcactacttacttttcaccaaagccctaaagtagcagttcttagtctttttggcggtttttagaacttgatgaaagctatgaacccacttactagaacatacagatacacacacacacacacacacacacacacacacacacacacacacacatccaattttgcatacagtatcaaaaggtttacaaaaatctccaaacccatccatggatc

SEQ ID NO: 201650 - DNA, 1000 bp, Homo Sapiens
acctacggtgtgtgcagagctcaggccccaggaacttggggacagaggtgccttctcgcttctctctgaatctgtgtctgaggtgagagaggcatggccctggtggcctttcttaatttcaggttgggttccaagaaagcaatgacggctcgcgatttcttctttctcacgccattctctgttcggttgccaaggaagtggaaaaaattggttttgcttatctaaaaaggttcaggtgagtttattatttatttatatgtatttattttttgagatggagcctcgctctgtcgcccaggctggagtgcaatggtgcaacctctctgcaacctccgcctcgcgggttcaagcgattctcctgcttcagcctcctgagtagctgggattacaggcattcgcaaccacgcccagttaatttttgcatttttagtagagacgggtttcaccgtgttgaccaggctggtcttgaactcctgacctcatgtgatccacctgtctccgcctcccaaagtgctgggatgacaggcgtgagccaccatacctggccgacttgctgtttaattcagcaaaaaggtgttgtatttctgctttgctgtgacatgtatcggaaaattgagcatatggaaataatgagtgtgaagagcagcatgtgctcctgtttgggcattatgcctcattagaaaaaaatctggcgtttccggaggttgcagtgagccgagattgtgccactgcactccagcctgggtgacagggtgagactcagtctcaaaaacaaaacaaaacaaaaactaccatctcctataaaagggcattaaaattttccaaaatttgggattttgaacaccgtcccaatttagtatcaaagtatttttgagaattccaaatatcctttgatactaaattgggacgctgttcaaaatgacacagtgtctgcagctcaccttcattattcctagactctcccttaccatccacagctcttcttgcatctaccggatcc

SEQ ID NO: 201651 - DNA, 1000 bp, Homo Sapiens; identical to SEQ ID NO: 114915

SEQ ID NO: 201652 - DNA, 1000 bp, Homo Sapiens
aggctggtctcgaactcctgacctcaggtgatctgcctgccttggcttcccaaagtgctgggatgacagacgtgagccactgtggctggccaaattgccaatttttacatggtatttctggcaatgatggtggctcgtctctctgaatacataaaatggtccattcaatccatggttttcatattcctttgttattctatctactgctttaaaatacattcaggctgagtgcagcggctcacacctagagaatcccagcactttgggaggctgaggcgggtggatcacggggtcaggagttcaggaccagcctagacaacatggtgaaaccccacctctactaaaaagtacaaaaattagcctggcatggtggtgcccgcctataatcccagctacttgaggggctgaggcaggagaatcgcttgaacctgggaggtggaggttgcagtgagctgagatggcactactgcaatccagcctgggtggcagagcaagactctgtctcaaaaaaataaaatacattcaaataaaaaaatataagttactttcaacaagtgcacacttagaacagcgaggagagctgagaacataattaaccagtactcttgtgttcagagcataaatagtctgaaaccgtgggactgaagcttgctcctcatagactttctccaagtatccttggtggacgtaaggttaccctcactcaacggaaggacacatctgctgctgtggtgggaggacacagaatgacaatttcatttacgtaggacgttttccttccataatgtctggaacaagtcggagacaactttagacccctttcagcctggagtggcaccagtgcaatctaataacaaacttgactcactagcctttatctaccattcgttttccatatagctgctttcccatgcacagttagccacccttggaagtccaacctaggctggagcttgggggcctggacctcagccctcttctgggacaggcggtaggatcc

SEQ ID NO: 201653 - DNA, 1000 bp, Homo Sapiens; identical to SEQ ID NO: 115000

SEQ ID NO: 201654 - DNA, 1000 bp, Homo Sapiens
gcccaaattgatgcttagtgatatttatcttaaagacctcatttcctaagatgtcctcttttcttttaaggaagacttgaattctgtttttggatttccctagagtttagaatagtcacttattacaatattccccactgcttatttgagtctcacagtactggtgactaaatttcaaacaagaggcaactgcactgcaagccttcagcctgacaaggaatcttagctcaaaggctggagaagtcaaaggtaatgacagtgtccatgttccttcctacctgactctttcgttgagtacttaggcacccacctgtttctcaccatcccttaaccaacacaggctctgcagcacatggtctcaaactattttctcaaacacctgtcacggcccgtcatgagtatattctcatgtccatttattaattcttcattcaagccattatagtgagcatctattgtgtgccaggtatcatcctaagctaaagcagtgaaaaattagtcaagacttttggctcttatggaaacaggttataggaaagtacaacaaaaagacataagataatttggggttgcaataagtacaatagaaaaaatataaaataaacagtgatgtaatgaaaaaaggagatgcaggtcaggtgcagtggcccatgcctgtcatcccagctactttggaggctgaggcatgaggattgcttgagcccaggagttcaaggccagtgttggcaatatacccatctctaaaacaattggggactgcaggaaaggagttcattttagactgaatgaccagggaagacctatctgagatacagataaaggaaaaatgtttggtcaagaaccttctgggccaagagaaatttgggcataaaaggccctaaaggatttgtattaaaatgaaaaggacagtgtggctgaagtctaaaaacaaagagaaaaatcatgcaaggtgagggagacaagggccagttctaatgggtgttggtaaaggggtttgatg

SEQ ID NO: 201655 - DNA, 1000 bp, Homo Sapiens
gtcacttcaagaaaaacagctgagaacatttgttgctaatgataaaatttgaattttcaacaaaaataagaattttagaaatttgtttccacccctgtgaacttacttccaagtgcttacagacatttctgatgacatggatagtgatattaacaaatgtgattttttaaaatattgagtaatgaaatgtgtcaacatttgaaagatctacataacttagtgaactgatagtttccaagtggccaatacataatgttacaaaaacatacatgagtaaaagatctattcaaagcatgagatggataaattaagtttaatatatcaaagtatgaaaattcattgctatagtttgaaattccatatggcaactaaacattaagaagtaggatttttttcaaagaataattccacaataatctgaaatggcgattaatataccttgcatttttgaactattaataaatatgtgtgtgaagctggattttcttcatgtacttcaaccaaaacagcagattgaaacagactgaatgcagatgcagatataaaaatttaactttctatcaaactagacattgaagagatttccaaaaaatattttttttaaaaagtcactccttacatattgttttggacaatgtaattatttcccagaaatgtatcccttaagttaacatgtaatggatttaacattgatcttataagaatgaattaataaatatttttacatgtctcaattttaatttataaatatagtaactactgataaatatataacccctgtaaaccaacaaaagttatctggggccttaataattcttaatattgcaaaggtgtcctgaaataaaaaaaagtttgacaacttactcgtcactcccacaagttttctcatttatgattaaagggaagctttgagtatttatcaaattcttttctctctccacaagcttagctttcaagactgttgtctcgtctgagcttaacaaatctagtctgctcctca

SEQ ID NO: 201656 - DNA, 1000 bp, Homo Sapiens
atgactaaatgtgggtctgggttaagtgtttgtttcccaagtgccaattccttaatgtactttgtgaaatgaaggaaaaggaccaagaagacgaggtgtttttgtttttttggtctgaaagatgggttttgtgcatgtggtaagaatgtattttatttgtgatactggtagatgatgaggtttttgtttttgttgtttttaatgccttttgctgggaaagtaaaatgttaccttttgttattcccttttttttttttttttttggagacagggtcttgctctgtcacccaggctggagtacagaggactacagactacagggacacacccggcttttttttttttttttttttggtagaggtggggtctccctttgttgcccaggctggtctccaagtcctgggctaaagcagttctcctgcctcagcctcccaaagtgctgagattacagatgtgagcttccacacttagcctctttttttctttttctttttctttttggagacaaggttgctttgttgcctaggttggagtcagtggctcttcacaaacccaaatagacactgcagcctcaaacttctgggctcaaataattctttacctcagcctcctgagtaggctaggactacaggcacaggctactatcgatgcccggctccccttcccttttgcctttcaccttttctttttttcctttttaatttttacatatttatgttttaacatatttttagagacagggtctcactatgttgcccaggcttgtcttaaaactgctgggctcaagtgatcctcctgccgcagcttcctgagtaactggattaccagcacacaccaccacacttcctttatgtttttggaaattttactggctgctaaattctaagactgtagactcactgacatggattacatttaaggaaggaggaggtttgttaaaccagttgatggctggtaaggagtagaatctgcagatcaaggaccacaactgtaagaattc

SEQ ID NO: 201657 - DNA, 1000 bp, Homo Sapiens
  misc_feature (488)..(488): n is a, c, g, or t
  misc_feature (576)..(576): n is a, c, g, or t
tagcacaatggagagattccatgccatctttactatgtggatggtggtatcagggaagagggctcacaagacacatttgtcccccgggcccaccacatcatcctcacgtgttcggtactgagcagccactacccctgatgagaacagtatgaagaaagggggctgttggagtcccagaattgctgacagcagaggctttgctgctgtgaatcccacctgccaccagcctgcagcacaccccacagccaagtagaggcgaaagcagtggctcatcctacctgttaggagcaggtagggcttgtactcactttaatttgaatcttatcaacttactcataaagggacaggctagctagctgtgttagaagtagcaatgacaatgaccaaggactgctacacctctgattacaattctgatgtgaaaaagatggtgtttggctcttatagagcctgtgtgaaaggcccatggatcagctcttcctgtgttngtaatttaatgctgctacaagatgtttctgtttcttagattctgaccatgactcataagcttcttgtcattcttcattgcttgtttgnggtcacagatgcacaacactcctccagtcttgtgggggcagcttttgggaagtctcagcagctcttctggctgtgttgtcagcactgtaacttcgcagaaaagagtcggattaccaaaacactgcctgctcttcagacttaaagcactgataggacttaaaatagtctcattcaaatactgtattttatataggcatttcacaaaaacagcaaaattgtggcattttgtgaggccaaggcttggatgcgtgtgtaatagagccttatggtgtgtgcgcacacacccagagggagagtttgaaaaatgcttattggacacgtaacctgctctaatttgggctgtttttcagatacactgtgataagttcttttacaaatatctatagacatggtaaacttttggtttcagatatgcttaatgata

SEQ ID NO: 201658 - DNA, 1000 bp, Homo Sapiens
ctctaccctggggtataaccaggtggctgacttaggaggttctcggctcagcataaagaaagcctcagagttgctaagagaatcgatttaaattcacacacacacacacacaaatggtaaagatgtgacatcacacagttgtcggctgaggcgatgacgataatcactttgctgtacgtaagtgtttcctatcgacaatttgtacactataaacttaatatttatatcaatcatatctcaataaactaggggggggaatctctgaatcttgctctctgagagtttccttgtgtgttattcttgcaaagttctttgtgggcaaaaggatttcgaatcgttctaaattcaagttcccatcatggctcagtggttaatgaacccggctagtatccatgacgatgcgggctcgatccctggtctcgctcagtgagttaaggatcgggtattgctgtgagctgtggtgtaggtggaagacaagtctcagatcccatgtggctgtgacataggccggcagctagagctgcaattcaacccctagcctgggaacctccttgtcctgcgggtagagtcctaagaagatataagaccaaaaaaaaaaaaaaaaaaaaggttctaatcaaataaagtcagagagacagattcgtagttttgttttatttcaggaacagccctgaggccacacagccaggaacagaatccacagccctacccagttcgggtcccgcctgggaaacactgccttgcaggtggcacagatgccaccgttcacaacaccgtcagtctgatgggggacagtggactcggggctagacctgctgtccctgctgctcctggaaactgggtgacactactgccacctctgccacatgtgctaaaatcattcagcacagggccagcttccctgtgtgcccaggttccgagtcagagtctggcccgtggtcccctgcctggtggcgcctggggctggctgaacctgtggcaatgtttaggaagcaagctt

SEQ ID NO: 201659 - DNA, 1000 bp, Homo Sapiens
atgccttttcttgctgtggctgccaatggcctaggcaggacagaagaaacaaaacccacccgcttcctctgctccccaggagcccacactccccgccacttcctccacccgcaggttcagccttcagactgcctggagcccgagttcaccaggaagtgccaggccctgctgaagcgctggcgggagaaggtgttcgccctcatggtgcagctgaaggcccaggagctggagcacagaggatgcgtggagcagctgaagggacaggtggcctggtaccctctttctccccgtcttctcccccagctctttgttccttagggctggcatttattcagtagatacctactgaatgcttctcacatgctggctgcaccgccctgagcagaggccgacaaggacctgctcttgtggggtttactttttgtgaggtgggccggccttaggtgggatggtcacctgaggaggcgacagcattcaaggatgggtgggcggcatgaacagaggccatgggtccttgtgggtgggtcacagggcgcttcctcagggtgtgggtatagggaccatgtttctggagggaaatcccgactcagactccagtctcaggaacccaagctttgtctccctctgcggccttctttccgagacctctgcccctgaccccttcccagtgtcccccctacagcttttgggtctagacctgcctcctgtcctcccccaggtggcagagctccaggaaagagctgaaacccagggccaggaacgggccatcctggagcgctccctgcaagacaaagccgcggaggtggaggtggagcggatgagcgccaaggtcagcgtctgagacaggcagaggccaggggagagcagggacaccccaggaaggggacccttctctttactgcctccttcctaggccctgcagatagagctgagccgcgctcaggaggcccggcgccggaggcagcagcagacggccgaggcggaggagcagctgaagctt

SEQ ID NO: 201660 - DNA, 1000 bp, Homo Sapiens
ccttaagccaaacttttcctacttttcggagtattgtcaattatctcttacttccttattggtttagagaaggtgcagaaatgcagacactattctacatttcttttcaattagctagggattttggaattgtgcagtggactcctaaggaaacactgcaggaagaatatgggtgagacagtggtgaggaagtaggaattatctcatgaaatttaaaatcaaatatcattttcatccctttccaaaaatccttaaaatgggacatctatgtgggttttagaaagagaaaaaaaaaatgttggttctgaacagaatcctactgactattcttagagcctccttcaggccctctccaataaaaatatggaaactcaaaataaggtcactcacatcaattgacaccttaattttgtgactttttagttttcctcaagatgttttcttgaccaagttaagaatcaaaatcattttccttgatgttcaaactttctaaagattttgattagtgggtgttcaattacctgtttatacttggggaaattgaggctaagacaagtacactaactcaactgtagtaatagcgactagtagagatagaagtacatactcagtactccagagcttgctctagaggactgccttttatcttttgaaggtgaatttgatggtatccctgagaattttttgcttttcttgagattctcagttatctttcactctttgaaggatttcaatttcctgacttggaaacatctgaaaaagagaggaaggtgccttgttttttcattcccactcctgtgaaagaagtacaggaggggaaagacttggggcagacaaaaagggaaatctctgaaactagagaaaactcaaacaaattgtggccagccgagtcagcattcctcacccacagttggtcctaattaaggagactcccgttaaacagctcaactttctgctctttcttcttgctctggccctgccagctgacatggcaaagctt

SEQ ID NO: 201661 - DNA, 1000 bp, Homo Sapiens
acgctggccacccagcgctaagacagttgctgctggaggatgaccagggaagccccctgataagccaagagggccagcacagcccttgctcccaggctcctgcctgaaactatctagcacactaggacccaggtggtaccctactcagtggctgagaattggataaagtcttkgggaaatgagacaagtactgggcagtgaatccagctccttttccccagcctttccctgtgggccatttggggaaggccagcattycagcctgagatgttcctccctgcctcctgggggggcaraagggvtaggwtggttaactcctgccgcatccttccctgcctcctggagggacagaaggggaggatggttaactcctgccgcatcctttttcttgtgttcacgtggcattctctaacccagggcagtggttccttcccaggccatgcacagaggctgggtgcctgccagacccacggagggttcgcgaaggaaggggcatcctccttcttgagctgcaagctttagctgaggcagtaagtcacacagtagttagttcagcctgggctggcacataagtccccagtgtccctgttgagaggggaaagttgcctgctggttgaaaaactggcttttcctttctcgctgcctaatttcactctcagagtgaggcaggtaactggggctccactgggtcactctgagagggttgtggctctggttcttattaaaccagggccaggtgcagggctcacacctgtaatcccagcactttgggaaggtcacttgagctcaggagttcaagaccagcctgggcaacatagtgagaccttgtctctggaaaacaattagctgggcatggtggtacacacctgtagtcccagctacttgggaggctgaggcgggaggatggctttagcccaggaggttgaggctcctgtgaaccctgatggcaccactgcactccagcctgggtgacagggtgagaccctgtctcaaaaaaaaa

SEQ ID NO: 201662 - DNA, 1000 bp, Homo Sapiens
tcatggcttggtgtagtcctgtcccttctgctgatgacttgaggaggccatgccatgtgggtgctgctgagttaccactcagaatgatacagcaagccttcagagcagcttccttctccttcccgtgtttccaatctttcctcatctcttcagccatctaacccttgacatactatcttcaggtgtgtaattacataatgtatgcagacttttctgtagatacataacagaataacaactcataaatatatatcaggtttgctttgttatcaggttttatttgattaaaatactaaactgtttgtttatctcatacttcgattcttccataaaaggattaaatttgaagcatagtacaggttatttataaatagccaaagtatacatgtgcagagctaactggaaaatcttacagttgagcactaaatttagtttagactacaaatgaatgcaaacaaatttgcatcaatgaagagagttctgaatggtaatatattattcaaatgaagattataaaaaagaagaggttacaataataaatttggtgacaggttaaaaattaaggaagtatgtggtagagaacattactgaagtttctattttagaataagatagagttggataaaaatcaaacattttaataaaaacctatggtcttaaaaagaaaaatattcttcagttgtatcccctggaaacaatgtccctctaactcattatcgaattgttttatttcttgtattttttttttttttgttgttgttgttgtttgtttttttgagacagagtcttgctctgtctcctaagctggagtgcagtggtgcgaacttggctcactgccacctctgcctcctgggttcaagtgattctcgtgcctcagcctcctgaatagcagggattacaggtgtgcgccaccacccccggctaatttttttttaaatttttggtagagacgtggttttgccatgttggccaggctggtctcaaactcctggcctcaagt

SEQ ID NO: 201663 - DNA, 1000 bp, Homo Sapiens
ggctaatttttgtaattttagtagagacgaggtttcaccatgttggccaggctggtctcaaactcttgacctcaagtgatcagcctgccttggcctcccaaagtgctgggattacaggtgtgaggctccacacccagcccctagcttctaggttcaataaaagttcaaatacatctatttcttaccattggcttttttgttttggatataaaattatttccttgtgctaattatgtggtctttgttaagaacaattttaatgactgtgtaatccacagcgtttatgtatccatttatttaagcatttcattattggtggacatttaggatgaatttttttctaccactctgtgtatgtatacatctattataggtcatactattatttttattatggaaaattccaagtacataaaaaagaaaggtaataatgaatcctccccaaccagcctcagcaattatcaacacatggcccaccttgtttcatccctactcccactactccttggttccactattgccaagcaaatcccagatgtctcatttcagttttgtaaatatataactgtaaaagataaccactctgaaaagatagccacattacaattattcattaagaaacccggcagggtgcgatggctcacgcctgtaatcccagcactttgggagccgaggccggcggatcacctgaggtcaggagtttgagaccagcctagccaacatggagaaacccggcctctgctaaaaatacaaaaaaataagcggggcgtagtgatgggcgcttgtaatcctctttacttgggaggctgaagcgggagaatcgcttgaacctgggggcggaggttccagtgagccgagatcgcgccattgcactccagcctgggcgacagagcgagactgtctcaaaaaaaaagaaaaaagaaatgaaagaaacccagccattaaatatccagcgaccacattgctccaattttcttataattttttttttttttttttt

SEQ ID NO: 201664 - DNA, 1000 bp, Homo Sapiens
ttcatttctgcttccgctaagtaagagcacctcattcctgtgttttctctactattgagctgtagacgaactgtttctctaattataaagcaaactgtttgggatattcagggaaactaccccaatgttatgttgtcatttaatgggaaaggctgggatcatatgtatttctatgttctgtaaagtatttgacttactagttctcaataaaattttattaggactatatatcatcatgtgctttttgtttgctttggtttaaacttgagaaatattttccctcaatggcaagttattgcgggatctggccagcagcccgcaatgcaacggggctctctctttgttcccaggcagattggtaggttgagaaataatagactcacacaagatagtgaaagccgcgtccaggggggtcactgccttctggtcctgcggtgccaacaatgcgctggatataccagcatttattattaagtttagtgagggcaggggtaggttagtgaggaatttagggtcatttgattatgaggtgagatggtcacgtggggatgaagtaatgctttaacataacatttgtatgcagaagtacagtatacagggataagaatttacaatatagtgtgtgcatcagtaatttctaacagagccttaaaacagaaacacattctttccataacctatgattagcaagatattaatcagcagtaacagttgcagcaaaagctggttacagacaatccatagaaataggacgtgaagctagacaactggttagaccagaaattctcagaagggagtatgccttaaccctaaagaggcctagaagagccatggcaagatgagggcatttatagccctatcttatccatatggacaggcgcccccccatgcgtccatttataggctctccacaagggtcgcattccattcccagagctatgaatatctgcttttctgggataggaatcttggtgatgatgtgaaacctccctgactgcag

SEQ ID NO: 201665 - DNA, 1000 bp, Homo Sapiens
acacataaccttgtgcacatgtgattttgcatatatatgtgtgagtagatatgctagataaattcctagagcaggattgctggtgcaaagatacatgtattcgtaattgtgatcagtgttgccaaacttcccttctagggttgtgccagtctccattcttacctgcagggtttgatagtgcctcttctccttcagcatagtcaccatgatagtatcaaacttttgaatttttgccaatctgatgtatttttcgtagttttaattttcatttcccttaaaataaataatgtaatatatttaaaaactgttcttgtactgtgctaaaggccaatgttgagtctcactcttgaaaaaagaatgaagttggtggtctcatacaccctgaaatgcaaaactcagaatcataaagcctctagaagacaagagaggcaaatacttctgcaaccttaaagattacttggactgtattcaaaatgtactaacaatgaaagaaaaaactgataaattggacttaatcaaaattaattctgctcaccaaaagacactgttaagaaaaagatcagacaacccccagactgaggaaaagatattcacactatatacacacactatattgaatataagtctaaaaacggactgtattgagaatgtgcaacaaacttctacaaatcaacaatgaaaagatgaacaaccgttaaaaatgagccaaaaaagtgttttaaaatgtacaaatcattccattgctcattgaacagacctcccacaaaagattcataactcaaaaagtgcacatcttttatcatcaaagaaatgcaaattaacatcacaatgagagagcatttcaaacccaagaagatggctaaaatcaaagactaacaaaaccaaatgttgatttctcctaagaaactggtgaggaaacaaccaccaccaccacctccaaatgttggcaaagatgtggagcaactagaatattcatatactgctagtgggaatgtaaaat

SEQ ID NO: 201666 - DNA, 1000 bp, Homo Sapiens
ccaagaagaattttaaacttcagagccatgaaaatgagcaattatgcaaattcgagtatattttgagtaaaaagagattggatgctgtggatggtaacttctcatgtcagtttattcttatgataaactttgtgatgtttggttatggtaatatctgatttctagctcctgctgtggttttcaaagagaatagaaaacaaatgtagcatgatctctgagggcttgttaggaaggagtctggatgctagtttcttccgtggtgtgctcactggctgtcattccctgtatgtatttctccttctgcaaatgaggccagtagtgttgcagagagagaagctattctctaggttcagctattgaaggagtaaaacaaagtagatctttgcccaccggcctgctgctaacctttatgaacttcggactttggaaaatgcatatcagcagagttgggttaaatatgtcattaaaataggttattggctgggtgctgtggtgtgtgcctatagtcccagctactcaggaggctgaagtgggaggatcacttgagcccaggagttctggtctgtagtgtgttatgctgatcggatgtccgcactaagttcagcatcaatatggtgacctctttgagcaggagatcaccaggttgcctaaggaatggtgaactagtacaggttggaaacagcaggacaaaactttcatgctgatcagtagtggaatggtgcttgtgaatagccactgcactctagcctgggcaacacagcaagaccccatctctaaagaaaatgttattgacttttgttttatatatttgtgtatatgcaaaaaatactctacaaaatatacataacttcagaaaagttatgtataacttatgtttggtatttatgaatattctattaaattttttgtgcaggtattttgacaatagctcatatctgttatagaactatgaattaaacttaatagttatttgtattattaaaatatactaaaagtgatc

SEQ ID NO: 201667 - DNA, 1000 bp, Homo Sapiens
tcactttcgctcaggagtttgagaccagcctgggcaacatggtgaaaccctgtctctacaataataataataataataataataataataattagccaggcatgttggcatgtgcctatagtcccagctacttgggagctgaggagggaggatttcttgagcccaggaggtcaaggctgcagtgagccaagatcacgctactgcacttcagcttgtgtgacaaagtgagaccctaatctcaaaaaagaaaaaaaaagaactcttaacttttaaaatggaaatatttatgtactttcataatatatcaaacagtatataaattctaaatatttcataatttctatttttatcttattgactcctgaactatttaaaattacagctggatacagtggctcttgcttgtaatcctaatattttggaaggccaaggtgagaggatcgcttgaacccgggagttcaagactatcctgggcaacagagcaagaccctagctcagtaaataaatagataaataaataaataaaatttaatttccaaaggcatacttttttgttctctttatgatttctaattttattgtgttgttattgtatcaagtatatgttcagatctatattctcattaaacttcagttttgatttgtcacttcgtaggtatgttacaagctcctattataattgacatttgtcattgcctgcctgaaatcttatcagtttttgtttatcttgatcttatatttgttttttctttttttgtttgtttgtttgttttttgagtcagagtcttactctgtcacccaggctggagtgtagtggcaggatctcagctcactgcaatctctgcctcctgggttcaagcaattctcatacctcagcctcccgagtagctgggattacaggcacgggtcaccaggcttggttaatttttgtatttttagtagagacgaggtttcaccatgttggccaggctggtctcgaactactggcctcaagcattga

SEQ ID NO: 201668 - DNA, 1000 bp, Homo Sapiens; identical to SEQ ID NO: 114751

SEQ ID NO: 201669 - DNA, 1000 bp, Homo Sapiens
catagtgactggatatgttgtgttttacagtattatgtagtctgttttttatgcaaaatctaatttaatatattgatatttatatcattttacgtttctcgttcagcttttttgtacaaagttggcattataaaaaagcattgctcatcaatttgttgcaacgaacaggtcactatcagtcaaaataaaatcattatttggggcccgagatccatgctagctctagagtcctgctttaatgagatatgcgagacgcctatgatcgcatgatatttgctttcaattctgttgtgcacgttgtaaaaaacctgagcatgtgtagctcagatccttaccgccggtttcggttcattctaatgaatatatcacccgttactatcgtatttttatgaataatattctccgttcaatttactgattgtaccctactacttatatgtacaatattaaaatgaaaacaatatattgtgctgaataggtttatagcgacatctatgatagagcgccacaataacaaacaattgcgttttattattacaaatccaattttaaaaaaagcggcagaaccggtcaaacctaaaagactgattacataaatcttattcaaatttcaaaaggccccaggggctagtatctacgacacaccgagcggcgaactaataacgttcactgaagggaactccggttccccgccggcgcgcatgggtgagattccttgaagttgagtattggccgtccgctctaccgaaagttacgggcaccattcaacccggtccagcacggcggccgggtaaccgacttgctgccccgagaattatgcagcatttttttggtgtatgtgggccccaaatgaagtgcaggtcaaaccttgacagtgacgacaaatcgttgggcgggtccagggcgaattttgcgacaacatgtcgaggctcagcaggacctgcaggcatgcaagctagcttactagtgatgcatattctatagtgtcacctaaatctgc

SEQ ID NO: 201670 - DNA, 1000 bp, Homo Sapiens
ttctcttctcctgcctcctggccgcgctgtctcagcctcattttctggctctttcctctctttgaattcttgggggcttggtcctggaccctctattcttctcattcttctctataccctctgcccagatgagcttactcaggcccatgatatcaaacaccaatggcaccaaatttcacatccactgatgaaaatgcctttgtaaaaattacaacattgagaaaaatctggcataaggaaattttgaaagtgaaagaaatctgacctgactctatcttgcttcgaaccttcatgctacccttgttcattcctgggcataggccaaactaactttgggaggaatttagtttatagtttaactattttttttttttaagagaaaaggtcttgctctgttacccaggctggggtgcagtggcacaatcatatagctcactgcagccctgaactcctgagctcaagtgatcctcccacctcagcctgccaagtagctggaactacaggcatacaccaccactcctggctaattttttttttctttcttttttttcagagggagtctcgctctgtcacctaggctggagtgcagtggtgcattcttgcctcactgcaacctccgcctcctgggttcaagcaattctcctgcctcagcctcccaagtagctggaattagaggcatgcacaaccacgcctggctaatttttgtatttttagtagagatggggttttgccatgttggccaggctgatctcaaactcttgacctcaggtgatccgcccgcctcagcctcccaaacttctggggttacaggtgtgagccactgtgccctgcctttttttttttttttttttttttgagacagggtcttgctctgtcacccaggctggagtgcagtggcatgatctcagctcactgcaacctctgtgtcccgggttcaagcaattctcatgtctcagcctcccaagtagctaggattacaggcgcatgccaccacgcctgg

SEQ ID NO: 201671 - DNA, 1000 bp, Homo Sapiens
ggctcacacctgtaatcccagcactgtgggaggctgaggcaggtgaatagcttgaaccccggagtttgagaccagcctgggcaacatggtgaaaccccgtctctactaaaaatacacacaaaaaattagccagtcatggtggcatccacgtgtgttcccagctactcaaggctgaggtgggaggattgctctagcccaggaggagattgcaccactgcactccagcctgggtgacagagtaagaccctgtctcaaaaaaaaaaaaaaaaaaaaaagaaaaaagaaaaaattcattcactacatctacaggaagtgtctttttggagtggattctctgtgagtctgcacatttatcagtcaatttttttttttttttttaagacatagtctcactctgtcacccaggctggagtacaatggtgcaatctcagctcactgcaacctctgccacccgggttcaagtgattctcctgcctcagcctcctgagtagctgggattacaggctcacgccaccaggcctggctaatttttgtatttttagtagagatggggtttcaccctgttggccaagctggtgtcgaactcctgacctcaagtgatctgcctacctcagcctcccaaagtgctgggattataggcatgagacaccacactcggcctatcagtcaatattttataaacggctgatgtaaataaagaaaataaagaggattttgactactgtcttctaaactgtaaaaatggtctattgagtatatatttagtgtgacgatcatcagctatttcctagtggagggaattcctttactggaagcaggacgattctgaaactagaattataaagatgtaacactgacactcccacccccagtttatgtttgatgctgattattcagggatggtttaggtcttagcatttttgaccaagatgaacagcatcaaatggaagtgccagttcagagacaagcctgaggcatagtctgacttggtggttctcaa

SEQ ID NO: 201672 - DNA, 905 bp, Homo Sapiens
cggggtctcggagctcccaggtcagaccacgaaaggtcagcctgcaaggtggatggcgtgttttctgaggttatccccgctacgtgcagtgctgggtgagagagaccctggaatgtgtgtcgaaatgaccaagcgtccccgcagcggggctcccaacacgggttcccagagagggtaaaagagggggccataaagcccagggtgtaaaacaccgaccgcgccaccagatggcacacgtggggaaatgagggttagcataggcaacccccgcctacacaccaactatagcaaaccccgccccgtcacggtgacgtggtctgtcttgaggagatgtagacttgtagacactgcaaaacctcaggacctacgctgccctagaggttttgctagggaggagacgtgtgtggctgtagccacccgtcccgggtacaagtcccgggtggtgaggacggtgtctgtggttgtcttcccagactctgctttctgccgtcttcggtcaagtaccagctggtggtccgcatgttttgatccaaacttttgttttaggatttatgcatccattatcccgcagttccacctaaacggggcttaacgttgcatcccagaagatgcacgcttaaccccgcctacaaccgtgacgtagctgtttaccagcatgtatagagttacggttcgctacatcaaacaggacagccgttgccctagtggtttcggacacaccgccaacgctcagtgcggtgctaccgacccgaggtcaagtcccgggggaggagaagagaggcttcccgcctagagcatttgcaagtcaggattctctaatccctctgggagaagggtattcggcttgtccgctgtttttttgtggctagttttgcacccacaacatgtaagggcccgctacccct

SEQ ID NO: 201673 - DNA, 1000 bp, Homo Sapiens
tctgtccctgccacttacagctagtctctttgggataggggtgtatgtggagagattcatgtaagtctcacatgagtgacctgtgcccctatgtgtactaatgtgtgtactgggtcagaaggtgccctgggttcccacagaccttggtttcctgcctgggtgggtgggagggagggaacttcagagagtatgtgcgaacagccatagcagagccacccctgccaaggacccagtgagggaaactcaggagcaggtggttggttcagttcccgcgctgatgtctggggcagtgcatgtgtgagaagagaggcgcaaagcagtgaaaggagtgatttggcatccagagggcccgggagccccacggataccccagggaagccactgactcacaccgctgcagaggctcctgggcccaatgcccgacccctgctggccagcatggggcctagcactggaagatgcctcaggtgtgtttggagtgggggaaacggaagtagggcacgctctcagagaccaggatagagagtcagggaacctgggaaagagtagtgccagttccgggtaggctgctgcaccaggccctaccagctcaggctataaacagtctgctttgccccaagtcttttccgtccacccccaacagccttgtcatcacttagctactgatcacgcccatggcttgacattggagggttacattagtggagtccgccacagcttcgaaccctctccccagatgccctttgcctctgctgtggccctggggttttatcaactgtccccttcctatcctcctctccaccctgttttttgtttttttttttttttaaataatattttgctatgggggaggggaatatcaaatggtggacaagatcacttttaaatggtagtttttataagatgttataaacttgtatctttttaccattaaagtgcagtgtatgttccttcgtgatatatttaggatatttaaataaaaggaaaatggggcttttct

SEQ ID NO: 201674 - DNA, 829 bp, Homo Sapiens
  misc_feature (696)..(696): n is a, c, g, or t
gcggccgctgcagcgcccacgggtggcgcccagtcacgcccgaggcccgggccggcgcgggccctccgcgctgtcccccggcgctgccgcagcgcactcaccctggcacaggcgcgcgcgcccccggccatcctggcgccccggcatcctgcaccgcacgggcgcccgccgccgcggcgcgaacctcactctgcagacagccagacaaagcgcctgctcgcgggccccttcaccatctcccggagacgggcgtctttgtcacatgtcgctgggcaccctccccaacacacccacacatgcccacacacccacacgttcctgcacccacgggcagggccgagcgcaaacccgcactgttgctgggacccttgcgttcacagacacacgctgaaggtcataaccgttctgcatcaccgagtcacgtggagggtccccaaccggcactggtgtacggccgtgggggagggctggggcaggctcccctagtcaaggcttcttgccgggtgggggctgaaagggctatgtcctttcaaacatgcgctcataccgataactatcatatgcttgactgtagattgtgttctgtgtagcaaatccactcctacatgtctcgtccacccatgtgtgtgtgaggagtgtgtggggctcaacttgaatcgtataacatgcacgaatgggctgttacttacttagttntctatacccgctatggtatataatgtatattagattctcaatattatggtggtacacttctacttatgtgggagaataatctatctagtcgtatccgtatgtaaatattaatgtaagggtagggctggtgtag

SEQ ID NO: 201675 - DNA, 742 bp, Homo Sapiens
gcggccgcgcagcagcgactactaaccgcgcgtgcgcgtgcggtggcgggcgggaggcggtggcggcccgaggtgtgtgctacgcgctcctgctccgaggggctcaaccgcctccagggggagccgcacatggagcctgtgccgccgccggccggttgtggcctggaccccgctcccgggttagcccaggaggaattccccctgcaagtccgaagacttttcctcctctgagctcccgccctctctgcagaccgtgctacctcctgttgcgcaatgattgggtcctgaattttatgtaaatcatatttatgaacaacgtccagtaataagtgcagcaagattagggctctaggttttctccagagttctagatgttaacagatctgcagtcatggtgattaataaggagctttcctgtctggtgtgtgtatatgacaaatacagatgcgttaagtgttaataaatacattgtatataaaacaatatgttcttttctctcgaacacacttttataagacctgttacatttatgtgttcatgtgctctaagggcttactttattgtttaccttcgtggcaccccggggatgaaactgttgcaacttgtttgaagttcccacctgtatacagtggaaccggagtaattatggcttgtttttctaagccgttgtttaaaccattgaaaaatttagttaacctggttatgttgtattccatccaaccgtgttccttttatttggaag

SEQ ID NO: 201676 - DNA, 790 bp, Homo Sapiens
  misc_feature (414)..(414): n is a, c, g, or t
  misc_feature (456)..(456): n is a, c, g, or t
  misc_feature (510)..(510): n is a, c, g, or t
gcggccgcctgcttcctggacaccgctctctgggctccatgtgtacagcacccatggctgtctgccgtgtctgcatcttggctttctccattttgctaaatgatgaaccacaaatttctctaacttctcttgtgctgcggacttatatagtcactgacagcacagttgggagaaacagataaaggcacacttccaagttgccaagcgtatccagtggcctgacgtttttaatgtttcaccttcaatctcagtaccacacctatctggtccactcaaacaggcttcctgtgattacctccaaccctaatctcctcttggtgcccatggacgatggtgcacggagttccaggctgctgcttggcttctcacagaccttacatgtctgatctcagaaagctacttttgcataccatnctcgtgaatatctactaagtggaaatgtaaagcttgcaacanaagtctgcaaacaaatgaataaaatagaagacctggcttttccaggtgcaatangacgcaaaaaaacgaagaggatgacctgcttcctcatcattttctttgagtcattcaaacaagctgagtggttatgatatgtctgaagaaaaagcaccataggcgtgtcacttgattcacctggaccccaggccagggcagagaggcatccactgcccgtacaggaaccacatgctgttgacaaaccctggtgccaactgaacatctaaacctgatgcgctacggtttggtgttagggtacgtacagcacgtcattgggacggatgaaacacttaggacg

SEQ ID NO: 201677 - DNA, 659 bp, Homo Sapiens
  misc_feature (498)..(498): n is a, c, g, or t
gcggccgcgccgcgccgcgccggggccccgtcccgagcttccgcgtcggggcggggcggctccgccgccgcgtcctcggacccgtccccccgacctccgcgggggagacgggtcggggcgtgcggcgcccgtcccgcccccggcccgtgcccctccctccggtcgtcccgctccggcggggcggcgcggaggtgccgtcggccgcgcgctctctctcccgtcgcctctccccctcgccgggcccgtctcccgacggagcgtcgggcgggcggtcgggccggcgcgattccgtccgttcgtccgccgagcggcccgtccccctccgagacgcgacctcagatcagacgtggcgacccgctgaatttaagcatattagtcagcggaggagaagaaactaaccaggatttcctcagtaacggcgagtgaacagggaagagcccagcgccgaattcccgccccgcggcggtgcgcgggacatgtggtggaccgaagaaaagntccctcgtgcatttagtgggggggcaaagagattccaattacaagccaaaggcaaaggtcagcggaatggccagatccagctctatgaatgcctactgtggggtccgggaagcacaggttccttctctttaatggggacccatcaaatgggtggtctatct

SEQ ID NO: 201678 - DNA, 1000 bp, Homo Sapiens
ttgctgcagcctgtccccagggagacagttagaatggaacaatgacacaaacaacaccaacaataacaacagcagcagaagcagaagcaacaatagtagaacgagaaataatttataacatgcttactacatgccaggcactaagtgcttacccatattaactcagttaattcttataacaaccagatgagatagagtttcttattatcccgattttacaaatgagcaaacagaggcacaagcaggttaagaaacctccccaaggttaaacagtgagaaacagcaaagatttgaacagtgagaaacagcaaagatttgaaacagcaaagatttgaacctattgttcgggagtccatgctgttactcatttctttatgctgccataatctaatataaaattgaataacaataaatgcaccttatatttgtatagctatacacactaatttacatgatcttcataagaactatgaaatggctgtgattatccccatttttaaaatgatactataaaggcataaaatgctgtatttatggtatgcaaccctttggtgaacaaccctataaatatttaattacttatattgatgttcttcctacgtctaagaaaaatgttatttccattcccaagatgttagtagagacgaagatttttcaatttgtctccttgattttgttggattatagcattaaagttatttttacaaagccatctacggtaacccagtagaaagggtaagcctgttggcttaggaaaactgaatggcattcagtttcttcaaagaaatttgggacagatgtgggttttttttcttcttcttcttcaacaaatccagaagatgaaaaatgtattttatttcttgtgaaatgcatttttctgttcatctcagtatgtgggactgttgaagtttataagtttggcagtgttctaacatggccatcctgttctcctttagcaacttattaaatgtatttttttaatgaaaacaaaaaaaaaaaa

SEQ ID NO: 201679 - DNA, 1000 bp, Homo Sapiens
tatcagcatccagcgaatgttagctaccattatgccttcagtaccatgtagttaactgttgctaattactttgaggcacatggcaagattctgaaattgccttctgaatggtgaaagagaattttgtgtggtttttatgggtactgtaagcctagaaagtcaatgaaaatttgggcttcacccttatcccaccactgattctggataattttggataagagtttatttctgttatccattttcagaaaagatgattgtgtagtctcttccttacataaatatcttttgaactggttataatgtgcttgtggagctttttttttttgagacggagttttactcttgtcacccaggctggagtgcagtggcgtgatctcggctcactgcaacctcggcctcctgggtttaagcgattctccttcctcagcctccagagtagctgggactacaggcacgtgccaccatgcccggccaatttttatatttttagtagagacggggatttagtgccaatgaccatatatcctctcgctaccctccccaatgctcccctatccccaatcgtatctcctatatagtttcgtatcattgatatgtcatctgactccatcaccaacttgtatctattccacatatgttacatcgttatttcttaatgctcagatatattctatcgttccgtcctgctttatctttacttgcttaatatatacgatcaaccgtttgttacttccatccctcacttcatccctactttatcccactcttttcaatattatcctcgtcgctgttaacacttttccctccatctttcgtcgtacccgtctctcaatctactctctccattatcatttacttcatattattactaaactatcactatattatcagcatactatcttaatgtcattctcctcatactattatcacctgatctcaacataacgtcctcgcaacgtactcgtctacatttgctccatttagccctcacgactaccac

SEQ ID NO: 201680 - DNA, 1000 bp, Homo Sapiens; identical to SEQ ID NO: 115053

SEQ ID NO: 201681 - DNA, 1000 bp, Homo Sapiens; identical to SEQ ID NO: 114741

SEQ ID NO: 201682 - DNA, 1000 bp, Homo Sapiens
agaaggggagcaaaagaggaagaagagggaagaagaaaaagagggggaaagagggagggaggcatcaacaagtcatgttaagtagtgatatattaagaaataaaaaaagggcgaggagttcccgtcctggctcagtggtaacaaaaccgactagtatccatgaggatgcaggttttccatccctggcctcgctcagtgggttaaggatccagcgttgccttgagctgtggtgtaggttgcagacatggcttggatcctgcgttgctgtggctgtggtataggctggcagctgccgctccaatttgacccctagcctgggaacctccatatgctgcaggtgtggccttaaagagacaaaaaaaaaaggaaagaaagaaaaaagggcaagagatggaaatgggtagagttgctgatttagccaagtggtctggggaggcctctctgaagccttaagatctgagggaaagctggtccaggcaagaaagaaaggcccagcaagcacaaagccccagagacaggaatttgcctggggaattggaaggacagaaggaggccagtggctggaggggaatgagtgaaggggagagggcagagaacagacaaggccagtttgtgcggggcctgcgggccctggctgaggactttggcctgtactctgagtgtgatgggagccagggcagggttttcagccagagagggctgtgccgtgactggcattttgaaaggagtacacgaggctggttcctggagacacattctgtgccatccttccccgggctctgtatcatctggttattcatttgcttatccattcagcacacactgcattcctgtcctgtgccaggccctgtgctgggtgcccacattactacagagagcaacactcagcagagtctaaagggaggaggagtttctgttgtggctcagtgggctaataacctgacacagtgtcagtgagaatgcaggctcaatccccagcccccttagtgggttaaggatc

SEQ ID NO: 201683 - DNA, 1000 bp, Homo Sapiens
aagagaaagatcactgctgtttacagcgccttgtgcagccttagattttaatattcttttgtcattgttacatctcatagagtaaagctcttattaccttgatcctgagtcagaaatcccacctgaaatcaccttttttcccccttgatcaaacatcccatccttcagctaccatactgttgctacagggattttgtggactgtggcccctgtcccgaggttggcaccttcagttcagcacagcctgagcagtgagaaggtctgaaaggagagtatatagttaagatccttgagaaagggctgcctgaggaactgacctcttaaagatctcaggatctttaagacaacaagttaggttcctactggagttacctgccagaatggcctcttaattaactcaggtaatgaagagctaactgtgttataatcatcttgcttttgcctgaatttggagaaagtattataattaagttcccagtatcagaaatgtccttacataagattaaaatatcttgatgactaataccattctatgagaaagagtagttatatgcccagactgtattaatttactttagaaactaatgtttgaagtaatggaaaaaattttaaattataaagctaaggtgcaataacatttgctacttatttatagaattatttgaagaattttgtttttgaagtaatgctttaaggagtataagatattcaagataaattatactataaaatgattttattgaaagttgaaggttacacaaattgttttaggtatgagcagaagaggttaaggtatttctaaaggtaacatatagtcaagagtttcctcaaaatagttatttggagaagaatcagaatgtctgtgtatttcttgtctgtttctatgttgtcttatagctctgactaaatgtgtttacctatgcaaaagatttattaaagcatagaaaaggtgaatgaataaaaatataaaataataaaaaaaaaaaaaaaaaaaaaattg

SEQ ID NO: 201684 - DNA, 1000 bp, Homo Sapiens
aactacgtgccagcagccgcggtaatacgtagggtgcaagcgttaatcggaattactgggcgtaaagcgtgcgcaggcggtttcgtaagtcagatgtgaaatccccgggctcaacctgggaatggcatttgagactgcgaggctagagtgtgtcagaggggggtagaattccacgtgtagcagtgaaatgcgtagagatgtggaggaacaccgatggcgaaggcagccccctgggataacactgacgctcatgcacgaaagcgtggggagcaaacaggattagataccctggtagtccacgccctaaacgatgtctactagttgtcgggacttaattgtcttggtaacgcagctaacgcgtgaagtagaccgcctggggagtacggtcgcaagattaaaactcaaaggaattgacggggacccgcacaagcggtggatgatgtggattaattcgatgcaacgcgaaaaaccttacctacccttgacatggtccgaatcctgcagagatgcgggagtgctcgcaagagaacggatacacaggtgctgcatggctgtcgtcagctcgtgtcgtgagatgttgggttaagtcccgcaacgagcgcaacccttgtcattaattgccatcatttagttgggcactttaatgagactgccggtgacaaaccggaggaaggtggggatgacgtcaagtcctcatggcccttatgggtagggctacacacgtcatacaatggtacatacagagggttgccaagccgcgaggtggagctaatctcagaaagtgtatcgtagtccggattggagtctgcaactcgactccatgaagttggaatcgctagtaatcgcggatcagcatgtcgcggtgaatacgttcccgggtcttgtacacaccgcccgtcacaccgtgggagcgggtttcaccagaagtaggtagcttaaccgcaaggagggcgcttaccacggtgggattcgtgactggggtgaagtcgtaacaaggtaa

SEQ ID NO: 201685 - DNA, 1000 bp, Homo Sapiens
ggctcaagtgagtgtggaaaaggggttggaggagagccctggagtggggggacccagcccagcatcagggggggtccttacagggaaccctaaaggacaaagaacctcaggggctcaggtccttccccaaagagggtggtctgggagctgctgagagacaggtcagaggcttccaccgtggctgcagccagaagggcctggagctgcccctgctccccactcctggccatgtccccagtgagcaggtgctgcacctgtggctggaggtgctctgctccagcctgcccaccgtggagaagtggtaccagccctggtccttcctgcgcagcccgggctgggtccagatcaagtgtgagctccgagtcctctgctgctttgccttcagcctctcccaggactgggagctccctgcgaagagagaggtgggtggtgtgggcctcgtagggcctgcactgatggagctgcccaaaccgttcgcggggtggctaaggtgggaacccgaagtgctggtgtcagcggttaggaactaccccagccatgcccaaggcctgtgaggtgaggggctgccctgtttgcaggcgcagcagcccctgaaggagggcgtccgggacatgctggtgaagcaccacctcttcagctgggatgtggacgggtgaccccctcctccccagcccaacctcgggcctgcgtctgaggtggcccaggaccccaagctgcagagcccagggaagagcagctccagagccctggccggggccgcgggatatcaatatcaggctgccccactccacgttccccagcacatcccaggtggtgggagcagagggtaccctgccccaccagggtccttagggatgctctaggccaaaccacagtttgtaccaaaaaccttgtgaggaggtgggggagccatgtctgtgctcaggaagagggaaggggatgggggtggctagtaggctcctggcctctttggtttataaataaactgtgtctgtctttg

SEQ ID NO: 201686 - DNA, 1000 bp, Homo Sapiens
atgcgtatttatcttttaaaactccgtctgtttgctcgttccggctgataatttatactttgcgcagttcttagcgcttagacacggttcctttactaaagaccatttgtaggagattaggtgtcctttttttccctttcatttcaccgtctaggaagcgaaatgccttgttctataggcactaaaccaccacccctaccaaacctttctcggggaagcagaaggggaacttgtgccttgtgaggaagcgacaaaggccccttctggccctggagacttcacgccaatggagcaccagctctctgtcctcgcaatagcccgagtgcaggcagaacgcagtcatttgtgtttatctgagaggagctttgggatataaatagtttcaggccccgctgcgctgtcattccagcccagcctcctgattgagctgcttccgggcgggctttcttcttgttggcggtcccatgctgtgttcagatgggctctgtgacaggtttggatgttttctatcactgaataaaactttccactttggaacatattttctacactctattatctcatgtaagtcctgcaacaactattaagtaggcccattttatggactgaaaaagcgaggcacagagtatttgcccaaggtctgagtcactgaagtatgataatgtgtgaagtgaacagtataataataatgactgaagcacagtaagaatccagtcatgctttctccttccctgatctcactaagccacacttttaggggcttacaaaccagttcttattgccaagccctctactctaccctatcctttcatgaatcggagcctagcctctgataacataaataatttacttctcttgatgtagaaagagatgacgttgttaccctgagtgacagtcacgacagaacaaaaccacaagaccagaccacatttgtggataaatatattagcaaataaatatatttcttaacataaaaaaaaaaaaaaaaaaaaaaaaaaaa

SEQ ID NO: 201687 - DNA, 1000 bp, Homo Sapiens
atactggagagaaaccctatgtatgtaatgaatgcggcagagcctttggttttaactctcatcttactgaacatgtaaggattcacacaggagaaaaaccctatgtttgtaatgagtgcggcaaagcctttcgtcggagttccactcttgttcagcatcgaagagttcacactggggagaagccctaccagtgcgttgaatgtgggaaagctttcagccagagctcccagctcaccctacatcagcgagttcacactggagagaagccctatgactgtggtgactgtgggaaggccttcagccggaggtcaaccctcattcagcatcagaaagttcacagcggagagactcgtaagtgcagaaaacatggtccagcctttgttcatggctccagcctcacagcagatggacagattcccactggagagaagcacggcagagcctttaaccatggtgcaaatctcattctgcgctggacagttcacactggtgagaaatcctttggatgtaatgaatatggaaaagctttcagtcccacctcacgacccactgaagatcagataatgcatgctggggaaaagccctataaatgtcaagaatgtggaaacgccttcagtggaaagtcaacccttattcaacatcaggtaactcacactggtcagaaaccatgtcattgcagtgtgtatgggaaagccttcagccagagttcacagctcacaccacctcagcagactcgtgttggagagaaacctgctttaaatgatggctctaaaagatactttattcatatcaagaagattttccaagaaagacatttttaatgtgataaatgcagaagacagtttagcaactgttcacttgacattagaagataagatggcataatgaaagatatataaggtctaaatattactggcaaagtaaaataaatagttcagatgactaaaaaaaaaacaaaaaaaaaaaaaaaaaaaaaaaaaaaaaaaaaaaaaaaaaaaaa

SEQ ID NO: 201688 - DNA, 1000 bp, Homo Sapiens
ccttactttaaagccaaaatatgagattttcattaaaaacattggtcataatagggagaggttttttatttgttctgagcaaatcctttaacctctcctgatgatacagttcagagtacacacactttggtgatggatcaagagcaatattttcttatgtgaaagatagcttattattactattgtgacatacaactaatagtaacagttaacatcaacacttcatatataccaggcagcatgataagcactttattattttactgaatcctcacaacagaccactgaggtagggactattgccatcatcattttataaaaggaaattgaggtttagtcctcaagaagtcttggctattaaggggcacttatccatacaacctctactttttctaggcactaaaagggggaaaaggcttaatagccaaaatagttatcaaaagaccctaaagctggggtcctgtacaccatgaaaggattactttcattctcatgtaagggcatgcttttataaaaaacaaacatgggctaggcgtgagccactgcgcccggccacattcagttcttatcaaagaaataacccagacttaatcttgaatgatacgattatgcccaatattaagtaaaaaatataagaaaaggttatcttaaatagatcttaggcaaaataccagctgatgaaggcatctgatgccttcatctgttcagtcatctccaaaaacagtaaaaataaccactttttgttgggcaatatgaaatttttaaaggagtagaataccaaatgatagaaacagactgcctgaattgagaattttgattttttaaagtgtgtttctttctaaattgctgttccttaatttgattaatttaattcatgtattatgattaaatctgaggcagatgagcttacaagtattgaaataattactaattaatcacaaatgtgaagttatgcatgatgtaaaaaatacaaacattctaattaaaggctttgcaacac

SEQ ID NO: 201689 - DNA, 1000 bp, Homo Sapiens
ccaaaattccctgggtaattgccagtagctcctgctctgctgtgcagatattgtaaaacggtgagaaaggccctgaaatctgacctggggcctcttgggaaagctgctgtgaacacctccacgttaatgtcatccctcagccctctatgcctgtttctctagggactgagaagtgcatgatgcttttacttccttgctcatttcgaagtctgttccagacagttcctataaccagtgaggcctcccaaagtgctgggattacaggcgtgagccactgtgcccagcttcaacaatgacattttctaacacatggggaagggcacactgggctccacaggcactgtctttgtgcacaggccacttgcatcctgcctcctccatgaggcaatgtaaggggaactggaggcttcatgctgagtcccatcacttcctaagaaacctgctggcagagtgcctgcatgtccctcaccttattggtgtctcacagccactctggtcacagatgaagaagcaactcaagtggcagctggaccgtgacagcaccatgaggagctgagccttgtggggagagcactgtgtctggagtcccaggctgctgtgtgaccctgggcaatttgcaaaacctttctgagcctgtttcaaatgaaaatgatgcttcgtgggattgtcgtagtcaatgagggctgggcacagtggctcacacctgtaatctcagcactttgggaggccaaggagggcggatgacttgaggtgaggagttcaagaccagcctggccaacatggagaaaccctgtctctactaaaaacaaaacaaaacaaaacaaaaacaaaaatttgccggatgtggtggtgcatgcctgtaatctcagctactcgggaggctgacagagaattgcttgaactcaggaagcaaagattgcagtgagccaagattacgccaggacactccagtctgagtgacagagggagacgttgtctcaaaaaaaaaaaaaaaaaaaaa

SEQ ID NO: 201690 - DNA, 1000 bp, Homo Sapiens
tcctctgaaaattagcttttgctggatgctagattcagttctggacttactgagtagtctctgggtttttgacattgttaggcactgtgggaaaattataacaggtacgtctgcgctgagttgcttgctaattcctaggagagacttggacattttggacaattaagaagcaatacaggccaggcacggtggctcacgtctgtaatcccagcactttgggaggctgaggcgggtggctcatctgaggtcaggagttcgagaccagcctgaccagcatggtgaaaccccatctctactaaaaatacaaaattagccaggcgtggtggcacatgcctgtaataatcccagctactcgggaggctgaggcaggagaattgcttgaactggggaggcaaaggatgcagtgatccgagatcacgccattgcactccagcctgggcaacaagagtgaaattctgtctcaaaaaaacaaacaaacaaaaagaagcaatacagctctttgagaaagatgcagtcataagtggtgcagagttgcagtctgcccattcctgctcctcactcatcgctgttccgaacaagtcagccaggaagccgcactgcaccaaggcttttaaagataccagaaaacacctgtgaagctggaggtgaccattcaccaaattcgaatccctctaatgatccgcagcgtaaaatccctggagaaggtgtgtgctgactggattcagaggaggaaaggaaaagaatgtctaagtgaagggaccagtttgaatgcctgccaagactttgagaatcactataagaaaatctccttgtggtgaaggttcagagacatgggatcgtttccagatgagaatccacaagctacccactgacttgcacagtccttctgagattgttaagcagttgacttccatcagtgttgagccaggaattgaggtggaagtcaccattgcagatgctcaaagtcaactattttaataaactgattagcggttgttat

SEQ ID NO: 201691 - DNA, 1000 bp, Homo Sapiens
actgccattagattgtattgaggtccctgaagtcatggataaccagaagggggaatttgaagattccatttaataaaaagaagttgatacaaagaagctaagatatataataaaatttcatagttggaagagaacatgatgcttctgtattccaattactgattataccttttgttcatagtcttttaaatctgagctctttggcaatcccatttcagccgctggtctcattaggtaccatcctttctccctcagaattaattttcgcttctggaatcagaatgtcattcttaagggtctcccttattagtacctttaggaccaagttcaaactacctagcaggacataacaggcccttcacaatataactccattctattattttgacctcttctctccaacctcctttatgcactagccacagtaagtgtctgctattcacacttcagcacatatgtctctatgctttcatgcctctgtagaagttgtgccttctgcctgcaacgcctctcacctccacactcaccacaattgcaccctccttcacttcctttccatcctttgaactcttgcctatgatccttttgtagttcataagcatgatgattgagtgttcatacacatgtgtgaggtatgtcgcccccaaaccttttatgacattggcacattacctgtctgacatgaaagaaaaataataataaaaattttaaaaatgggcagccaggcgccatggctcacgcctgtaatcccagcactttgggaggccgaggcgggcggatcacgagatcaggagatcgagaccatcctggctaacacaatgaaacaccgtctctactaaaaatacagaaaattagccaggcgtggtggcgggcacctgtagtcccagctactcgggaggctgaggcaggagaatggcgtgaacctgggaggcagagcttgcagtgatccaagatagcaccactgcactcctgcctgggcaaaagagcaagactccatctc

SEQ ID NO: 201692 - DNA, 1000 bp, Homo Sapiens
acagagtttcagtttgggaagaggagaaagttctggagaggatggtggtgatggcggcacaacattgtagtgagaaaagagagagggagaggaagggctgaaagccccaagccccatcttccggctccagcgtcatatgagatgcgtgttcccgcggcctcaccgttgagtttgaaggcgtgatgtcagaatgcaggcccagcagggacaccccgggagatggtgggggtggctggcagggcgggtttcacctggactgcaccagcccaggtgtgacgggctctgggccagacccaggcacccaaggtgagaaggcagcatctctggtctcgggatacccaggcctccccgaggcggcagaactccggccgtacctcgcagcagctggtccgtggcacccatggtatgtcccattcatgcagtgcctttccagcctcttccagaaagaatttaattcacccgttcgcatatgaccacgggagaatcgcttgaacctgggagacggaggttgcagtgagccatgatcgcaccactgcactccagcctaggcgacagggcaagactctgtctcaaaacaaaaaaaaaaaaaaaaaaaggagaaatttccagaacaggcagatccacagagaatatgcatggatgtgtggttggaggagacgggggtgactgctaatgcggacggggtttccatttaaggcgatgaaacagttctggaattcagccagcacagtggctcacacctgtaatctcagcaacctgggagtccgaggtggggggattgcttgagaccaggagttcaagaccagcctgggcaatatagtgagaccccatctctagaagaaaagaattttaagttagccgtgcatgctggttcatgtctgcagccccagctactctggaggctgagatgggaggatcgcttgagcccaggaattcaaggcttcaccgagataaggaggtgccactgtagtccggcctgggcaacagatcgttaactctt

SEQ ID NO: 201693 - DNA, 1000 bp, Homo Sapiens
aggaatcaagtgctaccactttctgatgtggatacaacttctgctacagatattcaaagagtagctgtgctatgtgtttccagatctgcttattgtttgggttcaagccaccccagaggattccttgctatgaaaatgcggcatttgaatgcaatgggttttcatgtgatcttggtcaataactgggagatggacaaactagagatggaagatgcagtcacatttttgaagactaaaatctattcagtagaagctcttcctgttgctgctgtaaatgtgcaaagcacacaataaagtgaaaatcaaccttttcatattaggagacatgcatttgtaaaaattaataaagatgacaagtcagttgtcaatggaattgagctatctgctaagacaaaaaatgttacctcagttcactattaaaattaattttaggagtggaagaaatgttgttactgccatttaaaaatatgctgagaaaattccagaagggttatttttccaaccacacctattccctctagtgcccagatatttgatttgtgagctgtacgtttcaccttttcatctttgatctactaaaaactggtttcttagttgtgaggtgtcacaggcaggttgatgtgggtagtagtccttgtctttggaatctgaatatttatactcctgctctaagctgttctaagacttggggttatgcctttaaatcattttcaagcattggccaaataataattggacaaagttctaaagttgtcaagtgtgtaagaattagtgaggtagctgttgaaaatgagtgaggatggtatttgtatttgtaataagcactgcaggtagagatatttcatgggttataataagagaaacacagatgagatgtagatggtaaggagtcttactgttgttggggtccttcctttctctttcttttttcccccttacccctcccacaatttcatgaagtctttaaaattaaatatatagctgaattgtgttgtgaatc

SEQ ID NO: 201694 - DNA, 1000 bp, Homo Sapiens
tattcacaggctcaggtgtcactgcagctccccagtgactatcttcgcgcaagttggactcaatggcctgggaggtttgtcccagccgacagatacctgaccatgcccatcctcaccattccctcccccatgctgcatccatccaaccttgatctccactgtgtcccaggcaccctaagatgcacaagctatgtgggccctgccctcacagaacttgtagtcttctgccccaaacaagccagttcaccgtcttcatgatcaggccaaaggttgaggtacccagcaggcttcatatgcacatgcacactgtcccctataggaccatgccttgcccagctggctgcactctagagggtgctttgtaggaaggacagagtggagaggacagtggggaggtacttgggtgttcaacagccagaagggagggaaactgaaaaagaatcaggagtccagccatcccctccccacctcctgcccccacttccaccctggctgctggccctttgcccttgaatatgggtgatataggtgtggctattcagttccagtcacagtgctgcctctatgtcttttgcaagctggggtcttccttactcagaaggcctggaggccctgccagatgctgccttccggactggctgcccgctgcagtgttttcacgggagccaagccagccccgggcctgtagcctcccatgtgacaaagtttcagacaccacagtcctcagctggaccacagtaaaacacttgccttccccaacccatgattcttgcttggaaacatgaacctgatgttccacgtgcgttcagccaatcaaacctcaagaatgtgattgagcagtgaggctgcgttttgggcaagacactgagctctgaaataagacttttcttggaatctcaagccctcaacttacagtgggaccctaagaaatgcacttcagtttccttttatgtaaaatggtggtaaaattaattgtgttcattaaattgcacacaactat

SEQ ID NO: 201695 - DNA, 1000 bp, Homo Sapiens
cccacagactataagctctatgagggcaggggccacagtttgcttgttcactactatatgctcagtacctggtaaatattagttgactgaagaatgactatgtggtaatctattccattggtggcctccagtgaaccatgtcttctggtatttacatcttgtgtggtcccctccattaaatttgggctttaaccaacagaatgctgcagaagcgacaccctgccacttgtgcttttgtgatcctagccaccagtaagaagccctgtgaccttgctgagaccctgaagagaccacatagagaggccacttgaagggcaaggggtcctgactctacatggagagagaagcccagccatccctgtttcccagctgagtcctgaccagataactcactacaagactgaccacaggcaagaacagcagaagagctgcccagctgagcccatccaagagtgcagaatttcaagcaagtaaaatgactaatgttagaactcagaatgaaggggcctcaggttacctgcatcattctggttttttgctcctgttttactacgaagcaaacacctcgactataagccgccatagaccagggtctgtgtctcattcgtgtctggacaatgcatcacagacactcaactgttttctgcctgagcagaattaagacttggcctcctaactcctccatcaccatcttctccactctcttccttggccttcatcaccaacaccacctcatcaaccgtgaaagattcaaagagtaaggaaaaccatttctaggaccatgaaatgtgtcactggatctcctgcagaaatctgccagagctacaatgtgactggtttctacatgtctgacaaatttctatttaaataagtatttttcaaaatgcaaattgctacctattctttggccatcaaatcactttagtgggttgcaaccggctttttcttcttaatagaaaaggaaatgtgttgcatttggtaaacatggaaattgttttat

SEQ ID NO: 201696 - DNA, 1000 bp, Homo Sapiens
gtgtgcaaggacttttccaaagtaagctggaaaggagctgcttagctgagaggttctggctccagagtctcctgtgaagttgcagtcaagatgtctgctgggaccccagtcatttgaagccctgtctggggcaggagaatctaggtccaaaatggccgttgcaggagtccttatccacaccatgtgggacctcttcatagatgttcgagtgtcctcatggcatggccactggctttccccaaagtaagcagtccaaaagagggtaagacagagcccacactgtcttttatgaattagccttagaagtctaacacggttacttccaccacattcattagtcgttaggtacagctcacattcatggggaggaaaatcagggcctgtctttagataggagatgtatcaaagaatttgtggacatattttaaaatcacagcactactcttgatgtactaagtcagtgactcccccaggagtctcacagagaattgactccttgcccacctatactacctttgtgggtagagactccagtagtgtgctggttaatgttcaaccagtggctttctagaaaacaaaatgtatggatacatatatatgttctaagttttactgatatgaagaatgtgtagcacagaatttataaataataaaatatacagtattatttattgtaaattccataaaacctgttgtttttcacaaaaggttttagtttatttttcccaaatgcttgtattggtaacattttctgtattacctttttatgtccagacaatcaacaaaactgaaaaagcccagccttgtagcatttgccagttattgtgtaaatgtccccactatggtggatttcaggttaccactatgatatcacagaatgcagaattggaaggagattcacagcagcaccccattatactatattttcaccatacagatgcagtcgatgtaaattacctgaggagcataaataataataaaatgaagttaaataattcgg

SEQ ID NO: 201697 - DNA, 934 bp, Homo Sapiens
atgctgcggcgcccgctggtcgggctggcggtggccgccctgggtcgggtccccgcggacggcatggcaggacctaggccagtagtgctgagcgggccgtcaggggcagggaagagcactctgctcaagaagctgttccaggagcacagcagcatcttcggcttcagcgtgtctcatactacaaggaacccacgacctggtgaagaagatggcaaagattactactttgtgaccagggagatgatgcagcgtgatattgcagcaggggacttcattgagcatgctgagttctcagggaacctgtacgggacaagcaaggaagctgttcgggctgtgcaggccatgaaccgcatctgcgtgctagatgtcgacctacaaggtgtgcgcagcatcaagaagactgatctgtgtcccatctacatctttgtgcagcctccctcgctggacgtgctggagcaacgactgcgactgcgcaacactgagactgaggagagtctggcaaagcggctggcagctgcacggacagacatggagagcagcaaggagcctggcttgtttgacctggtgatcatcaatgacgacctggataaagcctatgcaaccctgaagcaggcgctctctgaggaaatcaagaaagcacagggaactggccacgcctgaaggcctgcttcattccacagagtgatgtctgtggtctaaatttgcctggaggtgggggaaactttgccagggcaccaaggacttgtagtagacttccactgtggagtagaaggagctaccctttgtctgaccacaaggtggctctgcaccgtgggctgactcactggctgaatgactccaaagagtacccatatctaatctccctggactatttgtgttcctttccttgttccttctgctggagcgggactgacctcttaataaagtaattatg

SEQ ID NO: 201698 - DNA, 1000 bp, Homo Sapiens
cgtctcggccagtgagaagggatattacttccacactgaaaatcccttcaaggactggcctggagcatttgaagaaggcttaaaaaggttgaaggaaggggacctgcctgtcaccatcctgttcatggaagctgcaattcttcaggaccctggagacgctgaggcatggcagtttcttggtataacccaggctgagaatgaaaatgagcaggcagctattgtcgccctccagaggtgcctggagttgcagcccaacaacttgaaggctctgatggccttggctgtaagttacaccaacaccagccaccagcaggatgcttgtgaggcactgaagaactggattaagcaaaacccaaagtacaagtaccttgtgaagaacaagaaaggctctccaggcctcacacggcggatgtctaaatccccagttgacagctctgttctggaaggagtgaaggagttgtacctggaagctgcccaccaaaatggtgacatgattgacccagacctgcagacaggtctgggagttctgttccacctgagtggagagttcaatagagcaatcgatgcatttaatgctgccttaacagttcggccagaggattactcactgtggaaccgtcttggggcaaccttggcaaatggagaccgcagtgaggaagctgtggaggcctacacgagagcactggagatccagccaggtttcatccgctccagatacaacctggggatcagctgcatcaacctgggtgcctacagagaagcggtcagcaacttcctcactgccctcagcttgcagaggaagagcaggaaccagcagcaagtccctcaccctgccatctccgggaacatctgggccgccctcaggattgccctgtcgctgatggaccagccggagctcttccaggccgccaacctcggtgacttggatgtcctcctgagagctttcaaattggatccttgaaggaaaagaagacaagaataataagggatactaatgtgt

SEQ ID NO: 201699 - DNA, 860 bp, Homo Sapiens
cgagtcagtaactgccatcagtaaagtaagagctctgcagggtctgggatgatgagaaggaagcggccaaggattttgggaagtctacgcaatcctgttccccctaaggatctttctctgccctctgatcaaccaaaaaacattcatttcttcccacctcagactcccatgcctcagcctacctttcgtaccaaccctcttttcgttttctaccctacctccttccctgccctgaggaacacttcctacttccccaccttaatgattgctatgcccagctcctcctgtgtaaacaaactttcctctaagcacccctcttatttccagaccccttccttcctgtctaccctcatgtctacctcttctccaagagcactgctggatagttgcctagttcctctttcccatctggaaactagctactttcagccagaggagcaaatccttcaggaactgaacaagatttctctagacccagagcttaaaattggaggaagcagatatgacctcacatccttggtaccagggaatctgcagccagggacagagactggaaatcatgaagtggaagatgctcaatccctggatgatcttgatgccttcactcaggaaacactggacagaatgaattgtcattggtcaagaacgcaagttttaccaaataacatttcgggatggagaaaccagagggggaaactgaagtgacaggacctcaggatttctaaataacttcaggaccgaaaataatgccactatccaaaaagctaaaatatgatatctgggaaagatggtcatcagaagcagcattcatcccatgtagccattccatggataaaataaacaaagtggacatggttcac

SEQ ID NO: 201700 - DNA, 523 bp, Homo Sapiens
ggccataggccggggcctcgcctgcctgcccggccggccgggaactggggctcttcgccagggcggcccagtaacgcgcgccgccgccgcttgcgctccatcacccaaggggctcagacaggaaagcgagctgcaggctcgaaggtgaaagaggctgggtcgccccggaacgcgtgatgctcacggaaagatgagcctatcgcctttgtgtggcggatggatatgaactgcagcccaaagacagaaaaacatcaacaacaacaaaacaagataaaagagaaaacaaaaacttccccccaactcttgagtttcacggaacaatctgcgatagcaaacaagattctacaggtttcatgttacctggaagcaaactattagaaagctggttgccttgcttcctgtgaaccgcacaagggaacctgagaggaggaacctggctccatctctcagggtcacggggacttgtggcttttgtacttaagaaagttatcagaccagttgattacaccatcacaatgattgc

SEQ ID NO: 201701 - DNA, 638 bp, Homo Sapiens
gatgagtgccataggacaacttagaagaaatgaagtggcctgaagtgcctgggccaccaaatctcccaaatgagagcaaaggtgcaccttaatatgtgtaacattttttgtgaaagaaaagaaaaaactagagggaagaatgaagattagtaaagcagagcaaaacagggcggggaaaggcacccagcccaaccttaaccaggaagttaaaaagtcaagaaaggtctaaatgccgggattccctgggaactgagcctgggccatcgcgctcctgtagtgtccacttcctcctcttaaaatcgacaccaaaaaagccttctttaatcaaaagaaaaaaattgaacttgataatttgtgtgcgaagaggatcaagggacagacagaattaagcaaggacagcggcaatacagacaagtagcaaatgtgctgtctgggggaagctgctgtccacaggctacagtctgaggaatatcgacatcagtgattatttttttcaacttattcaacctctttatttttatcagtgcctccttaagaataaagagttgtcaatactgatgtttcacacataataaaaccaagaaaatcacatacacacccctttcaaaacttcaaataaacagttcgatgtttggtgc

SEQ ID NO: 201702 - DNA, 698 bp, Homo Sapiens
ggagaagaaattgctgggcgtccatgggcaggggaggatgagcgggaagcagcagagaagatggtgtagtgcccattggatggaaaattgtggctgttttgatggttagaggttagcatgcccttctgaataactacccccagtcagcacatgactgagggccgccctgttgagactgtgggaatctctagtcaaacgtttgctgcgtagctcagaggcttgatttcacactgttgagagcactgccctgttctctaggtgtggggtagcccctgcagtgacaacccgaaggaacacaaatacacagaaccgggcacagtaatgaacttgaagcatagtcaaagacgccgtgaggatgcaggaagcctctctgcccccagtcccaagaatatggacatactgtgttcagaaaagtgttcaatttctacacttcctgccctgggtatttgagcatctatttcctagttgaaaacccagtagcctcctcaccagcttcagcatccagatatgatgtgcttgcattcttctggtcttcttgtagcctgaactcattccacctccccacaacgccaacatttcacttcttttatttggaggaggacgtttggaagttgtgtttctggaaatgttttgtatttattttcccagtaaacttaagaaaacttaaaagtaattaaatgttttttccttttgaaaag

SEQ ID NO: 201703 - DNA, 638 bp, Homo Sapiens
ggactcagtttcttggcttcctctctgcagaaggagataatggaagccctctttcaggcagggtccattcttatgaaggtgaataccttacagggcaagaagatggtggaaagcgggctccagtctggggacctttccctgtctcagtcatggccctcctacctccctctgccggccgacttggagatcctacagcagaaggtggccggggtacaaagggagttggaggacttcaaggaggaggcactgaaggccatccgttacttggaggacgccttctgccagatgagtggcgtcctggcacagcaggaggagcaggcggcgcgagtgaagcagcggctgagggaggaggaggaccgaggcatcgtccgcaacaaggtcctcaccttcctcctgccccgggagaagcagcttcgtgaacactgccagcggttggagaacatgttggtcaggagccacaacccgctgcgagccatcaggaagagccaggcggactgagcggcccgcgcccgagtgtgcgcccgagctggcgggcaagattgttttttaatggaaggacaaacgctaagtccccatttattccccttgccccatttttattgctttcctgctaccaaaataacaccatgcagagaggc

SEQ ID NO: 201704 - DNA, 936 bp, Homo Sapiens
gagtcgcgggcgcggcgattgccgccggcagacgcgcgaagaagcgggaagcaggctggtggcggcgcagagagctgcgcccatttccatccgcgcccgccgcccgccgcaggatcacgatgttccggatgctgagcagcagctttgaggatgaccccttcttcgctgattcttttcttgcacaccgagaaagtatgcgcaacatgatgagaagtttctctgaacctcttggaagagacttgctcagtatctctgatggtagaggaagaaccataatcgtcgagaacgtgatgatggcgaagattccttaactcatgcagatgtcaacccttttcagacaatggatcggatgatggcaaatatgcgaagtggtatacaggagttacaaagaaactttggccaactttcaatggatccaaatgggcattcattttgttcttcctctgttatgacctattccaaagtaggagatgaaccaccaaaggtgttccaggcctcaactcaaacccgaagggctccaggaggagtaaaagaaaccagaaaagcaatgagagattctgacagtggactagaaagaatggctgttggtcatcacatccatgaccgaggtcatgtcattaggaagtcaaagaacaacaagactggagatgaagaagtcaaccaagagttcatcaatatgaatgaaagtgacgctcatgcttttgatgatgagtggcaaaatgaagttctgaagtacaagtctattggacggtcaggaaacactggaatgcgaagtgtgggtcatgagcatccagggtcacgggaactcaaaaggagagagaaaattcatcgaaattcagccattgagagtggaagaagatcaaacgtttttgtggacaaactcaatgtgaaaggatcactgtgaaaatcaccaaaaaataaatagccctgcattcc

SEQ ID NO: 201705 - DNA, 932 bp, Homo Sapiens
gactcagccgagcgctgcagtgcgaggagcagggtgcaggcagcactggtccagtcttgctcctacagccccagcatgagtccatctacaaagaagaggccgagggataaagtgccttctaagatgcaagatgagaaactgcaggacaagataacccagcatgtgagcaaagtgattgagcggaatcgacttaaaatggtattaaaaaacttgtccctcttgaagctattcaagagctcaaatagccggatccaagaactccataagctggccagaaggtgctggaattcaatgctcagagttccaaagatcctgcaaatctcttctagggacaaggacaaagtgaaacaaaataatataaaattccaagagattagggtccttgaaatgagaccaaattctaagaaggcagagtccgtaaaggaacccaagcaaaaaacatccaaaaagtggaagcccaagcaaggatctaaggggtcacctgcagccgtgacatggagaaaaaagcaggaaacatttaaaatctccaaggtaataaagagtggtggcttgcaagccagggcccagaagaggaagacctacgttaagaagccccgagttgtcttcttaaagacctaccatcacagcactaccatggggaagatgaaggcactggatataactgaccagttggtctggtttgaggggcttcccacacgcatacacatcccagggcgccggatcatgtgtagatcgtctacctaccggtgcctcaagcgctcctgcacccgtttctgctgtgcatcactctgagctgcctacgtaccatccacactaggtggtgtgtaaccctagacgggaacttgaattgtaagaagtagagatcgtgctatcagcttagtggaagggataggcaagacagtcgcaagtctacaaataaaatctcccctatg

SEQ ID NO: 201706 - DNA, 1000 bp, Homo Sapiens
gcttttgtgctgtggctgctctcaccttacaccaagggggccagcctgctttaccgaaagtttgtccacccatccctatcccgccatgagaaggagatcgacgcgtgtatcgtgcaggcaaaggagcgcactatgaaaccatgctcagttttgggaagcggacctcaacatcgctgcctcagctgctgtgcaggctgctaccaagagtcaaggcgctctagctggaaggctgcggagtttctctatgcaagacctgcgctctatccctgacacccctgtccccacctaccaagatcccctctacctggaagaccaggtaccccgacgtagaccccctattggataccggccaggcggcctgcagggcagtgacacagaggatgagtgttggtcagacaatgagatcgtcccccagccacctgttcggccccgagagaagcctctaggccgcagccagagcttgcgggtggtcaagaggaagccattgactcgagagggcacctcacgctccctgaaggtccgaacccggaaaaaggccatgccctcagacatggacagctagagtctgcagattgaggccaccttacctctggagccagcgggggacctttcgctgctacaccagctaccggggttctgctccgtctggcttgtgcctaaatggcacatggcgtggtaccctgcacagggagacattcactataccaaagcagcccaggcctggggcctatttattgccttcctctgccttttactttctcagacacgggaccagagccccaccagtccctaccgacgaaaccaaaagtccaaccagctgtgttcattccttcttgtccttcaaaatacttgacagccttttccaaggcctggtgtgtgtgtgtgtgtgtgtgtgtgtgtgtgtttacgtacactagctgcatgtttcgtgttggtgagtgaggtcaggcttatgaatatttttatataaataaataccaaacagtgtttggcctctcct

SEQ ID NO: 201707 - DNA, 948 bp, Homo Sapiens
gagcattctggaccttttgacggaaaagccaggatggggatggtgaattctcatagcatggagtagtggacagtgggggtagcggtgtctggggttgagaagaccgtggagagatacacagaagtgtctccagcttccagaacattctatatcactagaggtgctcaggcaatgtgtccatcgaatctggacttcagccaccctatggtaccctttacaccattcatctacctaaaagatctgtgtgtgttcttgggaatttgacatcaaaaaccacttctaatccagagtttatggtggagagagggaccctacaggcagctcatggttcctactctgctggttctctagcagcacccgcgtgtcctccaggtcccaagtgaggtggtgacacttcctcttcagctgctctgtccgggccttcatctctgagtccaatctctcctcgcactgttgaaggcgcttgcgtaggaaatcgttctccatctgagcacagtccaaacgcatctgccactcgtctgctgtgtgacagagtcggcagctgcctccattcagcaggagagaatccacatcatagtgggaactggacaaagatgtcccgatcccatccaaccatgaatgccaagtccctaggcagtggcataaccagtgcactgatgctgcctgcctctcactgggcagtcactctgagagtcagcctcaacttgatcatgtatgtgaaagcatgcagagcccgtattcctcatgaagaggtagctgatggctatgggttagtctactccatatggcccagctctgcttgttcatcatctaggaccagctacacttgaatgtgaagaatctggggctcagggtgactttgaatagcatggtatgattcaaatacagaggggaaatttaaaaacctggactccactgtcatcttcatcaaatagaagagaatgtaac

SEQ ID NO: 201708 - DNA, 635 bp, Homo Sapiens
cgagtttgttttcttgcttgggtccctgcaggttaaaacaagatgctcctccctaggttattataaaacccagcaactcgacctcccgtaaggagatctgggctttcagaggagaagctgtgtttctatatgatgtcaatgtttgaagagtttggacagtgtttgagctgaaaacagaattctcctgagagctttccatggagacttctcatgggaggagatgcttgggggtcccagttgttgcagtcacggcgatttcaatatccacaatattgtcactatacactgcgttgacaacgccttggtgacatcctcggtcccagctgctgctgactgacagacctagagaggcccatctactggggttcgatctgaagaaatcgatggccgaaaaatcacgcaaggatgaggatgtagacaaagaagactcaatatcgaagcaagggcaggcttcctcctgccatgatggcttgtcccagttccagaagcacagacacctgaccagcaactgaaacctttgagacaaccgggagccacacaatggaaagctcggcttctaaatcagacctccaagtcctgatatccactcctgcctcatgcactgaaaggaaataaaactgtgattcatgtaatgt

SEQ ID NO: 201709 - DNA, 1000 bp, Homo Sapiens
ttgccttggtgttcctgggctttgggttctgttctatgatgacttgttttctcctggatagtcccagagcaaggcaccagcagcgtggagctacctcatagcaatgtgttagctctcattcatgttagaccttgttcctagccagccttgctgtgagttctgaaacatagcacagggtaagccacggcctgcccatgaggcagtgagcctacttcacccggagacccctgccctcagccttcctctcccctctactgctcaggggctatccaggtggtggtggcttctcggagtctctgctggggcatgaacgtggctgcccacctggtaatcatcatggatacccagtactacaatggcaagatccacgcgtgagtacaactggtgctctgtgttagcacagacctccttcctaaaatgaatgtgaatctgcagatacacagaaagtaagctaggatgaagaaaaggtgttagggaagttaacagctgagatgccaccagagccaagtgtttgagagttttgtgtctcaatacctaggctcacatttgctttttagtcattgtgcttccttattcagcagctgggagaggtaggaaattagagccaggaggaatgtttgacgttacgtcattaatctcagacatcttgtagattaggaaaagtgacttggtcgaggtcatacacctatatagtgacaagtaagaagctagaggagtgccgagcgcagtggctcatgcctgtaatcccagcactttgggaggctgaggcgggcggatcacttgaggtcaggagttcaagaccagtgtggctaacatagtgaaacccccgtctctactaaaaataacaaaaattagctgagtgtggtggcaggcgcctgtaatcccagctacttgggaagctgaggcaggagaatcagttaaacctgggaggcagaggctacagtgagctgagatcccaccattgcactctagcctgggcaacagagtgagactccaactc

SEQ ID NO: 201710 - DNA, 1000 bp, Homo Sapiens
caaggagagagagcacagactagaaagtaatacaagcagaaagaaggatgtcagcccatgtctgtgtggtagaggtcatctttccatctcactgggattgtccctgaaagtgtctcactgcttaggtctccttgcctgtctaaggcttggagaccttccagtatctcatgccttattctagatctgcttttttccccgaggtgaaaaaacctgttcaaatggtcactcacaacttttgtggccttactttttgtctccgaaaggacaaacatatcagaactaacatccacccagaagaagggctgatcagttcctttcaacacagcatggatgaaaacccaggttagcgttagtgcttcttgaattggaagtattctaacctctatgtacctaccaatgtaagaactgagggcccttttaagggaacttacattcctaaagttcaagtcaagttgtcatgaagagtacttaatgaggcatacttttaatctttgaatcgtagtgttgtagggctaaaagaaacctcaggccaggctgcatggtggctcacgcctgtaatcccagtactttgggagaccaaggcaggctgatcacctaaggccagtaatttgagaccagcccaaccaacctggtgaaaccctgtctccactaaaaatacaaaattagcctggtgtggtgatgcatgcgtgtaatcctaactactcgggaggctaaggcagaagaattgtttgaacccgggaggcggaggtttcagtgagccgagatcatgccattgcactccagcctgggtgacaggagccaaactccgtctcaaaaaaaaaaaaaaaaaaaaaaaaaaattagccaggcgtggtggtagccgcctgttgtcccagctgctggggaggctgaggcaggataattgcttgaacctgggaggcagaggttgcagtgagccgcgattgtgccactgcactccagcttgggtgacagagccagactgtctcaaaagaaaaaaagc

SEQ ID NO: 201711 - DNA, 1000 bp, Homo Sapiens
gtggcgtgatcttggctcactgcaagctccacctcccgggtttacaccattctcctgcctcagcctcccaagtagctgggactacaggtgcccgccaccacgcctggctaattttttgtatttttagtagagacgggctttcaccatgttggccaggatggtctcgatctcctgacctcgtgatccgcccgcctcagcctcccggagtgttgggattacaggcatgagccaccgcacccggcccaaaataacttgagaaaacagatcgctctgcagtttaaagaagtattatgtacccgaactgaaatagatatactgttcttaattatcctgaatcataatgaagagtagataatccaaaatagattttttaatcattcacatttagtttggggtgttctatgtttgttaggaataaaactggttctaaccaattactgaagctggtactgggaggattcaactagagaggattcaaaaagctgcctttttctctgttgcctccgtgccttactcacatttagtttagggtgttctatgtttgttaggaataaaactggttctaaccaattactgaagctggtactgggaggattcaactagagaggattcaaaaagctgcctttttctctgttgcctctgtgccttactcactcgtctccttttcctcacttcacactaggactgggtaccatcacactgcagtataattccaaatgcatttccaagctaagtttcccagcgtctgattgtgctttccttttggcctttactttcattgggggtgattgaggtagtctgattttttagctaagtctaaacttaaggctattatttgtctaccagctagggttcaggctgcattccctgtgagtccttagataaggtctgtgaaagactgaaagcatctcctatttcattaagaatgaaatgatttgtttggagtataaggagattgataccttgtatgatgtcataaactgtgaagccacttgctttt

SEQ ID NO: 201712 - DNA, 1000 bp, Homo Sapiens
cttttatattgttggcccctctctcccaaaaggtaaatatgacaaatattacgaatgtttggctgggattacaggcatgagccaccatgcctggcatcattattgatttatgtcattgttatccctctaccgcagagaccttctttcactttccatttccctgggagttcacgtgaagtagtgaatgggtcaaaatcttaacagtggttgttgatcaagcccctcctttcttatccttggcactgaataaatctttggttttccataatcaaagggtgagggagacttcttttgtctacattattcagctttctgaaagctatgctgtgtccatttgagaaaaagccccagggatattgaaggtctgagaagttgggtggttcagtgtgttattatatttagggtcccagtaaagaagaactgaagcaactgtgagacaccagggcatacttccctgtatgagtggaaaacaaggcacggaaaatagctcacaggatagtcctcaactgacttgcttgaggataagcagcttcccttcgtgaagaagttgccatttctctggccttcatatttatctactttttgttattgttgtctgtatcggttcaatctcacactgctataaagaaatgcctgagactgggtaacttataaagaaaaaaggtttaattggctcatggttccatgggctgtacaggaagtatgactggggaggtctcagggagcttttactcatggcaaaaggcaaagccagagcaggtatcttcacagggctagagcaagaggaaaagagagaggggaggtgctacacactttttatgcaaccaaatctcatgagaactctatcacgagacagcagtagggggacagtgctaaatcattcatgagaaactacctgcgtggtccagtcaccttgcaccaggccccacctcccacattggggattacaattaaacatgagatttgggtggggatacagatctaaaccatatcattactc

SEQ ID NO: 201713 - DNA, 1000 bp, Homo Sapiens
agggagagttagacctccagacgtcagcctccctcccatggggtacattttcaatctgagtgttgttgccttagctgtgttggtattagcttgattggttggtccgctggttatgaggtgtagggaggcagtttttgtttagtttttaggactttgcctcttcctttgtccttagcataatttctaggcagagcatccacgaagtcggttttcattgccagctcaagagcgacaatcatttacgagttcctatgttatgttaggtgccttatgtatattatcccaaatccactgcatggtttaaatacaggcactggaatataaatgaaaaaggtcattacagtcactgactttctgcaggaccttaaacatttctctttccacaagtttccccttaatcatgtgtcaaacctctcttcctgacgggaatgttgtgctataatgaatctgcataacgcttgggattctaggaggaaggaaggttccatggacatgtaagtacagcatattcccctcagtcttctaggagggcagagtgaatcccagaactggtaagattgggaatctgagcattgccactttaatcttagaatatttatcattttgacacatcctgttttttagagaggaaaacaaacacagtttctgcattggtagtgtaaagcataccttgttaggaacgtgttttgtaagacacatttgggttgtcattctagagcatgtcaaactttgtacttcaaaatatatttagtatgattgttagtggtaacatatatcaaggctttgaattaactgttttatttaattttcacaagaagcacttattttagccataggaaaaccaatctgagctacaaatagttctttaaaataagcccaggttatttagctattctagaaagtgccgacttctttcaagaagcaggcattgtaggacagctgagaattatcacatagcctaaattctagcctggcagcaagagtcacatctgagatgtcc

SEQ ID NO: 201714 - DNA, 1000 bp, Homo Sapiens
tctaaccagtgcatagtatttctataaaacagggagcctgttattcttttggtattagcttccagagaaactaacaataaaatatctaagatctaagtagtacattaatgttaaagagtagatttcatctcctggcctttagtttatattcagtataaggaaaatagataaaactctaaattaatagggggctaaggttacaaaacctgcagtctggttctaattctgtagtaagcttgagcaattcactaattatcagggatcagtttttgcatctacaagtggtaggttttggtttagcagagctgtagttcttcccttccatttattattttatgttcatgcaacctcttgtctcttgatttcagagaccataaaatagtagagtcatacttgtttttttcagtcttctccttcctctcttgtcccccaatttctttttggtgaaagtaagtcagtattcttggggtaaacccagcttttttcttgctataaattgaaaaaaaaaaaaaaaaagatatatcttctcaaattcctgagaagcagtaactttaattgaataatagtgccctctttgaaagtgttaaccttttggattagaaaactagtagatatttaaacagtgccagaatatttttctgaagaattgtaatttcttacctaagtctttggagatagagttatttgctagagatgtaataagggccttctttttctttactcttatttagaaaagaaaagcattggcactttgatcttgaaattaagaattttcttttctttgggtagtaatatttactggaatgtcagaattttgccactgaatgccttctttcaatagcaaatgctttgaaagggttgtaaaatgttggcgtaaattagccaggtgtggtagctcacacctgtaatcccagcactttgggaggctgaggcaggcggagcacttgaggtcaggagtttgagaccagcctggccaacatggcaaaaccccatctctact

SEQ ID NO: 201715 - DNA, 1000 bp, Homo Sapiens
aagacaccaaggggttaatcccagctgagataaagagaattatggagctcttaatgacgggcttttactgaatgagagaaactactgtggttcgagcaatgtacaaaggatatgactttatatatatttcctttaaagaccacggggttgtcttgtcacccaggctgcagtacagtggcccaatcatagctcactgcagcctctatctcctggcatcaagcaatcctcccacctagggctctcaaatgctggggctacaagtgtgagccactgcacctgacttaaaattttaaaggaacacattggctgtagaagaaaaggtggggcaatgattaaaacactttcccagagattttaattggcttggagtgggtgaagacaataggatttgctcttgttgtccaggctaaggtgcaatggcacgatggctcacgcctgtaatcccagcactttgggaggctggggcgggtggatcacgaggtcaggagttcgagaccagcctggccaacatggtgaaaccctgtctctactaaaaatacaaaagttagccgggtgtggtggtgcgcgcctgtaatcccagctactggggaagctgaggttgcagtgagctgagatcacaccactgcactccagcctgggcaacagagcaacactttgtcaaaaaaaaaaaaaaaagtctacagcataaacatctttaggcatgcataaaaactaattttggcctggtgcagtgacttgcgctataatcccagcactctgggaggccgaggcaggtggattacttgaggtcaggagttcaagaccagagtgaccaacactgtgaaaccccgtttctactaaaaacataaaattagctgggtgtggtggcacacgcctgtaatcccacctcactcggaggctgaggcaggataatcgcttgaacccgggaagcagagattacagtgagctgagattgtgccattgcactttagcctggataacaagagcaaaactctgtctc

SEQ ID NO: 201716 - DNA, 1000 bp, Homo Sapiens
ctacttttcaccattatgatttttaccatatccacctgccagttttacagttgataaatgcaaggctggggaacaaagtgagaccccccatctctacaaaataaaaatttctaaattagccatgtgtggtgttaaacacctgtggtcccggctgcttggggctgaggcaggaggattgcttgagcccagaggtcgaggctacagtgagctgtgactgagccactactccagcctggctgatgaagcaagaccctgtctcagaaaaaaaaaaatgtagctcgggcacagtggcccacatctgtaatcctagcactttgggaagccaaggtgggggaggattgctcaaggccagaagttcgatacctgcctgggcaacatagcaagaccctgtctccacaaaaagtttagaaaattagctgggcatgtggcacatacttgtagtcttagctactcaggaggctgaagccagagaattgcttgagcccaggagtttgaggctggagtgcagtgccacgatcatagctcactgcagcctcaaactcttaggctcaagtaatcctcctaccttagcctcccaagtagctgggactgtagacacatgccaccaggcccagctgatttatttttaaattttttcaggggaggtgggatcttactgtgttgcccagactggtcttgaatttcctgcctcaagcaatgctcctacctcaccctcctgagtagccaggattatagctgtgagctaccacacctggcccattttagtttttaaatgccactatgtaatgaggcatttaaatttttttccgaaaagtcaggaaagaaggacttggagcacatacctgttacgggtttaaagcctactttagtcttggccgggtgcggtggctcacgcctgtagtcccagcactttgggaggccgagacgggcagatcacgaggtcaagagatcgagaccatcctggctaacacggtgaaacctcatctctactaaaaatacc

SEQ ID NO: 201717 - DNA, 1000 bp, Homo Sapiens
actccactaatatcaatcactgtgttacttaatcccagggagaatttttaggacattcttttgcttctttaatataatcctattttgctcctaccactgaccatcctttctggcttatcatgctttaccttgccattaattagtggagtttctcaaacttcagaccctaggccctcttcctctaccaccagcagatcccatttatacccatggccttaaggtttatttctgtagtttagactactgagtaatgtgctactgcaaaaagaccatttgggtttctcaaaggtaatttaaaaattcagctgtttaaatgctgctccccagctgaatctagggtcattatgctcatcagtgtgcaagctggacacctagcagttatggacacctccactattaccacgtctagttggctctgtcatccaactataaacgatcttatttcactaattttactagtccaagctggtctcttgtctagacaacaataagcaacctagttcaactaccttttcttgcaaatctgattttccaccatggatttatcttgctttaataaagccagagggagcctgaagtggtctggcttctttacctacctcttcagcctcattttgtaacactctcacctcccataatagccatcttacaagcctcagtaaggactcagttctaaaacagggcactgaagagggaaagcagccaaaactgtctcaaaagtaagtggactaacggtatcttttttctagcccaagcctctgtatatgtcattcccccagttttgccttgtgaaaaatatgacacatacctttagtctcaactctttctcaggtttccctaagaaaatcctatcacggaactcatctcatagtgaagttttacatttgtgatgacattccctccacttatctatgtttccaaagggaagaactgtgttgtgctcatcatcgtgttctcagctcctagtacagtgctttcaataaattttttgaatacctct

SEQ ID NO: 201718 - DNA, 1000 bp, Homo Sapiens
atatggtgaaacccagtctctactaaaactacaaaaatagccaggcatggtggtgggtgcctgtaatcccactcgggaggctgagtcaggagaattgcttgaacccggaggtgaagattggagtaagccaagattgtgccgttgcactacagcctgggcgacagagcgagactccatataaaaaaaaaaaaaaaaaaaaagctgggcgtggtggctcacacctgtaatcccagcactttgggaggccaaggtgggcgaatcacttgaggtcgggagtttgagaccaggtgaccaacatggagaaactccatctctactaaaaaatacaaaattagcccggtgtggtggcgcatgcctgtaatcccagctactcgggagactgaggcaggagaatcgcttgaacacgacaggtggaggttgcagtgtggcgagattgcaccattgcactccagtctgggcgacaagagggaaactccatctgaaaaaaaagagaaattcttttattttctacttctcttcagatttgtcttatgcattttccaactatgtatgcatcacagctattctttttctgagttatagctacagttttcttactgttgtcttcatgccatttcatttcacatggtactttgtagattttgatgaggaagttggtatttttagtgcacacaaaaattggttttaactgtagagtttgcttatcagaacagttaaaaggcagccaggtgtggctcacgcctgtaatcccagcactgagataggtcaaggagggtggatcacttgaggtcaggagtttgagaccagcctgaccaacatggtgaaaccctgtgtctactaaaaatacaaatttagccacgcgtggtgacgcacgcctgtaatcccagctactcggaaggccgagggagcagaatcgcttgaacctgggaggtagaggttgcggtgagccgagactgggccactgcacttcagcctgggcaacaagagcgaaattctgtct

SEQ ID NO: 201719 - DNA, 1000 bp, Homo Sapiens
acaatcttaaacactctggataagatgagaataaatgactccactgaaatagaagtctatgccttttaaagtgaattagtacaaaaacatttgctgtggatatgatcttaaaggattgttttaaccaagtttgtttctatttcattacagagctggagctagtggaagtgagatagcacttgtgctgttggggaaaacaaaggatatgtttaatccgaattagtggattactttctagtgtatttcatagtgttagagtctaaagggtatgtgatagtagtcaggagatcaggattatgaaactggggctgccacttgtgtgaccttgtgtgtgatacttgaatgctgtaggccttcatttcaaaagcgagggggttggaatagaaacctctcagaccctaaatgtgtaagactccaattctgtggctaggcctggtaaggtaaagagtagcagaatatatcaagaactggaagggattagagagacctattatctaaattgctgtccctcctttgccccttgccttcccttttttttttttttggtgaatttcatatgtaaatttaaaaaatgcagattagttataatcacactctgtttattataaatttggtcacatctaagtgccatggtggtagttactccttccatctctacttctgcatgggaaacattttgctcctttaactttgaaaatatgagggtgtaaatatacaatactataagaatggtgcttctgccaggtgcagtggctcatcctgtaatcctagctactcgggaggctgagacaggaggatctcttgaggccaggagtccgagaccagcttgggcaacataacgagaccatgcctctaaaaaaataaaaataaaaaaattagccggccatggtgatgcacacctgtcatgccagttacttggggggctaaggtgggaggattagtgagctgtgattctgccactgcattccagcctgggtgacagagtgagaccctctctctt

SEQ ID NO: 201720 - DNA, 1000 bp, Homo Sapiens
cccagcactttgagaggccgaggcgggtggatcagtagaggctaggagtttgagaccagcctggccgatatcgtgaaaccccatctttaccaaaaaatacaaaaattagcccagtgtggtggcaggcacctgtaatcccagctattagggaggctgaggcaggagaattgtgtgaacccaggaggcagaggttgcagtgagcctagattgtgccactgcctgggcaacagtgagatcctgtctacaaaaaaaaaaaaaaaaaaaaagtgcatctggatttttttatacaaccttaaaccaccttctttagctttaggcgtctgcggttgcccttggatctgttctcaatcctcagtgtgtgtggcagcatgtggtcatagagagctgggcaaagttcactttctctttgctgacagtctcaccttttctcactgggaagctgcacaggagcctttgggctggttcagcccagaggcccctgttctcctgccttcctggcattctctgctccccttctgcatggcacccctctactcctgccaggttagaatggagcagaggcctttgaacaagatgacatttgtagacaacctgatccatcaggatgtggagagatctggacaaatggcaaataatttggggttgaattatggcccagagaagtaagcaaatgaaaaactaaacaattataaatgtatctgggaagcaaaggtattcataatatgtcccatggccagctgcgagcagtatttaactagacatgctgttgtcaatattgaacatgaatcaagccaaatactgatatagctattgagagaaggttggcaggaagaaatcatgggtgagggtatgtgggagtgataatcttagctatagattttaggtaaaactgattctgaaagctttctttgaaacaaatttataatttttcttctacatgtttctagcacaaggactcaatttttttttggttataatgttcattaaaacatatgccttc

SEQ ID NO: 201721 - DNA, 1000 bp, Homo Sapiens
aaattgaaagatatatattttagtcgatttttcaaaaggggaaaaaagtccaggtcagcataagtcattttgtgtatttcactgaagttataaggtttttataaatgttctttgaaggggaaaaggcacaagccaatttttcctatgatcaaaaaattctttctttcctctgagtgagagttatctatatctgaggctaaagtttaccttgctttaataaataatttgccacatcattgcagaagaggtatcctcatgctggggttaatagaatatgtcagtttatcacttgtcgcttatttagctttaaaataaaaattaataggcaaagcaatggaatatttgcagtttcacctaaagagcagcataaggaggcgggaatccaaagtgaagttgtttgatatggtctacttcttttttggaatttcctgaccattaattaaagaattggatttgcaagtttgaaaactggaaaagcaagagatgggatgccataatagtaaacagcccttgtgttggatgtaacccaatcccagatttgagtgtgtgttgattatttttttgtcttccacttttctattatgtgtaaatcacttttatttctgcagacattttcctctcagataggatgacattttgttttgtattattttgtctttcctcatgaatgcactgataatattttaaatgctctattttaagatctcttgaatctgttttttttttttaatttgggggttctgtaaggtctttatttcccataagtaaatattgccatgggaggggggtggaggtgggaaggaaggggtgaagtgctagtatgcaagtgggcagcaattatttttgtgttaatcagcagtacaatttgatcgttggcatggttaaaaaatggaatataagattagctgttttgtattttgatgaccaattacgctgtattttaacacgatgtatgtctgtttttgtggtgctctagtggtaaataaattatttcgatgat

SEQ ID NO: 201722 - DNA, 1000 bp, Homo Sapiens
ataaacaagacactgccacaacatcttgtggttctcaatgccaggatacaatgagacatcccagagtccagccctgaaggggttttcgcatcctctgagactggaatcagaaggtgtgaatagaaatggaagcagtggcctgtttcatccccttctctcccctcccctgtcccatcttttttcctcagggctctgccgacccattctgctgtttccgtattcccttcacagcagctcccatcctctactccttcccttgtctacctctccttgaaggaggagcctttccaatacacccttccctgtgactccaaccttggtaaagtcaccaaccagctggactcctccagacagctatacacttgcagcccaaggctgggagtagaacatggctctgtgccaagctgcagctgggaagagactggcaatgaaagggactgatttgggctgggaacaaaacagcctcaaatcaagggcactggacacagcacagacaatggcatttgctaagctgccaggggctcttggcaagagccacatttctttccactttattaactcccttgaggagggataagccagggctaggatcctgagcaacacatgccctggagaaggcccgagataggatacccagagcctgtgcagccccaccctagagccttccagcctcccaggcttcctaaacccattttcccaaccagtgcccgtaggcaggactatgttccatctgagccatggctgtcatctccctagtcactcatccactaggttccctagaagtgcaggctgcaaatgtctatcccaaatcctccctaccatagcaaagtaggatctccccttggtgaacgtcagctagagctgccctggaccatgccacactggctgtaaagggctttttcctggtctggattacatagaccaggaaaaagctactgcactctagcctggatgacagaaggagaccctgtctcaaaataaaaaataaaaaataaaaaat

SEQ ID NO: 201723 - DNA, 1000 bp, Homo Sapiens
atgcaataacagtattttaaaattgttcaaattatatagaattctttgcagattatgttagagaattcattacaatttaaattcattttattatcaaaattattctttgttttttggtattacataatggtcttccttataatggagtgttttacttctatttatagaatatagagaatgttgtgtagtttgctgttttatttttttaaagaactatttttaacaaaaatttgattcaatgaaatgtaattctatttcctgaataaaacgtaaaataaaacataattttttaagaaaagctttaaaaaaacgtaatttttttaaaaagctttctgttattgagttgtattgagtatgatattttaatcaaaaatttgaatttaaaaataatcttttctaagattgagtttctcttaagtcataaaatattttactgcccccagatgagcaccataattttaatgtcacaataaattagaaaaaaaatggagaaattccaggttgcaaagccagatctgatacaaattttgcctgatgcctttatcattaccttacacttccacctagcctatgtgcctcaacaggatagacatgtgacatttttctttggaaatttgacttagtcttttcaatggtgtccctagtttaacacaacatggaggcaaaatgttttctagaaggatctcaacttacccagggatgcatttctcttttgcttctctgtttgtttgtgtatgcatgacataatgacctttttagaaaatagatgtttattataaaaatagcatctggtatcctctaacattttattgcataaagataaattagtttaattttatataatatattttaacttcttcccaatggtgatggccttcttcaatatttaataaggtaaaattagcatagtattacaataacaattgcgaataatcaaatatgccctaagcagtgtttttttcaatatcagggctttgtctctcttctcttgctcttttgt

SEQ ID NO: 201724 - DNA, 1000 bp, Homo Sapiens
ggccaagttttattgaggcatcatttatagtagcaaaacactggaaacaagctaaatgttcattatagaagactggttaaataaaaatttgtccatcgaagatggagtagcatgtagttattaaaaaagaataaggaaaatactgatagaggatgatgtagatattaaatggggaaaaaagtaaaactccacaagatgtagaacagtatatgtgttttgctgccgtttgaggagaaaggagaaaatacagaaatatttatatgttgcttatgtatgcatacaacatttgtggatggattcacaagaaaatggtagccttaatttaccttgagacaaactgagggacaaggacaccctttaatacctttcagatatttttttttttttgagacagggttttgctcttgttgcccagcctggagtgcaatagcgtgatctcagctcaccacaacctccgcctcccaggttcaatcggttttcctgcctcagcctcccaagtaggtgggattacaggcatgcgccaccacgcctggctaattttgtatttttttagtagagatggggtttctcatattggtcaggctggtcttgaactcctgacctcaggtgatctgcccacctcggcctcccaaactgctgggattgcaggcgtgagccaccacacctggctaccctttcagttttaagccataataaaaattacatgaaattgggctgggcacgatggctcactcctgttatcccagtgctttaggaggctgaggcaagaggatcacttgaggccaggagttccagaccagcctgggtaatgtagcgagaccctgtctctacaagaagataaaaaaattagctgggtgtcgtggtgcgtgcctgtaatcctagctactcaggtggcggaggtgagaggattgcccgaacccaggagtcaaaagctgcagtgagctactgtgatcatgcctctctactccagcctgggcaatagggtaagatcctgtctctg

SEQ ID NO: 201725 - DNA, 1000 bp, Homo Sapiens
atcatcctcctcctcctcctgttgtgtgcaataaagtagcccattcaaaactggattcacagtaaccaactgtgtcatgtaaacaaagcaatcttcagattcaccttgtaggatggtgacaggtaaattaacaaggaagttgagaacaagaaggaaagctacctgggataaattcacggttttttttttttgtttttttgttttgttttgtttccttcagtgactttcaaaacgtcagcaatcagccctgaagtgtttggaatgcatactgaattgctacagggataaatataccattgccagaatcttctgtaggacaatcttactagaaatcagtaatcctgaggctgagcacagtggctgtcacctgtaatcccagcactttgggaggctgaggcaggcagatcacttgaggccaggagtttgagaccagcctggccaacatggtgatacctgtttctactaaaagtacaaaaattagctgggcacaatggtgggcacctgtaatccagctactcaggaggctgaggcaggagaagcgcctgaacccaggaggcggagattgcagtaagccaagatcacaccattgcattctagcctgggtgacagagcaagactctatcttaaaaaaaaaaaaaaaaaaaaattgagcaaataaaaagttgtttatctcatggaaaccacgaggaaaatacacaagaaaaagtatagtaggctgggtgcagcagttcacacctgtaatcccagcactttaggaggctaagggaggaggactgcttgagctcagaagtttcagaccagcctgggcaacataatgaggccctgtttctactaaaaaaaaaaaaaaaaaattagctaggtgtggtggcatgcacctgtagtcccagctacttgggaggctgagccagggggatcacttgagcctgggaggttgaggctgcagtgagctatgattactacacccttgcactccagcctgggtgacagtgagatgctgtct

SEQ ID NO: 201726 - DNA, 1000 bp, Homo Sapiens
ctgttaaggaatgaatttgtcttatttaaccagtggtttcagcatggctgtttgtttttgtcttttataccattagccatggcatgtatttgagaattagttttttagtgtaattctaaagtccgatggaggacccctctctccatgaccctggaacctcccagatgtgcttcacctccgacttgtttctgttccagatctagtagggctgccaggaagcggagtctgtgaattgagccattggagaagactgtccaggaccttctttgatgtggtttctcattctcgcagaattattttgtcttatgatcacagtgatgtaggctatttattatttgttagttccaactctgcgtgaggtaataaatgttgttggcagaaggcttgcttaaatgggtgtgtatcagtaaggactcaggagtagctaaaagtttgctgatactatgaactgtgctgttcatggggttcctttgtgaaaccttgttgatttttattgactagtcaacccatatgagggtcttaaaggtttaccgtcctctgagcagtagagctcttgcccctgacacagactctctcacctccttttctagctcttccactcactagctaagtggccttcagcaagtttcttaccttttctcacttcaaataatggagattataaaagcacctaccacacaggactcttatgtggaccaagtgattgacacatgtaaagcacttataacagtctctgacatgcatgatacacacaatgaacacatcgtacctccaattatcatagccacaatatttcagtgtgttcctttcaagcctcctttggaattgatgttatttctcatcgtctagactatgttttaatagatgaacaactgcgttcatcttttataactctagaattacaaaaattggtttttaaaaactatcactatatttttaatccttgggttataccttttgaaataagagttgtgttcaatactatatctctctatatttg

SEQ ID NO: 201727 - DNA, 1000 bp, Homo Sapiens
attgttactgtatcatgtagaatagttttagtgccctaaaaatcccctttgcgtcacctctttcattttcccctctccctgaacaccaggcaatcactaatctttttctgtgtccacatttttgccttttccagaatgtcatgtagttagaatcatctagtgtgcggtcttttcagagtggcttctttcacttagtaatatccttttaagattcctcaagtctttccatggcttgatagctaatttctttttattactgaatgatattcctttgtatgacgtaccacaattcatttatccattctcctgctgaaggtcagattgcttctaagttttcatagttatgaaaacttgtattttaagattaaaatctggaagtttttattgatattaggcattcgtttcttagggctgctataataacagagtaccacaaactgggtagcttaaaacaacagaaatttattctttcatagttctggagcctagacatcagaaatcaaggtgttagcagggttggcacctgccaaccaagagagctttgagggagaatctattccatacctttctcctagctgctcatgagggttagccatctttgatgttccttggattgtaaatgcatcagtccaatctctgcttccctcttcatggggcattctccctgtttcttcacattgctgtcttcttgtgaggataccagtcatattgaattaggggcccaccctacaccagtatgacctcatcttaactaattatatctgcaacaaccctatttccaaattaggtcacattctaaggcactggtggttagacttcaacaacgttattagagggcacagttcaacccatagcatgaagtgatgctttctagaccattcttctttagatagtcatcctttttgttattgttgaatcatggatggtgatgtaacgttttccagctttggctagttgtggtttcagctgaaaaaccaaaatgtccctgactgtgttatat

SEQ ID NO: 201728 - DNA, 1000 bp, Homo Sapiens
agagtcctcaaagctttgtataaacacattctttctggtacattcaaaaggaactgatttcagattggtgtagggcaaagcagaaagtaagtgtgtggtcacagaaatgaaaggacaagagagttgacaagagttacaaaagacagacaacagatcattaacattgctgttgatttaatttggtcactagaaatgcggcattcatttttaaaagaacgtctatctatccataccaataatctggagatgatcacactttccaagcagagagctgaagtgaaggcttgaggggatgcctctgcctctcttcattttctttcatctacatggctgaccaatattcacgcattaatagattttggtttctctctggttccaacatttacataatacagtaatagttataggaaagggtttgcatgttcattatataaacccataccgattttttttctacattcatctataaattacatacgagtggggtagctctatttcttgctaattcctgacagtatttattttaagcatgtctttaattcaaagggatcaaatatgttataaggaccacgtatttattatttcaggtgttttacacagtatatcacattttatccttaaacacatgcacatataggtatgacactttatacttgtatagtataaaaatattaggccaggcgtggtggctcatgcctgtagtcccagcactttgggagactgaggcaggcggatcacaaggtcaggagtttgggaccagcctgaccaacatggtgaaatatacaaaaatacaaaattatacaaaaaacatgcaaaaaatatacaaaaattttgtcctaaaaatacaaaaattagttgggtgcggtgacatgcacctgtaatcccacctactcaggaggctgaggcaagagaattgcttggacccgggaggcagaggttgcagtgagccgagatcgtgcaactgcactccaacctgggcaacagagtaagactccttctc

SEQ ID NO: 201729 - DNA, 1000 bp, Homo Sapiens
actcctaagggaaaataagtcaaatatcttctttaagagtaagggcattcttccattgtaggtatttctaattgactttataataatttgaacaaatcttgaacaagatttaaagaatttataatctcccaaacttaaaattgtattctttctggttttttatttttatgtattaagattatattcaaaccacttaattatcttcatgacataagtttgtgttaatagaaaattatacagaaaaaaacatgatttgttcctctgtggaaagatatgcttcaatgagttaaatacccttgaattttggttctcatttcttatttggacttttctgttatgtacctcaggggtcttaaattctaacagatgaagtagtcaaaggggtataaaatacttgaaaaaaattaaaacttcaaaagggacgaatttctctgttaacttttgtttatcctatactgacttattttgaaattgtgaaaaaacaggcagctaccatataaattggtatctatgaaaatactgattactttcttcctgtgattttcactgttaagaaaacctttgtcttgaaatgatggacaatcttaatacttgttcagataaagaaatgtgactttcaatacctttaccatttgtatttctttagggaaatattttaataatgattgtaaaaatagaagaaatatggttgagaaaaatagaagaaattaagatgaaatttgaacagttgtaatccacagtcccatttttccctctattttattgccttctactaagttattgaaggcccagatctgcaaaatttacaagctactaattcattgtctcctttaagaatttggagcaaaaattattccgactatgcggaaatgaattcacatcatcatggcaggttttgactatgagggaattcaggttaggttcaaatagaataatggtccatggagaaaaatactttctgatttttcttcaagttggatggaaaggtttttctttattt

SEQ ID NO: 201730 - DNA, 1000 bp, Homo Sapiens
gtagtccttccttaatttcaactcattaaaaaatgctttatagtttagggcagtggaaggaaggctggcatcaaaatattttgatcaaaaaagatgacaatgtaaaggctcagttgtggcagacagttttttgaaagtaacttgtaaagcatttaccatatcctaaatttgcactctttgcagacttgtgcacatatattccgctttcagaatagttttgcaaattgtacacaaacaaacaaaaaggtggaagctttttaataaagaaattgcatttataaatgatctgtattagaatataataaatctccagttatagtcaattactacccatgttgtacaacagataccttctattttagttgctaataaagggctacacaactcaaaatagtctgatttaaacttattgctctgtggtatatatgaaaattgttttttattaattccatctcagaatttttgttaaaaatggtaaacctcagctcttatgtaaaaatatattaggatgtattttatattttatatatttgtatgatttttttaaatcagaaattagaatcatatgatcttaaagttaactttttaaattacatgcagtttgcctttttgtctgtgacatccctttgtgtcattactatattgtaacagaatatatattcaagattggtaaaagaacgtagatgtaatccttgacttcaaagatcatgtttgatagtctgcaaatgaggaaacattgaagagtgttcttagtgtttttcaaatcattgcagaccttacactgctgtgcttttttaatgctttaagcagtttgactcttttacttgaatttttagccagagatcattaacatcatcaacaacaacaagccactggattttcttatggttacacaattttttttgtcatgatttttggtgcggctcttccaactaaaataatggtatgatgttgtatttctttctttctttagcatagaccaattctagtcactttcgcc

SEQ ID NO: 201731 - DNA, 1000 bp, Homo Sapiens
caaccatcatcattatcttaatttgagaacacttttattactctaaaaagaaattgcctacccatcagcagtcacttcccattccttccttcccctacccactgggaactgctaatctacttttatctgtatggatttgactattctggacacttcatatacatggaatcatgcaatatgtggccttttgtgtctggtttctttcacttaacatgttttcaagccttgtctatgctatagtatattattacctcatttctttttatgcttacataaaattccattgtgtggtgtgccacagtttatccattcacctgttagtggacatttgggttgcttccaccttttggcagttgtgaataatactgcgaggaacatttgtatacaagtttttgtgtagacgtacgttttcctctttcttgtgtaaatacttaggagtgtaatggctaagtcatatggtagctaaatattaacattttaggaattgccaagctgttttccaaggcaactgcaccattttacattcccagtaacaacctgtgagcattcaaatttttccgtatcgtcaaccaacatttattattatctttctcattgtggtaaaatgtctattcagattctgacattttagcttttgatataatcactttagggtcttcctcatgtaatatttatatttttccctttttctgtatatccttttttttctctctgaaaaacgtaacactgtcagccagaggaagtaatatattctagggaatgggaaactcatgcttcctgtgagtctttaaactgtccattgtccatcttggcaacatgaagaaaccccgtctctacaaaaagtacaaaaatcagccaggtgtggtggcacacggctatagccccagcttctcaggtggctgaggtgggaggatcacctgagcccagggggtcaaggttgcagtgagctgtgatcgtgtccctgtactctaccctgggtaacagagtgagacctatctcc

SEQ ID NO: 201732 - DNA, 1000 bp, Homo Sapiens
tcatgcataatgcccaggtcctggagtatttcaggatgtatgccaaagaatttgaccttctaaagtatattcgatttaagaccactgtgtgcagtgtgaagaagcagcctgattttgccacttcaggccaatgggaagtggtcactgaatctgaggggaaaaaggagatgaatgtctttgatggagtcatggtttgcactggccatcacaccaatgctcatctacctctggaaagcttccctggaattgagaagttcaaagggcagtacttccacagtcgagactataagaacccagagggattcactggaaagagagtcattataattggcattgggaattctggaggggatctggctgtagagattagccaaacagccaagcaggttttcctcagcaccaggagaggggcttggatcctgaatcgtgtaggggactacggatatcctgctgatgtgttgttctcttctcgacttacacattttatatggaagatctgtggccaatcattagcaaacaaatatttggaaaaaaagataaaccaaaggtttgaccatgaaatgtttggcctgaagcctaaacacaggtatgttcccaggatgggagtgcagggatagtggccaaagcacaagaataaggactcttcacactggctaatagtaaagccacctctacccatacattaagaaaacccacagtggctgggcatggtggctcacgcctgtaatcccagcactctgggaggcggaggcgggtggatcacctgagctcaggagtttgagaccatcctggccaacacggtgaaaccccatctctactaaaaacacaaaattagccaggtgtggtggcacctgtctgtagtcccagctattcaggaggctgaggcaggagaatcacctgagccctggaggcagaggttgcagtgagctgagattgcaccactgcactccagcctgggcaacagactctgtctcaaaaagaaaaaaaaaaaaaaaaaaag

SEQ ID NO: 201733 - DNA, 1000 bp, Homo Sapiens
tttggatcctatatttgaagcaaggcatgcatatatattttaaattttattatctctgttttgatctttttgtcataaaaaattcgtttttatttctaataatacttcctgccttaaagtctacatttcctgtttgaatgatgttcagtgtccattgtgtaaattctcatgtggtaatttcctttaagaaattattgaggggccaggcacagtggcgcatgcctgtggtcccagcactttgagaggctgtggtgggatagtttcttgagcccaggagttcgagaccagcctgggaagcatggcgaaaccctgtctctacaaaaaaaacacaaaaattagccaggggtgttggtgcatacctgtaatcccagttactcaggaggctgaggtgggaggatcacatgagcctgggaggttgaggctgcagtgagtcaagattgcaccactgcactccagcttgggtgacagagtgagaccctgtctcgaagaaaaagaaattattgagggcagggtggtggcacacgcctgtaatcccagcactttgggaggctgaggcaggaggattgcttgagctcaggaggttgaagctgcagtgagatgtgtttgcgccactgcactccagcttgggtgacggagcgagaccctgtctcaagaaaaaaaggagaagctactgaattgcagtaaaaccgtgtgcttctatgaggggataaagtatttacttgtggctgggcacggtggctcacgcctgtaatcccaacacttcgggaggccgaggcgggaggatcacctgaggtcaggagttcgagaccagcctcaacatggagaaaccccgtctctactaaaaatacaattagccaggcgtggtggtgcatgcctgtaatcccagctactcgggaggctgaggcaggagaattgcttgaacccaggaggcggaggttgcggtgagccaagatcgtgccattgcactccagcctgggcaacaagagcgaaactccatctc

SEQ ID NO: 201734 - DNA, 1000 bp, Homo Sapiens
tacacagaaagagatccattcagtcaatttccaaggttgcagactgcttgggcccacccagaattccaccgggactggacggcccccaccaggttatactggatatgtgggcacagagcttatgctaagctgcctgatcagtggacaggtagctgtgtaattgacaccattaaaccatctttcttcttactgcccataaaagcaggggaacttctgggcttcccagtctatgcttcccgcaaaaaacaaagcatagccataggtgattggaaagatgataaatggccccctgaaagaatcatacaatactatggacccaccacttgggcacaagatgactcttggggatatcggacccccatctacatgctcaacggaatcatacggttacaagctgttttcgaaattattactaatacaaccggtcaagccttgactgttcttgcccagcaggagactctgatgagaaatgctatctatcaaaatagactagctcttgactacttgctagcagctgaaagagaagtttgtgaaaaatttaactttactaattgttttctacacacaggtgatcaagggcaagtagttaaaaatatagttaaagatataacaaaactggcacatgtacccatacaagtgtggcacggactcaatccaggatccatgtttaaaaattagttcccagcaataggaagatttaaaactcttataataggagttataatagtaataaaaacctgcttactgctcccttgtttactacttttacttctacaaatgataaaaagcttcattgctaccttagttcaccaaaatgcttcagcacaagtgtactatatgaatcactatcaatctattgcacaaaaagacataagtagcaaaaataagagtgagaactcccactaataaaaagtgagagtctcaaagggggaaaatgaggaaagagagcgaccctctcatattgttctatattgttttatactcagtacctgttttaagg

SEQ ID NO: 201735 - DNA, 1000 bp, Homo Sapiens
gttgtttcatgtctaagatcctcattatcttcatttgaaaaataggaataataatagcttcttcttagacctgatgagattactaaaatagatcagcagttttcaaaccttctggtttcagggtccctctgtactcttaaaaattattgagaaccgcagagagcttttgtttatatgagttatagcaatcattatgtatcatatgtcaagttaaacagaaaattatgaaggtttattcattttaaaatgacaactattatgctaacatttttctgtgagaaatatcttccaaaacaaaagaattactgagaatagtgtttttgttttaaatttttgtaagtctctttaatgtctggatttatagaagacaactggattttcaaatatgcttctgaattcagtgtgtcatgttatgttttagttggattatgtagcaaaaataaagcttcacatagatacgtaattggtaagagaagggtatttcgatacccttctcagttaaatgcggatgttcttatttgattaatcagtaaactttgataattgatgttgtcttaaaagttgtgatgtgcaatcagaagccatattgtgaactttatgtactcaatgacataaaatccattggtttaccttgcacttggaatgacttttttgcttttaaaacagtgtcattggccatttggaaaatattagttacctagattgtacagatctcctgaaaattgactcattttatcaaaccatatcaaaaaatcataattcttaatattaccactagtctcatcagataagtcttcagtattgagaagctgtcaagcttaggatggcagatgtatgttttccaaaatgctaatttttgcttgaaaactcaaattttatcattggcaacaagtgttgttttcctggaagtgacaggctcacttcattcatttcagtaatatatctgccaaatgctcaagtctgaataaccacagtttatctaaaactgttctttcaagtt

SEQ ID NO: 201736 - DNA, 1000 bp, Homo Sapiens
cctcgcctccccggaaggtgttgtggggcgacagtgcggggacgccgggcgggggtggacgttctgggcccagccctgtcctcagaggctgctggggcagaagcccggggctgggggatgccggggatggatgttggggtgggtgcctccgagaccagaggagccctgttccttggcagggaaggtgtgcacgggccttgcccgatggatggtttagggccatggccctggggtccctggtgagcagtggggccgcctctgcccttggcctgtgagggactgtctgtgctggtcccagaaggctgggatcacctttccactggctcctttgttcgaggtttttcatagacaggctatgtggacaaatgagggcagcgcccacgtctggctggtggaggggctgcggctcctccttggaggggacgcctggccactgctgtccccacaatggggccacccgtggtgcaaggcgtgacaagctgccctctctaggtaagcaggacttgggaggcccctggccaagcctgtggacccggctgggcggcctctgtggtctcaggtttgggtgtgtttggtctggtcagggctcaggggctgctggtccacactggccccatcctgacaattggagctttggggcaaggtccctggagaaggggtcacgtggggaggaaacagcctgggttttgttgatgcttttctaagaatggagtactcgttttcaagagatttgtcctaattatattttccagcgggtacttatgccaagtattgatgaataattcataaaataagcatctttgtgaattttagtgaatcagaccttaactatcaacggcaatgaatgaacatctaaagtttccaattttaaagtaaagaactggctgggtacagcagttcacgcctgtaatcccagcactttgggaggccaaggctagaggatcgcttgagcccaggagtttgagatcagcctgggcaacataccaagacctcatctgtt

SEQ ID NO: 201737 - DNA, 1000 bp, Homo Sapiens
ctgtttccattagaggggaccaggatgggtagacaggctaagacgtctgattactctttgctctgtgtatttgtatgacagctcgggtgtctggcttaccttcctgaggatgagagccatagcattatccatttaataacagccacagtgacagtgctgataatggctagcatttacctagcactgtgtgccctagaacatttaatagtttcactctatgaactcgtttgttggtcttcgtgccatgtgtccaacataaagctagcaggacccatctgtccttgcccatgcttattctgtgccacagccacccctggttgtgattaagatattaatgttaaagagggaattgagttctgatttctcctcattcaaaaccattctgtcatcttcatgcacatgccctgcaggcagccagccagtaaggggtccttcatacctatcctgttcctggctggtggctctcagaatctgccatggctctttgatcctgtttgtcctcctgcccttgagtgactggctatcagaaagccttcatttccttgttggattctgcctccaggaagcaaagccgacccagtggtttctgtgggtcagctgcacttggctgtctgcactggggaagagacttggcttgttggctgttttatgccctttggactgtcaggtccaagtgtactgttggccgcagcatccagtctgtgctatcagagcaaggcgctatggtcaggagacccttagccaccaaaggtctgttgtctcctggtgtctttgcctgaagacttctggccttcttgtgtttcatcactaagtgcatctataagctgacccgctgccaggtatcatgtctgagcattttggcaaggagagtcggtgagagaagttttcttggcaaccataaaataaaagtactatcaggagctgctaaataaatttgcaccgcttcagccagggaatttcagctctcctgggtgggatagtgataggggatgtggaatgc

SEQ ID NO: 201738 - DNA, 1000 bp, Homo Sapiens
attcacccatggtgtagcatgcatcagtacttgactcctttttatggccttaggacaggccagggcatatgtatcccacattttaccacattttgtttatccatttatctgttgatggacccctgtgctgttcccatcctttggctgttgtgaatagtgctgctataaatatgcatttacaagtttttgtttgaacacctattttcagtcctttggggatacagagccaggagtggaactgctgagttacacagtaattcaacatttaactttttggaaaactgccaaactgttttccacgacatctgcaccattttacgttcctgtcaacaatgtgcaaaggtttccatttctccacctgtgtcaacacttgttattttccattttaaaacattatagccacccttgttagagtgaagtagaatctcattgtggtttttgatttgcatttccctgatgacaagtgacattatacatattttcatgtgctcattggccacttgtgtgtcttcttcaaagaaatgtctattcaagtcctttgcccatttttaaattggttgtttgtctttttttgttgagttgtaagtgctctttatatattctggaggctgactgacttttattcttctaagtcaaaggtgctttagcccaagtcctgtcactcaaaaagaaggctgggtgcagtggctcttgcctgtaatcccagcactttgataggctgagtcaggaggatgacttgagcccaggagtttgagaccatcctgggcaacagggtgagaccttatctctataaaaaatgtttaaaaaattagccagggacggtggcatactcctgtagtcccagctactccagagattgaggcatgaggattgcttgagcttggaaggtcgaagctgtggtgagctgttgattgcaccactgcactctagcctgcgtgacacaaccacactgtagcctgtctcaaagaaagaaagaaagaaaagaaagaaagagagagag

SEQ ID NO: 201739 - DNA, 1000 bp, Homo Sapiens
tccagtttagcaaatggttgctcaggcggtcagctgggaaacaggcttggtttttaagccactcactcttaggattggaggcagcaggactagatttggaattgggattcatgatcttctcaatcttctccacagcctccagctgattccccactgactcagtttgctggcctggctattgcttgggaaggactggagggatccagttgaggaggtcagacatgttagtgaatttgctggatgtcaagtcagaaccatttgactgagacccaggaggacctggctgagagccccttctttgaacccctctgagatccatgttggggaggctgtgacccttgctttcttggaggcctcaatgcctcacctccttttctttaatttactattttaactgaaacatatgccagagtgtgtgtctgggccgggtattgtggcccacacctgtaatctcagcagtttgggagactgaggcagtaggatcgtttgaggctaggagtttgagagcagcctgggcaacgttgtgagaccccgtctctacaaaaattaaaatatgagccaggtgtgatggcatgcacctgtagtcccagccactcaagaggctaagatgggaggatcacttgaacccaggactttgagactgcagtgaggtatgattgtatcagattgcatcgctgcactctaggcgagaccctgtctccttaaaaaaaaaaaaaaaaatagccgggtgtgttggctcacgcctgtaatcccagcactttgggaggccgaggcaggtggatcacgaggtcaggagttcaggaccagcctggccaagatggtgaaaccgcgtctctactaaaaatacaaaaattagctgggtgtagtggcaggtacttgtaatcccagctacttgggaggctgagacagagaattgcttgaacccaggaggtggaggttgcagtgagccaaaatcatgccactacactccagcctgggcaacagagcgagactcagtctc

SEQ ID NO: 201740 - DNA, 1000 bp, Homo Sapiens
gttacagcacttgaggatgtcactgtgcccattcaacaccacaaagagtaggaagccaggaagtaccaagtgaaagtgtggggctgtctttgcgtagtatcctgctttttatttcctgcaatgctgaacccctttctaatacattttctagcaaaatccatagttcccttctttgcattctcatgactcttcagtcatttgcaatcatggagcccttctcatgtgccagggactactctagtaagcattttatgtttttcattcgtttaatccttaaggccctttaattctacaaggtgagtgcagttaatatcgtgctttaaaaataaataaatgaagcacagagaggtgaagccacttgctcaagctgtcctgctggcaagtggcagagccaggatgtggagcctggcacctggctccagaatgcagtaccctgtgccccctctcttttgacagaggatgtgctttgttcaacttctaatctcaagcatctgccatgcatctgctatgaccctctcttggtggactctaatagaagaatggaagaagaagtcttcataattaagatattaaagaatggtttattctcctgctgttgtccctgccacattatttccattcttctttctgtagtctgtcctgacacccctatcttaattaagtctccccattatgttctctgagcatccagggcttctcttggtagcttttgttacaattaattactatatattaatttgtgcaacatctgcttgttgttgagtccgttttaaaccccaagaggacagatggggagcactggttgaccacgtagccagccctgcacttggctcagagtgggtactccgtaaagacttgtggaattaatgaatgagtcatcattgactttactatgtggccacatcatatcatttaagcacccacataattgcttatgaataacagctctctttcaaccacttagaggaaaagacacctgctctatgaggagaggaaatgc

SEQ ID NO: 201741 - DNA, 1000 bp, Homo Sapiens
agcttctttatgggaaaagcaaaaccactggttctgtggggacacatattctctgcagatacagtggatggttcgaggtctaagggcatgcgaggcctccgtgctgctctccctttagtggatgccagccacctgctgtagctggagcccagggtgggcaatggctggccactgcctgacttgcagacctcccaaggtatcctcaccatcccaaggtcatgacaacctcgcacacttctgcccaggcctaagcaggaggggggcctgtgtgggagagagggcctagcacctcactcatcagagctgtgtacatgaccacactgctgtgcttcagggaggcccagtggctggatgttgagctttgcagacaccagtcaagaatgatgggtagttgggcgcgacaggagaggattcagaatttgccatccaaagccctgtgagacacaagactaaggcccagtgcctggtgcagttctgcctttgacattgtgaggggcgcaccttgggaacttggagcacagggatcttccctggaaatagtctcaggtgtcacttgtcaccctgcattgggacttcatgagactgtgaataactacagtaaaccagatgtgcaagaagccagagtctaggttatagttacttcagactctgtatttaaagattctctcttttttttcttttttttttttttgagacagagtcttgctctgttgcccaggctggagtgcagtggtgcgatctcggctcactttaagctccacctcctgggttcacgccattctcctcaactggaggattctacgcctcccaagtagctgggaatgcaggcgcccaccaccacgccaggctaactttttgtatttttagtagagatggggtttcaccgtgttagccaggatggtcttaatctcctgacctcatgataccccggcctcagcctcccaaagtgctgggattacaggcgtgagccaccgcgcctagcccaaaagttctcttaatt

SEQ ID NO: 201742 - DNA, 1000 bp, Homo Sapiens
caaatgatacggcagacggttggtcacaggacaactctaaaggtgggaacagcaaagtggcctggcgaggcagcctcgggacctcaagggacagcagccctgcctgcccactcccacccccacccagcagcaggaggtggcccaggccagcagactcccagcctcccatgcagtggcaggaggtggcccagacctgcagactcccagcctcccatgtggtggcaaaaggtgacgaggcaggtgttttcctcctgcagccacactagcagatgggcaggtggccagcaggcaccccgcagtcctgggagtgaacccaggggcatggtctccacccgtggcaggcatctcccacccccacccagcgacacaggacaccccaagaagggcattttatccccacaggcagcaccggcagggacccaggtgggcagaccggcagctccaggtgaatttagcagaccagaatagcacttcagcaagcattctgaaaagcaaattgtcattggaaccgtagcctccaaaagaacaggctgtacacgcgaaacctaaacagggtgacagcctgctcaaatagaggatttaacacttaacaagatcagtcttctaacataatatccaaaatgcccaggatactgcagaaaaattacccgtcacaccaagaacaccgaagatcaatgatttgaatgaaaaaagacagcagaaggcccggcgcagtggctcacacctgtaatcccagcactttgggaggccgaggaggacggatcagatcacctgagatcaggagttgaagacgagcccgatcaacatggagaaaccccgtctctactaaaaatacaaaatcagccgggcatggtggcacattcctgtaatcccagctactagggagggtgaggcaggagagtcacttgaacccgggaggcggaggttgtggtgagccgagatggtgccattgcactccagcctgggcaacaagagtgaaactccatctcaaaaaaaaaag

SEQ ID NO: 201743 - DNA, 1000 bp, Homo Sapiens
taaatctgtgttgtgagtaacattctatgcctttaaataatcttcagtgtcatttttgtgaagatttattccacattcaccatcctttttttgtgaaatttaaatcagatgtcataaagtctttaaaaagcagaattactttgaaaataaaggtattattattatagaattttagagattaaagaaaaaacagaaactaacatttaatgaagacctactctgtgccatgccatgtgcttagaactttgtttaagccatttcatttaataacctttcaacctaatgaagcaatatagcatgatggttaaactctgtgagctataggctgtcaagttcagctgcacagcggctaactagctttatgacttttcaaatgtttatcttctttttggcttagtttctctgttacaaagtggcaataataataatagcactcacttccaaaagattgttgtaggattaaatgattggataggttcaaaatgttaggaacagtagtattcaataaacatagttattatttgctacctttcccactactccataaaccctctattaaaatacaaatccacattgattttaactgctttggtgtagaagtggattctaagaagaggcaatgtgaaataaatggaaaagccaaggattttatgttttttaatcctggctcccagccttctaataattttgcctctgggaattttgtcaagatttacaggctgggcgtggtggctcacgcctgtaatcccagcactttgggaggccaagggaggtggatcacctgaagtcaggagtttgagaccagcctagccaacatggcaaaaccccaactctactaacaatacaaaaattaaccgggcgtggtggcacacgcctaatagtcccagctactttggaggctaaggcagaaggatcgcttaaacccgggagacggaggttgcagtgagccaagatcgcaccactgcactgcaatccgggttacggagtgagactccgtctc

SEQ ID NO: 201744 - DNA, 1000 bp, Homo Sapiens
cacctcggccaccttggaaaaggcctgatgaggaagccgccagattcctacccaccgaaggtgagtcttgagtagatgtgagtgctcagggcacacatgcagacatgaggttttcaatacgagactgaataagaatgggatcctagaggcgctgcctgtgaaatgctgagtcagcctcactaggtcagcaggctctgagggagggtctctgtgatctggggccagagggaggccccacggtgcccccatggaagcccacctagatcctgttggcgcactcagtgccccctgcatgatatggtgcagcatagtgtgagctgtgatcccttcagtcacccagaccagccacatttctggggccccactgggtctgcagcccgagctggctcctgacaccagcccccaatgccagccccaccatggtttccaaatgccaccacctggctttaggtgagccgctttagcccactgttactcttaaaatatttttcaaaagttacatggagctctcagaattgaccattttgctccagccctgagctgaggaagccctgtccaccctgtggtttcagagaactggatccttaacccagagtacctcacggctccctgctgtctcttaaccctcttgctaccctggtgaattacagctagagttcattctaatagttcttccccaccgagtttttctgatgtacccacaagaattcttgaatattgaacttagtcaacaagagtccaaattataacagtgaacaagattggtgtcaaaaaaaataagtgattgaaaaatcattgctgcatatgcagtaggcaataaactgttttaactcccttgatccaaaaaacgcaaagggtggggctccaaggaggaggctgccattcccaataagctttacccctgctcgtccccaaaggtggaaccataagcgagaacggctttgtgtggtagccaaaagcacatcttcattttcgtaaaaaagaaaaatgcagctctatt

SEQ ID NO: 201745 - DNA, 1000 bp, Homo Sapiens
gaaggaagttagaaccgggcactaaaatcctcagcagaggccttgcaaggtgagataagaagccgggttttgaaaaggtggtctggtgtgggcagtgggaggtcagtgtgaggagagatgaccaacatgagcagagagacccgagtgggtctgagcaggcctccaccaaaggatgggcagacctggccaaagagacattttgagtaagtctgagggggcctgatagccacagtccgtgtgactctatttcactcctacgattctatgaaaataggctggaatgatgttttagggggagagaatgggagccaggggggtgttttattttcaaattaattgcatgtgactgaaaatgaaatttcaaagtatatatgcttaccatccaatttgtcttatacttgctgctgaataaaaagtcctgaaattcagtttaaatattggtctttgttatcccaaaatagcaatcataattatggtaaattagttgaattcacctttcatttattttgtagtaaatatctatttcacttaactttagtagataaagtaaccaactattgttcagctttttaaaaagccttcacaatacaattaaaaaaattatatgtagtaactaataaaagtaaaccatttctttaaaattcacggggtgtacttgcaaaacagttcatgcacacctgggaagatggagagagaactatgaaataagaatgcacagggccgggcgcggtggctcatgcctgtaatcccagcactttgggaggccgaggcgggcagatcacgaggtcaggagatcgagaccatcctggctaacacagtgaaaccccgtctctactaaaaatacaaaaatttagctgagcatggtggtgcgtgcctgtagtcccagctagtggggagtctgagggaggagaatcgcttgaacctgggaggtggaggtcacagtgagccgagatcgtgccacggcactccagcctgggtgacagagtgagactccgtctcc

SEQ ID NO: 201746 - DNA, 1000 bp, Homo Sapiens
ttctatgtttagacacacaaatactcaccatgatgttacaatagcctacagtgttcaatacagtaacatgcacaagtttgtaacctaggagcaacagggattccatatagcctaggtgtgtagtaggctacctacaccatctaggtttgtgtaagtacactctgatattcacacaatgatgaaattgcctaatgacacatttctcagaatgtatttgtgttattaaatgatgcatgactctaattcttttcaaaacagagccatatggggcaagggggatggggggacgcaagtcagttgtcaaaagactaattgagttactgacaaactgaacatgctaggtgcctcatgtaattcttcatgtaactaaaaaatgttgagaggtttttttcccccgggtatataggctctctttttatccgaaaatagtttccacaaagaagtcaactctgttctgaaaaaaaatgaattgcattttgaatacacttatctttgggtatatcaactaaaggaagttggatttttttccttaacagaaacttctgcagtcctctcagttcacatcctttctgactttaccctgacaaacttattatataaagctatatttaaatctatattgtcaatataacaaaggattgtttttgaacatcacaaatttgttcttggatagaattttatacattgcttttcatcatatatttgctcagttactctaagaagcaaggaactgatcactagttgggaatctatatgggcctaaacttgaatgtattgatttattattacatctactaccaacattttcttaagcatagccttctaaattttttcaggagattagaataaaggtatacatgctactcggtcttctggtaattctagtgataaacctttggatgagacaggtcctaatcagcactgaattcttcaataggaggctgtgttacaggagctacagatttttccctggattagcttaggtcattgcctttacttt

SEQ ID NO: 201747 - DNA, 1000 bp, Homo Sapiens
cagtccatctggcatatcattagaatgttaaacctaaaacggtaagccattctgtgaatacctttaagtaacaggatattaaaatgagacttttcctgttttctcagtgctagctgacatctttgagctgagaaaaaaaaatattgttaaaaatgctcatctattctcaggagatgtcatctgctaaggagtgaccaaaaaaatggtccaataaccctgaaaccatcgctcaaatcttagctacgcaaggggagacttgtaaattaatgaggacggcaaggatttcatgagacagagctttcaggctgctaaaatgcttcctcctcccttctcatgtgttttcccctcatcttacgcaaataagagggggccttcagagaattacttggagagctgacctaggacccctaggctttggggaacatagaatgtattagtgtctattgctgctgaaacaaattagcacacatttaacagcttaaaaatagcaaaattactacctcacagttctgtaggttagaagtccagtgggcgcggctggtgtgtgggcttcaagcctcacagggctgaaatcaaggtgttggccaggctgtactccctcctagaggctctaatgaagcatctgtttccaggcctctgcgccttgttggcggaattcagttcaatttgcctgatggactgaggtccctgcttccctgcgggctgtcggcgggaactgccactggctccttgcagcctctctctgattcttgcacaagggcacctacatctcagagccagcgagagtgtgagtgtgtggaatccttctcacgaggcctcatctctctgactttcgtcgggaaatgttctctgcttttaaaggatcatgtaattattttgagcctacccgataatccaggataatcccctcatctaaaaatctgttaccttaaccacatctgcaaagtccctgttgccgtgtaaagagagaaaaaaaaaaaaaaataaaaataaagagatc

SEQ ID NO: 201748 - DNA, 1000 bp, Homo Sapiens
tctatggggtgcaaacatttaatcctcccaactgtcaaaaaagtgagagtttcacagcctgttttacagcagaggaaactgatattcagagaggttaagtaaatttgcccaatgccacacatctaataaatggctgagctggaatcaaggccagctcttacttggctgcaaaatccatgttttatgcagctcctccactatcttggcctccaaggcagctggctttgaacactacccttgcagcccagtcagccaatcccttgctctcctgaagcttttgctggtgggccagccccacctgctttccttgtgcactctgacttggaccctgaagtgagaagagttggcacaggacatcttacttccctgaaaacagtacctggacttttctgtatcttcacatccattgggcattgggcaaatgggtcatgcagatgaaaaccatccaagataagagacatgggagtgaaattcacacccactctggctttcataccatgggtctgaacattagcccatggtatttcttggccatactgacctgtgccattccagctgcattcatctcagttggtgttgtctgctggctgctctttctgatttcccacaggagcagtaagaacctgaggaagagtagggtcagaggagtctgggagaatgaggaaatatgagagccccaggaactgaaaaggcctgtgagagactctgagcttcctgggaacaggcgcagtggctcaagcctgtaatcccatcacttcgggaggccgaggtgggcagatcacgaggtcaggagatcaagaccatcctggctaacacggtgaaaccccatctctactaaaaatacaaaaaaattagccaggcatggtggcgggtgcctgtattcccagctacttgggaggctgaggcaggagaatggcgcgaacccagggggcggagcttgcagtgagctgtaattgtgccactgcactccagcctgggcgacagagcgagactccgtctc

SEQ ID NO: 201749 - DNA, 1000 bp, Homo Sapiens
agtgtgaaaggtgtcatgggcactgagggaatctggaagaggagcacctaggattccttggggacagggtgggagggtagaagaatgtgtccctaaggagatgacaactggtcaagagcgttaaagggtgttggcgatgggagaagggtgttctgggaagagaggagcatgtgtatggaaatcgttgtgtgttccatgggagagaaggagcgtcggccaccgatgggggatgaggttgagtgcctgagaagagtctagatcaggaacagcatcgtatgttacagtggagacttggtttgaaaactactgaaagccattaatggagtttaggagcatcatgagatgataaagattttacctgcagcacatcaagccagctctaagaaatcctgtgtacacaaattgcctctttcgaatcaatgtgaagtcagagagcccacaggccagcagtccagttctgccactaattagttttgccgcattagggaagtctcttactttccgatggtctgagttgccacatctccgaaattaaagtgttggagtaggtgacacccatgtttcctcccagctataacagcagcctatgactctgtgatgatgtcactgctttttggcgcttgtttcataattcctagagttaacttattaaaattgctgtgcaagcatgatgactgtcccctagtaaacatcaagtgttcttcttcatatgttccatatgaaaattagcttcttgggccaggcgcagtggctcatgcctataatcccagcaatttgggaggccaaggcaggcggatcacgaggtcaggagatcgagaccatcctggctaactactaaaaatacaaaaaattagccgggcgtggtggcgggcatctgtagtcccagctactcaggaggctgaggctggagaatggcgtgaccccaggaggtggagcttgcagtgagccgagatcgcgccactgcgctccagcctgggggaacaaagcgagactccatctc

SEQ ID NO: 201750 - DNA, 1000 bp, Homo Sapiens
caaaaaatacagccattggtgtattattttgttgaatattaaaccagacctatgaaaacattaatataacattagtgtaggtccataggaacacaaggcccatcgttggtaaggaaggagcaaaattttacagtcttactactcaatgaagtggcagaatcccagcggggttctgaggcaggagataaagagattctagggtttcatgatcattagactacctcaatggttctcatccttgaaggcactacacaatcacctggaggagctttagtgataaaagattgctccggccccatgccctagggaatctgatagactatctatatttaaagttccccaggtgattctagtgtgtagccagggtgactctagaggagataactcaagattttttttccccatatacttacatttctatcatcaaacaaacaatctacactttttaagggacaaaacgggtcaaactgcttataacattggccagttgatggattccaaagcaaatattcattagtttcttgagttactacataagccacatgcccctgtatgagaaaaaagaaagtaatttttggtggatttaaataatttctatatatggaaattatactgtgatgattctaatttttaaagccttttttagtggagtgtagtggcttgtacctgtggtcccggctctttgggaggctgaggtgggagggtcacttgagcccaggagtttgagaccagcctgggcaacatagggaaaccctgtatctatcacaaaaaaatttttttaaaatttgctgggcacagcggcacacacacctgtagtcccagctacttgggaggctgaggtgggaggatcgcttgagcctggggagttgagactgcaatgagctgtgataatgccgctgccctgtggcttgggtgacagggtgagatcctgtctcaataacaaacaaacaacaaaaataaataaaagcctttttgagggcttttacattttctttgaaat

SEQ ID NO: 201751 - DNA, 1000 bp, Homo Sapiens
ccctcttgattcgaaagtcatagactatatttccattattttaatggttactgttaaaattttcagttacgaagttttctactaaaaatgtgggcctaactggcttctaggatgaacccagctctggcacccagtctcttttactctgtttttcttgtgtggagatactcatcttgtatctcatctcagctttgtcttttggttttctcttttttacagttgcctttcatagctacatatttagagtaggagaagtcttcctcagggtgaactcaatgcatcatctctacttcagccattctttcactctactggtttgcatatctgcacataatattcagtaaatacttgttaagaagtgtttcttatatttttttcctttttgttttagttttactcacttttttcagcttttgatggaaaggagagaaagtggagataacaggaccaaccacatctgtagaatggtttttacactgactgtcgacaatcagggttggtggagtggtcagggtaagaaggaggtatagagaatttagtctgggacaaaggaactgtatggtccaagtgtgaattgacacttattatgacaatattatggcaatattatttattgataatattctaataagactgcctccattttgttaggtttgttttctgtttttatacacaccgaagtattaaatagatgccagttatttttgtagaaaacaggagggctacactgctgtattgtagctatgatgatggcgaccgcgttttacaaacatttgtgttctcctaacatagtgattaattactaggacaggtttgagatggtggcagttacaaagagcatctggctggagatgagtttagtgttcgcatatacccctactcactcctccaccatcttcccctttcagaaaccgagagaggaggtagctgatgataccaataaacttgttatgctttgagatgtatctctgtaactagcaagtgatttccaggcattttt

SEQ ID NO: 201752 - DNA, 1000 bp, Homo Sapiens
cacagctcaaggaggcctgccttcctctgtaggctccacctctgggggcagggcacagacaaacaaaaggcagcagtaatctctgcagatttaaatgtccctgtctgacagctttgaagagagtagtggttctcccagcatgcagcttgagatctgagaacaggcagactgccacctcaagtgggtccctgacccccaactagtataactgggaggcaccccccagtagaggcgggacacctcacacggccaggtactcctctgaggcaaaacttccagaggaacaatcaggcagcagcatttgcggttcaccaatatccgctgttctgcagccactgctgctgatatccaggcaagcagggtctggagtggacctccagcaaactccaacagacctgcagctgagggtcctgactgttagaaggaaaactaacaaacagaaaggacatccacaccaaaaacccatctgtacatcaccatcataaagaccaaaggtagataaaaccacaaagatggggaaaaaacagagcagaaaaaccggaaactctaaaaatcagagcgcctctcctcttccaaaggaacgcagctccccaccagcaatggaacaaagctggacggagaatggctttgacgagttgagagaagaaggcttcagaagatcaaactactccgagctaaaggaggaagtttgaaccaaaggcaaataagttaaaaaccttgaaaaaaaattaggccgggcgcagtggctcacgcctgtaatcccagcactttgggaggccgaggcgggtggatcacgaggtcagatcgagaccacggtgaaaccccgtctctactaaaaaaaatacaaaaaattggctgggcgcagtggcaggtgcctctagtcccagctactcgggaggctgaggcaggagaatggagtgaacctgggaggcggagcttgcagtgagccaagattgtgccactgcaatccagcctgggctaaagagcgggaatccatctc

SEQ ID NO: 201753 - DNA, 1000 bp, Homo Sapiens
gtgctcagtaaatagtgttagttgaatgagtgtcttgcacttcctatgatttcataataactttattgtcattgatgtaaagaactgaactcatggtttttcccttctaaatatatttcttcctctgtgggctgtatttttcttgatagtttcagatctttctactccctaggctgggaatttggacatcatagttggtatttctcttatacttgtactctcatattcattccaatgatgatttttatttttattttttttgctgatccttttctataacagctctccagtctgacttctgtttactatttctattgttactaccatagttcaggtccttgttcttgtttagagaattgcaacaacctccttactggcctttctgccttgtttctccttcagtccttttaactcactacaatgaagctaattttcctaatctaatcatatgattttcctaaatcttttaattgtccacaggataaagcccgaatgctttaacttggaatgcagaaccacttataatgtgacattttctctaactttatctcctatgcatttccttatgtgtcctgtacagcagtatattccaaaatccccagtggatgtctgaaaaccacatatagtaccaaactgtatatatgctatgttttgtttcatacatacctataataaagtttaatttatgaattaggcacaataagagataagcaggctggacgtgctggctcacgcctgtaatcccagcactttgggaggctgaggcgggtggattgctttagcccaggagtttaagaccagcctggccaacatggcaaaaccccgtctctataaaaaatgtggaaattaatcaggtgtggtggtgtgcacctagtcccagctactcgggaggcagaggcagcaggattgcttgagccccagaggttgaggctgcagtgagctgtgatgatgccattacactctagcctgggtgatggagtgagaccctgtctcaaaaaag

SEQ ID NO: 201754 - DNA, 1000 bp, Homo Sapiens
atctggggcaacaaaggtggatcaatcgtgaatccttcactaaaaagcttgctttgtaatagatgaaacagtttaatttttaaatctagtgttataagggtttaagtagtagcacactgtcaaacttctgttggaatgaaaagaataagaactgacgaccacaaaaaagcaattctgcttaaactagtgtctctcacccttggcactattaaattatcagtacaggcggtccgtgacttctgatggttcaacctacgatttttcaactctacaacagtgcaaaaacaaaaacaaaaaacaaaacaacaacaacaaaaaaagtgttgtcagtttgttcatcgacttatgatggagttacatcctgataaaatagtggttagttgaaaacattaatattttttattttactttaagttctgggatatatgtacagaacatgcaggtatgatgcatagatatacatgtgccatggtggtttgctgcacctgtcaacctgtcatctaggttttaagccccacatgcattaggtatttgtcctaatgctctccctccccttgcccccaacccgccgacaggccccagtttgtgatgttcccctccctgtgtccatgggttctcataaacattaatattttcaacttacaatgggtttatcgagatgtaatcccatcataagtcaaggaccctctgcactgaatatacttcattgtggagggctgtcttgtgcatcaaaggagggttagcagcatccctggcttctacccattaggtgctatggcataccttcttccactgttgtgacaaccaaagtgtctccagacattgctagatcgggcaaaattgtgcccagttgagaatcactggcttaaaaggaaaaaggccattgcatggatgtgcaataacacctttagccatttcctaatgatgtcatttaatcagttaggatttttgttttgtttttagtattttgctgttacaaataaagctgcaatgaacattg

SEQ ID NO: 201755 - DNA, 1000 bp, Homo Sapiens
aaaaaaaaattcctggttgttagtaacagaaactcacatagtctagctgaagcaaaaggggtttttttttttgcttacttaactagatttcaggaagagctggaatgaggtgggttttaaggacattcataaccagggacttgaaacacagctgtgtgccctatgtggctccgtgctctcctcaccttttatctcttagtgttgcgttaatttttgtcttgctgctggtgggcttcctctacatggaaggggatatgactgtggtcattgcccatctatagacatctttattgctgtgatctgagagaaaacaggcttcttttcccccagcttaagtttgacaaatcccagggaagaatggtcactggcctagcctaggtcatgtgtttgtgacagttctaaggggtgcgtgataggctcagcttgtgtcacatgcccagggaggtcacacagatgataccctgagggaactgctgtaaacagttaagatacagcagttttcatgcatttttagtccatatggaactcagctcaaacaactagttaagattctttccttgattcattgaaaatcttttacagtctttgttgatgctggtgcctgtaatcccggctactcaagaggctgaggcgggaggatcgaatattcgcagtggcctgtgaatagacacttcactccagcctaggcaacatagtgagaccctgtctcaaaaaaaatagaatgaggctgggcacagtggctcacacctgtaatcccagcactttgggaggcaaaggcaggcagatcgcctgaggtcaggagtttgagaccagcctgggcaacatggtgaacaccctgtctctactaaaaataccaaaattagctgggtgtggtggcagtgcctgtaatcccagctactcgggaggctgaggcagaattactttgagcccgggaggtggaggctgcagcgagctgagatcgcgccactgcgctccagcctgggcagagtgagactctatc

SEQ ID NO: 201756 - DNA, 1000 bp, Homo Sapiens
agctactcgggaggctgaggtaggagaattgcttgaaaccagaaggtggaggttgcagtgagccaagatcgcaccactgcactccagcctgggcagaagagtgaaactccgtctcaaaaaaaaaaaaaaaaaaaagccacctcacagagttgatggcagtgtgagtgctgctttttgtacattacctcattcagttctggacacaggaggggtctccaaatcatgctgcgtgggccagggagtctgatggaagaagtcatacttgagttatggctgtctcggggatgctgtgagttgactagcttgctgggaggctggagtctggctcacacattcagaacatttgcaggttactgagacaaccagtaccaaggacttgttctggagactaaccagatatggaaaacactgaggtaggcagaaatcagtttgtgatgggctattgatggtaaactaaggagctaaatggaaagctctggcaaacccttgaatgagagagaaatgatctaacagagaatcctctaacagaagtaggatgaacagattaaaggaaaaagtagggggagaccaggtgggaatctttcgcaccaagtcaggaaggaaatagagttgtcacaaaagctgagggaaggaagaggaggagaggcaaattcaagggactaaagaggttgactctttagaacttggcgatgatgtgaaaatgtgtaagaaagagtttaggaggccaggcgcagtggctcacacctgtaatcccagcactttgggaggccaaggagggcggatcatctgaggtcaggggttcgagaccagcgtgaccaacatggtgaaaccccgtctctactagaaagacaaaagattagctgggcgtggtggcacacgcctgtaatcccagctacttgggaggctgagacaggagaattgcctgggaggtggaggttgcagtgagccaagatagtgccattgcactccaacctgggcaacaagaacgaaactctgtttc

SEQ ID NO: 201757 - DNA, 1000 bp, Homo Sapiens
aatagaactggtaaagtgtcgcttgaaggaaccattatcccatttcaattttattcctactcctcgtcttttgtcctgggaagatattcagggtactgcctaggagaccccacccctgtgagcccttccctctagatgtcctgttttcctgtccctttagcttttccaactgtcctttgcctcattcttggtttcccttcctttcaggttttcggaggcggcggtgattatgggtgtacatatttgtatattttttgtcatcctgagatacttctaatttcattgtatataggtggttttccctggaattcattaattgtttgctttggacatgtggaaagagccttactaataaaattgattttacttatgaattaaagcccctttttgcacatgtattgtacgactggagtcgttgggtttgggatatttttggtgagtggttggtgaaaagggaaattttttttggaagtgcaaaacatttgtattgttttctttgataatatatttttcccaaaaactaaaaattggttacgtcacaaaaagtattgagagacgaggctggtataatcaactctttcaacccatgttgccacaacttcctgtatgatttgttataatacaatacagattgagatattaacacatgaattttaggttttattagtgttatctgggctggccaccaggtggcataagtggttcaagaaacttgagcttggctgtaatcaaaagcaagatagaacctttccacatcagcaagattattcttatctccacttctctgaatgtttttcatttctttctgaaatagcatgaacataaggctgatctttggtcagttactgagggagtttgtagaaaatagtagagtgagtaagaaggctagagtgaagagtcagtatagtcttgtgtttttcagactctgacccccccccccttcaactgagggtcattttaccagagtcaataaaggccaacccttctataaagagctggc

SEQ ID NO: 201758 - DNA, 1000 bp, Homo Sapiens
ggcggaggctacagtaagcagcagtcgtgccactgcactccagcctgggggacagaatgaagctctgccaaaaacaaaaatagggaatgtaaaatggtaccattgttttggaaaacagtttggcagtttcttattaaggtagacgaacacttccatgtgaccaaacaattcaacttttatttccccaagagaaataaaaacctatgtccatgcaaagactgttactactttatgtataatatcaataaactgaaaataaccctgacttccatcaagaatgaaatggatatttggtatgtttgtagcagtggagtgccacacagcagtaaaaatgaatgattattaatacatacagcagtatctatggatctcaaaaacagggaaagaggccaaacaatgaagtatgtgccatacaatttcatttatttgcaattctagaagctaaactaatccatagggacagaaggcatgtctgtggttgcctggggttgggtgtggagggaaagactccctaccagtgggtacaagggaactttctgggcatgatgagaatattctgtatcttcattgtggcttgatgttatgtttgtcaaaactcattgaactctacacttcagatgggtgcattttaccatatatgtcatctctcaataaactgaattttttaaaaattaaaggaatttacttaattgcaaaagaggactggaaaggaaaggctgccgagcatcttggcctgctgtacccctcttccttcaaaggagggtgtggccacgtccgacagcagagttgaatgaagcctgcatgcttgcacaacatcagaactgtcagaatgtcaagatggaatactttcaattgagttttacaaaaagacaagaaatttgctgggtgtggtggcgcatgcctgtaatcctagcactttgggaggccaaggtgggggaattgcttgtagtcaggagtttaagaccatcccgagcagcaaagtgagaccctgtttttactt

SEQ ID NO: 201759 - DNA, 1000 bp, Homo Sapiens
tttttagtagagatggggtctcaccatgttggccaggctggtctcaaacttccgaactcaaatgatccacctgtcttggcctcccaaagtgctgggattacaggtgtgagccaccgcgcccagcccctgaatttttttaagggtcatgatgcctgggaataagttttgccccactctgcagactttaatgcctctttggcatagtctatcaaactattaacaaatattttaattttaataaatattgcttatgacaactattttttaaaaagtggagttgttctgtttaatctggagagtagggtcagagtcctgccttcatccggcgccctctcctaaattattgctctcatactctaaggcaactctgtggatcctccctgaagttcacagcttgaaagagctttgcagttattctttcaagatgagatcggcttgtcctaaatccagccctggggttggaagcaccttttagggaagcaccctaaaaagtgtgtctcctggaggtgaacagtgttaaagtataggttgaaaaattgcacccatgggtgcacagatggatgtctgtgtgcctacaagcaggtagaacaaactatccattaggctgagctggtgagagtggaaaaataaataattattcaaacttacctctttcttagagaaaacgaatagctttcacataagtgtggagttcctgttccttttaaggaactctaggctgggcatggtggctcatgcctgtaatccctgcactttgggagtccgaggtgggtggatcacctaaggtcaggagtttgagaccagcctggccaacatgatgaaaccccgtctctactaaaaatacaaaaaattatctgggcgtggtgacacgcacctgtaatcccagctactcaggaggctgaggcaggagaatcgcctgaacctgggaggcggaggttgtagtgagcggagattgagccactgcactccagcctgggcaacaagagtaaaactccatctc

SEQ ID NO: 201760 - DNA, 1000 bp, Homo Sapiens
ggggcgggaagacctcttgatcccaagagacagaggctacagtgagcagagattgtgccactgcactccagcctgggcaagcgagactccgtctcaaaaaaaaaaaaaatacaaaaattagctgagcttagtggcgcatgccagtaatcccagctactcaggaggctgaggcaggagaatcatttgaacctggaggatagaggttgcagtgagccaagatcacgccactgcactccagcctgggcgacagagtgagactgtctcaggaaaaaaaaaaaaaaaaaagaaggaaccaaaatgtagtgatcaaacccttccattttataactgggaaaactcaggcctcgtgacaaggcagaaagaccccaaatggtagaaaacagctgctgtaaccccttgtgctcttgtcctcactgaggggctgaagtagctcttagagctagaggggtgttagaggtaaccccgctccagaggactgactgtagcccaaggcaagagagggagtttcctgaggaaggacccagatggtgacctcagggtgggtgaaggaggtattctttgaatttctcttggagttgggagacttgatattgtccgacctaatctgcagtgctgaatcctgtcccacaactaagggggaccaattctcatgtccttgatcctctttgaagcaccttgggcttgtctgtcccacatcatcagtggcattaagcacaagagataccatcttagcacaatccttttactctaaatgttcaggggaggggtatagcagcaaggagagggggtctctgtgatggcccaaggagatatttttgatactgaagacccaggcccccaggggaactgcaggaagcgtctagctcataggcataggcctttcagtaaaggtcacccatccagggatccaggatgtagctggttccaggtgatgaaatcttcccaccttatgactggggaatgtcaggtctagtagcaaagcaaagagaccccagatggc

SEQ ID NO: 201761 - DNA, 1000 bp, Homo Sapiens
ggctagattgggtatcacctttaggataacccaaaaggtggcctcataagaactgtctcagttcatcaattttcacattttagcatctctgatattgagatagagcatacaattgatctcactttaggattaatggtgtcttacaattgctgttggccagatagcagtcatgacttagtgtcattgcctgcctatttgagacaggaatgtgagtcctgtcttttgtctcaaaaacttccattattcttacctcctggtaagatcaagctccagtatcaaaagttgcatagtgggtacccagagagaaaatgctgatgatcatagtgtagtactggcttacgaaatgctagccagggtgcaatggctcatgcctataatcccagcactttggcaggctgaggtgggcggatcgctcgagcccagaagttcaagaccagcctgagcaacatgatgaaactccgtctttactaaaaatacaaaattagccggatgtggtgccgcatgcctgtaatcccagctacttgggtggctgaggcaggcgaattacttcaacctgggagatggaggttgcagtgagccgagatcatgctgaaggaaggaagggagtaagggagggagggaggcgagagagagagaaagaaaaagaaatgctgcattttcagttctattgatggcacagcaggcaacggtgtgtgaaaaacaggcacttaaagactctgggccgggcacggtggcccatgcctgtaatcccagcactttgggaggctgaggcgggtgaatcatgaggtcaggagttcgagactagcctgaccaacatggtgaaactatgtctctactaaaaatacaaaaaattagctgggtgtggtggtgggtgcctgtaatctcagctactcgggaggctgaggcaggagaattgcttgaacccgggaggcggaggttgcggtgagccgagatcgcgctactgcactccagcctgggtgacagtgtgaaactttgtctc

SEQ ID NO: 201762 - DNA, 1000 bp, Homo Sapiens
catgtagagaaaaagctgcaggtgacttgaaaccctgaggcgtctatcatcctttccctgtaaaggaagtgtctcttaaaaaaaagggagtgggggaggaggtggaggatccctaaagaattcttaatgaggtgatataatcattgtagtccatgacaaaatggaccagccaggtttgcatagcagtagacatattcctactgtacatttatccttcccaaatatgtcacattctaaaatagttgacaaattattttgtggaaagaggaagaagctggattggagtgggagatctaatctggaggagcaaagaggtagttgtttattgctatgttcctggcccatcaaatggccactttccaaactgacccacattttaggaaataaaccaatctggacctgtttcaaaaggatagagatgcttttagattgtcaattctcacttttaagttaaacaatcacaaatatctttagaaatagggaaagacatttgcttcaaaatcaaagaatgagtgtggatctttttaatttttttttgtttcaagtcctacagtcatcttacatttagaccttcatggtagggtgatatgagtgctaaaaaaatttctttctagtagccaggaaacagatagataagataaaagcaaatgttccagatttaagacttcttaggatgagtacaaggaagagagaaatagtatggaaaggacattttttagcaatttataattttaaaatggaatttgccaaacaagggagaggaaaaaaagtcaaaggggaatttttatctcaagatatttagatatggtttataaaaaaataatattttctaccactaaaaacactggtattatctcagcatcatgggcaatttttccttattacatgccaatatttgtacaaaaagggcccccaaatgtgtgaaatataatcctaaaaaagaaaataattggaacacatggatctgttacaattctacacagggggaaacaagctaagc

SEQ ID NO: 201763 - DNA, 1000 bp, Homo Sapiens
ccagagtccattttcaaggcaccattctcatctttctcagtggcaggtcctcagcaatagggttagaaggctgctgccattcagatagcacagacaagacagaggtgagagttggcattggattctgtaaaagcgttggccactggtgcatttttttgtacaaccccaggggtaccatccacagcgattctcggagtcatgctctagaatgtcgcactggagttgtgtagcatgtgctcttgagatccagcctatgtgtggcctgggaaatgggagtcatgaatccagtcactggcatggctgtcattcatctggctgggtgactcccagcaggtccccatgttctctgggctttatttcctcacttactcaatgggagttggcttcagtgatggccaaaagccgtttggtcactacatgctgtggatctctgccatttggacttagagacagtaccactgaaacatgcctgaccacacacctcttcaagagtccaaactttgattctaaaagggcacatgctttgctttcttcagaggctgagtcggggcctcatctccggtgcgcagagcatgaagatgttactttcttttggtggaagccattttggtttcccatacccggcgaccggaagaattctggagggagtctctaattgcaggtggaggccagagctacgtggaaatgctgccttttgggatttcctgtaatgcagttacgtgcctccaagaagaacaacggtggctgcaaagaccagaacgacttcacggcaccgtgcgtagttttcagttcctggcttttggcatgttggagagagacctgtgcttattggatggagtgagaaactaatacccatccaggcctgctgttccaaactttttcagttgggtcttttccttagccctgcgattagcacgggatgaattcatctgctttttggactcactgaccatctcagactgtttttaacatgcttggggtttgataaaactggaaagat

SEQ ID NO: 201764 - DNA, 1000 bp, Homo Sapiens
tatgtatatacccttgtagctaccacccccactcaaattatacatttccatcactcagtaaattgctttgtgcccttttgcagtctctcttactccttgccccaggctaccattgatctgatttccatcactgtagactagtttttccaattctagaagttcatataaaaggaatagtacagtatatactcttttttgcctgattttttcacttaatgtaaagttttgtgagattcatacatgttgttgcctattcaatagttcattcttttttattaccaaataatattccattatatcacacatcacatttgtttttccatttgtctcctgatgtgtatatggttgtttctagtatggggtgatgttgaataaagctgctatgagcgttcgtatcccagttttattggctcatccactgttgtccaaaagaatttcttgaactctgcatttgtcctgaaggattctctgattgttcttcatacaagaactctaggaatataacatggaatccagctaatttctgaaactcatgtatttaattatacatttacactaacggccgtgtgcactgagaaaaatcctcctgattaatggcattgcttttagagtcagtgatcttttatttctcatgcaagtcatagtcaccactgtcagtcaggcttctcagttccaagcaactgaaaccaatcctggctcccttaaaaagtagatgaatctggccaggcatagtggctcacgcctgtaatcccagcattttgggaggtcaagccgggcagatcacgaggtcaagagattgagaccagcctgaccaacatggtgaaactctgtctttactaaaaatacaaaaattagttgggtgtggtagtgcgcgcttgtagtcccggctacttgggagactgaggcaggagaatcgcttgaacccgggaagcgtaggttgcagtgagccaagatcgcaccactgcacttcagcctgggtgacagagtgagactccatctc

SEQ ID NO: 201765 - DNA, 1000 bp, Homo Sapiens
aatcataaaggaagaagcacattagtcacaaaagagaccacatttattcctggcattaaattctaaaacagatttctcatttgggctcttacataggggaatacagagtgacagtataacagtatccttaatgacagttttacaacaaatacagaagcaatttttatgacttttatatcttgaaactttttatccacttatagtacataaagtactctatatagtactttaaaaactgtggtttatcaatgtttaaatgtttttggacttttttgtgagaaacagttattagcaataagtttttttttcaaaggcatttcttctccaagctaggccaagtgataaaattatagagcaaaagctaattagaatggcaacaataggccgggtgtggtggctcacacctgtaatcccagcactttgggaggccaaggcaggtggatcacgaggtcagaagatcgagaccatcctggctaacacagtgaaacactgtctctactaaaaatacaaaaaaattagccgggcgtggtggcgggcgcctgtagtcccagctgctcaggaggctgaggcaggagaatggtgtgaacccaggaggcagagcttgcagtgggccaaggttgtgccactgcactccagcctgggcaacagagtgagactccatctcaaaacgaaaaagaatggcaacaatagaaaattgtacttaggctgggtatggtggttcacacctgtaatcctagcactttgggaggctgaggcgggaggattgcttgacctcggaagtttgagactagcctgggcggcatggcaagacctcatctctattaaaaataaaaaagttggttgggtgtggtagtgcatgcctgtagtccgagctacccggtggtggggggcggtggggttgctgaggcaggaggattgcttgagcctggagatccaggctgcagtgagctatgatcatgccactgtactccagcctggcaacagagcgagaccctctctc

SEQ ID NO: 201766 - DNA, 1000 bp, Homo Sapiens
tggcttggggtgatttcttgctttgttttgtttggtggcaggaaattgaggctcttctctgaagttgcttctgtttttcccatgaggtgatagtaaaatcatcccccaagagtaaggaggcacatcggagagtcagacatttgaggatgggggagaatggagagctcattgataaataagacaatagaggtttgctgagcagggttgttgaactgctcataatcatgaacttggagtgatgctagtctctgtggttgtggtttactccagtattacctagcagaccaggggtagtcatgaagatggctgagccagggttggggtattgccaagttgatgtgatgaaaagacagtgtagcaaggagatgtagaatattggcaggagacttaatgaccagtttgagtgtctgttacgtcccttataaaaaaactatgggcatattgtagttggtgctggttagatttatttatttatttatttttaatttttttttaacccctggaagaaaagtgtcattacactggaggaatgcaatttggcaatgacctaagacagcgtttggtccctagaacagcagcattagcatcactagggaaattagaaagacagattctcagcttccaccctagatccactgaaccaaagactcgggctggggcccaacaatctgtgctttaacaagcacataaggtgattcagattagtgctaatatttctgaataattaatctaagagaaaagcctatgaatggtcaaaaagttggacattaacagtaatattaatgaaaataaatgtgagttctttaacattgggagcttgtctgtcttgtgtagcattcccaacactccgaacatctgggtcataagaggggcaaaacgtatgtggaatgaaggactgaatgagtttataaaatagtacaaagatgaaggagagctgggaggagcttccatataataatctacagtttacttgaaagctcattaaatctacctgtaccct

SEQ ID NO: 201767 - DNA, 1000 bp, Homo Sapiens
gtgagtcaggcagcagcctccactgcgccttggacacaggtggctgacagtgtccacctggactggctttgcaccccttctgaggtcacagttgtgtcccttgaaaacttgggcaggagcacctgactggcccagcttgggtcatgccctaggcccagcagtgcgggaggccaggaaagtaggcttggggaggctggcctctcctccagtttgaagcatggcaggggttccgggggaggctgctggggggcctgcgagcatgtccagagcaggaatgcttggggtggtgtgtgctttgctcgtctgggcttatctggccgtggggaagctggttgtgcggatgacgttcactgagctgtgcacgcatcatccatggagtctgcggtgtgagtccttttgccgctccagggtcacagcctgcctccctgctccagccccctggctgaggcccttcctctgccccatgctcttctcagacaggaatcctgtggaatgtcatctctttggggaggccgtctctgaccctgtatgcaaaggccttctcccacattatttttggcaccccactttcttccccgtgaaagcaaattgtttggtgtctttccgtcccactacagtataggcccggttcagacagaggccttgtccactaggcctgcgctatctctgcggagcccagccaaagcaggggccaggcgaatcttttgttaaaagaacaatgcgcgctgggcacagtggctcacgcctgtaatcccagcactttgggagtccgaagctggaggatcacttgagcccaagagtttgagaccaccctgggcaacataaggagaacccatctctacacaaaattagctgggcgtggtggtgtatgcctgtagtcctagctacttgggaggctaaggtgggaggtggctgaggtgggaggatcacttgagcctgggaggttgttgcagtgagagccatgatcgcgctactgggcaatagagcagaacccagtctc

SEQ ID NO: 201768 - DNA, 1000 bp, Homo Sapiens
ctgaaaaacacagcaggagaacttcttgaagcatacacaagtatcagtagccaaatcgaccaagcagaagaagggatatgagagattgaagatgaacttaatgaaataaagtgtgaagactagatgagagaaaaaaaaaatgaaaaggaacaaacaaagcctccaagaaatatgctatgtgaaaagaccaaacatacatttgaggtgtacctgaaagtgatggggagaatggaaccaagttggaaaacactctgcaggatattatccaggagaacttccccaacctagcaagataggccaatattcaaattcaagaaatacagagaacaccactaagatactccacaagaagagccaacaacaagacacagaattgtcagattcaccaaggttgaaatgaaggaaaaaatgttaagggcagccagagagaaaggtcgggttacccacaaagggaaggccatcagactaacagcggatctctctgcagacaccctacaagctagaatagagttggggccaatattcaacattcttaaagaattttcaacccagaatttcatatctagcctaaataagcttcataagtgaaggagaaataaaaccctttacagataagcaaatgctgagagattctgtcaccaccaggcctgccttataagagctactgaaggaagcactgaatatggaaggggaaactggtaccagccactgcaaaaacataccaaaatctaaagaccatcgacactttgaagaaactacatcaactaacaggcaaaataaccagctagcatcataatgacaggatcaaattcacagataacaatattaaccttaaatgtaaaggggctaaatgacccaattaaaagacacaggctggcaaattggataaagagtcaaaacccatcagtgtgctgtattcaggagacccatctcacatgcaaagacacacgtaggctcaaaataaagggatggaggaatatttactacgcaaatggatagc

SEQ ID NO: 201769 - DNA, 1000 bp, Homo Sapiens
aatgcagatgttaaggtccaacccgacttccttactgagtctaggtgtgggggcccccctctcaccccttcctccctgcacagctctggctcttcctggagtcaggaggctgtgtgtcccacatctgctgtggtctggaaggtgatcccatccccaggcaatggggaggccaggaagggccagagccagacgagggcccagcggggccccagggctgcctgcaggttgtggcagggacccaggtcataggagtgctggccccgagcccactcccatgtggtctggccccgcagcagcagcatcccatggaagagcagcccagccccgcacagcagcgcacccgccacgcacgtgtccgtcacgaaggccaaggcaaactgtgccagagacactctgcctgcaataaaagagcagagagggccagggaggggcagtggggtccggctttcctgccacctgctcccctccaccacaaagcagggctcattcctccgctcagcaaaccctgtgtcgatactcgctggccagcccgtgctgggtgacaagaacgcactggtaaactgggcagacgcagccccctacttgggatacggcttcattcctgcatcacagacttggtgagcacctcctcagccctggaggcggtgccaggcactagagggtgtctctgcccttggggagctcacagacattaaagaggccattcttggctggatgcggtggctcacacctgtaatcccagcactttgggggggcgaagcagatagatcacctgaggtcaggaatttgagaccagccttgacaacacggtaaaaccccgtctctactaaaaaatacaaaaattagccagacgtggtggcaggcgcctgtaatcccagctactcaggaggctggggggctcaggcaggagaatcgctttaacctgggaggcagaggttgcagtgagctgagatcacgccactgcactccagcatgggcaacatagcgagactcccatctc

SEQ ID NO: 201770 - DNA, 1000 bp, Homo Sapiens
agctcacaaaggttctgaaaatgttcacaatcagttccgttaagccagtgctggtcggctgcagcgcaccactgcatattgggaattgaacgggtagagggttgtctttctcttgggacaagcacactttaaggggagcgtattcattgcaggaccaaggctcaacgtgcactgctccccacccgtcccagctcctctttatgcttgtgggggccagccactctccagtcctccccaggaatatacgtcgcaaccaggcgttcttttttcattggcctcattcttcccagggccggctcagaggcccccaggtctaattgccattggtttaactgctgtttaataaatcaaactatttttctgactaaatcttgctaatcagtaaatagtgatcatctgaattctccatatgctaaaaagtcatttttccaaggggtaaaattaaagtaatatttggcataaaaaaattctaatacacaggcagacacctttatgtctaatatctcaactgtagaggttagataatcacagagtgctatactgtgttatagccttaatatgtagagtgcttacagatcactaagaaatatttaaataatatcactaaataggccaaaatcctgaaaagcaattcgtaaagaaaacatacaaataaccagtaaacacaagatattcaacatttgtagtatccaaataaaatataaactaaaggccaggtgcgttgtctcacgcctataatcccagcactttgagaggccaaggcaggtggatcacgaggtcaggagttggagaccagtctggccaacgtggtgaaaccctatctctataaaaatacaaaaattagccgggcatggtggcgtgcacctgtagtctcagctactcgggaggctgaggcaggagaattgcttgaaccagggaggcggaggttgcagtgagccgagattgtgccactgcactccagcctgggcaacagagactccgtctcagaaaaaataaaaat

SEQ ID NO: 201771 - DNA, 1000 bp, Homo Sapiens
tatgccaggaagcaggatcgaagaccaaatatatatttcacaatattacaaagataaatatagtttaaatgtcctcaggtctttgtaatttatattagattttaatgagtcagagatagtaatatctagggtagtccttctcaatcacatttggtgagagaatcacatcataatgttcaaagacagcaaacttcaacctgtgggtcaaatctggcctgccacctattttagtaaataatgttttattgggggaacaccgctatgcccgttagtttacatattgtctatggctggattcatgctgcaccgccagaattgagtagctgctacagagacattgtggtccacaaagcttacatttattgtctagcccttgatagaagagatttgacaacccctaggtattgtggactgagtgtgtgtgttccccaaagatttgtatgttgaaattctaacctccagcgtgatggtgttaggaggtggggcctttgggaggtatttagttcgtgaaggtggaaccctcacaaatgggattagagacacagagttcttgcttctttctgtctactctctgccatatggggacacagcaagaagaatgccatctgcaagccaggaagagggtcttcaccagaacttgaccatgatggaaccctggtcttggagggtctatagaacccagcctctagaactatgagaaatgtttgttgtgtgagccacccggtctatggtatttttgttagtagcagccagaactaagacatctgtgctaaggcatctattatatattatgaattaacttctttacatttagaatgccttgtaagaactgaaaaaaaaaatagtcactcagaatgttttctgcaggacataattctttcatagaacttgagttgattaactctagagtaatcactaaaaggatagaaagagaatttatagctaccaagctaatagagaaggagaaaggaaataaaataataaaaaccatttactgtcc

SEQ ID NO: 201772 - DNA, 1000 bp, Homo Sapiens
caaaagttaggatgtcctctggaaagcctctttgggtgtctgatttcatatctccttcctcatcagagaatggcgtcgcctcctatttgatgagaatttaaacacatctagaacatgtgcttatctttttcctatctcctgtctctgggatcacatcatactgcctccaagaatcctgtccttaacccccttccttagaatttacagcatagcctggaaacaaccaagcattcatctttattctaaagtacctagaacagagctggatctgtgacagatgctcaatggctgtttaatcaaacaggaaaaactcatatttggagtagggagtagggggaggcaaaatggtactctcaatgaattataatattttaaaatttgtcaatagagaatataatacaaaccagagaagcataaaggaaggtcatgctaattttcatgaggtagtttctaactccaggaacaaaatggtgaaagggcattctaagtcaaaggaatttatcatgtaaagacgggagtaacacacacacacacacacacacacacacacacacacacacaccccactctgctacaaccacaacaaacactttgttgttcttcaaatgcaccaagctctcttcagcagtgttttgtagtgcgtataggacatctttgaaatattctggatatttaacctttgtcttcttggcatgttaaaaatatcttctggcggctgggcgcggtggctcacgcctgtaatcccagcactttgggaggccgaggcgggcggatcacgaggtcaggagatcgagaccatcctggctagcacggtgaatccccgtctctactaaaaatacaaaaaattggccgggcatggtggcgggcgcctgtggtcccggctgcttgggagactgaggcaggagaatggcgtgaacctgggaggcggagctggcagtgagccgagattgcaccactgcactctagcctgggtgacagagtgagactgtctcaaaaaaag

SEQ ID NO: 201773 - DNA, 1000 bp, Homo Sapiens
tttttcatatcaaataagatcatacttagtaatggtttacttaaagagaagtaatacttgtaacttagaatcttttcctgggttactaaaaccttaagggaaaacactgattctaccttccttgtcaacaaagcgtttctaacacaattctctgtaacagacatttctctgtggatagagtttagcacttgttttactactgtatgacagtacctggtgacaagagagaaaataatagaataattagcaatgttctgtaggacatgaaaagtgattgaagtctacgagagaaggaaatcagatcgatgttattttaaaaaaatgcatcacaaaaatgattctcttcaaagcaaagcctcctacccaggctggggccagctgtgctctgccatttccctgccacagccctgtccgtccacgttggctcttaccagcagtaccatctgctgctccagcagtggccttctctatggtaaggcaggccaattgggtcaaatcttgtgatatggcagatgtccactgagagctaagattgggccaggctcatttttatgtgtgtccaaagccaagatttcaacttggtgaaaggctgtggaatttatttccccaagtgttgcccaaactctgttcttttcttcaactgcctccttgggctgagatgattgcttaatgctcttaattatgctggatccctctgtattttcgaacacctgtgggtaattcagatcatgagtggtcacagaggctggctcgacaaacggcttccctttccgaatgggaaaatcccagggagctggaccatgcaccgtgtgtctggagctgagtggaggctgaaagaggatggaacacttcccttgaacttgaactggcattgtgttgtgtccaagtatccttcacccttggattggggagagtcttacaatgaataactcagaaaaaagttttcaaaataatcctagattgtaagatatctacgaccattatccatagccatatcttt

SEQ ID NO: 201774 - DNA, 1000 bp, Homo Sapiens
tgtgaatccgggaactcgagttggaggtgtcccaaacggtccgtggtgctattgctcactagaggccttgggtctttgtttgacctgaggggtagggaggtcctgcctacagtctccgtgcgctcagctgagctggtgtccctggcgcagagcgcggacgagttttgtttccttttctttttcttttttttctttcctttaagtctcggtctgtcgcccaggctggagtgcaatggaacgatctccgctcactgcaacctccgcctcccgggttcaagcgattctcctgcctcagcctcctgagtagctgggattacaggcgcgtcaccacacccagctaatttttgtgtttttagtagagacggggtttcaacttgttggccaggctggtctcgaaccctcgacctcaggtgatccaccggcctcggcctcccaaagtgctgggattataggcgtgagccaccgcgcgcggccgagttttgtttcttttaaaaacaagacttaggagagcctgcggagacccggaggtggggtgcccaatcctccctctcccacgttccctgcagccccatcttccagaccgttgctgctggtctctcggggcagcttctgcctgggcgcagatggggaagctgggccgagttggtgcagtggaatgaccgggagtaaccccggcgggcggcgcagaactcggagctccgccgcggggctgggctgggctctgccgtgagggtgggggtgctgggcgcgcgggctgcggtggccccccggagactggcccgcagcgcctcctagccggaggacctaggaatcggccggctctactaggtgtctttgctcgcggttccgactgtgaatccggtgaagaccggtggttgcagacggggaggaactatgaggctgaggcaggagaatcccttgaacctgggaggccgaggttgcagtgagccgggatcgcactaccgtactccagactgggcgacagagcgagactcctctc

SEQ ID NO: 201775 - DNA, 1000 bp, Homo Sapiens
agaggcgtgaccatgcacccacaggaaggggaccccacagctggacctagcttcaagggacatggaggggcctcgaggggccccctgctggagggagaagtaaagtccagtggcacatcctgggcaagtgttcagtttccaaaaccgagggaaatccagatacttcccaagaaaagaggttctagaacgaggattttcagctttagaaaattaaaaagctgaagtggaaaagaggatggatttcctgtttccaggatgcaaaggcctcccagaaaatcagaaacccaaatggaagtcatgaaagaaaagataggcttggtggttgcttcttcattcacctgtgaatgttataggctctggaagaagaaggaacaggtctggagatgattaatatgatgaataaataatagtggaaattttccctgatcagaagagggcatgagtctgcacagtgaaagtgttggtagagctccaggcagggttactttaaagaaaaagacacacccttggcatctcctggtgacattcttgaaatccacagataaaatctcagcgacctcccacagaataaataaaccattgacaaaggagaaaaaaaaaaaaacattggcagcagatttctcatctgcagcactgaaagccagaggaccaaggctggcctgggcccaggattctcaaccagagcattcatactgttccccaaccagattaagaaatagattttgagccgggctcagtggcttacgcctgtaatcccagcacttcgggaggctgagatgggtggatcacgaggtcgggagatcgagaccctcctggccaacatggtgaaaccccatttctaaaggtatagaaattagctgggtgtggtggcgcgcgcctgtggtcccggctgcacaggaggctgaggcgggagaatcacttaaacccgggagacagaggttgcagtgggccgggatcgcgccattgcactccggcctgggtgacagagcaagactatctc

SEQ ID NO: 201776 - DNA, 1000 bp, Homo Sapiens
gaagctctgctcagtctcagactcctcccagttaccaccactcgcagttgcttaagagcacaaagtggcacttgttttgcccacagaacatctgctgaagacaaaacttgtgtttatagctcttcacttcaaaagactggccgtgttataaaaagaaagggaccatctgtccctcttctggaccccagcgcctcttggaagagatttctgtgcaagaaggcagtgagaagtcagcgtcgacttcagggaactattttggggccggaaaagaatagtgcctacccgccaaggggaccgtcgccggcagatgaaagccagctttgaggaggccatgcgatgggagatgctggcccggaggaggtgggctgtgcgccaatgatgctgcccagatattccagcagagcagagaccccagagcagagaaccaactggcaggaccgagggatgtgagggaaggcgaaggggcagggctgtgaggcactgcagctcccaggagcaggcgtgagaaatgtcagcaacagcttgctgccacgcagagtcagatatcatgtttgcatcacccatgtgcgttccttcacccgacttctggggccattcttatctgcaaggccccttagggcagttctgcctcttgggaacaccttaggctgagtgatcgccttcccgtggctgagagctgagaagttcttccagactgcacaggtgtccggtctgtctgtgatgcccgcttaagactcatctgccttaagcccctgggcaccaatatagaaaagtcatgtgagtccaggagaagctgggcggaggtgaggtggagccaggattagcacggggtggggcctgcagaggggaggaatttcccaggcttcctggccggcatctcccaggctgagcatcttccagactgaaactccctaagaagggcttggccctccccgcctgcacggtgtttcatcggtttggaacagtcctgtttccttcccctcccctcgtccccaacagg

SEQ ID NO: 201777 - DNA, 1000 bp, Homo Sapiens
ctaatcatgtttcagttcactcctgttcttcacagtaattctttttaattgagctttctccatgcctggctttgtccccttttcatgtcattgaggctggtgatttttatggctgcagctgttgttggctacacgtatttatagacagcagtttgcttgattaggatgagaagcatgggtggctttctccatggttgtataggtcaggtcctgaatcccccagtgtgcttctgtggcctttggagtcagtcagggacagaccttgtcctgagccactgtgggcagtgaagacaggacaggctgaccaggtttgtagactggaaacagaccagtagacagagcaaagatgtctctccaccagtcatgaaatttggagatcaagggctgattcgagaagttgcttaggaagccactgagtattgtaagacccacctgtcacagtgtccttgactttgaccaccaactgctctaagtctgtcactcttttagtctcttctggaatgatcttaggacagtctgtcttgttggagtgttggttgtccataggaagtaaagaaaggattccactattctactgagccatgacttcttcatggttgttgctttggcaacctactatctctgaccaacatgtggcctgcctcactgcagccagccattccatgtgcagggaacaggcacagctttcaccttaaaatccttcatctcctgcccttgctaccagtccctgccacttcaggcttcaggattctcatctatccctctgaggggttttctccttccactgagtagagtgcactgccctgagtgagccgcttccccatcagctggatcccatctcttataaaaatacaaaaattaaccaggcatggtggcacacacctgtaatcccagctacccaggaggctgaggcagaagaatcacttgaacctgggaggcagaggttgcagtgagctgagatcatgccatgcactccagcctgggagatggagggagactc

SEQ ID NO: 201778 - DNA, 1000 bp, Homo Sapiens
tttccttcaggttgctgatacatttgctgcactgtgggggagggagtgggtatctgagttagtcagttttaccatttataaaatgtttggtggaggaaattgaaactaattgctaaattgttagtaaccagtgcattaactaggaccctactgagtggactgaaagaatcgaaaatgtttaactggttgagaggcaatgatgttgcaaatggggtattcttcaaagctccttctttttttaaaccttcaaaggcaattattctgaatgtaaactacagaccaaattgcagtcttctgtaagcatttcagagattacctcaaatattttttgattaaaaaactcttccgtggtcttttgtgcttcagaactacccagtacaacagggtcttcagcctgctcaggacctctaaagagagctagcacacagtcagccaactttggctgcttcaactcctaggaacaagaaatgatgctgagataatttgtctggcaggtattatcagcccacaatgactgctgtcatttagcctcaaaatgtttatttttccttttacaatgctgtatttctttagaaccttcctattccgagtgtggaccctaggccagccccatagacttcccctggggacttgtcagaaatgcataattttaggccccaccccagacctgttggaccagaatcttcatttaacaagatgcccagaaaacctgagataatcaaagacccacaactaagtaagacctctcaggatctcaaagccaagtgttttacagagaagagaagatagaaaaggcatattatctaggagtggaaaagaattttatgctgaaaatgttgaagagagaattcaaaatcaaattcaacattccacctaggaggcttccatctctgcttaggagctgagtaatggaggtgattggtgtaagtgttcagtacctatgaagacctaactcttgagggagagactccaatgtaaacttcctactcaatactgcctt

SEQ ID NO: 201779 - DNA, 1000 bp, Homo Sapiens
cagaaattgcactaggtacttcaaacagatgagatttagtataggggcttggttacacaggtgttggaagtagaagaaaaaggcaacacagggtaactggagataataactgcagaaggcagctcccacatcacagtgcagagtgtaaagggccaccttggagctcagagacagacagtaggtgaatatccagcacagtgggcagccttgaggcagggaagcctgtgtgagggagctgctgctgctcctgggacagaatcatggaggcttgcactaggaggtgggatgggatagaaataaatagacgagagagcgattttaaacctagagcctataggacctgatgcttattgggtaggaaataaaaaatgactggcaagattctgacttgaacaactaaatatctggggcactgctttttgagatgcagaaagcaagagaaacaggcttagagcattgtaagtgttgagtttagaacatgctgagtttgagatgtcaagcaaatggttagatatgtgaatatggtggacagagaagacatgtagactggagttatggatgtggaaatcaacatgcagatggtatttaaaaccatggaaatggacgatatcatcgagggagagaatggaagagagagaagggctagttctgagcccttgggaatctcctgtgttgagagatcagtacagaagcgacaaggagcaaaggaaactgagatggggtagcaggaataatagaaatcaagagaatgcagtcctatagaaaccaagacaggaaggaggcagcagtccactgtttctagcggacctaagagatgcttaagatgtaacagaatgatgtccatggatttagctacatgaggatatctggctacacgcctgatggggtagtaggctgaagagtttacgggaggcaagggcactccattctgacacggagagtccaagggaatgtaaaggccaaattgtttcctcagttcagggcctacttggagctaggc

SEQ ID NO: 201780 - DNA, 1000 bp, Homo Sapiens
gtaaaccatgtgacaagagtcatttcttaccccttattcatgtttgtaaactccacagtagttggttctttgccttgcatagagtatgtgctcaataaagacctactttctgaaaggttcacagagttcagcccaacacaggacaagttctagaaggcaagaagttaacctcaagattcaaagtagctctgagaattaagaaccagccagacccttccactgagcctagacccaattaattacctctgctctaattaagggaatcagtaatgtaagtaattgtaatatgggcgatatagtttgcctgtgtccccacccaatatcttattttgaattgtaatccccatgtgtcaagggagagaccaggtggaggtaattgaatcatgggggcggtttctcccatgctgttctcctgataatgagcgagttcacgagatctgatggttttatgtgtttggtagttcctcctgcattaattttccttcatgctgccttatgaagaaggtaccttgcttccccctttgccttctgccatgattgttaagtttcctgaggccttcccagccatgctaaactgtgagtcagttaacctgtttcctttataaattacccagtcttgggcagttctttacagcactgtgaagacagactaatacagtgggcttgttgacatagttttgcccttttatgaatgtgattatctcaattttattatgttaaggaaggacacagtggcccacacctgtaatcccaacactttgggagtccaaggcagaaggatggcttgagcccaggagttcaagaccaggctgggccacaaagtgagaccctgtctctacaaaaaattaaaaaactaactgggcatggtgatgcatgtctctagtcccagctactcgggaggctgaggtgggaggaccacttgatcccaggaggttgaggctgcagtgaaccatgttaccactgctgcatttcagctcgggtgacagagcaagaccctgtc

SEQ ID NO: 201781 - DNA, 1000 bp, Homo Sapiens
ttaagcgccttaaggcctcatttaacttgagttaaagaagtgtgattttggaggacccaaagattttccactggtgtagggaatgtctcctcccggctctgagagacttcctccaatccacaacctaccgcaggtatgtgttcttattaaaaggggcagggacaaaagctctgcctgtccctcttgtactttcaggctataatcaatcagcaggcacacctgttcagactgtgacattgaatttccaggatcagaaccagagcctggtacagacacaagccttccagtacttgtattttaagttccatagatgcttggaccttttgtgggctcctgggacagtgatcatgaaagaagagtgctcccaggggatgagcaagatgatcccctttggctgggaagaaaagattccatgtccatctggtttttattactcctctaaaaatgttccctttatagttttataattgtacttaaataaaaataattgcacttaaataaaaaaaaattggggagattatagcagaagctgttggtgtcccggccatagctgtgtcccttggtctgccacagaggtcactcccagaatacacttaggactccctgtgtctccttctgagggtgacctgagccacgatgttatgggatggaggctaacacctggtaggccccacatttttgacaatttggttttaagaaaactcataggtatggccacacgtggtggctcacgcctgtgatcccagcactttgggaggctcaggcgcgcggatcacgaggtcaggagatggagaccatcctggctaatacggtgaagccccgtctccactaaaaatacaaaaaaaaattagccgggcctggtggcgggcacctgtggtcccggctactcgggaggctgaggcaggaaaatggtgtgggcccaggaggtggagcttgtagtgagccgagatcataccactgcactccagcctgggtgacagagtgagactccgtctcaaag

SEQ ID NO: 201782 - DNA, 1000 bp, Homo Sapiens
agcagcccctggctccttgcaagctacccttcagtgctctgtgtgaccaagtccaagtcgatgcaggagggcaggcactgggtcagcaagccactcagtgaatgtgcaggtgaggccgttcataggcgcttgtgtgcctcccagcaggctgcctgccattgccagggctggccttcagcagggtgcgccaccatggcctgagtggttttctgctgaagtccgtgctgatttggccagtggataggcatcacctgggtgcaaaaccattgtctccaggtaggaatgacctcagctgtttgctccgtgtctcgctcagcctgtagatgtgtccctcatcccttcatgcctccctcttcactcctcttttactttctactcggggcttgcatgtttacaagagaggtgaacccaacagaaactagtataggccaaaaggaaaatgtgctgaagctcacacagcacagtcgtgtggaaagggcagcagtgactgcttcatccagtgcccttcccacagccagtcagttgcgacccaaggggcttagggtaggagtgtttctccataggggaagagtaacagcctgcacccaccacacacccaaagccctacatcctgccacactgagacctcacttcatttgggcgggtccctcctgggttgcagtttccttcattgctcccctgtcccaaatactcaagtctctctcattaaaaataaagagcaggccaggtgcagtggctcacacctgtaatcccacactttgggaggccaaggcgggtggatcacttgagcccaggattcgagaccaacctgggcaacatgacaagatcctgtctctacaaaaaataacaaaaatcatctgggcatggaggcacacgcctgtagtcccagctacttgggaggctgaggtggaaggatcacctgagcccatgaggtggaggctacagtgagctgagatcacgccactgcactccagcctggatgacagcgagactccatctc

SEQ ID NO: 201783 - DNA, 1000 bp, Homo Sapiens
agggaaagagaaagaaatacacctaactcagatttttgcattccaggtgtcaaaggggttaccaggttaagatggcagaaagaaggagaaaaacggggcctgtcagggataattaatagcattttaaagcctaggagcaagagaaagtatgatgacacagaggacctgaaaatagtggtagaggctatgatagactctaccttttcacaatgaggaaatatggagctcattaatttatatatatatataggtttgcctgacttcgtccaagtacatggaagttttgatggttcatgttgcagtgaagatgagtgaactaaacagagaagctcttacgttgtagaggagtttaaataaacaaggtacagtcatagcattatgctgttatagctggagggtttgcaatgtatttgatcaggagttaagcaaataactaaagagtcaagtggtcatggtataagttggtaagttttgatatggtgaggtagagagtcaaactagagaggggctgctcactctaaagttactcaaaatactctatttatctaacaaagcatgggcttaaaacctctgaatcaacccaactgtcttatttcctagctgaggaaaccaaggcctagagaagttagagaccaaagtctcacaacaagtgagcagcaaagatgggactggaacacgtctcctgactttcacttcgctcacttgctattgtttaaagaaccttttctagaggccaggcacggtggcacttggggaggccgaggtgggcagatcacgaggtcagcagatagagaccatcctggctaacatggtgaaaccccgtctctactaaaaatacaaaaaattagccaggcatggcagcaggcacctgtggtcccaactactcaggaggctgaggcaggagaatggtgtgaacccaggaggcggaggttgcagtgagccaagattgcgtcactgcactccagcctgggggacagaatgagacatgagactccctctc

SEQ ID NO: 201784 - DNA, 1000 bp, Homo Sapiens
tggagagtttaccacttgcacagccaagaaagggaagtcactagaaggacttctgtgtgggctggcctggctgctcagcatttcagactcctgttgtttacaagtcttctccagaagccctggaagaatgaactgtaaggcctggactatggaatggtacctgtgcaccagcaattcctgagcaagcagcacagtgagtagatgattcctggaaacctgagttcaggtgaaaatgagagacagcagtctccttgtccctgcctatgggcttcctcatggccagttctacctctgttctaaatatattcttcactgatgaaatttcaacttcatttattcttctgtccttgaggaaaagtggggaagagtaaagaggtcttttctctgcctcaaatttttatttgttcttatttgttgatacttatttgctggagatagcttagtggtttttttctctttctttttgagacagggtcttgctctggtgcccaggcttggagtacagtggtgcagtcatggctcactatagccttggcctcctaggctaaagcgattctcctgcctcagcctcctgaagtgctgagactacaggcatgagctgctaggcttgggttgattatttcaattaccatttgctatgtaacgaggctccaaaacttagaacagaaaccagcctgacttggtttaagcttctaaaaatttattcattagaaggatctggctgggagcggtggctcatacctgtaatcccagcactttgggaggctgaggtgggcagatcacaaggtcagcagttttgagaccagcctggccaacatggtgaaaccccatctctactaaaaatacaaaattagctcggcgtggtgccgtgcgcctgtaatcccagctgctcgggaggctgaggtgaaagaattgcttgaacccaggaggcggaggttgcaatgagccgagatcgtgccactgcactccagcctaggtgacagagtgagactctgtctcg

SEQ ID NO: 201785 - DNA, 1000 bp, Homo Sapiens
agcccacttaggaaaaatgaaccgtaagctggaggtccagacacaaagggcataagataggaggtgtggtactaaggacaggaatgtagatgggatctagagccgcactcgccgatagaaatgcaggccacgcacataatcaaaacatttctaacagcctcattgaaaaaccaaaaagtaataggcgtcattaattttaatagtatatcttacttaacctgatattttcaaaatattgtcctttcaacatgtaatcagtattaaaacatgatccagatactttgctgtttcctgcactaagtctttgaattccagtgtgtatgttacaattgccgtgcatctcagttcagcctagccctgtttcaggggctcggtagtcacgcgtggctagcggctgctgtgatagacagcgtaggtctcgattgcacaggcaagggtcagtgatgctagaaagtctgttgagatcattatgggatgatgaaatgaacatagctttgttttgagcggcagtttaaagttcgtagaacactctcatatttattaccttatatgatcctcagaatattgttgctgttactagtccccttttagaagagagaaaactgaggctaagtgacttgtctaaggttgcatatttggtaaatactggtgctgatactcaactttgaggccattgacttctatttcactgctttttcctcaccataaaagatgaaagagccaggtgcggtggctcacgactgtaatcccagcactttgggaggctgaggcaggtgggtcacttgaggtcaggagttcgagaccagcctggccaacatggtgaaactccatctctactaaaaatacaaaaattaactgggcatggtggcgatgcctgtaatcccagctatttaggaggctgaggcaggagaatcacttgaactggggaagcggaggttgcagttgagacaagatggcaccactgcactccagcctgggcgacagagtgagactccgtcac

SEQ ID NO: 201786 - DNA, 1000 bp, Homo Sapiens
cctccttctccagtgtcctgaaggactgcgctgttattgagggccaggattttgtgctgcagtgctccgtacgggggaccccagtgccccggatcacttggctgctgaatgggcagcccatccagtacgctcgctccacctgcgaggccggcgtggctgagctccacatccaggatgccctgccggaggaccatggcacctacacctgcctagctgagaatgccttggggcaggtgtcctgcagcgcctgggtcaccgtccatgaaaagaagagtagcaggaagagtgagtaccttctgcctgtggctcccagcaagcccactgcacccatcttcctgcagggcctctctgatctcaaagtcatggatggaagccaggtcactatgactgtccaagtgtcaggtctgtctctgcagctctctcttggggattaacatgaaaatggtcttggttgcaatgggtattgctctccgaggacccgctcagatccttgatccaccagaaaatcagatgggaccatcaggtgatggacccaaagaaatggagactcttgtcctctcttttctgccttctctgggtaggattttctggattcatgattaaatggtccagaggaagaagatggccatagagctagagcagtgaaagattaatttgaaaatatagtgtggccagtgtagctggaaggttttgaagactggtacaaaaccagattatgggccgggcacggtggctcacgcctgtaatcccagcactttgtgaggccgaggcagcagatcacaaggtcaggagatcgagaccatcctggctaacacggtgaaaccctgtctctactaaaaaatacaaaaaattagctgggtgtggtggccggtgcctgtagtcccagctactcgggaggctgaggcaggagaatggcgtgaacctgggaggtggagcttgcagtgagccgagatcgcaccactgcactccagcctgggcgacagagcaaagactctgtctc

SEQ ID NO: 201787 - DNA, 1000 bp, Homo Sapiens
cctggtagcccgggcctccaagtacgacttcttcatccaaaaactgaagaccggcgagaatctgcggccccagaacgggagcacctacaagaagccatccaagtacgacctggagaatgtcaagtacctgcacctcttcaaacccggggagggcagccccgacatgggcggggccatcgccttcaagacaggcaaggtggggcgcccttccaagtacgacgtccggggcatccagaagccaggccccgccaaggttccgcccacccccagcctggctcccgcacccctcgccagcgtgcccagtgcccccagcgcccccgggccagggccagagcctcctgcctccctgtccttcaacactcccgagtacctgaagtcaaccttctccaaaacagactccatcaccacggggaccgtctccactgtcaagaacggactgcccacagataaaccagccgtcactgaagatgtaaacatttaccagaaatatattgccaggtaggcccctggggaggagcctgccgtggagagaaggtggggggccaggactgaccgggcactctgaggccattcgtttgatatctgacctctagggccaaggtagctgcctcctcccatccccatccacttcggtccctccaccgcaccgagggctgccctgcacgcccgtttgggagcctccctctgctctgtgtagtccaggccacacattccctcagcagcctgtgcccccagttagggccggggtcccgacgcagggcctggccacaggtgagtgcagctcccccagcttgcctgggtcctgctgtcacacagagccttgagtagggtgcaggccaccgtgaaactgtcagggctgggaaggtagaggcaggccaggtgcagtggctcatgcctgtaatcccagcactgtgggaggccaagatgggaggatcacttgaggccaggagtttgagatcatcctgggcaacagagtgagaccctatctctttaaaaaaac

SEQ ID NO: 201788 - DNA, 1000 bp, Homo Sapiens
ctgtgtttgctgaaaaggcaagtggggacagcttgtttcctcccaacctcaggtaccttcctctccaactgctgctcctaaatctcagaatatatggtgttgcttgcttctcctccgaaccgccccctcccctcagggtggggatagggcatggaaatggcctttggaagttaatgggattcttggggtcagattggattctccagaaccttggggaaaggaaagtcaggtttctagtaaataaataacatcctggaatggccctagcataggctatttgtaggaggaaaggagagaagtagagaagcaaatcttgactatttcccccaagaagtgccaagtggttttggaacttttttttttcggttttgaacatttttaagggaaagtttatcctactctaccatatttaaatagcatacgctacaaagaacgacttgatttcctttaggccaaagagaagagatggccttgtttgttttcctagtgataagagtcgaggattaattgttaaatctctttttgaagactgagagatgccagggcaaggtggctcatgcctataaccccagttactcgggaggctgaggcaggagaattgcttgaacccagaaggcagaggttgaagtcagccaagattgtgccactgcactcccgcctgggtgacagagcaagaatcccccaaaaaaaaaaaaaaaaaaaaggaaaaggacttttagagggccaggcacggtgactcacacctataatcccaatattttgggaggccaaggaaggaggattgcttgagcccaggagttggagaccagcctgggcaacatggcaaaatgccatctctacaaaaaagtacaaaaattagcgtggtggtgcacatctgtagtcctagctactcaggagactgaggtgggaggatcacctgagcccagggaggtcgaggctgcagtgagccgtgatcgtgactctgcactccagcctgggcaacaagaatgagaccttgtct

SEQ ID NO: 201789 - DNA, 1000 bp, Homo Sapiens
cccccagccttgcggagttggttttggatgaggtgttctgttctagaactaatgctgtcagatccctctacctgatcgagaactccaccttgtatctgctctcccactctgtctccgaccctgctgttcttgaatagaaatttaaacctcatggacaggagcccttcatcaccttggagcctactgaagagccccccttgaagagggcaggaccttcagaacttgctctgggagcctgattcagatgaatttcctcatctctacagtgggataatgatacctgcttaattgtacaaaccccagagtcttggggctcaacctgagaatgtccatttctttagtatgtggcttatgaacactggtgttcagcagctggccttgatttagcagttcagactttgagcacataaaatgccaaggggtgtgcctgataccaagttgtaaaacacctaagaaatgtagctgtaattattttcagattgaaagggttttagatttgaaaacccatagagaaactttctactttggccttttttctttgagtgctgcaagaaataaaatatagcccaacatttattttttatgattcattgaaactctaggggtagaaatggaaagctttctgtaactactagtgtccttaggtcaaggccctcagaaagcgtgtggttttacatttgagaaaccaatcctcttttgttttactgtattttaaaatagcttcttactctgttttgttgtttatacattgtatgtttggcttcttgaggtctctggctcctcagtttttccttggctcataacatagtatcctcattgatccaagcatgaccctgttttgcttatttttattttacttatactaataatataatgaatatccacaaattcagtgcccaatgaggcaggagaatcgctcgaacccagtaggcagaggctgtggtgagccaagatcacgctactgcattccagcctgggcaacagtgcgagattctgtctc

SEQ ID NO: 201790 - DNA, 1000 bp, Homo Sapiens
ggttaatgctttcttcctctaatggattattcatcacctctcaatccaatgcttgaggggccagggacctaaaagaccatccaggcctatttccttatggagagagggaaaggacttgtccagttccacagctgggcagtgcagatctggattggagctcaggtctcttagtcctgtgctcctgctgctccttcccccactgggtgagcagttctgcagggggctgccactcctacccacaatcaaactgctcacttatttggagcacctgttcaggagctgcccactgggtacccctgaccccacttggctgggagcttctgccactccctccctcctctcaagcagctgattgctctaagcagagaggaaaccagtgccattctggctcccaaatgctggtacaagaccagcaaatatttaccactcttgtgtgtgtgtgtgtgtgtgtgtatttttttcttttgttagaaaagggctagcgcaatatataacaagtgattcatggtggcgtcttctggtagattgattgtattttgtcccttctttttttttttttttgtttttttgagacggagtctcactctgtcgcccaggctggaatgcagtggcctgatctcagctcactgcaagctccaccttccgggttcacaccattctcctgcctcagcctcctgagtagctgggactacaggcacccatcaccacgcccggctaattttatatatatatatttttttagtagagatgggttttcaccatgttagccaggatggtcttgatctcctgacctcgtgatcctcccacctcggcctcccaaagtgctgggattacagacgtgagccaccgctcccagccccttctttgtattttaaaatttctttagtaatgaacaaacattaataagacaagaaataaaaagctgttttaaaatttctcttaagcaaaaggccaacaatcatttaaaaaatgagtgggataagaacagattgttctcagg

SEQ ID NO: 201791 - DNA, 1000 bp, Homo Sapiens
aaatgactccaggtgattaactgggggctgtggccaggaaacacaagggggcctccttctgattaggctagtcagaggaagcctttgtaggggaaactgaggcaggcagtgtgagaaggaggagccagccccgtgaagtggggatgaagtggaggtagaaggcagggctcaggtcagggaggtgcctctaggccctggtgcagaattcggattttatccttaattcagtgagaaaccactgacgggatttacacagagggggatgtgattttgaaagcttggtccgagttatccccacgatgaagaatggttgtgtccacagtgtgccaggaagcacaggactcttttgtagatcaaggtgaaattcacataacttgaaattaaccgttttaaagtgaatgctccttggcttgatgtgccttcacaatagtgtacatccgctacctctgtctggttctaaaacatttccttaccccacaagaaaatctggtgtgcattgagcagtgagcataggacttagtggatcagaggggcgtcatggaccaccctctagaggtgtttactgtacataatccacagtgccccctgggcccctttttggtgataagggctaggcagaggacaggcgtctaggattaggggagtagtctgaggctgaaaaccacacatttagggaacctatataagcattacagattcatgatctgatcacagctaaatgcaatgtgctaccctggattggatcctgaaacagaaagaggttactaatggggccgggtgcggtggctcatgcctgtaatcccagcactttgggaggctcaggtgggtggattacaaggtcaggagttcgagaccagcctggccaacatggtgaaaccctgtctctactaaaaatacacaaatcagccaggcgtggtggcgggcgcctgtaatcccagctacgcgggaggttgcagtgagccactgcactccagcctgggtgacagagcaagactacatc

SEQ ID NO: 201792 - DNA, 1000 bp, Homo Sapiens
tggagacagatgtacccagaattgaggacgggtgggaaatgaggagaaatgaaggctgaggaggggtcattctcacagtccctccctttcggtcacaggagggtgttgcccatgcttttgggtgggtcccaggcccatagctgcaaatattcatattggctactcttcagtgagcaaggggtatatgccaggcactggcattgtgcttgacatacatcatcatactgagtcctcacggaagatgtattattcccatttcacagaagatgaaactgaggcttgaggttaagtgatttgtccgtgaccacaaagagttttcgggactcaaacccagatctgtcactgggcaaggtggctcacacctataatcccagccctttgggagactgaggccagcagatctcttgtggccaggagttcaagcctggccaacaatggcaaaaccccgtctctaccaaaaatacaaaaattagctgggcgtggtggcacacacccgtaatcccagctactcaggtggctgaggcaggagaatcacttgaacccaggaggtggtggttgcagtgagcctagatcgtgccactgcattccagcctgagcgacagagtaagactctgtctccaaaaaaaacccagatctgtccgactctgacacccaacctttaatcactcactttctgtcaatgtcacctccgttttgaccagccaagctagacctccctggagcctgtggagaagccaaggtagaaaagggttggaaaagaatgataaaataggccaggtgcggtggctcaagcctgtactcccagcacttttggaggccgagacaggcagattgcttgagcccaggagttcaagaccggcctgggcaacataatgagaccctgtttcaacttaaaaaaaagaaatggtaatgaacaattgtcaattctgagcagctgggtatggtatgaccctgtgtactttttctgtattttaaaatgttctcaaaataaaacttgttt

SEQ ID NO: 201793 - DNA, 1000 bp, Homo Sapiens
tgctcagggaagaggggaggggagtgtgtgacctcaaaatgggagggcttgggggtcagagtcgagagaggggacagggtggggaccatgtgggactcttgagcactgacccttgaacccaggcagtggtgggatgggagggcaggaggcggcgggctgcgaggctgatgcggggctgcacggagctgtcattgagcctcttggaggatggtgggagaagtgccaggggcggctgaaagccttgctgagactgtgggcagcctggttgtgggcacttcggatgcttgcaccattagacccagaggcttcctggacaagcctgggctggaagaggatggcagaggctgctgggccttggaagagagagggtcctggcttctagttcctggggcagctaaggccaaccccagtgtccaggtgtcttccatgttatgcctgggagggaagaaagtagaggggcaaatgctttctttgcctattttccttaaacatttggtggcagtgctggtggctgcctgggacaggggccaggaggaaacacccctgcattagggaagccctcagccagcttttccctgggatgttcctgcgcctggctgaagctttctgagttcatgttggggaaatggaacggtcaccttccagccagtaaaggcacccctagctcttgggatgtttgtatccaactccgggcaatgtggggctacaaaggcccctggcttccataccctggggaccgggggagggctggtgctcccgcggtgggtgtccgcggtgaggtcaggcccccacagcaggtgcattctcgccctcagcaggcaggcaagcaggcatcagctccggcgctggtctctggcttcgaagtctgtgtctttgcctgtctgtactcctgcctgacctgctggcgctccctgtccactgcactcctcccacctcatttttatgtgattttgcacagtgcctggcagacatttgacattcaataaacattgtacgaacg

SEQ ID NO: 201794 - DNA, 1000 bp, Homo Sapiens
gcatggtggcacatacctgtagtcctagctactcaggaggctgaggtgggaggatcacttgagctgtggagttcaaggttacagtgagctacgatcctgccactacactttggcatgggtgatagaccttgtctcagaaaaaaaaagaaagaaaagaaaaaagtaggtggggggtataaaattcttgttttagtaacacgggcaatgtaaagatgttataattttagtaaagatatatgaaataagcctcacatatccatattgtaaaatgtctatctgagacccaagtctctggaatttgttatctaaattaatctattagtggtatcattaacacatgcattagttacaggtgtcttgtaataacatttatttcacaccttgggtgataaagtgcttgaattggtttctgtctttgccagatcaaattctaaatttcctaaaatagctaacatgaaaccagtctcctttatgaacccttctctgacttctctcatgataaactttctcttctctattcattcctttggtcatctcattcagtcctgtgacattaaataccacatacgcactgaagacaccaacctagactgctccccagactcaatatttccatatccagttgcctgttccacatcttgatggctttttaatgggcatttccactgaacagatccagaactgcacccctgttcttgccccaaaataacctcaggaggttattttgtcttcactgatgaattctgtcaaacatagaactaatatcgagccttcacaaacatttccagagattaaaatctgctctgcttgcattccttcccactcactgaaaagcactgccatccttccagttgctccactcaaaaactttggagtccccattgacttctctctttcactccatgtatgtccatcagaaattaagtaagagatttctgaataacccataggttaaagaagagctcacaagggaaaattagaagatatttttaagtgagtt

SEQ ID NO: 201795 - DNA, 1000 bp, Homo Sapiens
gttttctgagggctcaagatattcaacaagtatttcaccttgcctcttctttctcctcagcattgggaacacagaagagaacaaaatatttccctacccctatagaacctacagtaatagggacagtaatttagactatcaaataatcacacgtgtgaaattaccaagaaaggtagagagtgttataagaatacttgataggaaatcaaatccggatcctaggaaatgaggtttgaggtgatgaaggagtaggcattaactcctttaagagataagagtttgggatggttggagcctagaggctgatgcagagcaagaggtcagaccttgtgtatgccataaggagtttgggtgtttaccccacatgtagtgggaagttgtagaattttaagctggggacaggagcgtggtcaggtgtttgtgtgtgtgtgtatgtgtgtgtgtgtgtttccttctaaaattcttcacactaaagtgtactttaaaagactcctctggcttctgtgtggggaattgactataaggcattaaggattaaagtagggagaccagtgacaaggctgttactgtggaattaaaatagctgtgattgaagacagccacacattctttgctgtttttcctatcaagaggtggagtctccttccttctccttatatctgagctggccctgagatttgttttgaccaatagaatacaatgaaagcaggctgggtgcggtggctcatgcctgtaatcccagcactttgggaggctgaggcaggtgaatcacttgaggaaaggagttcgagaccagcctgaccaacatggagaaaccctatctctactaaaaatacaaaaaaaaaaaaaaaaaaatagccaggtgtggtgcactcctgtagtcccacctactctggaggctgaggcaggagaatcacttgaactcgggaggtggaggttgcagtgaaccaagatcataccactgcactccagcctgggtgacagagtgagactctttctc

SEQ ID NO: 201796 - DNA, 1000 bp, Homo Sapiens
ctccagcctggatgacagaacaagatcctgtttcagaaaaaaaaaaaaagaaaaaaaaaaagctattttgactaaactagtaacatttctcagggtccaaaccttatggaacaaagttatggaacaaattttctagaaagatctaatatgcctcctctgacccttacactaaagacaacaacaaaaaggccaggtttggtggctcacgcctgtaatcccagcactttgggaggccgatgcaggcagatcacttgaggtcgggagttcaagaccagcctgaccaacatggtgaaaccctgtctctactaaaaatacaaaaattagccagatgtggtggtgcacacctttaatcccagctactcgggaggctgaggcaggagaatcacatgaacctgggaggcgtaggttgcagtgagccaagatcgtgccactgcactccagcctgggcgagagagtgagactccatctcaagaaaaaaaaaaagaaagaaaaacaacaacaacaataacaacaaaaaaccctaaaacataaaacaacaaacaaacaaaaacacctcacatgttttcttgaaggagtgaaagtacgagttactgaaattcataaggaagcatgccctggctccatgtctgctccagtgctttcacccaggaagggcatggagtccagatggggcttcaacttgcatcccagctttgcagtcccatcaggaggggcaacaacactttgtgtccatcacaaagcttcatacaccccttcacttctggttcacatgagtgacaatacattttcttcacagttccggttctcagggcttcacattctcgtgacttcagagtttaaaggaaaataatcaatgggcaagtatggtggctcatgcttgtaatctctataacctttgggaggctgaagcaggaggattgctagagcccaggagttcaagaccagcctgggcaacatggcagtactgcatctctactaaaaaatgtataaaaatgtcttt

SEQ ID NO: 201797 - DNA, 1000 bp, Homo Sapiens
tgtcagtgcatagggattaactaacatccaggaacttttagctggcctctgctttgttcttcaacattcggaccttcagtgagctctagacctgcacaaacgacctgcagcaaatggcagctttcatttgggctgaggaagaggaatattggagagaatgaggagaaggaaataaatatctttcctttttggcccttcctgctttatctttctccatctttatgcctttattaatgaggattttccaaatatcggtcttcaaaaatgccataagaagacttcattttctgtggttttaatgtcataaaatatctccttatgtgaaataactagatatgctggatcaagcataacaaacatccctttaggacattgctgaatctgtatttaaaacataagggaaaaactgagggaacagatggaaaaaggaactggaaatggaagtgaattgactgctgcagctgccctctgggctcctgcagatcttggtaatcaaaaggattggggttcaactgccttgtgggagacaggagacagggtcttgggtccatttaagttagagataccatagtaacgtgagacactcaaaggactgtggtctcagtagagaggtgacaaatacgtcttgacctgttcttgcctgaggaaaacgtttctaagaattcttaaccacaggccctccctcatagattttcagtttcaatttatactctgtgtggtctggcaatttccaagctgtgaaacttatttaaaacagtctgatggtactcacataaatcaccaagttaaaaaaatgcaaaatagaataaaaaatatgagcatggaaaataaatactatcaaaagggctcagattgatttaaaaaggaaacacagacaattctttaagactgaatggactaaagaactcattcatgtaaccaaaaaccatttctgccacaaaaactattgaaattaaaaaaagaatgacttaaataagaatggatcttatactccaaaaag

SEQ ID NO: 201798 - DNA, 1000 bp, Homo Sapiens
cttagtcatggcaaggcgagagccatctggttgaccttagataaggtgagagccatctggttgaccttagacttggcaagctggcagctaagtccaatcctctcagctgacatcttggagagagagacagacagacagacacaaacagcgagacaggagaaaatcttaattgtgttattaattacttttcacctttgttcactccaaacagaaaaaaatccaacagtgaatatttaacaataacaaagatataactacaaacaatattaaagacaaataaatgggagtgaacaaaggtaacaggtaattaatatcacaattaaattcttctaatctctttctatctctcactctcgatttctctctgtcaacttcatcaagcaggaaggagcacaggaaaatataaagagaaaacaagaaaaaaatagaaagtcactctaaggactgtggaaacaaactgaaagtaaggttaggaaaaacaaaggaaggatgtcgaaatagtctgagggaatcaggaggccgagatcatcagaaggccaccctgtagagacctggaagacgcccagggcacagtgaatcacgatccgatccctctgctggacctgaatggtactgctgctgatgagagccatcctctcgaccctagacttaccaagctggtggctaaatacaaccctcgtgggaagatctgtctcaaaagagaaaaatccaacagggaatatttaacagtaacaaagaactaaccataacaatattaaagacaaataaataagtgggagtgaacaaaggtgaaaggtcaattatatcacaattaagatcttctctctctttctccatttgtcacaaccaggctggattgttccaaaaaaaaaaaatctagaaggtcaaattcatcatgcaggaaggagggtaagaatatatatagagagaaaagaacagagaagaaatacaacagcaactcactgtaagtactgtagaaacaaactgaaagttgggttag

SEQ ID NO: 201799 - DNA, 1000 bp, Homo Sapiens
gaaaccaagcccctgtactcaaaagaagaaatagaatggggaacctcaggaggacatagtttcctcccctcaggatggctagccactgaagaaggaaaaatacttttgcctgcagctaaccaatggaaattatttaaaacccttcaccaaacctttcacttaggcattgataacacccatcagatggccaaatcattactggaccaggccttttcaaaactatcaagcagatagtcagggcctgtaaagtgtgccaaagaaataatcccctgcactgcaggccatgcatttcaatccctgtatctctaacctccttgttaagtttatctcttccagaatcgaagctgtaaaactacaaatcgttcttcaaatggagtccccgatgcagtccatgactaagacctaccgtggacccctggactggcctgctagcccatgctctgatgttaatgacatcaaaggcatccctcccgaggaaatctcaactgcacaacccctactatgccccaattcagcagaaagcagttagagcggtcatcggccaacctccccaacagcacttgggttttcctgttgagaggggggactgagagacaggactagctggatttcctaggccgactaagaatccctaaggctagctgggaaggtgaccacatccacctttaaacacagggcttgcaacttagctcacacccaaccaatcaggtagcaaagagagctcgttaaaatgataattaggcaaaaacaggaggtaaagaaatagccaatcatctatcgcctgagagcacagcaggcattcgagccggcaatggcaaccctctttgggtctcctccctttgtatgggagctctgttttcactctattaaaccttgcaactacaaaaaaaaaaaaaaaaaaaaaaaaaaagaattgcttaaacgcaggaggtggaggttgtagtgagccgagattgcacaactgcactccagcctgggtgacagagcaagagtctgtctc

SEQ ID NO: 201800 - DNA, 1000 bp, Homo Sapiens
tggcctagttcaaatgacaggaacacaaggtccagctggcccaatgggcaggtagagggctgcagccagggctggaactggccttgcactgcctctgggcccttctctacccacccagtagtattgttcaagcccaggagggaaaaaggccagctcagggttaatgttacctcagcaagtagctgagtggcactgagcctcctggtagccactgtaaagaaggacacagaatggtttgagggcattcgctaggaggaaggaagcagatggatactctatggagacagaatgtcctctgtgtttgctctacaggaacgggttgtcaaccttctgcagggccaggaattgtcatgaggctgtagtaggcagcagagcttggcggggtgaggcgagatcacaggtataggctcagggcctggattcaaatcccctgggctgccacttgttggatgtgtaaccataggcagagtaaggacctgccatagcaaattaccacaaactcagtggcttaaagcaacagaatagttctggaggctaaaagtctgaaatccaagtataggccaagccacactccctttgaggactccaggggaagatccttccttgtctcttcagcttctggtggctcctggcaatccttggccttccttggctgctgctgcatcactccagtctctgaaaccatctaccctatgtgtctgtgtggccttcacatggcattccttatttttgcagtggggtctcgctatgttgcccaggctggtcttgaactcctgggtccaagcagtcctcctgcttcagcctcccaagtagctgggattatgagtgagtgccaccatgcccggctcacatggcctccttgtaataacgctagtgcctgggtgcggtggctcacgcctgtagtcccagcacttttggaggctgcggtggacggaccatgaggtcaggaaattgaggccatcctgtccaacatggtgaaaccctgtctctactaaaatac

SEQ ID NO: 201801 - DNA, 1000 bp, Homo Sapiens
cgtgttggctgaccctgttgccccctctgccctgctttggctgagctgaattatttcttggtccttcccttctgggggcttctcgcttaacctcctttgttgtccctgataaaggggccttgttagcccgcaccttccctccttcgtcacttgacttctgcctgctcattctttgtaccttagttttagcgtcacctcctccaggaagtcttctttgatttctcctcctccctaggtctcctctaggctcccacagctgcctgtgttccctgcatgacagctctgctttatactgggattgctccactgcactccagtctgggcgatagagtgagactccgtctcaaaaaacaaaacaaaaacaacaacaaaaaagaaattaaatgaaagttaaaaatttagtctctcagtgtattgatttgctagggcagccatgacagtctcacagatggagaggcttgaaaacagacatttatgctgccataattctggaagccagaagtctgagatgaaggtgtgagtagggctgggtcctcctgaggctgacggggatctgcccaggcctctcccagttcctgctggtggccggcgtccttgatgttccttggcttggagaagcgtcagccgcatctctgcctccatctccacaaggcgccctccctgggtctgtatccaaactcccccaactccttcaaccttttttattttaagagatgaggggccgggcgccgtggctcacgcctgtaatcccagcactttgggaggccgaggtgggcggatcacgaggtcaggagatagagaccatcctggctaacacggtgaagccccatctttactaaagatacaaagaattggccaggcgtggtggcgggtgcctgtagtcccagctactctggaggctgagtcaggagaatggcgtgagcccgggaggcagaacttgcagtgagcggagatcaggccactgcactccaccctgggcgacagagagagactccgtctc

SEQ ID NO: 201802 - DNA, 1000 bp, Homo Sapiens
ggaagcacggtgtaggaatcctggactcttaacagagcttgaagtaccttggagcctgagaacccagacatgtcccctcctgcctggcctcgggagtcctcctggggacttatcacacttgctgcatggcagttcctggatgcactggcccctcagcagtcacggcgtggagttagagagaccttcaccccacaggctcagccatggactcatgtgatcctgggcaagaggcaggttctccaggccacattttttgccttgggggtctgaagagcttgcactaagatgctaccctctgtgaggtttccagccctaaacaggaagtcagggacattccatgattatggatccgccaaagagctctgagcagtttggtgaccatgctgtgaaagtggatgttgagtgggaacaaccacgatcagatctagtaggaataatgggtctggtaggaggacgacgacagagacctctagtagagaagtgttactttgcctgtgttagcccagaaacatggagcagggcaccggttcgaccagaaggagcagaatggctcttgtaaaaataaaaagcacttggtaccagcatgcttgtggtccaccaggtttgtgccccatcagaggaatactccggaggaacttgggccgttcagaatagtgtatttccagtgcagctctggaaagagtgagcagtcgtggaccaaacatttcatggtctgatgaaaagctagtggatgctggccaggtgcagtggcactttggaaggctgaggcgggtggatcacctgaggtcaggagtttgagactagcctggccaatatggcaaaaccctgtctctaataaaaatataaaaaaattagccaggcatggtggtgtgtgcctgtagtcccagctactcgggaggctgaggcaagagaatcgcttgaactcaggaggcggaggttgcagtgaaccaagattgcaacactgcattccagtctgggcaacagagtgagactccatctc

SEQ ID NO: 201803 - DNA, 1000 bp, Homo Sapiens
ctggggaaaaaattatttcttatgcacagttagcaaagagctagttcttttatattactaccagttatgctaaaattgggggtaggaggagaggaatcacacaactttatgttgatttcaagaattcaaagaaataataatattcatcattttcttgagagtcccctgcctttaaaaaaaaaaaaaaaagattaaaagcatttaccagaaactgatcatagttctcttgttaactgtgtcactgtgtttgcttcctgggtgacatctggcctctgtttgtatggtacttctccatgccagacagtgaggggactgctcagtcaagccacaatgcaaggtgcactaagaatcagtactaataggaacagtttttgcttcctgtagtctagtacctggtgttaattgatgtgatcaatcatttgatagtagtttaaacttcttttggtgatgggtgcaacctgctacaggggttgtctgctttattatgattttctaatgttcttgacttaccaaacacacacacacacacacacacacacacacacacacacacacaaaattggtttaaagctgatgtaggaactatactccactgataggtcaaaaacaaagacaattagaaaatactcacattcatatcttttttttctttcttttttttctgtgcagtggattctccaagcagtgagaagtcacctgttatgacacctgtaagtcactcattttaaggaataagattatgagttagtgtgattttaatttataacatttgattggctcaaagagtattcaggccgggtgcaggcggtggctcacgcctgtaatcccaacactttgggagggtgaggcgggtggatcacgaggtcaggtgttcaagatcaggctgactaacatggtgaaacactgtctcttactaaaaatacaaaaattaggcaggtgtggtggcaccgagatcgtgtcactgcactccagtctgggtgacagagcgagacttcgtctc

SEQ ID NO: 201804 - DNA, 1000 bp, Homo Sapiens
gacctgatagagattgtgacttcagaagtttaaggttttacctcctaaaccacatgcttcatttcatattgcattttaactgatgcccttttgttttattctgtagcctcttccccttactctttcttcctcagtgtcttcatctgtgaaataggaataagaacatttattttttgccttcaaacgaccaaggattgtggtgcatgtgaagattaatgaggtcatctggttaagctcttctccctgggtggaagaacaatggcttgtgaatactaagtggcatttgaatcatgtgtgctttcatggaaagagagctggtccatttagctccccgtctgcagggagttataaaagaagaaactagggaggaagaagctgaaaatatttcttcatgactatttcctctggtgaagcataaagtagcaatgagaattctgagatttgtttgcgtgatactttagtcatgcaccacataaagatgtttcggttaaggacaagttacatatgtgacggtggtctcataagattataatagaaattaaaaattcctattcctaagtgacatcatagttgccataacatcacagcacaatgtgttactcacatgtgcgtgatgatgctggtataaacaaatctattgtgctgccagtcatatgaaagtatagcacatacaattgtgtatggtacataatgctaatcatgataataaagattatgttattggttgacatacttactatcctatatttgttattttagaatgtaccacttctacttataaaaataagttaactataaaacaacctcaggcaggtccttcatgagatattccagatgaaggcattattacagagatgatagctccatgtatgttattgcccctaaagacttctcgtggagcaggatgtgaatgtggaggacagtgatactgaacctgaccctgtatatgcgtggattaatgtgtgtgtttgtgtctttttaacaaaacagcttaaaaagc

SEQ ID NO: 201805 - DNA, 1000 bp, Homo Sapiens
ggtaaatggggtaaccttggtgcccgccatgcagagctgtgtccctggcaccctgtaggttcctggagtatcaggaggaaaacaacaggttggaagagggatctgtgcctagggtgggccagggacactgactctggggccctgcctcccccaggggctctttgtgcagttggtccaggccaacacccctgcatcccttgtggggctgcgctttggggaccagctcctgcagattgacgggcgtgactgtgctgggtggagctcgcacaaagcccatcaggtggtgaagaaggcatcaggcgataagattgtcgtggtggttcgggacaggtgagtagccaggcccgggcagcctctccgtctcaccccagccatgtccccaggacagctcactgtccctcctgccaggccattccagcggactgtcaccatgcacaaggacagcatgggccacgtcggcttcgtgatcaagaaggggaagattgtctctctggtcaaagggagttctgcggcccgcaacgggctcctcaccaaccactacgtgtgtgaggtagacgggcagaatgttatcgggctgaaggtaggctggtggccgcgccagggagggactgccgggtggtgggagggctcaggtctttgggcagcttgcttaccccacctgagcctcagcatcctcttcctaaggttgctgtgagggttcagtaagacggtgttcatagggctgggtgcggtgactcacgtctgtaatcccagtgctttgagaggccaaagcaggaggatcacttaagtccaggagcacgagaccagcctgggcaatgtgaaaccctctttccacaaaaaaactaaaaaattagccaagcgtggtggtgcacacctgtagtcctagctactcaggaggctgaggtgggaggactaattgagcctgggaggtcaaggatgcagtgagctatgatcgtgccactgcactccagcctgggcaacagagagagaccctgtctcc

SEQ ID NO: 201806 - DNA, 1000 bp, Homo Sapiens
gaggttgtagagtaattagtggaagatgatgagggcctgacctaggctggtacagtggtaataaaaaaaagaaatggatgtcactgcacgatagaatagacaggacttggtgaccagcggagtgtgtgggaaggttgagggtgaggagaccggaagagtctctgcagagtctctcgaggatgcacaggtggatggtggtgccttccgctgagataggacatctgggaggatgagcagagccgatttggggtggaaggcaatgattttaggcttgaagtaccgagtcgcgggtgcctggagtatatccagagggcagaaagcaagttacatcaaaggggtaacgaaggtgaatgcttcccgaggccgggtaggtgatgtcaacaggtcagactgaagcagacagatgatcattttacctgtgagtcaggtcaggctcctttctgaaacgcccggatggcttcccattgcacttacgtcaattccgcatttctttccatggcctgcaaggtctgatttgaattggccctgcttttttttcccacctcatttactacacatttttctctctgactgtgttccagccacagtgatcttagtgattttcaagcatatcaaatttgttcctgtgtcagagcccccttccccctggccaagccctcgccaccagatgttctcccactggttcctcatcaggtagctcgtagcttgcctggtatctcaaggaagccttcctgcctataccgccgcatctgaagaggttactgtgtccaccctgtcttgggtttttttccatagcacttgtcactacctgaaatacttatgtgctatctccctccttccattcattccatgaggccacaagtgtgttttgctcatcagtatctctcattgcctagcgtagtgttgggcatgttccacagcatggagagccagtgcttctgggcattgcagtaggtaccagtgagaaaaaaggggaaaatctgcatattgagtatttatt

SEQ ID NO: 201807 - DNA, 1000 bp, Homo Sapiens
gcatcccaaaccactcattcgcctaacaattagactggcccttgggagcactattcttcttcattggtctcattgccacaaccattctcacaaactcccattgccctcagctcagcccaaggctttgtattgttcaggctgtgctgtgggccctgctctaaaaatagcatatggcaaagaggcctgtcttgtagttgcaaaagtggtgtaggatttgaattccccatgatgagctaatttgggggcccactacaaagattttcagaaaacttttcaaaataatctcaactactgtgactacggaacacaatggcaaggggctgggagcaggaaataataccttcattatccaaactaatgtgcatacatttgaaatgtacaaaaaagtagatgtgttgcatgtgacaactcgacctggtaatgaggttttggggcatcacatcaatgctagttgtaaatactgtatttgccatgtactgcctttggattaattagcatccataacataaaataagttgtttcctgaaatgtaaacctagcaattagcgcttcatcaagtccctatcagatgttagaaaaaaaaattggttttgcagttgtttttttcacccaaaacaagtctgacagtacatattggtggcattcacagcaacataacggtaataaacttcagctactgttgggctctttgtaagcggtacagttactaaagcgagagtttggaagtatggttttcttttaggcaccctcaccagcatggtgagggtgcctacattctagttaaagtcagtaacacaaattaactcatgtaaatgtttttaatcagtgtttcttacagctgattattcagctcattaactctgatcataaatctggactttggaaaacttaacatttgttctatgttaccttttagaacaaaatggtggctgaggtagagaaatgacttgttctctgactggtgactttggtccctgcatcaaggagtggcagaggtctc

SEQ ID NO: 201808 - DNA, 1000 bp, Homo Sapiens
gagataaaagaattagaggacctgtccaggatgtccaatatttgaataatgggagttctaaaaagagtgaacaagggaaacaaaaggtaattattcgagaaaatatccctgcactgaagaatgggagtttctgcactgaaagggccagagatggtagctgcaaagagacacatcgagagctttaagaggtgaaagttttggcctctgtgcagaggaagtggtagggacaggtctcctcttggcttcctttaaacaagccctgaagaatattcaactcttcaaattattgcatgtataacgatttaaaaaacaaaaactttggtaaggttgaaaaataaaagacatcaatagatgttcatgaaagagaaaatccaaatgccaatgaatctgagaagatccagagattgtctcttaaactggacatgtgttgtgacaaattgagaaaaaaggaaaaaaatatctatctctctatctatatagtccactaggatgtgtggtgggtgagttcctgtaggacctgaccccgctgacacagctggtcaccttattgctgtgatgttgtctatgatttattctactcatgggtgagaaatgggatgtgatgcctgtgggttttgaaataacgtgtatattgtggagtggctaaatcaaaccagttaacatatgcgttacttcacatatttctttgtggttagaacacttaaaatttactcctttaggccgggcacggtggctcacgcctgtaatcccagcactttgggagtccgaggcgggtggatcacgaggtcaagagatcgagaccatcctggccaacatggtgaaaccctgtctctactaaaaatataaaaattagccaggtgtggtggcatgcacctgtagtcccagccactcaggaggctgaggcaggagaatcgcttgaacctgctgggaggtggaggttgcagttagccgggatcacgccactgcaccccagcctggcaacagagtgagactacgtctc

SEQ ID NO: 201809 - DNA, 1000 bp, Homo Sapiens
gacattggtttgactggaattatcttcttgttaggtcttaggaatctccttccaggtaactttttctatgattagacaattgatttgttcagggtcacagagcaaagtccacatttaattccacatggccaataaaagtgaggggctacaaggtgagatccaggggccagagttatcaaagtgatacagcacttttaggaataggacagggaatggaggaattggaattccagtattactttcaaaagcagaactggccagaggaattggaattccagtattattttcaaaagcagaactggccagaggtgcttgtgattcctgggtggaaaccatggcagtggacagaagcagcatggaggaaaagagcactggaattcaggctgaggaactgtgaagccaagggtgttgtataggttgtccatttcaaattagggttgcttggttctgggatgatttgcatggaagaggggagagtgacttggagatgtgtgattgaggacagtgagcacagtgagttgatggtgttgctgggttataagcagcttcaaagagaaggcattttgaatgaaggtggaaacataatggccaggagaacaagcaaaggactaggaagcagtgaacttcatcttggcctcaagttcctgaggtgcatatgaataaacagtctctaacccagagggtttcaagaaaagcagagtcctcaaaatccaaaggtagagtttccccacattgatattatactaattacacgtataacagtactttggaaaagcacaggtctctggtcacctctaaaaggcaaggttggtaaggaggtcagggtgtcacctgttggtagtcttaactaaatggtctcttcaagggatctaaggatggaaaggggatatataatggttggattaaaggctcatcattgattagcaaattgtcccttttgtttcttaaacccaatttgtacagggaaagttatgccactgtaagatatttttaaatgggg

SEQ ID NO: 201810 - DNA, 1000 bp, Homo Sapiens
aatctgagagcaaatgagagtggtgaggaaagaggatgagaacgtaaggcacgggccacatggactctgcatctttagcgtgctgtttggccacagggaatagaaacccaacaaatagtggcctaactcctagatgcctgtttctctcaagggaatggattcagaggagccacttcaaaagctagtgcagtgcttctgcagtttcattaatgcatcaagcccgttccatctttccacttaacagagcttctctttggtcctcatagtttcaagacggaagtgaaaggactgtgggagtcaggacctcacatggaataaaccaggaaggcaggaggtgaagatgagaatggaatgcatgaatttgaagttgaggaaggtacagtaggtattcataatgataaggtctactatggtatgattatggaggtgagtgaggttggatggacaagacccttggagaagaaatcaagaaatggagaagcaggtattaaaaagatcatctacaggtacattgaaacctccaaatattaaaacagaagtggtattttaaatgaattatgactcccgcctccccatcccacattctataaccttccattgtcttcatggtgagtgtagagaaataaatgccttggtggagtcgctataacatgccatgagtcgcttgtttttcctcatgtgcggtttcctcctagcctcttctacagacctcatattgccctgtgttggagagagtgccaccctttagcctgggctgccatgctcctcggctcctgctgactgagacactctggcagaaggctcttccctcctttcttcccataggacatgctctcagctctcctcccaagtcctagcaatcagctacaagaatctgcttcattactttcatcctccttccctccactgcccggaggaccaggcaggctgctctcagctgcctgatctattattggggctcaaaatacatcaaactctcttaaaagccaaaacatttttt

SEQ ID NO: 201811 - DNA, 1000 bp, Homo Sapiens
tattggagtgaaatgaatgtattttgtacatgagaaagacatgaatatagggggggtccaggggcagaatgtaacatgtcctctccaaaattcaggtgttgccaatgtgatagtattagaaggtggagcctggccgggcgcggtggctcatgcctgtaatcctagcactttgggaggccgaggtgggcggatcacgaggtcaggaaatcgagaccatcctggctaacagggtgaaaccccgtctctactaaaaaactacaaaaaaatagccgggcgtggtggcaggtgcctgtagtcccagctactcaggaggctgaggcaggagaatggcaggaacctgggaggcggagcttgcagtgagctgagattgtgccctccagcctgggcgacagagcaacactctgtctccagaaaaaaaaaaaaaaaaagaaggtggagcctttaagaggtgatgaggggctcctccctttgtgaatgggattacagccttcataaaagaggctcaatgcagacttccttgtcctcccttttgcacgtgaggacacacgtcctttctggaggatgcagcatcaaggcacccttggaagaggacatttgaacctgatgatgccttgatcttggacttcataaactacagaactgtgatacatttctgttctttataaatcaggtattttgttatagcagcacaaacagactaagaaagttgcctatgggtgccaggcgcggtggctcacgcctgtaatcccagcactttgggagggtgaggcaggtggatcatgaggtcaggagttcgagaccagtctggccaacatagtgaaaccctgtctatactaaaaatacaccaaaaattagccaggcatggtggtgtgcgcctctaatcctagctactcgggaggctgaggcaggaaaatcgcgtgaacccaggaggcggaggttgcagtaaaccgagatcacaccacagcactccagcctgggcaacagaatgagattgtgtctc

SEQ ID NO: 201812 - DNA, 1000 bp, Homo Sapiens
tgcagcacgggctgctttcaggcaccaggacctctctggcaccggctcactgtccagcacatcagagaggtagccacacacaagctgcgggccctcagttgctgggctttgtgacataggagtcacgcctgcctccttgaggatggtgagcacccagtgaggaagcactgccaggcatcctggctcacggcccatccctcagtgagcttgccaccatgcggctgcaggcggtgagcgtcagtgatgataatcgttccctgcatgatttctaacacacagtgttggcttttcctaacccagcattcaacaccctcctcaatgctttggccacgtgcctgtactaatctcggaaagtggttgtgttcccaaggtgtcgtatgctcgcccgagctcagaggtgatcaaagacgccaacttgtacatcagcgggctcccgcggaccatgacccagaaggacgtagaagacatgttctctcggtttgggcggatcatcaactcgcgggtcctcgtggatcagactacaggtaccagaggggccccagacgcgtggggagggtgttctctaggtgggggctgggttttctagggaaggcagatcaccgtttgattttaaatgtcattagttattccgcaaacgaggacagcaccaaaatgagaagacgttggctttggtttgaggaggctgaggaggtaagatggcattaaaagaagctggggatatctgggcgtggtggctcacgcctgtaatcccagcactttgggaggccaaggtgggtggatcacgaggtcaggagatggagaccagcctgaccaacatggtgaaaccctgtctctactaaaaatacaaaaaattagctgggcatggtggcgggcgcctgtagtcccagctactcgggaggctgagacaggagaatggcatgaacccgggaagcggaggttgcagtgagccgaggtcttgccactgcactccagcgtgggtgacagagcgagactccgtctt

SEQ ID NO: 201813 - DNA, 1000 bp, Homo Sapiens
acaaacaacaaaaccactctgaagaacaacaacaaaaaccactctgaagaaggggacagggaatcagtatccagaatcgctatagtatgttacctaatatgtccacttatcaacaagaaattgtaagacatacaaagaaactgaaatgttcgacttataaacaggaaaaaagcaggcaacagaaatggcctttgacagggaacagatatcagatttaaaagacaaaaacttcaaggtagccattatatatattcacagcagtaagggaaaatacaaagataatgtctcatcaaataaagaatatcaataaaggaaatcataagatgaaccaaatgtaaattctggagttgaagactataataactaatataaaaaatcattagaagggctaaataagtttgagctggcagaagaattagaaaactttcaaatagatcaatagaaattatgcaacctcaattccatcttcccattagaaaatagaataggaaaatgaagaaataggatgagaaaatagaacaaagaaatataaacagagcctcagagaaattcaggacgcctttcagtgcaccagtgtacatgtaatgagaataccataaggtgaggagaaagagaagcacaaaaatattcaaagaaataatggctaaaaacatccacaatttattgaacaaacattaatctatactcacaagcatctcaacaaactgtgaacagaatgaatgcaaacatatccacaaacagacacgtcatagtaaaaatgttaaaagtgaaaggaaatgttgaaagctgtaagagaaaaacaatgtgccacaagggtaccccaatagattaacagcaaacttctcatcagaaacaatggaggggatgaaggcagtgggatgatacattcaaagtactcaaaggacaaaagctttgtgaaccatgatcttatttctagtaatgctgccttcaaaaaaaaggtgaaacaaagccctcccagatctgccatatgagaaattgt

SEQ ID NO: 201814 - DNA, 1000 bp, Homo Sapiens
tctctgtataaaccagattacgattttagggtcttgaaggagaaaaaaaaaaatgtcataaatcttattaatactaatggcttttgttttaccagcaagaaataagtaaattgctctcattgggataagataaaccttttaataaccatttcttataggcactgagtagtttgtaggtgggcatcgaatttccaatgtggaaattatgctgaaaaaactgtctcccagcaggggtatttattttcttttctaagccccacaacatcatcaaatgacaagagtcagcattctcatatgcatgtgtgtcctttgtatgaacgttatctgcccagtagtgcccagaaatcaaatgaatataaactaagactttgttttcgatgtgctttttacttttggcatttataaactctctgagtcatccctgggagtggaggacacagcggtgggaccagtacttatgtgaatatacagtcataggttttattgtcttgctgtctcttaaaaaaaaaaaaaaaggaagttctacaagtctcatggaaatactggaattggagatacatatttaacatgctaactttattagatcatgatttctacctaatttggttgtgtttcagtaaactacaatccccagtcatgtgacaaacacctgtttttaatagaatccatcatcttcagagaaattggttgtattcatgagctaaaacatgaatatatgggctgggtgcagtggctcacgcctgtaatcccagcactttgggaggccaaggcgggcagatcacctgaggtcgggagttcgagaccagcctgaccaacatggaaaaatcccatctctactacaaatacgaaattagctgggtgtggtggcacgcgcccgtagtcccagctactcgggaggctgaggcaggagaatcgcttgaacccaggaggcggaggttgcagtgagccgagatcacgccattgcactccagcctgggcaagaggagtgaaactccgtctc

SEQ ID NO: 201815 - DNA, 1000 bp, Homo Sapiens
gtcttggccccactcccaaagcaaatagatttccatgtaactggaaatctgctgcaaaccccaagaattttatcctccctcaaaaagtgctatcctgagtggtttttttttctttttactgtacattgaaaattgaagttgttgtttcctttttttttaatttgagacaaggtctcactgtgtcacccaggcatgatcacagctcactgcagcctcaatctccccaggctcagatgatcctcctgccttagacttctgactagctgagactacaggcgcaatgccaccatgcctggctaatgtgtgtattttttgtagagatggagtttcgtcatgttgcctaggctggcctcaaactcctggcctcaagcgatcctcccacctcggcctcccaaagtgttgggattacaggcatgagtcaccatgcccaggctaaagctgttatttcctcataacctttactgcacatgttttaaaacaggtccttatcattgtttgccccagcaactggaatagctttctatctgctttcaatcttaacccagtctcaccagggcatataatctttctagaatgcaaatctgatcattttacttgaaggcttaagttttgcagtgacatactttagagcagcactgtctgataggaatagaatgttagcttcatgtatacagatgctccttgacttaggatgggtttatgtcccaataaatccaccataagttgaaaatattgtaagtaaaaaatgcatgaaatacacataccctactgaatatcatagcttagccaagcctaccttaaatgtgctcagaacactgatgttaacctacagttgggaaaaatcatcttacacaaaccctattttataataaagtgtgaatatctcgtgtaatttattactattgatcataaagtttaagcattataagttggcgatagtctgtaattgttaatttgtttgtatccaatataaaaaatataaagagaaacagatgaaatt

SEQ ID NO: 201816 - DNA, 1000 bp, Homo Sapiens
atgttagctccttcagatctcatattttctcacttttattgctatagacataccccccgcagttatcctacctctaggcaaatcccttccaaaatgcagctgccagtgtgatctttgtaaaatgcttttatgataaagttcaaactcattagcaaagcacacaaagacctttgtgatgtggtattgctgaattaaactactggcagccctagaaaggtaaagtgtatttgatgcttctgtgctgttcccttagcccagaaagcccttccagtttctgtttagtaaagtcctattcatctttcactactcaatgagtcataagtaatcccattaggaaagcctgtgtgatctacctcctccctaatttgccaccttgagtttgcttcaccccttcataatactcagtcaatcataatgtcttataatccatcatagcacctcacacaatgaactccaatgtctggtttgttgggatgtccgccttactacattgtaagcttcttaagggtagaaaccagttctgataggcttagggcagtgaccaccaacagaaaaagtacttggtaaatgtctaacacaatctgttttactttttccagagcacgaggcatgcatgaaagagattaatttactccacatgggaagttactacccaggcttaccaaaaggtcaggtttatataaagtggcgttcctttttttcccccttagtaagacattaaaaaaagaaaccacaattgaaaagccaagagctatctgtgatacggaatatgaacacagaatcagattctcatagcagctaagctgttccccaggcagtggttctcaaggtgtgcttccaagaacagcagcagcagcggcatcacacatgcaaattactggactctgccccagatccacagaattggagactggggatggggcttagcattctgttttaacaagtcctccagatgattctgttgtgtatctagcttgagaatcactgccctggagaatgg

SEQ ID NO: 201817 - DNA, 1000 bp, Homo Sapiens
gattaattttgttgtgcaggtcctataatcagtaatgttaattcttaagagaattttggtcacctacaagcgtgttaaactcattttttggaatgagaatttaaagaaggatagcctcaagaagtaagtgtgttgaaataaaaagggagaaggtggggaagaactaaatggaagcaggcattaactcttctggatttattcattccttgtcataacaccagcatcctattccacaattgaggaggtacccacaactgctccctgagttgtcagggaggttgaatattcagagctgtcctattttaagctttggtcctaaattgacttgaattctaaagaacagtttgaaatttagtgactgatatttctattttgtgataggattcaaaagagaaatgataattacacacttttggctcagttagttcaggacttgagtggatttcttccttgcactatctagtacctgtgtccttaagggcagggacctagctatctatacctggcttctagaactttgtgtgttcttaaaaataacaaaaacttgttaaatgacatagaattttcattgtgcaactttctagccagtgttactcctctggaatattaggattttcgtatattcagaatctaaagtatacgtaaagtgcacggtactagttccaaagtggttcactaaattgtacatgtttgtcaggataaaaaacatattattattttggccgggcgcggtggctcacgcctgcaatctcaatactttgggaggctgaggtgggtggatcacctgaggtcaggagttcgagaccagcctggccaagatggtgaaaccccgtctctgctaaaaatacaaaaaataagccgggcatggtggcacatgcctgtagttcctactctggaggctgaggcaccagaatcacttgaaccaggaggtggaggttgcagtgagctgagatggtgcccgctgcactccagactgggcagcagagtgaaactgtgtctc

SEQ ID NO: 201818 - DNA, 1000 bp, Homo Sapiens
ggggtagggtaccttgctgtcttttgacagaatgaggatgagaggaggtggtaggaaggcgggggaggatcagtgatgagatggcactggggacagtggagagaatggttgtgcatatgatttacggtctttcttttcagtatactacagtgcttagatgtgtatgcagaaatcaagagttatcagtgatgtttgaaaattagatgttgctggcatggaacttccgttttcattgagaacagagcgtgcttagtgacgtgtatatttagtacagtaagacagttgcagaaggatggccctgatggtgacagtgataatcctaaccctagatgctcactggctgggcacaagtacaggatctcactggaacctcactaggtatctgttgtcctccttttatagttgagaaacagaaagcttaagtaatttgcccaagatcatgtaactaataactggcagggatttgagtcaggatctccaaagctacatctcttcctaaagctagttttaaaatttcatttctcatatatggagtagcccacaaaggctgtatgcaaggtagtcttcagaaagcttacatcttcaccaaggcacatgaaactgcagaaagaagcaatgttaggcgttcctgataataattatctgcctggatgacagcagtcctgctttatggtcacagaccccagctttctgccagaacatggctcaggactcctgaaaatcatcccattcgggagcaagtgggtttaatttccttttcatgaaaggaaagattagctttcatgcaaacacttggtccatttggccatttaataagaagactgaagtctcatgttccataactttatcagcctaaaagtccctttgttgtatcataaacacataggctgaaacccctgtccttccaactcagagcaaattctgttgtattaaataaccatgccatgtactgaatatttttacacttatttattggacttgactcctacctccttcccgc

SEQ ID NO: 201819 - DNA, 1000 bp, Homo Sapiens
cttaaatggttgtacaaactaaggaaataaaagcctctcagtggatggtatttagagatgaaagaattatatacagggaggaaaaatgtagagtgaggcttcccaactgggcaagggaccctcacaggctgttacttgggtcccccagtgtcctctcaagttttgcctaggattggggtccccaggtgtgctgttgggggcccaggccccacaagggtagctctctgaagaggtccatttgtccctactgactctgagggcacagctgttgagatctgggtccctgggatgagcatctggggagctgcctctaggctagccttctcttggtgtactccctcagcattcctggagcctggttgggggctggccctagggagcccgcccctgcctgtgcagagttgctcctggcccaggggagagtgaatgcattgtgctcaggcctcagtaagaggcagccttggcaaccagaatcctgagggagggtgtgcctggcaggtcccctatggactcaaccagccactgtcctcatcaccaagcattagtttggacactagctgcaccctgctaccaacaagagatcaaagaatcatgtctgggacatagagtccagagacctgggctctagtcctggccctgtcactaattctcggggcaaacttggtcatatttgttacctcatatgtgccagacactgtgcaagatacttcacatacttaaggccaggcacggtagctcacgcctgtaaccccaggactttgggaggccgaagcaagtggatcacctgaggtcaggagttcaagatcagcctgaccaacatggtgaaaccccgtctctattaagaatgcaaaaattggctgggcctggtggcacgtgcctgtggacccagctactcgggaggctgaggcgggagaattgcttgaactcaggaggtggaggttgcagtgagctgagattgcaccgctgcactccagcctggatgacagagggagaacatctc

SEQ ID NO: 201820 - DNA, 1000 bp, Homo Sapiens
cccaaggggagctgggcttgggtccagctgctccaggtgagctggctggggaggaggatgaatagggctcagagtggaaggccacagctggagcgccaatcgtgctgccccttctcataggacccctatgacccacagatggcagggacctcaggagagatgctactctccataaaggcaaaaacaaagcctcacacacctacttttatcaaacaaaagtacaaaagcagttgctgtaagaaatatttcttcagttcattaccacaatttatgtacacgttcaacgccaggtttttcttcactgcttatttctaggaaatggtctatggtggaaacgtcttcagctgcctgctggactgttatttcttgaaaagcacactttaaaatgttctcatagctgagaatgggctgaaaagaaaagaagaaaagcataccaaagttaggagaaagacatacataacgttaccttattccaaagaaataattgtgatagaaatgaaatttgtaattgatcataccattagtgttactatcacttgacatattcattcctaaaaatcaccaagttagcaaaatcacacaaaaccagaggactcatgggaaaggtggggttagggcaaaacattcaaacttcatcagtgacacatgaaaaaagatgaccacccaataatgtcagtgctgttttccagtttggttaagaaattatacatgcggccgggcgcggtggctcacgcctgtaatcccagcactttgggagccccaggtgggcagatcacgaggtcaggagttcgagaccagcctggccaacatggtgaaacccccatctctactaaaaatacaaaaattagctgggtgtggtggtacacgcctataatcccagctacttaggaggctgaggcaggagaatcgcttgaatccggcgggtggggggcagaagttgcagtgagccgagattgtgccactgcactccagcctgggtgacagagagagactccgtctc

SEQ ID NO: 201821 - DNA, 1000 bp, Homo Sapiens
cctgctaatttttgtatttttggtagagatggggtttcccctgttggctaggctggcctcaaactccgatctcaagtgatccacccgcctcggcctcccaaagtgttgggattacaggcatgagccaccacgtctggctataattcacttcttgtgtgtgacttcctactaatttgtaatcatgaaagttgggcacatacccagtatgctcactatttctctgcagggcctgatacagtggctgctacaacactgatactctgcatttgttgaatgagtaatttaaattttaaattatcatctagaatcatttagagatttatttagactttgataaatttagataacccacacacagtttattcctagagttcttgatacattgttacagtaagtttggtcctggcaacagcaataacacttactgtaataacttaattcttcatacgaggttgcttcacttttattattaagcagaaaatacccaaagtaaaattgagctatttgggactcctttcagaatactgtgtaggctgaagcattgttgtatcagaagtgctctgttatttgaatgcataaggtattcaacaaacaaatgcttattaaattaaatggtattcagcatacagctactgtcaccgtgctaggagttcacatttttcatatgcgtggcagttagcactggtgcatgtttccttcagcctcagaaatggaggtgtctgcgtgttgcccagatctaccttgaaaactctagttgcttcctaacacctaggttgtatagtgggacttgattatgttttataaagccaagtctggtctgtgaggactgaaaggatttcctcatcttaactctaatttggcctgcaatgtctggggaaaacccaaaactaaaatgtaactaaatgtggaactgtttttttctgcagtttgatttccttgtaccattttcagtacagttaaattcatcacctcccctacctcaccatccccctccccctgc

SEQ ID NO: 201822 - DNA, 1000 bp, Homo Sapiens
ccctgtctggctttacatagaacaggctacttaacttcgctaaacttcagtttcctcatctgtaaaatggggaagaataatagtatctaccacatagggttgttttgaggattaagtgtacttaacttagtgcctggtatgtagtaatgctcagtaaaatatattgtgttgtcatttcccaccatttcttcccacctgcccctgtatttgttactccagtcatgttgagctacagctctctaatccctctgcctggagattcctcctctgaccattaacccatttatgccggaagttgcaagttttttttttgtgaaaactcagaccttggcgatgaccgtgagcgtcggatataaataattccaccaagcttaatttttttttttattttgagactgggtctcactgttgccaaggctggagtgtattggcgcgctcacggctcactgcagctttgacctcccaggctcgtgtgatcctcccctgtcagcctccctagtagctgcgcctacgggcatgtgccaccatgcctggctaatttttgtattattttatagagacagagtctccctaggttgcccaggttggtcttgaactcctgggctcaagtgatccgccttcctcggcctcccacagtgctgggattacaggcataagccattgcacccagcctaaaatgcaaactaatttaacattgagtcacatttaggctgggcgtggtggctcacacctgtggtcccagcactttgggaggccaaggcaggcggatcacgaggtcaggagatcgagaccatcctggctaacacggtgaaaccttccctccgtctctactaaaaatacaaaaaaatagctggacatggtggtgcgcgcctgtggtcccagctaccccagaggctgaggctggagaacggcgtgaacctgggagacagagtgtgcagtgagccaggatcgtgccactgcactccagcctgggcgacagagcaagactcagtctcaaaag

SEQ ID NO: 201823 - DNA, 1000 bp, Homo Sapiens
tgagaaaagcgaggagtccgatgtgtgcagcagaaaaggccatgcattctggagatgtgggagccagatggaaaagagccttatgggccacggtcaagacctcatgcctttcagagtgatgtgttatgtggttcacaccccgtagcaactctgtgatagttgttgttcttattatccctttctttacgtgaatgcactgagatacattgccaaaagccccctttattttacagctgagaaaattcatacccagagtagggaagcaacttgcccaaggccacagagtgggaaaaatggcacggagctagggttcgggttccctgattcttggtccagaaccctttctctcatgtctctgctccagaaatgaacttcttttgaaggaggtgactctgggcctctcttgaagattcagattagatcctggagctcttaacactgtgctttgctgcccagatcttctatgttaactacagtatttccttcctaggaagaggtttaacatggaaaacctgagaaaggctaacacattaaacatgtatgttagtaaatcctggaggagggaaggaaggccattgactggtgacatggcggtggcatcagtcatagtaaatactgataccaactgattgcttcccatgtgcctggccctgttgtaagctggtgaagtgtgatagtttaagtattctttaccactactctaagaagtaggtactgggccaggcgcagtggctcccgcctgtaatcccagcactttgggaggccaaggcaggcggttcacctgaggtcaagagttcatgaccagcctgaccaacatggagaaaccccatctctactaaaaatacaaaagttagccggacgtggcggcacatgcctgtaattccagctactcgggaggctgaggcaggagaatcacttgaacctgggaggcggaggttgtggtgagccgagatcacgccactgtactccagcctgggcaacaagagtgaaactctgtctc

SEQ ID NO: 201824 - DNA, 1000 bp, Homo Sapiens
tcacttatttcatggctgtttgttttatcttcccagctaaataaattgcagttcttttgaaagaaaggatcggctgggtatggtggctcatgcctgtaatcccagcactttgggaggccagagcaggcaagtaacttgagcccaggagtttgagaccagcctgggttgcatggtgaaaccccatctctacaaaaaatacaaaaattagccagacatggtggcgtgtacaagtagtttcagctacttggaggctgaggtgggaggatcacttgagcctgggaggcagaggctgcagtgagccgagatgtgcaactgcactccagcctgggtgacagagtgagatcctgtctcaaaaaaaaaaaaaaaaaaaaaaaaaagatcatgtcaaaagttcccttgtttcctttatatctttcacagtgctcagaaaagagctggtcaccaggtggctgctaggtaaacagaaatcgattgattgactcagcctgagtatatgtattcaaattcacatttcctgaattagcagacatggtcttgtttttaaaattgactttataagatctcgtgttttcttatatctgatggtgatgaaaatgaatagggctgggggagagagatgttcagccaagaaagtctaaaatagaaagggaatgttcagttataacaaaacaaatttttgtaattagagtgctgggttgtgctcagcatcattggagttaaatgtggagcagtggcttacacttgtaatcccagcactttgagaaactgaggtgggcggatcccttgaggtcaggagttcgaggccaccctgggcaacatggtgaaactccatctctacaaaaaatagaaaaattagccggctgtggtggcaggtgcctgtggtcccagctaaggaggctaaggtgggagaatctcttgaaccctggaggcagaggttgcagtgagctgagatcacgccactgcactccagcctgggcaacagagcgagagaccctttctc

SEQ ID NO: 201825 - DNA, 1000 bp, Homo Sapiens
gtctgggagcttgaccacctggctgtcagcgtggctggccctaagtctccagtccctcgcagaggtcagaactgaggcagcaaagcccctgaaaacgctggtactccagtgccagccaggacgttctgggggccgagagctcaccctgcaggccacccccggccccggccccagcgttctcgcagtggaatagtcacgtttgtctgggcagctccttcagcgttgcctgcttcctcccttgcggcagggctgcccgtgcctatgaagcatgtaaagacccaccgtgtgcaggcgttagcccggggttggctccacctagctcttccgcaggtgtcattctccatcgttgctacatcctgaggaggctggaactcagggtttcaatacatttgccatcaccatcaacgttataaccttatcaaccgtgccaggtaggaccatattgcagtctggtggatgtcacctaaaaaggaagaccggagtcccactcagtcatagcagtttatctagtccatcaccacatcagatcagcagatgtcccccagggcgaggccactcaggtttgcaggctgccattcgaccttgtcaagttccaaaagcagaggcggccttggcgtcaccctttcaggcatctggtgtagttgagctgagacgatgccctccacgccgctcttaaggtagtactgtaatgtaggattcacgtaaaattggatttcccggccgggcgcggtggctcacgcctggaatcccagcactttgagaggccgaagtgggcggatcccctgaggttgggagttaaagaccagcctgaccgacatggagaaaccccatctctactaaaaatacaaaattagctgggtgtggtggcacatgcctataatcccagctactcaggaggctgaggcaggagaattgcttgaaccagggaggcggcggttgtggtgagctgtgattgtgccattgcactccagcctggacaacaagagcgaaactccgtcgc

SEQ ID NO: 201826 - DNA, 1000 bp, Homo Sapiens
actttgtaggctagactgcagactgttaattgactactttctggtaccctctagctattgtcttgagacagtaaaataattactgctctctagctacatccttagcattttcctgttctgaaatgaaatcattttcttatgttaaaaataaagttaattactgttcaactcccaaggtgatattcagctgccacctcttacaaccctctcttcttaatctgtgtaactattctacagcccaggaatagcctgagtttattaaagtcacccacacagatctggctcttttcaatcaagctgccctcagagtgccagctgatgatactcccaaggagactcacaagcccactgctgcctgcagttcagacagagtccatgctattttaactgcactcttggcactattagcactgacacaatgactccttaaattacgaattacaacaggccattctattccgtctgtgcttctaatgctgtcaccatgtgattttcccccagaagagatatttcccaggtaggggtatgcttaacatgcagttacggaactgagagttaatgtcagaagaaagcttttgcagtgtagccacagaatagttacaggctacattgctcagcatgcacaaataaaagcttaaaagaacgtgttaaaggaaagatttccctgtctttttagcctcctacgaacattaagaagaaaaatgttgcgaggcacagtggcttacgcctgtaatcctagcactctgggaggctgaggtgtccaagaggatcacctgaggtcaggagtttgagaccagcctggccaacatggtgaaaccccatctctactaaaaatacaaaatttgcctagcgtggtggtgggcacctgtaatcccagctacttgggaggctgaggcaggagaattgcttgaatgcgggaagtacaggttgcagtgagcagagatcacgccacttcactccactccagcctgagtgaaatagcgaaactccatctcaaaag

SEQ ID NO: 201827 - DNA, 1000 bp, Homo Sapiens
gtatctcaaccagccattacaggctgtaaaaaaattatataagatagtctatggtaatgcagaaaagtgaggttattttgctccctttccctttgaagaaaaaagccctggaaagacatatcacttgagtatgggaaaaaatgaagctgtggcttttctgtgagtcaattctttcctggcagcttcttggaataagaccaagtatagcagcagagttttctgttttaatttgagctgcagggtgactttttttcttctatgctttcatctctctgtggcttcttttgcctcgttaatttcatgccctgcccaggcgggctactgtgctgcccagtcacccgggtctggggcggccaccgctggccagcaggcaggccctccagaggcagaggtggccacgcttaggtcgctcccactgtgggggcggcacacttgggtggcagcacagctgtgatgtggcggcagctggcagccccatgggaaagatgtgtgaagtgtggggtttgacgacccatgggagaacagactttcttcctcttcttgttttcccttcaaagccgtgagtcaacctcaaattctctgtcttttttctccaccccctcgtgcctctctccctcacactctgcatctctcattgcaagcttgcatttttttgcacacaacactatcctaatatttctcttttctgcaggcaggaaatgagaagtcatttttcagggtccttcaggaagtcatccagagttataatggcccattatctaatggtcagagtttacttaggctttcactacttccactgcccacttgaaacagggaaaaatattttccccccgcgctgtgagtgtgctatttagagctgaccacaagcggggggaagagaggatggctcggatgctgcatttccactgagaacacaaggctggcaaagcttgtctgctgcccagcaagcacttcaggctcacaccattttaggttcactttaagtagtttctcaattgtt

SEQ ID NO: 201828 - DNA, 1000 bp, Homo Sapiens
agaagaaatgtgaataactagaatcagcaatagaagtggagacattactatcaaccttacagaaatgaaatgtaagagaagaaatgaaatgtaagagaaaaaacgatgaacaccaacaaattagataacctagatgaaagacaacttcctagaaacacacaaattatcaaaactgactcaagatgaaatagaaaatacgaacaagcctataatatgtaaatagattaaatcagtaatttaaaacctcccagcaaaaaaaacatctcaaactacaggactttcttattgaagtctacaaaacgcttaaagaataatgaacactggccaggcacggtggcttatgcctgtaatcccagcactttgggaggcggaggcaggcggatcacctgaggttgtgagtttgagaccagcctgaccaacatggagaaaccctatctctactaaaaatacaaaaaaaattagccaggcatggtggcgcatgcttgtaatcccagctcctgggaggctaaggcaggagaattgcttgaatccgggaggcggaggttgcagtgagctgagatcgcgccattgcactccaggctgggcaacaagagcaaaactctgtctaaaaaaaaatgaaaagaataatgaacaccaaacctcctttttaaaaaagttttcttccctaaaaaggaacactttttaactcattctatggagcaattattacatgtataccaaagctacctaaagacaccacaagaaaaaaaaaaagcaatatttccatatgactgtaaatgtaaaaaattctcaataaaataatggcaaactcaatgtaacagaatattaaaagtattatacagtatgacaaagcaagatttattacaggaatgcaagggtagttcaacataagaaaatcagtgtaatacaccgcattaacagaatgaagagaaagaaaaccacatgattatttcagctgatataagaaaagtatttgacaaaatctaactcttttatgatt

SEQ ID NO: 201829 - DNA, 1000 bp, Homo Sapiens
ctagtcctccggaggtaaccattattctgatttctaccaccatagattagttttgcttgattttgaatgtcatatgaatggaatcatatacttttttgtttggcttttttttttttaatctcagcatagagtttttgagattcatccatgctgttctgcatattacaacatttttttacttttattattgctggtgatattccattctctgattatatcacaaactgttctatgtttttcttgatggatatttggattttgtcaagtttttggctattagtaattaagtggctatgaatattcttgtataagacttttggtggacatataaactaatttttcttgagcatattcctggatgtggaattgctgggtcctatagttggctttataagaaactgctggccaggtgcagtggctcacacctgtaatcccagcactttgggaggccgagatgggtggatcacttgagctcaggagtttgagaccaacccggcaaacatggtgaagccccgtctctactaataatacaaaaattagccgggcatggtggtacactcctgtaatctcagctactcgagaggctgaggcacaagaatcacttgaacccaggaggtggagtttgcattaagctgagattgcaacactacactccagcctgggtgacagagtgaaactgtgtctcaaaaacaaacaaacaaacaaaaaacgaaacaaaggccaggcgtggtggctcatgcctgtaatcccagcactttgggaggctaaggtgggcgggtcacctgaggccaggagttcgagaccagcctggacaacatggtgaaaccccatctctactaacaatacaaaaattagccaggtgtggtagcacatgcctgtaatcccagccacttgggaggctgaggcaggagagttgcttaaacccgggaggcagaggttgcagtgagctgagctcaccactgcactccagcctgggcgacagagtgagactctgtcttgg

SEQ ID NO: 201830 - DNA, 1000 bp, Homo Sapiens
tatggaaatgcccggatgtccaggcagaagtttgctgcagaggcagagccctcatagataacctctgcgagggcagtgtggaggggaaatgtggggttggagcccacacagagtccccactggggcactgcctagtggagctatgagaagagggccaccatccaccagaccccagaattgtagatccactgacagcttgcactatgcacctgtaaaagttgcaggcagttaatgctagcctgtgaaagcagctgtggggactatatgcagagccacagaggcagagctgcccagagccttgggagcccactccttgtgtcagtgtggcctggatgtgagacgtggagtcaaagatcattttggaggtttgagatttaatgactgccctcctggattttggacttgcatggggcccatagcccctttgttttggctgatttctcctatttggaatgggagcatttacccaatgcctgtatccccattgtatcttggaaataactgacttgtttttgattttacaggctcacaggaggaagggacttggctggtctcagatgagacttgacttggacatttgagttaatgctggaatgagttaagactttagggggctattgggaaggcatgattgtgttttgaaatgtgaggacatgagatttgggaggggccagggtggaatgatatggtttggctgtgtccccccacccaaatctcatgttgaattgtgatcctgagtcttggaggtagagcctggtgggaggtgattggatcatgggggcagatttcccccttgctgttctcatgacagtgagttctcatgagatctggttaagtgtgtagcacttccccctttgcttgctctctccctctgccatgtgaagaaggtgcttgctttcccttcgcccttctgccatgactgtaagtttcttgaggcctcgcagccatgcttcctgtacagcctgcagaactgtgagttaattaaacctcttttcttcat

SEQ ID NO: 201831 - DNA, 1000 bp, Homo Sapiens
agacagtgtggcaattccccaaagatctaaaagcagaaataccatttgacccagcaataccattgctgggtatatatccaaaggaatataaatcattctattataaagatacatggatgcgtatgttcactgcagcactattcacaatagcaaatatgtggaatccatccaaatgtccatcatagactggacaaataaaatactgtacacatatatatacacaccatgaaatactatgcagccataaaaaagaacaagatcttgtcatttgcatggatatgcatggagctggaggccgttatccttagcaaactaaggcaggaacggaaaaccaaacagtgcatattctcacttataagtgggagctgaatggtgagaacacatggacacatagggggaacaacacgccactggggcctgttgaggaggggagggagagaatcaggaagaatagctaatggatgctgggcttaacatctaggtgatgggatgatctgtacagcaaaccaccacaccacacatttacctatgtaacaaacctgcacatcctgcatatgtaccccttaaaagctgaagataaaaaattgttttttagtggtttctacctgtaatctcactttgggaggctgacgcaggaggatcgcttgagcccaggagtttgagaccagcttgggcaacaaacaaagggagatcccatctctacaaaaaattaaaaattgctgggcacggcggtttacacctgtaatcccagcactttgggaggccaaggtgggaggatcgcttgagtccaggagatcaagatcagtttaggcaatatagtgagaccctgtctctacaaaaaaatttaaaaattagccaggtgtgttggtgtgtgcctgtagtcccagctacttgggaggctgaggtgggaggatcacttgagcctgagaggtcaaggttgcagtgagccatgatcatgccacttcaccccagcctgggtaacagagcgagaccctgtctc

SEQ ID NO: 201832 - DNA, 1000 bp, Homo Sapiens
agggcaggagccccccaagctgtggatgagctgctcagagttctgagctggggaggaaaggggcttctgggcgggcaccagcttggtctggaaggatcagaagatgaagacttgctcctctcccaccaccccacagatgccagttgccatgacaacaggtgtctttgatatgaaaaggacattttggggtcaattggcaaaacttaaatgggatctgaggaatagaaggtaaaaattggtcagtgttaatctcctgatattgattgtaggagaacataggaaatactcactgatgtcttcccaggagttagccattacactaggtatttatggtttaggaaaaaagtatgaattgcattcctttttaaggctgaatcataggtaattggatgtgtacaccatattttgtttatctgttcatccattgatgggttttgagtttacaccttgtggctattgtgaataactgctatgaacactgatgtacagattatgtttgcatttccgctttcagttcttttgggtgtatcttagaagtggaattgctgggtcataaaataattctgtgtttaatattttgaggaaccgcctgactgtcttcaacagtagctatactatttttgtttccaccatcaatgtgtaagggttccattttcttcatgtccttgccaacactgtcttttttaataatagtcatcctaatgggtataaagtggtatcttcttatgcatctcactaatgaaaacatttttttcatattttgcattagtttacatttgaaagtattgctttaaatttgtgaactatatatgagcaatgtagagaaatatttcgctttaagcaatggttgactggccaggtacaatgactcacacctgtaattccagcactttgggatgccgagttgagaggatcacttgaagccgggaatttgaggctgcagtgagctatgatcatgccggtgtacttcagtctgggcaacagagagagaccctgtctc

SEQ ID NO: 201833 - DNA, 1000 bp, Homo Sapiens
ttttaaatcaagtctttcatgttataaactttaaaactcaggctcatcgaagtgaagtgatttgcccaagcataccttcccacacaaggcttaacaccgactcccactttagtacaataaaaaaaaaaaagtcatgtaacattaagagcacatacctggaagtcccctaaaacataggttgttgaactctgactctgccacttcctcgctattgatgtgtgctatggtctggatatttgattcctccaaatctcatgttgaaattcgatccccaattggagatggggcttaatgggaggtgtttgagtcttgggaccagatacttcatgaatagattagtgtcctccctggcagagggagagtgagtgagttcttgctctattcattcctgggggagctcccttgagagctgattgttgaaaagagcctggcaccttcctgctctctcttgcttctgctctcgccatgggatctctgcacgccggctccctttaaccttctcccctccaccaggagtggaagcatcatgaggcctctccaaaacccaagcaaatgtcagtgccatgcgtcccgtgcaggctgcagaaccgagagccaaataaccctcttttctgtatagattacccagcctcaggtattcctttatagcaacacattgacttagacaaggtatgtagatatatacttctaaagtggcttctcccacaaaagagaaatttgcggcccagcacagtggctcacacctgtaatcctagcactttgggaggccgaggtgggtggatcaggaggtcaggagatctagaccatcctggccaacatggtgaaaccccgtctctactaaaatacaaaaaattagctgggcgtgctggcacgtgcctgtagtcccagctactcgggaggctgaggcaggggaatcacttgaacctgggagacagaggttgcagtgagctgagatcacgccacttgcactccagcctggcaacagagcaagactccgtct

SEQ ID NO: 201834 - DNA, 1000 bp, Homo Sapiens
ggaagaaaagtgactaccctgctgctcagacccgaagttgcccagactttatgtcaataagaaattcagtaagtcagtcactgagaggttggggttgttactccagcataacctagcctatcccaactagtataatagattattctctaaaccaattactagctgaaacttggagagaggtgctttaccccttgaactttctcaaaaagagacaaagcaggtaggggccttcataaagtgttaacttgattggatggggcttccaagaagccaattttctgcccttctcacatcagcaccaaaaggtttacaattcagatagcctggatctttaaaaccataataaaaacaagtatcaacatatatagcattttttattttgtcttattgcatcctcataacatctctctgaagtaagtaggactgggaggatgtattcattttacaggtaactgaggctcaggaaatgtgatctgtcctaagttgcatagtggtgagagggcctccgctgagctccacctacgccccttagggagcacagggcctgaggttacactgaccatattatggccccaagagttgaggctgaaagaggatttggtagagcgacttttctggatgtgctgtggtttacaatatctgcttctttaagagaagctactctgaaatatcatggaacaagtgtcacaagaagcatgcaaattaaatagcaggcccagtgaagaatgtgctgttggcatccatacggctagatgggccagtactgtggattcttaaagcatctctttgccactgttccatcttcttgtccagaaaatataacactataattttatcccaaatacagccaattagattttcttgcctttcttttacacctccatcaaaaaaattagcaacagattaacaccggctacttactgtgctgctttggacattattcagatccagtgtgactgttagtttgacctctccaagctttaatgactaaacatgtgtc

SEQ ID NO: 201835 - DNA, 1000 bp, Homo Sapiens
attctttattcctttactttcttaataaacttgctttcacttaaaaaaagaaaactccaccttcatttataagtattttaagaaacaacctgttccttcattaattggacattattgactattttaaaacaaacatacagggtaatcttcccccagcaccgcccccagcagtcaccagctagcctaatcatgttttggttcttttacacggaagtattttacatgaatggcaaacttacgttggatcagatggaaaaactttactagaaggagggctgtgtccaaactcttacagcagtgtagccagtaagtgattctgtccttgcatttgccaggggcaaaagcatacatcagtgccttttacctgagcagcatgtgtcagggcacgctcttaacctctaattactttcttctaagctggtagagtagagtcatgggaagagtatggagtcaggttgggtccaatcctggctgagtgaccactgacaagttgtatatctcctctgagccttgctttcctccttggtaaagtgaggataataatgccgacttcatggacttattttccaggttaagaacaagctgccaggtccccagaaagtgcttagtggggtgcagggtctgcccctttgctgggcactctacctactgaggcactgctgcccatctggaactcagtctatcaagaataagtgaaacttgcctttctccactgacaaattctctcagcctctgtttggcttacttggaatttgtttgacagtatatctgtctggcccataaagaggggaatttagacagggttgaaatgcatcaaattaagtcctgtctccacaaagaaaacacttttgtacttctgtgaaaaggctgcagagacgtggtgactggccatgagtcagcccaggactgtggtgcagctgtggtccttaatccctgccccacaaaagatttgatttaaatgccttgtcacacttgttgaaatctgggaagtggtatcgtt

SEQ ID NO: 201836 - DNA, 1000 bp, Homo Sapiens
tctaccagccacagtctctgccttagggagctctatagcccagaacacctaagaaagaaaatgtggacgtggtgccagtgatcagaaggggctcctccaaggcctaggagcaaacctggtgaggttgtcagctctctctcccctgaccacagagtactactgtgcgtatgccaaaatacaacagagctacatggctgagttagaggctatctgccagccaccactcttaaggagcacctactggattacagcccaaatgaaacatcaaaaacattatgccagcatacagcacctgtgaaacctaaggcaaaaatccagacataaataaagattatgtacagagccttggctctctgcaagcacccagaaatggagccaactgactatactcaacttatgtcacagttaaaggaacatcagccctcacacatgaaaaagaatcagtgcaagaaacgctggcaattccaaaaggcagagtgtctctttatgccgaaacaaacacattaacccatcagcagtagttcttaaccagattgtaatgactactggacagacagagaattcagaatctgggtagcaacaaagctcatcaagatccaggaaaaagttgaaacccaatccaaggtattcaaggaattccgtaaaacagcccaagagctaaaagacaaaatagctattttaaagaagaaatcaactgaacttctggaattgaagaatttacttcaagaatttcataatagtccaggcacagtggctcatgcttgtaatcccagcactttgggaggccaaggcaagaggatcacttaagcccatgagtttgaagtcagcctcctgttctctacaagaaattagccaggtatggtggtgcacatttgtagtcccaactacttgggaggctgaggtaagaggatcacttgagtcagggaggtcgaggctgcagtgagctgtgatcatgccactgctctctagcctgggccacagagtgagaccctgtctcagg

SEQ ID NO: 201837 - DNA, 1000 bp, Homo Sapiens
ggccataagccgactcacagagcactgaccttggacaaggtcatggtgaaaccatggtaaatagagacaaagcaaagccacttcatatttttttctgagcacagacacaaaaaagtttcctgtaggacccataattttgattatgacagggtaaagacaagttccattttctaggatttgatttgagccaaggtcaatgaatagcttattttgtagcttaattgacaacagtaaatacttttgcagtcttaggtcccgcttgatctgtactagggagggtaatttgaaccaagagcctgattcccgggcatttctgccctaaccagatcacgggctaaggatgcaacagagcatagtttcagcagagcccccttgaaaaaaaagttatgctgaatccatgatgcaacatccatttgaaatgaggaaaaagaaggcaaagatgacatgatttattttgtgtcatacctaaataattagaagaaagcccctttttctagtagcacctataaaaatttcactgggctttggaggtctaaagggaaattctagcacatatttcagctccagttaatccaaggttaccatcatctcagttttgtgaagagatggaagaagccaactgaaacagtagcgtaggaacccagccctgccttttgctttatatgtgaccttggccacgtacctgaccttcacctttctcatatagaaaaagaaaataggcgggccgcagtggctcacgcctgtaatcgcagcactgtgggaggccaaggcagatgactcacctgaggtcaggagtttgagaccagcttgaccaacatggtgaaacctcatctctactaaaaatacaaaaattggctaggcgtggcggtgtgtgcctgtaatcccagctactagagagactaacgcaggagaatcgcttgggcccgggaggcagaggttgcagtgagccaagattgcgccgttgcactccagcctgggtgacaagagcgaaactccctct

SEQ ID NO: 201838 - DNA, 1000 bp, Homo Sapiens
cagtgtggaaatcctgcccaccagccaaaacctgctgcaaatggggactgccagcccagcctgtgggcgcagctgcctgcacagcggatggagcagctctgtgccttctgtgtggtggggagtggctgtctctatgaggctgctaggatgcttgggccccagccagtctgtgcttgcttcctcttctgcctggctccctgacaggtcccccagaagccccagagccctatttgcactgccttaagagtgcccgctggccatgcagctacctggcctttcaggcaggagggatctgatctcaggtggctcacagtggaccacatccatccttgggccagagacactagaggaaaactccagctgtggggtttcagagttgtcaggaactggtgggctcaggaccgatgtcaggctctagggagtcaggctctggggatgtcggttcccacttctgaggagagggacagggaggcctcccaggtggtgaagcaccgacctcagcatccctggaggcaattgggagcctgacgggtttggcggctgctagatccacatcggcgacccacatcctgccggcgtgcacctgcgtctgtgtctgctcctggtgggttgtggggcaggaatcagattcactcattagtaagccgcactcgctgaaggggagagcatgagcaaggcagacgtgagccaggccttggttattaggagctaattatgggccaagtatggtggctcacgcctgtaatcctagcacttcgggaggccgaggcgggcggatcacctgaggtcaggagttcgagaccagcctggccaacatggtgaaaccctgtctctactaaaaatagaaaaaaaattagttgggtgtggtgacgcacgcctataatcccagctacctgggaggctgaggcaggagaatcacttgaacccaggaggcagaggttgcagtgagccgaggtcgtgccaccgtactccagcctgggcgacagagtgagactgtctc

SEQ ID NO: 201839 - DNA, 1000 bp, Homo Sapiens
ctgtgaccttcccccaacgggggttcctgagagaggcctgtccttattcctttcccccacttctccccacatggtggatggatggactgattgttctagggatggaagcctagggaagcactgattgtccccagtgccaagcccagcaggggctagaggggctttttctgccacacactaacttcagttcagctgaggtcttggtgctttcggcttgtccgaggccacactgttcttctctaattaaagacacacccccctccaccccaaccaccatcaccaaagtccccatcctcaggcccctgccctcaagccagccaagttcttaggctgactggttcagatcagactcctctatgagggtctctttgtcaaaggaggtcagtgtcctagctgctttgggaatcagtgggggagacccccccaacccaggtatgccagggggtttaaatttacatgtgaaaagaatgacaggccaacattaatgaccatcctgtgacttgggatgcaccttctcttctcaggttcaaagcagcttaaggtatctatcatctgggagtgctttctctccccagcctcgctgggaggcaaggaagggccattcacaactgaacattaaggtcctcaaattaagacactatccagactcacaaaagatgtttccacccaaccagaaacagtggacccctgacccctagttgagtgcacacttccaaccaggccccttaatttatctcccacctaaatggcagctctgaagcttctgggctgccagcctcccattgccttgaacccgtgctcctcagagaccaagtgctaacagctcccctgttgacactatggaagccatggagtgatctaattgatacaggttgctataagtcagaggtcaggtgtcctagggtaaggggagtccctggagcaaagtcttctctgtggctgatgctccctgcagggaaatttaggagcagatttctgaaacagtgacgttcctcacagg

SEQ ID NO: 201840 - DNA, 1000 bp, Homo Sapiens
agtcgcgctcagcgggtgcttgtgctctctgcccagctgtgctgaagtcccgagggacatgtccgctgcttgcgggtcggttcctgaggaattggaagtgtcacgagatgtggccctcgttgggctggcgctcattggcctcccttgtgcctgtgcaggaggagctgattaactcagtggtcatctcgcagctctcccacatccccgaggataaagaccaccaggtccgaaagctggccacccagttgctggtggacctggcagagggctgccacacacaccacttcaacagcctgctggacatcatcgagaaggtgagagccgttgtacccggggccgggtgctagcgtgccagagctccgtgggcagcaatggcctctgggccctctgtcctcctcttcgagtgaccggatggctgtgtccgtaggtgaggctcccctccctgcagggtgggtgtcccgaggcctgtgcagggcctgccactgctggatttgtgtcctgactgaaagtcctggacatgggtgtcctgtcacactctgggacagctgggctgggcctcctggaccgacgctggagcccagacctggggctggggctttggcctgccgtcctccctgcccagccaacagctttgctctttgattttcagatgcattttggtttctgcacagtcactcgggtataaagggcatctttgcttttgagcaataaagatgaaggccgggcacagtggctcacgcctgtaatcccagcattttgggaggctgaggcaggtggattgcttgagttcaggagttcaagaccagcctggccaacatggtgaaatcctgtctctactaaaaatataaaaattagctgcacgtggtggcgggcacctgcaatcccagctgctcaggaggctgaggcaggagaatcgcttgaacctaggaggtgaaggttgcagtgagccaagattctgccactgcactccagcctggacgacagagcaagactctgtctc

SEQ ID NO: 201841 - DNA, 1000 bp, Homo Sapiens
cagccagttgcatacttgcagagagatttatggggctgaacatacagctgcaagttttcttttcttctactttttttttcttccaggaacagtgtcctgctgtcaggtctgtgtgcactagacacaaacacataacttatttactacagcagtatccaaaactcctaagtagtgtccttgctgaatgtgagtgttttcatgaatatgaaacattctgaagatgtaaggaattcctagatacaagccaatcttgactcagtttacatctctgtctaatattttggtgaaggaccatccaggagtctagttacactgtacagctgtttcagttctaaagcaacttggttaccttatggtcaagatcagaaattccttaacggaatttgactgctctgtttcctttaaaagtatgctgattgtttatagtagcttctggattctctgtccttgggaggttctcttagattgaagcaaattctctctcataccttgtgttggtttttgtttttattttaatttttcctttgtgatctgaatgaataacatcatcacttaacacctattgccatttcaaagacagaatcccaacaggcttttctgggtatggacccatgcaatggtttgtctgcctttcaacaatttgtatcatcttggccattttggggaacagggattgtgcatggggaaggatggaagaggaaaaccaatatttatttaacattcagtggtagtaaacactgggattagtacttaattagagttgatcctcataataaacttgatccccattttacagatgagtaaattataactcagagaatttctaacttgcccaaagtcatacaactaataaattgtaaaggtgggagttaaagcaattttttattgaactatatagaaaatgtacaaattatttatacacatctccagttattacaaagtgaactgctaggaatgtgagtggaattggtaatgtcagttaaaggcagaaggacgcgct

SEQ ID NO: 201842 - DNA, 1000 bp, Homo Sapiens
agagcaaagctgaagtctagtcacattgtactctcatattgtagcctgaagcaagaatatgatgacagcaggggagtgatgaacttggaggctagagaagagggaagcagaggcttctactgcctcggctgcattgatactggcttgcaaactcccggaggaagaggcccatcatctgctttggtcacttcagtgcaccttgcttgcgaagagtacagtaggcattcatttgttaaatgaatgaataatattaacgtatggtattattgaggtagagataagggagatttggcttaatcgcttgaccccaaggcatacttaggaagttattattattattattattttttgagatggagtctccctctgtcaccaagctggacgatctcagctcactgcagcctccgcctcctgggctgaagcgattctgctgtctcagcctcccaaggagctggggttgcaggcgatcaccaccacacctggctaaattttgtatttttagtagagatgggttttgccatgttgtccaggcaggtcttgaactcctgacctccggtgatctgcccacctctgcctcccaaagtgctgggggattataggtgtgagccaccgtgcctggccaaaaaattattgataataacaattttatacctcaaatatagtgtagaaaaaacattttagagcttagttatttgaataatcaaaaataagtttgttggccgggtgcagtggctcatgcctgtaatcccagcactttgggaggccaacacgggcggattgcctgaggtcagaggtttgagaccagcctggccaacatggtgaaaccccatttctgctgagagtacaaaaattggctgggcatggtggcgaatgcctgtggtctcagctgcttgggaggctgagacaggagaatctcttgaacccgggaggcagaggttgcagtgagctgaagacgcgccattgcactccagcctggaaaacaggtgtgaaattccgtctc

SEQ ID NO: 201843 - DNA, 1000 bp, Homo Sapiens
aggccgaggtgggagggtcacttgaggccaggagtctgaaaccatgcctggccaacatggtgaacgcccccatcccccatatctactaaaaatataaaaattaggctgggcatggtggctcatgcctgtaatcccagcactttgggaggctgaggcgggtggatcacttgaggtcaggagtttgagaccagcccggccagcatggcgaaaccctatctctactaaaaatacaaaaactaaccgggcgtggtggtaggcgcctgtagtcccagctcctcaggaggctgaaacacaataattgcttgaacccagaaggcggaggttgcagtgagccgagattgctctgccgcgctccagcctgggcgattgagactgtctcaaaaaaaaaaaaaaaaagaaaaattgtataagatattaatccaagaattctaagggaggtactagcaaatagtatccagctttttatcacaaagttaacctgcagaaaaatgatgggagctaagatgatacagagggtcaagaaaggtatctccctttaagtgacatttgagcagagatctgaatgaagaaatggcaaagtaataaagactctgaggcatatttggttttttttttttaggaatatgttctcagtgaaccatatggggggaaagcttggtttatccattttatagcatgctgtacagttactaagaaggaaatagttggtcaggcacaatggctcacgcctctagtcccaacactttgggaggccaaggcgggcggatcacttgaggtcgagttcaggaccagccttgccaacatggtgaatccctgtctctactaaaaatacaaaaattacctgggcgcagtggtgtgtgcctgtaatcccagctacttggaaggctgaggcaggaacatcctgcctcaggtagcttgaacctgggaggcagaggttgcagtgagtcgagattgtgccactgcactccagcctgggtgacagagtgagactatgtctcag

SEQ ID NO: 201844 - DNA, 1000 bp, Homo Sapiens
gcctttggcctgaccttccaacacctcctcctgacaagctgtcaccctatagcctttcagattgcataggccgagctcacacaagtcagcatccctgaccacattctctttatcttgcaccttgcaaggggtgtagaacttttctcttaacccatcccttctctcccaggcacttggatccccattagagagttaggatataatcagagtcaccatttatggaatgtttatgtgccttgcactgttgtgtgcctggcgtctattatctcattcaatcattgcagtgatcctctaggtagaagctattattatctctacagaagaagacagggaggcccagagatgttaggtaacttgcccaagatcacccaactggtaagtaacagaatagggaccagaatctgagttggttggttggtttttttttttttcactccaaacccttggtcaccagcttatattgtcatttagagtatcagaaaaattgccccagactctgcaacaacatggagcttgggttcaccagcctccctttccatagtcctcattgccactgctgctgtccagggtctgatttcactaccctgagtctcatttccttatctctcagtggaagataaagccactgcctagcacccaggattgttacagggatcagattagatgctcaggaagatgctcttgggacactgcaagggacaggattcttcaggcgtcgcttggaactgtggtgcctctgtgaggtggatgtcccaggcagagccagccagccagccctgacctgagctcgctgctgaccctgccacagattggctgtgtgtctctggacaggtggcttggccactctggaccgctaccaaataaagagctggccggccaggcacagtggctcacacctgtaatcccagcactttgggaggccgaggcgggtggatcacaaggtcaggagattgagaccatcctggctaacacggtgaaaccccatctctaccaaaaatac

SEQ ID NO: 201845 - DNA, 1000 bp, Homo Sapiens
gggtcgagtgatcttgaggcgagagcatgccctgcagcagaggaacagacctgacaggtatgaacccaagtctgactttccagatttctcagcagtgttccctgctctgaggaagtgctgagtaactgcatagcgactgttccctatcctattccctgaatacaatcgaaaagattgctggtggtaaatatagggagtagcttagagagagcctaatgttatcagcactattggtagataattaatacctgcaaatagtttgtactcttgacagtatttcaaggcaaagctatagcagggtagttgctgagagatccggggaaacgtgtttttctactagtggaaagaatagtctcccactggttgtgaggttgcagcattttagagctacagaaagagctgagaccaggaggaagaactaggcaactgctaggctctcatattctctaggaagcaaaagaagttcttactctgctaagaaccatggcaaaatgaattctggctttaggggctttggaatgcccagaaatggttggagtgaggaaaagtaggagaatgcaaagaatgaattaagtgataaatctgtaagttgcaggtcctctgcagcgtgcaaaactggaaccccaggtaacaaccaagaaaacctccatgaagctggaatactatgcagtcataaaaaaggatgagttcatgtcctttgcagggacatggatgaagctggaaaccatcattctcagcaaactgacacaggaacagaaaaccagacatggcatgttctcactcataagtgggagttgaacaatgagaacacatggacacagggaggggaacatcacacaccggggcctgttaggggatggggggtaggggagggatagcattaggagaaatacctaatgtagatgacgggttgatgggtacagcaaaccaccgtggcacgtgtatacctatgtaacaaacctgcacactctgcacatgtcccagaatttgaagtataatt

SEQ ID NO: 201846 - DNA, 1000 bp, Homo Sapiens
tagaaaggttacactctacataattttcttgttctcaagtaacaaacccatgttaattagaaattttagagttaatccattttattaatggtcaacatatacccaaagtatttcacgacaccaacgtgtgcatcgtgtatgtctgactcatatgctttgactcctcatcagaattctgcaggagcccttctccctaggataaatccctcaattttaaggtatgccctgtagggccctttacagtctcaccctgttcagccttatcattagtcctccctcttactcctccccagcccctcaggaatgcatagctgtttcacttcccttaaaccaagcatgctttctcatacttctgtgttgtttcccttcactgtctcttctgaccagagtgattgatgtagccacaaaatagagtcccttccagtctcagcccaagcaccttgtgtcccatggagccttctctgctaggagctttcagcacttgtaataagtagctggggccctagttaagctgcagatttcagagcccctccccaaacctaaagcagcagcatcttgagatggagggtgtcctacgtaatctgcaaatgtttcccgttttgaatgtcagagaactacttgtgtttacttataaggctcttgcaggcgcttgtcactgtatcttctgtgccagatattgtgtctggcactcagtaaacgtttaggaataaatgaatgctgttgagggttttgtgtgttgtgcaagtattgagatgtcttaggctttgctctggcgtcctctagagcctgaaaagttgcttcatttctcagcagcatttaccaaccacttatttaaaaagctaataggaattgttggtatttagtgagagatggggtataacttaagggatgaactaacaaaagtatgataggcatatgaataaaccaggcaatttagagaattatttccttctcacctttttttctttccagaagtctcagaagtggtaatgtttatgtt

SEQ ID NO: 201847 - DNA, 1000 bp, Homo Sapiens
tggtgcctccctcccacaggtggcgcttccgggcatgcgctgggtggacggtcacaagggcgtgttcagtgtggagctcacagccgtgtcctctgtgcacccccaggtacggggtgggccgggaaccaagagtcccgccctgctcccctcttgcctgccctacgattgagtaacagttgccgatggccggggaggtctggcctcaggccttggacgtgactttggtcagctggacccagctttaagggaagctgctgattcaggcaggggtggtcttcattccctgaggccccaccctgctcactccacatccctacccaggacccctacctggacaaattcttcaccctggtgcacgtcctggaggagggagccttcccattccggctcaaggacactgtgctgagcgagggcaacgtggagcaggagctgcgggccagtcttgcagcactgcgcctggccagccccgaaccccttgtggccttctcccaccacgtgctggacaagctcgtgcgtctggtcatcaggcccccgatcatcagtggccagattggtaagcgaatgtggcctcagacctcagtttccccatccacatggcttctcagtcctgaggtcctgagggatcttctataagcccatttacctctctggccatttttctcatctgaaaaatgacctccagtcccctgcacccagagaaggtcttctgtgaccctttggcccgggtgcagcggttcacgcctgtcatcccagcactttgggaggccgaggcaggcagatcacctgaggtcgagagtttgagaccagcctgaccaacatggagaaaccccttctctactaaaaatacaaaattagctgggcgtggtggcgcatgcctgtaatcccagctactcgggaggctgaggcaggagaattgcttgaacctgggaggcggaggtgacagtgagccgagatcatgccactggactccagcccgggcaacagagcaagactccatctc

SEQ ID NO: 201848 - DNA, 1000 bp, Homo Sapiens
tttggtagtagagaagctagcattttttagtggttcgatttgtctgattgtattcttttgtgataggtacatagtatagtttaaccttatgtgcttattttttaaccagaatgttaaatgcacccatctgttctattgaaacagcttgaggtagtatggtgtttaaatcatacgaaaaaacgttacatctgagtaggattgaacaagaaaactagtgtaaacaattgtgttcactgataattaaaattcatttaaaaggctaaatgtattccacaagatgaatttgcactggtactctaggtcattgatttaaacaatacttctttcttacataagccaagtgaaaagatcattagactattcagagatttactgagtagtttcattattatacatttattctttctatagagttatgccaaagatgttactgatatttatttcagagctataaattaatgcttttaaaagatggatcaaattgtatggtcattcagctttgatgtaaagcttatagggcctttatcttttaaaaagtaggctgggtatgatggctcacgcctgtaatcccaacactttgggaggctgagagaggcagattgcttgaggtcaggagttaaatacaaaattagcctggtgtggtggtgcatgctgtagttccagctatttgggtggctgaggcacaagaatcacttgaagctgggaggtggaggttgcagggagctgggatcatgccactgcattccagcctaggtgacagcctaggtgacagcctaggtgtctcaaaaaaaaaaaaaaaagtattctaatgcttatatgtggtaattattctatatgtatattgtgtttagaagtactcacttgcccctattactatatgccctacccaagaaatggtagacgataccatttgaaaaatatgtttgattgtggactgtgattaggaacttacattattttattttgaatgttattttctgatcattaaaaagttatttac

SEQ ID NO: 201849 - DNA, 1000 bp, Homo Sapiens
tcatctgggcaacgcacactgcgctttaatcaagttcctattcaacatagtcccagtgattaatagcccaactgcttcgttttcggtccagagctcataaacaagatatttttagcttgacgcttttggacgggagggagtaaaaaccagatacgttaaataaatatcccgatgtgagccggagagctgcttgctgagccaaatgcaggacccattcatatagcattcacctgtggagggagacctggacggaaatcaaaaagcaccaagagcgatttgcgtttttttctgcggtgctaaaactaatggcttttcctacctaggaacaaagaaacgccactgtacatgcacggttcccggcctgtggagttgtgggaggaaggcgatgtctggccttttttgcacagctgctgttgcctgcccggagatcgggaactctgccccgtaggactggaagaaacctcagtaatgggaataagactttgtccaatagggggctgatgaatgtgtgggggcgacaatggcaaggagtgggactcccggcccggggttcgccaaccccaggggccacaggtcctcctacaattgaaccagaattcacccacccgggcctgccctgtgcagggtgccgagagcccagggatgcatgagagggtggctcctgcctctgggaactgggacagtgggagagacggataagttgtcacacagaggctgctgggaggaaggaggagacagaaggagtaggggatgggacttcattcgttcatcaaatgcacacgaggcacaaatgggaatcaagggtggatgtgctgtgatgaagagaagtcctgccctgaacaaggtggcgctgtggaggaggcagagatcagatttgtctgcggaggtgttatggactgaactgtgtccctgccccaaattcctgtgttgaaggcctaacccccatgtgactgtatttggagataaggcttttaggaagtcattaaagtgagatgatgtc

SEQ ID NO: 201850 - DNA, 1000 bp, Homo Sapiens
ccttatttcttcaaatatttcttctgccctctttcttcttcttccacttgtatggtacctgacatctcttcctgttctgctccactacaggtaagccagtgcttgcatctcgtctctcctgggaaagatctgtctttccttggattttaagcttatagttgtcctgtaaccccagctctgatgggatcaagaaaagttatgattttgtagttcattaactttttcttattgttaggaaaggagcaatattctcccaactctgctccattagagggttttgagtagaaggcaggacataatctgatttatattttaacaagagcagttaggttactgtattgaaagtaggtagaaggcagggttggctctaacgaatttgaatgaggagcctcagcacttttcggcgccattttcgagtgatacctgatctcatcaatctagcggaagagacaggataacctatccaagagtatagcgccactatgactccgccggaaaaattactttaaaaatcgccaaaaattacttggagcaaagggcagtaggcggagcttcgccaaggctggcgcagtcggttttgacctgtagcagagaaccaattctggagaacagcctcacttctttgattgaatactcacataatgctttggaacaggacatgagattagggtttaataatgatagaatgaagaccataataaaagagacctctacttacctcagcaattcttacctttcttacctatttgatgaagatgtcttttgaaaggtgtactgcaaggaacaaaatgtttgtaaattctgcttttaccaaggtttcttttttagttgatgccaaagagttccaatattgaacatcttaagtctgttacttggagtatggattgagtttggagcttactcagaggactacaggagagtatccaggaggtggataattactgtaccttcctcatggaaaaagttttatttaaagtgttatttctcgttgaatactatc

SEQ ID NO: 201851 - DNA, 1000 bp, Homo Sapiens
tgtcccctcttgcttgtgattcttttcctgagctagtccattttctacctcgagtctgctctcctgccattcccaggggccacagctcagtaatgtgggtgtcagggaaccccaggccaggcccccttgtgccactgtggctctccccaaagcagggcaccaggctggctgggggggtcctgcccagagctgccccacgctgccgtgtttgtgctgctgctgtgcagtggtgatcttgccaaaatgtggcttttcctttctcactcccccagagctcccagaaaagtctctaggacttttcttccccctaaataaaagtcaggatgtgaagccttttgacagaattggagtttactgtcatctgtttccgtttctctaagatagggatcctggcgaagcccatgaaagccatggggcgctcccaccgaagcctccgaggcacagacctcccgggagtgcctgtgggcgctgcttccttaaactgcaggaggctgcagcctcttgttgttcatgcgtcgttttttcatagtgtgtgtgggtttagagctacatgggttcttttctcacttatctgttcataccgcatgacaccgtccacttcaggcacagttgacggccgtctggaggtcatcagctgagggcacagtttgcctggttcttctataataggttaagtatttttttctccatttttttcccttttaaaagtactgctagaaggccaggtgcggtgtctcacacctgtaatcccagcactttaggaggccaaggcgggcggatcagttgaggtcaggagttcaataccagcctggccaacctaaggaaacctcatctttactaaaaatacaaaaattaaccaggtatggtggtatgcacctgtagtcccagctactcagaaggctgaggtgggaggatcacttgagccttggaaagagaggttgcagtgagccaagatcacaccactgcactccaccctgggcagtgagtgagaccctgtctc

SEQ ID NO: 201852 - DNA, 1000 bp, Homo Sapiens
tccctagctgcttgggagcctgaggtgggaggatcacttgagcccaggaggttgaggcagctgtgagccatgatcctgccaccacacaccagcctgggggacagagccagaccctatctcttaaaaaagaaaaaataaggaaacaagtcccaaagcggtaaagatgaacaccaagtaagagcagggccaggatttacccttctggtctggaagcacatgttttgtgtatgtgggaggggaggggggttttgctctgttggggatactaacccccctattcccacatccctcagagtgctggctatggccacttgtctgagaaccatccaacaacatggcaaaaatgcagaattcttgcacttcaaacagactctggggggtaggacctaagtatcaatgtgtttaaccagcttcccaggggcatttgagaggcaaatgctaaagcagatgaagttcctgccctcaagaggtttagattctagttagggaaacagacaataaaccaatgtaaggtaagtcaagttccaggaagaaaaagcaggataagaaaacatgccaagagtgttgttttagacttggtgccaaggcagtggttcccttttggacaccacggactggttttgtggaaggcaatttttctacggatagaggggtgcgggggtggggggaatggtttggggataattcaagcacattccacttattgtgtactttattatcgcattgtaatggataatgaaacaattctataactcaccatcatgtagaatcagtgggagccctgagcttgttttcctgcaactaggtggtcccatctggaggtgatgggagacagtgacagatcatcaggcattagattctcataaggaggccaggcacggtggctcatgactgtagtcctagcactttgggaggccaaggtgggcggatcacctgaggtcaggaattcgagaccagcctggccggcatggtggaaccctgtctctactaaaaatgcaac

SEQ ID NO: 201853 - DNA, 1000 bp, Homo Sapiens
cctgcctctacaaaaacatttagaagaatttttttttaatagccgggtgtggtggctgtatgcctgtagttccagctactcaggaggctgaggaagaaggattgcttgagcccagaagttggaggctgtagtgagctatgatcatgacactgcattccggcctggatgacagagtgagaccatgtctttaaaaaaagaaaagtttctcaccatccatagataattaaacatttccaggccgactgaattcctccacggagaagacaggagagggattcagaaccaacctgagcccagggctgctccactccctgctctctaccttcttccccttgggtttgagcccagattttaggtgagatgagctttcagctggtggaacatctctcttccgttttgctgtgataacaactctagttcttatgtggagggaggggttaaagtgcattggagtgcactatccctccacagaagtgcttcaccctgcagcgcaaatgtgcttcctcctgggttgggcatctagcccaggtatttctgagtctgacgatcatggagtgaaggccgaagaatgtggataaagaaagggaaggagaatcaaataatgccccccaagttactaagtgtcttgctgaacttttgctttttctatgtgggtgaaggtaaaaagagataactcgagacagtgcaggaaaaatatcatttaaaacctaaccttgaggctgggcgtactggctcaggcctgtaatcctagcactttggaaggctgagactggtggatcacctgaggtcaggagttcaagaccagcctggccaatgtggcaaaaccccatctctactaaaaataccacaattagctgggcatggtggtgggcgcctgtaactccagccactcgggaggctgaggcaggagaatcacctgaatccggtggggcggaggttgcagtgagccgagattacgccatttcactccagcctgggcgaaagagcgaaactctgtctc

SEQ ID NO: 201854 - DNA, 1000 bp, Homo Sapiens
aaattgtttattgtgatatttgcttatattaaaagtcatgtatctatttctgtaatttgcagatagtctaacatcatttataaatatttaactgaagagttggcaatggcttttttaatatgaaaatattttcaaatgtgtgaaagccggttctgacaattaaaaaaaaagttttctatttagtttctacacatacaataaatatacacacttggtaattttgtactggtaacccgtaaagaattttcctgtcctattgcggttaccgttactgttaagtttgcatacagtaaaacaattttaccttaatgcattagtttattggaaatttactgttagctatgtaaatatactagcataattaaaatgttatttgataatctgaatgtaaatacacttaaaaattacttttcaattaagaaatgtcgaaggaggccgggcgcggtggttcatgcctgtaatcccagcactttgggaggccgaggcgggcggatcacgaggtcaggagatcgagaccatcctggctaacacggagaaaccccgtctctactaaaaatacaaaaaattagccgggcgtgtggcgggcacctgtagtcccagctacttgggaggctgaggcaggagaatggcgtgaacccgggaggcggagcttgcagtgagccaagatcgcgccactgcaccccagcctgggagacagagcgagactccgtctcaaaaaaaaaaaaaagacaaaggaaattcttctagttcctttaaggatttctctagcacaggatcagagaggatcttggttattggtgactggtgagattctgttgggtgtttggaagcttcaaatgcatggagccaccccttaaaaatgtctcactggaggcaggcacggtggcttatgcctgtaatcccagcattttaggaggccgaagcaggtggatggcttgagtatatatacttcgcgagcaccgtgggcaacatagtgaaaccctgtctctacaaaaagtgc

SEQ ID NO: 201855 - DNA, 1000 bp, Homo Sapiens
aatgtataaaataatattctgtactccctagctaagtttttatgtaacatgtaataattatacctttgttacaaaagcaaacaagaaaaaagccctgaataattgtgttcccataagtagaacttcgggcagggatcactgattgcagtttgaaaaccagaagccccttggcaagagtgtgccactgttcacagcacttttgaggttcggaggttcagggctatttgttcaccataacgaagaaaagctcaaagcatgagatttattggcagaaaccatccatagcatgattgctgtcattttctaggaagatcaaatgaccaacatatttattttgccataggggggtagtcaaatttgttaactcagggttacacaatctcttttcctgtaaatagcataatcactgtgtataaatgcatattttacatcccacattttaactattttatattgttttcaaatcaacaaaacaacaaacaattttatattgtttcaaatcttattggcatactgtcacatgagtccccaacaaaaacatgtctttgcatttcagtttatagtttaaggggaaaatagaatgtatgtgatcaagtgttgtaagacaggtaagaacaggtcatgagaacccagataaggtagctaatacataaatctgaaacaaaatgcatgactatagaaaaagagagtcttgaaatacgggcaggttttcaacaaggggagagggaagtgattaggtagtgatactccagatgaagtaaaacctgggaagcaaaggctctgagtttcaaaaccacagggtgtgttggaggtcagtagcacagtttggctgagatgcatggtacttgttagaaaacaagattagaaaatattactgaaagtggccaggtgcggtggctcatgcctgtaatcccagccctttggaaggccgaggtgggcggatcacgaggtcaggagattgagaccatcctggctaacacggtgaaaccccatctccact

SEQ ID NO: 201856 - DNA, 1000 bp, Homo Sapiens
cctggactccaccgcctgcttctgcaaccacagcaccagcttttccatcctgctgcaaatctatgaagtacaggtgagtgcacggtgggaggggggtgtcaggagggggcttcttagctggaggtgaagagaagagccaataggtagccagaagaagcatctgagggatgccagctttcatagattgtcggggacagggctgcacgcagtagttcatgcctgttgtcccagcactttgggcggctgatcacttgagcccaggagttcaagaccagcctgggcaacatggcaaaaccccgtctctaccaaagatgcaaaaattagccaggtgtggtggctcgtgcctatagtcccaactattcaggaggctgaggcaggaggattgcttgagcccaggaagtcgaggctgcagtgagccaaggtcacaccactgcactccagcctgggtgacagagcaaaaacctgtctaaaaataaatgagtaaataataaattgtaaaaaaaattgttgggggaaaactctaagaggatgtcaggaggggtcggattcactggagctggaaagggccccggagtggttacttgctgagaagtcaggtgagatgggacgtgagcctcaggaacgctggggtcactacaaggaacaccttgtagtgttgaggggcacactacaaaaacatgttaccaaatgcatttttcctgtagagtcagggccaggcacggtggctcccacctgtaatccgaccactttgggaggccaaggcaggcggatcatttgaggtcaggacttggagaccatcctggccaacatggtgaaaccccatctctactaaaaatacaaacattagccgggcatggtggcccgtgcctgtggtcccagctactcgggaggctgaggcacaagaatcacttgaacccaggaggcggaggttgcagtgagctgtgagctgagattgcgccacttgcactccagcctgggtgacagactgtcttgaagcaac

SEQ ID NO: 201857 - DNA, 1000 bp, Homo Sapiens
atttacatgtagttaatgcctgcaaaacattaactgatttcatgttcaaaacaatgctaaggctgggcacggtggctcatgcttgtattcccagcactttgagaggccgagatgtgaggattgcttgaggccaggggttcaagatcagcctgggcaacatagcaagaccctgtctctacaaaaaaaaaaaaattaaaaaattagctgggtgtggcggcacacacctgtagttacagctgctcaggaggctgaggcagagagattgcttgaacccaggagttcgaggttgcactgtgctatgattgtgctactgcactccagcctgggcaatagagtgattccgcacctccccaccaaaaaaaaaaaaaaaagctaaaagaaaaagtggacaactcagttttaagaaagtacgtatcatggcaaagattctcagtgattttgaagcagagttagttttaaaccctgacacaaatgtcccagtgtttcttaatgtcagagctactctgctcctttccatgaatgaggcagaattatcagtggcacaactgacaaaactattttcttcatcttgaagagtagttttaacagccacatgttgcagagttattcacaatgaacttactagatagtagacattcagcggcctgtttttataattggggaaactagggctcagagagggaacgtgattttgatgcgactcctccctctgagcagatccctggcggaactcagggtcttctcatatttgccctgtgattccctcttgggctgtaattcctctttaaaatttccctggagagctctctgtgtagtccctttctcctgaatagtaatgtgctcacttttgctcccttatctatctcattttaaaatctcctttcaggcctggcatggtggcgtgtgcctgtagacccagctactcaggaggctatggtggaagggtcgtttgagcccagtttgattctagcctgggcaacatagcgagactccatctttt

SEQ ID NO: 201858 - DNA, 1000 bp, Homo Sapiens
atgaggaggagccaggagagaatcgaggaagagcaaatattacgagcgtagaacgcgaagcttggcatgtctgcctggttccacttactcacgtttgttgagctccttctatgtctgaagctgtttctaaaacgtcagtttctagaaaacaggatcctgaattcagctaagcatgattcccagggccatccctgggaagctgtcctgaagatgcctcctgctaagacgggttgcggaggggagtcagtggctgaaagggtgatttcaggatagattgtcctggcaaataaggaggggtcctctgcatgaataagcagtgtaccctgccaaaggaagctggcaggaggtgattcctgctgaagcctgacagtacatgtccaccctgaactcatggccttggatgcagaccggccaactgtacacagttgagcgaggaagtggcgacagcacggtttgaatctggctgataaaacagatgttcgggggaagggctcttattttctcccagttataggatcgggggtgggggaagaaaacctaattccctatctgccaaatgtttctgttggtaatgtcctggcaacagtgagatgcccccaagaatggagtggttgaaagttctagctatcgactcagccctggatgtaaattctgaattctgtgtgaccttgggcaagttacttaacctctctgagtacccttggcctcatctgtaaaatgaggataatgatacctacttttggcggggtgcaggggcttgtgcctgtagtcccggcactttgggaggctgaggcaggtggatcacttgagatcatgagtttgagaccagcctggccaacacggtgaaaccccgtctctactaaaaatacaaaaattagctgggcgtagttgtgggtgcctgtaatcccagaatcgcttgaacccaggaggcagaggttgcagtgagccaagatcatgccattgtactccagcctgggccacaagagtgaaactctatctc

SEQ ID NO: 201859 - DNA, 1000 bp, Homo Sapiens
cagaatttttacaaaatggaataaattaatgcaaacaatactgctctttgtataaattaaacattttccttcatcctaagagctataaatcacagacactacattttaaatcaatgtatcaacataaagtgtaaacaaatggatcaaacaagcaaaaggaactctaaattccctcctgcctttcctttttggctgatgcaatcagtaaaacccagaggagcggcaacattttcatgtgcattggaaatggtttaacagctgtctgtgcaagtatttcctaacgtccaacatgatgcagtgtcaaagagtccagtgaatctagagaggttgtttgacggtaatctgtcttggagacagggacaggtactaggtcaacacctatttgtacataaaattctaaaaaaatttttccttaaggccaaggcaccatgaagtaccttggaatgcttttcagagcccatgaccctggagacaggcaggacctcatgcttttggcaatgtaaaaatccttcctatccctgctcagcatcccttgttctttccacaaatgttcaaatccagttatttaaaactgcattgatttggagtgaagtaaaagatattttacaagtagcattgaacaaaaatgctattgtgctgggagaggagttgccttttgcaagctgcttgtttttgcttttattctgacagtggtagccagtcattaagacttctaagataggccgggcacagtggctgatgcctgtaatcccagcactttgggaggctgaggcaggcggatcacctgaggtcaggagtttgagacaagcctggccaacatggtgaaaccccgtgtctactaaaaatacaaaattagccagacgtggttgcgggcgcctgtaatcccagctactcgggaggctgaggcaggagaatcgcttgaacctgggagatggaggttgcagtgaactgagattgtgccattgcactctagcctgggcagaaagagcaaaactctgtc

SEQ ID NO: 201860 - DNA, 1000 bp, Homo Sapiens
taaggacgattgtgaagttcttgaaagtgagaagagagaacatgttcctttgaaattaaaactcagtttttcctgatttttcacgttagctaaaacgtgccaggaaacgggcttttcctgatttctttttttccctagtacaataacataatgactaaatttggaaaagtactttgcagttttcagagcactttgttattcacagtaactgcagagatccccccgttttagatgagaagggaaactgaggtgtgaagaaggaaaggaacaggagagaagtgacaaagatgagtaaagtattggtaatttcttttctctgggagttctaacattctaacaggcttgtagtttaagacgtttctagatagcagattctcacacctaactcactatattttccaaacttatctaactataagaatccgctggtgtgcttgttcatatacagattcttaggcccatcttctagttattctgatttcagttggtctggggtgatctaggagtctgctttttttaacaaggtcatgtggggattcttatctcttggcatgtttgggaaattttacatagccggcagctgaagtgcacatggaaataagttgtccaaggtcacgcaatctgaactccctgatccccacctggtgtctctggtccctgagcccacatccccctaccacccactgttccacagctgccttcccagggacacagagtttgtgatcaatactgaataattctgccacgtctttattgtcatgccttcatcacctactacgtatgaagctgtccagaaacaggagggatttaagggtgagggagagaatgaagaagacagacacaggcataagagacaaaaagaaacctcaatgttattaaaaattcaagccaggtgtaggggtgcacacctgtagccctagttactagggaggctgagacgggaggattgcttgagcccaagagttcaaggccagtctgggcaacatagcgagcctgcctc

SEQ ID NO: 201861 - DNA, 1000 bp, Homo Sapiens
aacagagcctcagagagtcaggttacttcctcaaggtcatagaactagtaagtcacagacctagggcacaggagcaggtctgtgtgggggtcagagccacagctgtcccccacacgctgggggcctcctccacaaagtggtttcaggtggggctcagcccacctctgggggaacccattcatatactatgcaaggtttcacaggtgtgtgaattcattttccattgctgcgtaataaattaccacaaacttaatagcttcaaacaacacatatctgtcattccacagtttctgtggaggccaggcctggttttcctgagttctctgctcagagtctcacaaatctgtactcagggggtcagcctgattatggtctcacctgaggcttgggatccccttccaaactcactaactgttggtggaattcaattcatgcagggagagcactgaggctgcaagctcatggagaccacccactgtttcctatgtgtggccctctccacaacacagccctttgcttcttcaaaacccaaccaaagaatctctgtcttcaggaacagcctccgaccctctttgaaggggctcacctaattaggccaggcccacagaggaaaagctctcttttgattaactcagagtcaactgattagggactttatacctgcaaaatctcttttgccacacagcataacttaatcaaaggaatgtattccatcccattcatggatcctgcccatactcaagggaaggccataatacaagcatatggtcattaggggccatcttagtcactactgttcgtggattgttctccagcttcctggaggagaggagagcaggagacagagctaagagtgtttgtaaaatagggcagtgggaaaaggtaggtcttgtgagtagcaggctacttaagatgcctagtgggtctaaatgtcaaatgctattggcagattttccgtgcaaggtatgaccaaaaaataattatttcattaactttgtgc

SEQ ID NO: 201862 - DNA, 1000 bp, Homo Sapiens
aaacttggtggcttaaaaacgacagaaatgtattcttataggtctggaggccagcagtgtgaaatgcaggtgtcaccaggaccatactccttctgacagctctaggggagaatgcttccttcttttcccagcttttggtggctcctggcattccttggcttctggctgcaccactcccatctctgcctctgtcttcacgtggccttcccctgttggtgtgtgtctgcatgtccaaatctccctctcctttctcttataaagacataggtcattggatttagggcccatcgtaaatccaggacaatttcatcttgacatccgtaactgattttatctgcaaagtctctatttccaaataaagtcactttctgagatttcaggtggacagttatttgcggggatagtattcaccccactagattcagggttgtgggaagtgttgcttactaaactctggttcacggagctgccaaagaaaagagatttatttttaaacctaggagagaaggcaagcttggctgctgtggaggctggggcccatcctcagaccatctgctcccctcatggtgacacagatctgaaaaccaggtgggttgaaggctggcctagaggccctgtgtccttaagatccagacactttgcagtacagtcagctcgcagtctctgtctttgtggattcaatcaaccacggatggaaaatatttgagaaaagaaacaaaactggccgggcgtaatggcttacccctgtaatcccagcactttgggaggccgaggcgggtggatcacgaggtcaagagatcgagaccatcccggccaacatggtgaaaccccgtctgtactaaaaatacaaaaattagctgggggtggtggggtgtgcctgtaatcccagctactcaggaggccgaggcaggagaatcccttgaacccgggagcagaggttgcagtgagccaaggttgtgccactgcactccagcctggcgacagagtgagactccatctc

SEQ ID NO: 201863 - DNA, 1000 bp, Homo Sapiens
cggccatgttcaagcagctgttccagaagtggtcagtaaaggaccagaccatgggcctggggaaaacgttcagcattggtaaaattggtgagactgcccccagatcatcctctcattgctaagactctagaaaagcaggcacagatgcttcttactcactcggcttttcccaaccctttctccacagctaaagttttccaggataaatttgatgtgactctgctacacaccaagccagaggtagctgcccaggaaagaatggtcgatgatggcaacggaaaagttgagatctggactctgcttttcttctctctagggtgggacttccaggaagggaaatgccgagcctgaccctccagtaagactcttccaaattcatggaaatgacaaatctaacaccaaagcagtggaagttccagcctttgcctcctccctaaactccaatgatgtctttctgctgcgaactcaggcagagcactacctgtggtatggcaaggtaggatggctgggccccgggtcagaccagcccctcggagcccagacctgcactcccctcctcctgtcagcaaggtcaaaggacctagagtaggctggagtgcttgctttggcagcacatatactaaaactggaatgatacagagaagattagcatggtccctgtgcaaggatggcatgcaaattcatgaagcgtttgatattaaaaaaaaaaaaaaaaaaaaaaagctgggcacggtggctcatccctgtaatcctagcactttgggaggctgaggcaggcaaatcacgaggtcaggagttcgagaccagcctggccaacatggtgaaaccccatctctactgaaaatacaaaaattagctgggcatggtggcacgcgcccatagtcccagctactcaggaggctgaggcagaagaatctcttgaaccagggggcggaggttgcagtgagccgagattgtaccactgtactccagcctgggcgacagggtgagactccgtctc

SEQ ID NO: 201864 - DNA, 1000 bp, Homo Sapiens
cccacattgttagctgctcagagcaaatgggttttgctgcaggtgtaggtttgcctctggctgatcctgggcagtatggcatctggatgggagggtctgagggagccttagcccagagttaaggggtgccccccaacccctgcctggagtcatcctacatggagctaataggggcgagtctgggaaaagttgcatttgtttcctgctttaagactttagcttttggcccgacctcaggtgatccacccgcctcggcctcccaaagtgctgggattacaggcgtgagccaccgcgcccagccttccttttaactctttgtacctgttttttttccttgttaggatgaaatggtaacaactagctcataaggctgttgggaagataaatgagatagtgaatgtagtgtgcttaggaccttgccaggtgcatagtgagtgcttgacaaacattgaccatccttttacagtagtcacctctgcagtgaatcagaaatttccaaccctgcacacttagggtgtctggggactgataatgctaactttagttctttgctcctgatttcacctatctgtgacattctttgtcttgatacaagtgtctgtagtactacattcacttgcttaatggtttaggggcagccacagccagtggaatgctttccagaggtagctgggcaacttgggagagagaaggaggaggatgaggccaggcatggtgactcatgcctgtaatcccagcactttgggatgctgaaatgggaggatcacttgaggctaggactttgagaccagcctgggcaacatagtgagaccttgtctctacaaaaataaaaataaatttaaaaattagccaggcatggtggtgtaggcctgtagtcccaactactcgggaggctgaggtaggaggattgtttgagcccaggaattcgaggctacagtgagctataattgtgccactgccctactactgcagcctgggtgacagagcaagaccctgtctc

SEQ ID NO: 201865 - DNA, 1000 bp, Homo Sapiens
aaaaaaagaatttatagtttccaaggtgaaacaaacaaaccagctgcttaggagaacacagctgattttaacatgttctgaggagcacaatttttcttgctggtactcatgaagaaaacatcttacttcatatttaaaggtatttttaatgtgaatagagtcaaaataatttataaaagtggtctttggggtccagattgatgtgttctaattatgagcctctgtgatcggacttaattcaaagatagatttttgaggggctagaggaatggattgaactttaggaatttctatggatattgtttctcttctctgtgcttttgaaatggcagtgagtgagtctggcattggtaggtgatgctcacacttatgcattccagtgataactttcgtcaagttcaagactgttttggaaaatttctgcataactttgttgagttttagaattctatttgcagttaaaatttttattttaattgtgaaataccaaatctgaagttgtattttaatattctttaagctatagaagtcagtacaacagttaatttttccttagtattaaacatccttataccatagtgtaaaaatgagaaatttggaatatctcacttttatttactatgttaaatgctccattccttctccccaccaggcacacccacataaaaaaagatttttggaaagatgttatagggcagagtgtgttaagagatgagccgggcataatggctcatgcctgtaatcccagcactttgggaggccaaggcaggcagatcacttgaggtcaggagtttgagagtagcctggccaacatggtgaaatcccgtctctactaaaaatacaaaaattagctaggtgtggtggtgggtatctgtaaacagcctggctaacttgcaaggctgaggcaggagaatcgcttgcacccgagatgtggaggttgcagtgagccgagatcgcaccactacagtccggcgtgggtgacagagcaagcctctgtctc

SEQ ID NO: 201866 - DNA, 1000 bp, Homo Sapiens
aaaatcttaaacagagaaatccatatttagaaaacatggccagattaaatagggggtgggttattttcttaaatacgttttgtcaatttcacgtgaaaaatgaaaacccctagttcatgttacatattacatttctgttaagatgtatgttcctctgtttctaatagaagttgtggtggtttggaagtgaaaattgaatgtgagcacaggccatgtaaaggaaggagaaagtgtaaatgttaataacaggaaaactgaatttagctctcatgaggcagtcaaggaaatcattcattgaacatgttgggaaatacttttcatttggtgaccaaatacctacaaattcatttacaaaaaagaaaaatgaaagttacctcagaactaaactcagaaatatgtcccacatgggttcttgtaatgtttcttggtgaatgtctttatagaaagaagtgggcatgaaatgatgactcagtaattaaacacatgggggaagggaggctgtagaaaacactggattctatatttaaaatttcattcagttcactaatttgtttttactgaccaaagctttctatacctatgtagagtgtctgagaactagaagggcccatcagttgccactcggatgatccttttgtctcttttcagataaggccccagttcaacagcgtcctctgtgtcaatcagatactcccaggaatgagtgagccctgccgttttcccaagttgcccctcagcacattccagccagttccaaaacttttggcttgtttttgacacaaggccagataagctactcaaactggtttttttaaaaaaagaaaacaaccccaatctatattccttttttaatactgtgtacataacctgctgctcgaaagactaggttttcccctttccagctagttgtgttgtttctttatgtagacagctttaaatcatgtttacatgattcagccattttaaacaacctcttcctatttttttttcctttttgtac

SEQ ID NO: 201867 - DNA, 1000 bp, Homo Sapiens
ttcttcccttatccatgtcagagtgttggaaagataaagttattttttccacaacattttggggactcctgatatatatttctggtcatattttgaggcaccagtgtctagtccctgattgacttttatttgactctcagcagttctgtctcaaccccatagccatgggaatttccttccctcattgtcacagataatgatgttctgaacttctgtctttcccccgtacaacttgtatgaatttggagtacttttagttgtaagtaactgaatacccaagaggcttaaactagaaggacttttattatttccttaataagcaatctggagataggttttagcacttgttctggttgcttgctcattgatgttagggtttgggtctgtgtctgtgattttcttgacttttttcctcacggtggtttgatgcctgccatagcattaagcatcatctcacaaatcagcgccttgagcaaaaagaaataaaagcacgaaaaatggtccttctctccataatgctttgtcagggaagaaagtcctctctggaaggctccacctgacctctgcttatgactcggcccactcctagtccttccaccagcaaagaagaaatttctgtgatgcaccaatcatgatttgtttccagggcctgctttcctgggcatgttgctgcctaattgatactatagaaaagatgcgttctaaccaggtgctgtggctcacacctgtaataccagcactttgggaggctgaggtaggcagatcacttgaggccaggctttgagacaagcccggccaacatgacaaaaccccatctctactaaaaatacaaaaaaattagccaggcatagtggcacacacctgtaatcccagctactcaggagaggaggctgagacatgagaattactcaaacctgggaggtggaggttgtggcgagccaagatcgcaccactattctccagcctgggcaacagtgcaagaccctgtctcaaaaaaaac

SEQ ID NO: 201868 - DNA, 1000 bp, Homo Sapiens
ctaatcccatgaatataaactagagacttcttcagatgaccctggcaaatctctcgtctaggacaaagcctgccttccaggaagctagcctccttagctagtaagtagcctcgtattaacaagcccatttggtgccctaaggcctttagaaatgtccttccctaattcacatttgcacactctctttctctgtctccttccttccttcctttcctggcttccttcaggaacaggaatagaggcatcttcaagaagtacacattaggcaaaatacagagaagaggaggaaatgtggatcaagggacaactgaaggaaaccactaaattagacctgagttccctggcaggcaaagcaaaaacctgtcagagtcagttataagattttcagtgccccaaaacataagaatcaaccagcttttcctggcattgaaagttgagagacatcagaggacttcatctcctaaaacctaattgagctcacaataatgagttttatagagtcgggccttatagtatccttcgatgtgggtgcatgcgaactaacatactcttcaggagaagggattctgcaagtccccagagcagcgtagccaagaaccacagcttcaggaccacccctcctgagccagggatgataacgggctgggtttctggaagtgtttctcaaagtgaaaacttggtcctccgagatgctctatgaggagtggattccatgacgaaatgttcccctcttagagaacgaaggagcctataagcttattaataagcttattaatggctctaagaagcccttcagtaaagaaacttgcttagctttttttaatccagtatttctccaaatttacttggttataaagcctcccctcctcccatgacccagggcagttatctctgtctttgtaatactgtgtgtcatcggcttaaaaaagaaatacctgtttttggtggtggccagccacgctgggaaagagaaagagggatgattgattttctgcttcct

SEQ ID NO: 201869 - DNA, 1000 bp, Homo Sapiens
aaaaaccttacatgtgaaatagcttaacataaatatataggtttagacatactgattgatgtttcagtgcctatttttatatgcatttatatcgctcaggtcatctattttccacttgttctattaagtcatggttttgcaaatggtcaccatttaaatataaggaagggacctattttgcttctttcatattcttcgacatttcctcaatgaaagaataaggaaagtttaggagtgagttacttagggtgtattctactctgaggatttcagttttactatagctgtatttaatcttatattaattgggcacttatattaatttagtgcctgtataatgttggcactgaaatggttctttagtgtgttgtgagaaaatttcaatgaagtcatttatagaaaactgtttttctcaagggaatttccctttccccttttcagaagtcagaggaaaaaaaaactggaattagagtatagagttagagataaagcgaaacgatggcagaatatgctgagacatttgctcaggggttaaaagacagggagtttatagaactcccttttctgcttgtcataaggttatctgttccttcttttggacatctctctagaggtgttcccaagctttgtatcacagattcttttatcgtgggggtcctaaactttaaccatttaaaaataaaaaccaagggttaccaaacaccttaatagagacttctctatgaagttacaagaagtaaacaaccatatggaagaatttgatgtgttctttgaagtcactgcttgtaagagaagacaacgtgtaatttttgagttactgtatgactcacgttggaaatgtttaaagccttctgtaggcatggtgtggtggctcacacctgtaataccagcactttgggaggccgaggcgggaggatcacttgcacttaggagtttgagaccagcctgggcaacataatgagactttgtctctacaaaaaaaaaaaaaattaaaaaaatt

SEQ ID NO: 201870 - DNA, 1000 bp, Homo Sapiens
tatgccaggggaatttgaacctggtagtacactgaaggttaaccacagcagcagcaaaaccagctcaactcctggctgggttaactcaaacccccacactgatggtctatcagaataagagctatgcccatttctaggcataaacatttacctgtctgtactattgttttgtattcttttataatatggcccgtcaagtgtagccacaagaggagacacacagaaaggatgggggggcgtgggacaagaccaaagtgaattatattcacaggacctagagacaggaggcacatcattccatgcagggtcacagtaaagacaccaggtggtcaggaggcaaaagacaggagcaagaggaacacactaggccagagcctttattggggtttccatgggaaaggcaaggcagggcagggtgaacagcttagaactggcttgtttgaataatttcagagagacttaaactataggagcggcgcctagttgcctggtacctggccctgggatgactaagacagaggaatattgtctcctgtggtgtacaggcctgctagaggcggcatggagtctctggattggtcagtttgcagatcaagggcatactcctggctgagcccttgctatgcataagacttggctaaccccaggaggggcagtcattccccagctagaaaggttctttttcatttagttttgtttttaagatgtcaaaacatcataatataccgaacattaaaaagaacactcacagctagctgggtgtggtggctcacatctataattccagcactttgggaagccaaggcaggctgatgccttgagcccaggagttcaactccatctctgcaaaaattagccagccatggtggtgtgtgcctatggtcccagctacttggaaggctgaggtgggaggattgcttgagcctgggaggtggaggttgtggtggccgagatcacggcattgcactccatcctgggcaacagactgagaccctgtctc

SEQ ID NO: 201871 - DNA, 1000 bp, Homo Sapiens
atttttatttttgtggagatgaggtctccctatgttgcccaggttgctctcgaactcctaggctcaagcagtcttcccgccctggcctcccaaagtgcaggcattttaggcatgacccatcgtgtccagcctaaatggcattcttggaagtaaaaccacaggggatctgttggaagtggcatgatggaggaattttaaaagaattgaacaaataaaatagtcagagctcaaaaattgagtactgcttcgtttctcccaaataaccatcaccagacaaacaggtgtgtgtgtgggtgggggaggtggcctggtggtacttcatgatcttggaagaaggaaggcgcccctccttcttagctgattgatgatgagatagaaagatagaaacagccccatcactatgagatggaaacccttctttccttcagctgacttccctctccttcattcccaaccaagtttgaccccgccgcagtggagattgtggcagatgggtcagatagcatgtgtcctgtcgctgtcacaactttttaataagggctgggggtcctcttgaagagcccaggaactgcagtccctcctctatgccttcccctgaacgcagtgcgccctcactaataaattctgagggctgacactgcctgagccggctggtctttgccctcaatttcattgagatgggccgtgagtgactaaagtaatgcattaatggttgaatggctggccaccgtgcctcatgcctgtaatcccagcactttgagaggccagggcgggcagattgcttgaggtcaggagttcgggatcagcctgggcaatatggtgaagccccgtctctactaaaaatagagaagttagccaggtgtggtggtgggcgcctgtggtcccggctacgtgggaggccggggcaggagagttgcttgaacccaggagggagaggttgcagtgagacaagatgatgccattgcactccagcctgggtcacagagcgagacttcatctg

SEQ ID NO: 201872 - DNA, 1000 bp, Homo Sapiens
atgtctgaaaacttgaaaaactgccgtatcatctcacagtgatgcttttttgtggtgtgggcagggaatttcaggcacacttttgccaatcccacaccagggaaagctatagtctttggttgcctgtggttaaggaattgagttaaaagtttcctttttatctcagggatttgcaggagttatttattcattcatcagatatttacttaactcttaactcatgccagaggcacttgaagatacctgattcctgtcctcaggaagtttagagttgagatgtggggaaacggagaagtaaataagtacagcagagggctaaaagtgctgttttaatagaagtttgcacaacccaaaggagacagaggtctatataggtccatcatgggaatcagaggttgaggatgcccaggttgatgaagcttaaattgagcttcccctttagaagagagctgccaccagtaaagacacagaagtgcaagacattaaaaagctattctagccagtagggtagagtagaagcaaggactttgtggtcagatgtgggtttgtttctggctagtggtttgtaacccctaggcaagttacttaatcttgctaagtaaaccttagtttcctcatctgtaaagccaggatgataataacacctccctcaaagttgttaattcattttgcaattcacgtgttgagtactttttaagggactgggaatacagcaatgaacagcacaggtctgaatgaggaaggtaggaccgggtcacgaaggtatgccaccagttaacaaagacactctcaaaacaggaaggatggcaagtcgttaaaataacatccagggctccatttttacctgaagaagaatagatgataagaattattttaggtgattaggttaagaatgagtttgcgctggtccgagtgcagtggtgtttacaactaattgatcacaactagttacagattatttgttccttctccactctcactgcttcacttgactagcttt

SEQ ID NO: 201873 - DNA, 1000 bp, Homo Sapiens
tcatagccaccagatcgcatttgctttgattgttgactgtctcgtgtgtaattgagtttcccagtttctacagactgccattgctatgcacggctgagatggacagagtttgcttgtgaatccgccacactcactgcctgtcaccacacctgcaggcgacgactgtaagggcaagagacacctcgacgcgcacacagccgcccactcgcagtcgccacggctgcccggtcgggcagggaccctctggcacatctgggcatgtgcaggttgtctctcgccccgtctccgtctcatctcgccctgtcaccatgctatttgtgtcttgtgtggtttgtgcttggaattcaagtgctttaaagtcttgctgtaaaaactgacaggaatagtattaactttggtttaaaacagggtgaatctctctcgaaaagctcccttgtaaatattttttggaagcggagtctcactctgttgcccaggctggagtgcagtggtgcaatcttggctcactgcagcctccacctccagagttcaagcaattctcctgccacagcctcctgagtagctgggactacaggcgcacaccaccacacccagataatttttttgtatttttagtagagacagggtttcactgtgttggccaggacggtctcgatttcctgacctagtgatctgcctgcctcggcctcccaaagtgctgttggcatcttaaaaaaaaagttagtttcaaaaataattgtctcacctgctaatgaataaacataaagccattgatttttcttttaaattctcataagccatatttctttgcatgtcaaccatgttgtaattacatagttgcaggaattcacaagcaggtgttaagtcactgtgaggagacagccacccacagtgagaactggaacaaaacttactttgggaggctgaggcgggtggatcacttgaggccgggagttcaagaccagcctggccaatgtagcaaaaccctgtctcttaaatt

SEQ ID NO: 201874 - DNA, 1000 bp, Homo Sapiens
gctcttcacagtacaaggatgccaagggactccataaatgaactgataggctgggttctccagagcccattagctgagacttaccacctggaaagccaccaggctatttaaaaccccactagtcagaaaagagaggtggccttgtaatgaagcctcacttctgctttaaatctagtgaaacccaaaatgctgaggtttagtatgaggggggaacctttgcatgcaaataatgacatttagcatcataatcttcattatgaatgtttactaatggctcgttgctgattttcgtttttgagacggagtttgctcttgttgatgaggctggagtgcagtggcgcgatcttgactcactgcaacctccgcctcacagcttcaagattctgaaagatgaggggtgtgacaatgagcgcaaaggatagtggacacactggaataatgctgagaaattaagagtttaagaaagtctttgtgcgttgcttttccaaggataggaaagaggatatgatgggtttgaagtctaatgtccctacagccctctaagtctttgagggctttagggtcaggcctttggtatcagtctatacacaaaaccacggtcagtttactcaacatacttaataagaaaaagaatttgaggaactggatgtgactgtcattgctggagcctgtttgcagtatacttttactgagaaaaatagattaatgtgaggtccagagatgatataaaaataaaattgctcactgggcacggtggctcacacctgtaaccccagcactgtgggaggccaaggtgggcggattgcttgagcttaggagtttgagaccagcctgggcaacatggctaaaccccgtctctacaaaaaaattaaaaaattagccaagcatggtggcagacacctgtagtcccagctacttggagggcagaggtgggaggatggcttgagcccataatcatgccactgcattctagctttgatggcgaagtgagacctttctc

SEQ ID NO: 201875 - DNA, 1000 bp, Homo Sapiens
ttgggtaagatggcccaccccactgcaatatccataatattgtaccacatggcaagtggagaacagaagaggtatcaaggagagaaaagatgataactatgtactgttttacactttaaaaagcattttaattcttgattgcgtttggattacctcagggcaagtcattttacatttgagtaatgttatccatttatacatttgagtgaacaaaagcttatggacattaagtaacttcatccaagatccctcaggtagaagttgagcagggattcatgtattcatctgtttgactccaaatacctatttcatcctcatatatcatggaaacatccactaatctccatccaccttacccatattgattccaacttttctgtctgtccagcaatctgtctgtctaggtagcaatctcttgaagataaaatgtagaaactcacagagctggtgttcagttacgatataagtttggaggagaaaacacaatccagaagctatgattcctcttgtttttccatggtcaacgggtttctggagagctttactgagaatctcagaaataaagtgtgggtggaagggggatttagatggctagttatccaagagttagtgtttaggccattgcagaatcaatgatttaacagcagcagaactgttttggcctgcagttaacatgaatgttaatgaagaccaagtacatgctaggaattccagtcaattaatggttataatttacatgcaactaggaggttcttagcttggtctcagttataactctaagagactaggagaggtagatgagatggaatgcatttcttcttattttgtaatcctgctccaggtcaaggaatagaaactcagagcccatgtatttaagaaagaaatgtatttttgtggtaagtttgctccaagtagggatacaagtatctatttttgacaatcaagtgacattgccatctattcagttgctcaagctggaaattatcagtgtcaacacatc

SEQ ID NO: 201876 - DNA, 1000 bp, Homo Sapiens
cttagaatatttttacctaacatgcttaaacaaaacaaatttcattcttaacatcaggctctgaaagttccttttagttagcatttgctatattgacagctggtttgacaagtacatattttagcataagaaaaaaacagcaggccgggtgcagtggcccttgcttgtaatcccagcactttgggaggccaaggaggcagattgcttgagctcaggagatcaaggccagcctgggcagcatagcaagaccccgtctctaccaaaaaaaaaaaagaaaaaaaattacaaaaactagccagatgtggtggcgtgcacctgtagtcccagctcttgggaggctaaggtgggaggatgacttgagcctaggaggcagaggttgcagtgtggttgagattgcactactgctctccagcctgggtgacaaagcgagaccctgtttcaaaaaaattaaaaacagcagatgagtttcttttttaaaactggattcaggatcagtgtaatgttactgatcttcaatagtaaccacaaacttaaaaaatctttacatattgccgtatgtattagatattctgatatttaatagctgagacagtcataccttatagtattattatcccaattttactagtgaggaaacaagcagttaataactgttagagctcagattcacattctgaaagttatagaaattaagaacatagagcctatgttcttaatttcaccaaaatatctcctcccaaattatacataccctttcaaacctaccttcctctcttagtaattaatgataccgtctttcaatttacatgaatcagtatcactattagtaaatgtattttatgccattatataacagactaatttatttattctgtactctactgtgatattttcctctatcttctgcaagattttcatttttaaaaattactgtcttggctgggtgcagtggctcatgcctgtaatcctggcctaggcaacaagagtgaaactccatctc

SEQ ID NO: 201877 - DNA, 1000 bp, Homo Sapiens
aaagcagccacagacagtaaggaaatgagtaggcatggccagttttggcccacaggctataatttgctgacccaggtgtaggcaaggctttcttatgcggtctaattggaatgttttcaagggaatattacttaaaggatgtaaataaagaggcattttcttttttcagttcttgtcatctctcactgtttttcaaatatgttgagtcttattccatgctttactatatgtaaatatatattttctaaaattacattttcaccatccacaagtttagtcattttcatctccaggtaagatttttctttgcatttataaattcctgcttaaacagctctgaaatcactttgtaaattgtaagctttgtacatattttagaaagttatcttaatgttactttcaaccctgttgctcttgaagatagatatgtcattttaaatggcaatttaagtttacaaatattaatatgaaacttcagaaacaagttgggaatatagttttgagattgtggccaaataaacattttgcatgaagttctgaaaaattggcactctgagtatgcagtaatttttctggaattctccgtcattctaactaaattttctctgaagatgagtcatgttgtcggggtgtgatgtcctgctgtttggaaagtttgctatcaaaattatgccagccattgagaaaacagactcatttatcattccaatctgtcagaagtaaaataaaattttaatagatgacttattagaacactggttataaagcatttatgatggtaaaaagtaatatatatccattaagttattagcaggaaggaaatggaataataaaaaataatccaaaagaaggcaagaaaggaaaaaaaaggggacatagaacaaatggaataaataacaagtagtaagatggtagatttaaattcaaatatatccataattgcattaattattaattgactaaatgttccaattcaaagaaagagatcagggtttgcttt

SEQ ID NO: 201878 - DNA, 1000 bp, Homo Sapiens
ttagcgaggccaaggtagcttgattgctagagcccaggagttcaagactagcccgggcaaagggcaaaaccccatctctacaaaaactacaaaaagaaattagccgggcatggtggtgcttcccggtagtcccagctacttgggaggcaaaggtgggaaggtcacctgagcctgggggtgtcaaggctgcagtgagctgtgattgcaccactgcacccgagcctgggcgacagagtgagaccctgtctcaaaaacaaacaaacaatattatacttgtagtatttaaaaaacataattatctggtattcccatagctaatggaatgaaaggggagactttatctccctagacaggaagcacggtacctcctacactctcttctccccacatcaactggataggtgtgtgaacgcatttcaaagtcaagtatggttagtaattacttgatctttttccagccccttcagataagctgaattgaacacccaaaagtgatagtaacatcattttcctttgcaattacaaagaccattaacccaacagaatctccatgctttacctgtttgtgatgtttttgttccattttattaagtctgactcctgataaatgaatcactacacaattaattttttctcattctttagattcatacacacagacacatatatcaagcaaactataaattgctaaaatgacaggccagcagtgactacttgttatcacgtgtgtaacatctcttgagggctgctttgtaattcatttgtatggtgttgttgtaccagtgtaactgctaagtggtttctctggttccatgttcatttgtacatgaagttgtgcaatctccacataccagcagtttcaaagaatgacagtttgcatgaggccatcttaatagcaggtagcatgtaaccaacccatctgaattaagccaccattgcagaataaaacatttgacactaagccaggtatttcagtggatgagttgtattttggatttcc

SEQ ID NO: 201879 - DNA, 1000 bp, Homo Sapiens
caggtaatactgggccccaaacatgctcgtaagtcttgtagttttccaaagaaaccaaaaatagccctcaaatgcagtcagaaacacctagaattcttagtgaaacctcaatacccagacaggttctcattttcagaaaggtttgtttttagccaaagcattgccttttagatcagtgaaatatattgcctctatggagagcatggcaaaccaggagtctctaaggggtcatggtgggaaggggaagcttctggtttcttctgcacagctctgagattgtggattttgtgggatggggtgaggtagaggggagagtccatatttgggagaaaaaggccccagcccttttcgtctctgggtaggaataagagaataggactatcctcagctccctgtgactccagatccctaagcaggccttcctggggcctggcctgaaagttaatcccaggggcagacttagcatttagctaactgagatttagcattagccccttttttactcccacttcaaaccttgggacctccccaccgaccccgggctggctacccagttctaattttgttcatacttactgaacagagtggacccataccatccttggttttgcttttggcacttctctgcagctgggaactaagaattccttactcctgggtggggagtgggaaagaacctaagctttggaatctgtcagtgacctaggtggctgggtgacctcagaccaattgcctaacctttctaacctttcatgtgttggacaggaaggtttggaaagttcgaatagttatactgacttacatttgattcatatcaaaatggagcagaggcttctgggccagcactagttagtttgctgctggcctggcaggctgcactgtggacacagtgagggctagctcctggctctgcctgggtgggtctgaaaaggcaacttctcttcacaaactcaggaacagggctactctatgggttagccctgctccataaggagcagtc

SEQ ID NO: 201880 - DNA, 1000 bp, Homo Sapiens
gtctctaaacgctaggctcctgtctactgcggctgcaccgtcgcccccctgtaagagtccccagcccactgagcccctgggtccaaagctccaggctgcaccccatttccaggactttggaaggttcatgggtcactccccactggagaggccccagctgctgccatcttacacagcatcagcaatgtttatgggccggcagaggcatggggaagcaaacggtctgcaggccgtgtttggagaaaaggaagagctgagttccaaaggaatctccaccacaggcatgtttatagagtttgtaaataattagaggcccaggctctgttccccgaggagccaggtcagcctgccctggggagccgagtctgtctttcccttcccggctccaggccctggtgggagaaggtgttcatggttccccatctccccctggggcttcctgcctgagcagctgtgccagctgtgccctctgcagtggtggctgctgcgttcataaccagcacccgattaggcgctaattcagttccacaaatgctccctgagcctgacccagccaggctcccttggggattatagccttgacctcagaaccctgcggacctgggtttgaattttgttgtaccacttgtcaggtgtgtgagcttggaaaaatccattcacctccctgaatctcagtttccttgtctgcaaattggggggatcagaattccagcctgaggccgggcgcagtggctcacgtctgtaatcccagcactttgggaggccgaggcggctagatcacttgaggccaggagttcaagaccaccctggccaacatggcaaaaccccgtctctactaaaaatacaaaaaattagctgggcgtggtggcaggcatctgtaatcccaggtacttgggaggctgatgggggagaattgcttgaacccgggaggtggaggttgcagtgagccaagatcacgccactacactccagcctgggcaagagagtgagactctgtctc

SEQ ID NO: 201881 - DNA, 1000 bp, Homo Sapiens
ttcacagagtctcatccaagaaaaacaaatgtttaccttgctacctttttcctcttccaaataaaaatagctttattgtgtcacatgggggaaacgtagatatgcttttagatttttagattaactatctgtcaaatagaatcatgtcagtgaaagaactggccctgccgatgccagggtctggaagtatttaagaggtggcagcccagcggcatccttctagtatttctctttcattcctgaaattagaacgagggctgtgctgcagaactcgctgggccacatctagccctttggtggtgaattgttcctcttgggccccgattagccagtcaacaggtcacacagtctgtctgaaatgtgttccaagttctttctataaagaatccttccagagggaagccactgtgagtgaaaattttgaggctcctctgcccagaagttggcatgtcctgtggaattgcacaaattctacagagaagggaaatctaaatcgtcttcagatggagcttgtgttgcgagctctggagagggggttgtctttctacactgcatctcccatccttcctaacgagtcacggagctgtcgactccgccttcttggctttagttaacaggttcttcttgtgtagtcacatcaacgtcgggtcacatgggaatgtggtaaagcctcattactgtagagttcagacatgatcacttaaaaagagctttattgggccgggcgcggtggcttactcctataatcccagcactttggggggccgaggcaggcagatcacctgaggtcaggagttcgagaccagcctggctaacatggcaaaaccctatctcttctaaaaatacaaaaataagcagggcgtggtggcgggcacctgtaatcccacctactcaggaggctgaggcacaagaattgcgtaaacctgggaggtggaggttgcagtgagctgaaattgcaccgctgcactccagcctgggcaacaaagtgagactccttctc

SEQ ID NO: 201882 - DNA, 1000 bp, Homo Sapiens
gaataaccctcagtactggtgtgtagaagatgaattgtaggcaggttttgctgatcagcagcctaaggattgatgggctctcttttggcctctgatcctgagcactatggaggcagcatcagagaatggggacctgagctacataggttctcaatgttaaaacaactctgttcggagtgacatataagagcaagaaatctacagctggtgtaaaatacctttgccttttctatcccgaaagtaacaaatggcatctgtacatgtaggggtaaaaactcagatgtctactcctccaggccatggacaagaaaaagtacagcagtcagaacagtggaacaagtgatttgcattctcttcttcacgctttcctagatctgccattggtagcgcagccctcgccctccagacataatgcatcgagcccagttgcagggaacatcactgtgtgtgtgtgatgtcatggtgttatatgtgttgagtttaatgttgagctgaagcaagttggtgaccttcctctttgctctttgtaaagaagacaccaatgtttgtcagagaaaaatccccagcagtcgtgttgaagaggcagtgtcatccacctactgtcccctttggaacagttcaactgcagaaaggtcggattgaggttttgtgctttgtcgtttttcttttttaaacaaaacatgacaaccttggcttttccgatatggaacacttttgttgttgtggagttccctcttgctgtatcttctatgcaattccttttctaaaaaaaccccccggcagaggcagagtgccctccggatatctgtccggcgccttgctgagtggtggaggtgagggataccagctccgggtgtgcctcttttctctccctggctgccaatcctgattttccctgcagtccccttggtttgtaaattgcctgcatttattctgtcagccaacatgtacaaaatgtaagaaagaatttttaaacaggtaataaattatatttataagc

SEQ ID NO: 201883 - DNA, 1000 bp, Homo Sapiens
agacctgccccaagccatgtggaaggccagccatgccctcatcaagtctttgttccccgaagggaatcccgccaagatcaacctgaaaaggcctcctacagcaggctcacagttcaaggcatccgtggccactctgatgaaaaacctacagaccaagaacccaaactatattaggtatttttggcacatgaaactttcacagttcaaatgtgagagcaccccgaaggaatatcatttttccctttgcttcaatctgagtgtagcccaagcagagggtaactaaaatacttacagattaaataataccttatctgggattggcttaaaaaatgctccactatcctttcccctaaaataagaaagtaaaaaagtaaagtgtggtggagaagatagtagatatttaatgaagctcagtggttgagacctaggggttttcaactttctgtatgtttattattatttttttaacggcaagttaaaaaacaaaatgcaagtgttttttctggtcagtgttttgcagaaaactcttgttggcttcatttgggattcttgttctattagcttagagcacagcattgaagcaagtgctttagttaactgctctggcacttcttaggagacatgcacttttttcttccctgtgagaggtgtaggcctggagaaagtaatgattcctaaagcaatctgaattttttccaaggcagtagaaagaccttcttaaaaagggctgggcgtggtggctcacacctataatcccaacacttagggaggcggaggcaggtggatcacctcaggtcaggaattcgagactagcctggccaacatggcaaaaccctgtctctactaaaaatataaaaattagctgggcgtggtggcagggacctataatcccaactacttgggaggctgaggcaggagaatcgcttggaggcagaggttgcagtgagccgaggtcacgccactgcactccagcccgggtgacaatacaagactccatctc

SEQ ID NO: 201884 - DNA, 1000 bp, Homo Sapiens
aagtctgctctgcctgttcattgttgagttactttaggtcaagatccgtgtctcagtgatggaaaaatgaatgacaaaatagaaattggataaatgggaaggaaggagtgatgatctaacatggctgggggtcagtggggaatcactttcattggccagaatagagagctaaataaagtggcttaaaggcattagaggttcatttgcatgtggaaaaagcctggaggtggatggttgagtgctggtgtgggtgccacaatgtcatcaggagcccgggctctgctgcgcagcttggccacctttaatgcgaagtttccctcttcagggtaatctcgtggctcaaaatggttgctggagctgcagccatcttatccatttcaggcaagaaggactagagaggtcagctggtacaaaaaaaaaaaattatgttcattccctgaaggcagtctccttcaaacaggtttctcagggtcctttacccaggagcttcatctgcatctcaggccaggatgtagtcacatggtcacctctgagtttggaagagatgtaaatatacagcaataaacataggttatctccacatttaatttaaaatgacattgctttttaaaacagtttttaggtctgaatacacatttctcaaaaaaagatataaaatggccaataagcatatgaaaagatgcttagggaattagtcattagggaaatacaaatcagaaccacaatgagacataatttcacatctaccaggatagcactagagtcaaaaaggcataataacaagtgctggcaaagagagaaattagaattctcaaaacgccactggtgggactgtgaaatgttacagcagtctggcaagccctcacaaagttaaacacttgagttaccctatgacccagcaatcccacttctaggtatacatatgtgagagaatgaaaacatacatccacacaaaagcttatgtatgcatattcatagcactattcataatagccaaaag

SEQ ID NO: 201885 - DNA, 1000 bp, Homo Sapiens
cctcccaaagtgttgggattacaggtgtgagccactgcacccagccaagtaatgctttttctgtgtaccagtgacaattttgacagctaaaaactcacagttgatcttgtagagaacataatagattatgcaagggccgcaggatcgctcacaagagctgtcagattgtttctaatataaaaataccaaaggttgcaaaatccagcaaattgtattttactgtgatatatgtatatttttaactctacccatctgtgccagtgagtacacaggcactaataacctgaaatgctgggagtcctgtaaagccccatcttggaacagtcagcacctttcatgctcttgtcagtgtttccttttgaagggcatattggtgtttatctacagaaacatatattatttttattgtgtacataaaggagtatatggctgttgtcccgtggggtatgtttaattcctctaaatgtttaaagtacttttctgcctgtactctccagttctgtcgttgagtatacactcaggcttgagatacaaccaaaatttgcttgcctttctctagccactggctgccagtgagttcgtgtgatgggcacacagaaatgcacacagatgtacatacacgtatgtatgcacacacagtatatgattccataaaattcaaatgcagattaattctcctaatgagttttcagtgttgaatcgtaaatagtctgaagcaggccagtgttccttttggctgccagtcttggattagtaaaaggaggtaattctttcagattccctggttctttgccactcagagtattgtacttttgatatagaatagagaaggttacctttggtttaaaaactatttttatatactagctctttcatgtataaaacagagacaatcatcctaacaaaagagttcctgttatttttctgcacaaatgtcttgtgttgaaacactgttacagttccatataaatgtgtgctatataaaataaactttggagat

SEQ ID NO: 201886 - DNA, 1000 bp, Homo Sapiens
ttggagtaccctccttactgattttgttacacatgtccctcttttagtcagtactaccatgataataccatggataataattttttcatttttatttttagtcttgctctgtcgccgaggctagagtgcagtggcgcgatctcagctcactgcaacctccacctcccgggttcaagtgattctcctgcctcagcctactgagtagctgggattacaggcacctgccacagctcctggctaatttttgtatttttagtagagatggagtttcaccgtcttgaactcctgacctcatgatccaccctcctcggcctcccaaagtgctgggattacaggcatgggccactgcgcccggccaataatttttgtgtgtgtgtgtgctaatcatactacattttctttagaataaaagatcacatacttgtttgccattcgcagtctggccccattgtgccattctagacttacctcctgccactccccaccagctttgttttgtcttagccacacaaaataatctagcgtctctaaccagtcaaacattttaccttgtgccttggctcactctgtgccttttctccagaatatctttctgtgtacttttctcccatccttttacctttaaacctgctgctatggtttgcatgttgtttggcccctccaaaactcatgttgtagttcaattgccaatgtaatagtgttgggagatggtacttttaagaggtaattaggttgctaagatggattaacatctttctcttgacactgagactgggttctcctgggaatggttagttcccaagagagtgagttgttataaaacaatgctgcctcttctattttgcgctttttgtttgcacaaactcggtccccttctgtttctctacgatgttttgatgcagcatgaggcagtcatgagaacccaccagatacagctgcctgatcctgaatttcccagccaacagaaccaagtgctaaataaaactctttttaataagtt

SEQ ID NO: 201887 - DNA, 1000 bp, Homo Sapiens
ttaccttcagactttctctcctgcttcaaaaaacaaaacagaagccataagaatggaactccctataacttgcggcccccaagtctgcacgctgatttccctcccctgtgttacagatgacgaggagtcccttcttgctcaggccacttctccctcctgtgctctgggtcccagtttctgctacttgctctagaatctgacatcatcagtcaccttttctctcctggcaggttttctgctgccctccttgcttgatcctctattcacctttgcctgtgccagcatcccttctgtctccgctgaccccacgttctctccctcctgcttctggccagcacctcatcaccctccccttcactgctgacccctgcagagttgcctgtacttgccttctgcacttgctcacccccgtaagtgttagcccccggcatctgccagattctgcaggtggttttttagttttcctcttgaagtggttgaccactcctacttaaaacactttgtcttcccttgccttgagaccacactctgctggttttcctcttaactctctggcccttctctttctcctggctcttcccttagcttcatgtatccaaactcggcatctccacttgactgatggcccaaataattcctcaaactcaccttgtcggggactgcattcatcacctctcccacagtgttcccaagcagcctctcactcccctacctccccacttgctcgttttgcttttcagcatccttaagtaagccctgcctgaccctgtagattgggccagggacccttattctagggcattctttccttttctaaaggcactgatcgcagtttgtagttatatctttattagggggttgctggatgactctctgccccgctagactgtaagctccgtgaggggtagggacatggtctgctttcattcaccactgtattcctgcaggcctgccacagtgcctggcacttagcaggtgctcaataaatgtttgttgaaat

SEQ ID NO: 201888 - DNA, 1000 bp, Homo Sapiens
tttctcctaaggccttaaatatgctgtactattttggcttccacagtttctatgttttatcccaagttgcttaatccatttggagttgatttttgttgaccgtatctgtagagtgtaatgtcatttttcccactatggacataaaaatttttgcaaggcctcttttttttaatgaagaaaagaggtttattttgttcacaattctgaaggcctggagggtcccagaagcttggcaccagcacccactaggctccagatcggggcctcatgctgacttccgttttcacacaacgagtgggaaacaggtgtcctaacactgtgagagaaaaaatcccaaagtttagtttttcccattcgcttgccctggcctccaggcattcctgcagcagcaaacacatcatcagccttaggagctggcctgtgaggttgaccactctgtaggtggacaagcctcgcccgagaagagacatgagcagttctgcgtaggctttaagacagaatcaacatggaaagcacgacccacatggtttcaatagaacttgcctcctgaacctgactaggttactcgcctgatgaaccagtatctccatcacccgtgggactgacagacccagagtgtcataacctaaaattcagaagtgtagactataatcttaaattattcagcatatgtgcaacagccttggggagcagtgttatgataccaaatggctaacattcatgacctcagtatcctggaagaaaaggagaaagtgtgatgtagtaaaaccacttgaaaaaataatgatgaaacatttctcatatttggtgtaagataaaaacttaagtttgaagaggttccatgagccccagacaggataaacctaaagaaaaccaagcccaggccgggggcggtggctcacacctgtaatcccagcactttgggaggccgaggtgggcggatcacaaggtcaggagatcatgaccatcctggccaacacagtgaaacctcgtctctagt

SEQ ID NO: 201889 - DNA, 1000 bp, Homo Sapiens
ggggcagctttgcttcctgcccctgtgctcggggcctgggtggttactggcgtgtagatggaattgcttttttaatatgggaagatacatttatttttttccatgtgggtgggtgtctctttttggattttcttctgtttttacgtttctcttcttagaagggtgggagagaatcaagctcctgtggccacctgtgtcccagcagcagtgagtggagctgctcagggtgccctctcctgcggaccagtctctgaatgttcaaagatgagggcctggcttccgtgctctggctttgtaacttatctggaagggaaagcacatgccttcacgggcagggtatgttccttttcttctcggggtgttgacttgcattcctgtgtgaactgttccctctgccatgtttaccgtgtgatgttctgtagttgaaaatgttagttgtctgctggcacagaatttatctcgttcctttctctcccttctctcctccaaatcagtctcttcccttctccactagataactgtaaaaccttttcctggggtacatacattcgttaattcttgggcagtggtgagcacgagatgactttctgcagcgtttatcactgttgggtggagtcacgtcccttccctccaccgaagtcatcaaccagatagggaagggaaagatgaggcccagaaaacgagttcaaactctaggtcttgtacacgtatgtaagtaaatgtcaataacccaagcctttgtcatagcagtcacttggttgacttaggatctgggtctgttgaattttgtgcttgggaatggagctggagggagtggggcctgtgtacagcagctacctctcccaggtcctctcacttgcctgccccgcgtcctggttgcatggccgcacctgtgtgtgtgcagaggtctgtgtcccatcctctgcacctcctttccgggggcctggggagccccacgtgttgccaagatcttggtgcaataaaatactccggttctgtg

SEQ ID NO: 201890 - DNA, 1000 bp, Homo Sapiens
actagatgtttttcttactcatgtgatcagttgctaattcagacgtggctgtcatgcctgtgttattaagtaacgccatgtttcccaatcaaaaccagtctctattaagcaactccaaatattccaaaagcattctttaaggaagaaacaaccggattgcaaaatagttttttctgaaatttcaagaagtgaaaagtttgatcagaatttattatgtcaaatggagagtttgtgtttattattaaaatatgccttatattttaatatggtctagcttgtgtctatctggctatttctctaagtgtttagttaactgttataagaagataacaacattacaaatgtccttgggggtgaaaaaacttgccagaaaatactaaaaagcttaatttacttgcgtttttttttgtagtacttattgtattttagttacaactttcctatgtctattgaaatataaatcctgatagctttaacttcatagtagtctctactatgtggagaatcttagaaatgttagcagtcatcattgaagtatagcttaagactgtgtttggttaattgaattttctggttatctgagtttgttttacatgggttatcattatcgtttttcaaaatataagagaatatgattcagaccattagaagattatgaagataataattattaacatgtaataattattataatttatcatgtgcaggcattgttgctcactttacaggcaatctcatgtacatacaactttatgacatagttactgttattatccccaattatagatgaagaaactaggttttaaataggttacatgacttgaccaatgtcacataacttgtacaggtgatatctgaaccaaagagtctgaggccagaacctgcacttctaaccaccttactatatagcctcaaaaattcagacatcatctgatcagcatcatcagttaattagtatatgcaatgttagccttaaaataaaaatgatgatttaagattc

SEQ ID NO: 201891 - DNA, 1000 bp, Homo Sapiens
ccctaggataggaatcaagccccaccccctaggcccgggtttcaggagaagccacggaaaactcggaagtgtggagcaggattgacaggttctagcaacagccctcccacccccccgcccaggccaggcttccttctggagcttggacgtgaccccacactggggacatttgcatttaagaaaaacttggctccaggctttccacagtgggccctggcatcttcctatactcactgggccctttctgtttcttccttctggacgggggttcacaagtgtgagcaggcagttccacactccgtgtccaattgagccagtacctttgctggaagctactgggctggaacaggagggagagcccagatgtcttccagggatcaggaatttgggataagcggctggtggcatggccaaggcttcctcataccttatctcagtctacccattttcagggaagaaaatgaaatatgccaacaagggaacaaaaattaagtgcatggaaaaaagttatactacagcaatattctgtaaagaaatcaaaaggggccgggcgcgatggctcaccctataatcccagcactttgggaggccaaggtagggcagatcacatgaggtcaggagttcaaggaccatcctggctaacacagtgaaaccctgtctctactaaaaatacaaaaaattagccgggcgtggtggtgggcacctgtagtcctagctactcgggaggctgaggcaggagaatagcgtgaacctgggaggcggagcttgcagtgagccgagattgcactactgcactccagcctgggtgacagagcgagactccggctcaaaaaaaaaaaaaaattaaaaactggccaggcacattggcacacggctcacacctgtaatcccagcacttcgagaggccaaggcaggaagatcccttgagcccaggaaacctgtctgggcaatatagtaagacctatatagtaagaccttgtctctccaaaaaaaaaaaaag

SEQ ID NO: 201892 - DNA, 1000 bp, Homo Sapiens
ggtggggcggaccccacggtctgtaatcacgcgtttgctccagaaacacccacgagggcattttctctctgcacacgtgattgttgtagattttttaactgaaaatgtttggtgttcttttcgtaccagtgtatgtgggcttttcctaattcgaatggctgcacagttccccatcgtatgaggattccatagtccatgtaaccattccttttttgaatgtggaatttaggttatttatttatttatttatttatttttggtagagatgaggtcttgccgtgttgcccggactggtcttgatctccgtggtctcaagcaatcctccccaaccttggtttccttaagtgctgggattacaggtgtgacctgtaaatttttttttttttttcttttagacggagtctcgctccgttgcccaggctggagtgtagtggcgtgatctctgctcactgcaacctccacctccctggttcaagcaattctcgtgcttcagcctcccggctagccgggattacaagcacacgccaccacgcccagctaatttttgtatttttagtagagacggagttctgccatgttgcccaggctggtcttgaattcctgacctcaggtgatcgccctgccttggcctcccaaagtgctgggattacaggtgtgagccactgcgcccagctgaaacttgactgcagggaacattcttgtacctgtgttttgttcacaagtgattattcaaaagaatcaactcctagacatggaattgctgggtcgaaggctattgaatgtaaaatttccatagatactgccaagttgtccttggaggctgtgctgagttcttccttccccactgcatagcctgtacaccatcactcagagcgtttcccagggctgcagaggccgtggcctgcctgtttccctgtgcctcttgtttggcctgcacatttaaatttttaaaaatatttgccaacatttgaaaagtgagagcttgactatttaaaaactc

SEQ ID NO: 201893 - DNA, 1000 bp, Homo Sapiens
gccttgggggcctggatgggatccagcgggtctgagtccagcctcgggagcccctgcggtggagctctgagtggggcaggggcctgggagatgccaggaggatgagagcggcgcccccctggtccaggggacagtaagaggcagccggtctcagagaagctaccccaaaactgttacccgtggtgtgcagagcgtcctgcaaccccagccctcaccaggatttcttgcgtttttcaggaaatcggttgtgattggcatgttccttaagcgtctgcaggaagccgaggcctttttggtatttcaggaggggttgctaacccccctccttgtaggatcggggtatcccagctgctaattcccctcctaacagccctgcagcgcctggattggaggtgtgacaggtggcatttttggcccgaagtccctaggcaggacgggtggctgtagcctgcgcgtttgtgtaaattaacctccctttttagttctgtgaagggagaacgtgattagtttaaaatcacctgcgtgaaagaggctcttgattagtttaaaatcacccacgtgaaaggggctcttgattagcttaaaatcacctgggtgtttcgttttatctcagttggcctctgaatgtttatcctacagcttcctgcaagctccagtctaccttctaagggaataacggggctcgtctttctacgttactttatgtgggagtagttgtaaaacagaatgagggagaccgcggggattgtgcggaaatgtagccaccgtttacatgtcgggaggctgaggtgggaggatcgcttgagcccaggagtttgacaccagcctgggcaacatggtaagaccccttctctaccctcccccccaaaaaaaaaattttagtgtggcatggtggtgggtgcctgtggtcccagctactcgggacgctgaggtgggaggattgcttgagcccaggagtttgacaccagcatgggcaatatggtaagaccccatcatctac

SEQ ID NO: 201894 - DNA, 1000 bp, Homo Sapiens
atctgctgtattttgttttcactgcattgacacattatgcatttatgtctctctcccaccgccttgcacacacatactagaatgccagctccctgggtgcagagacagagcatttgttcacagaaacaaccccagagcctggagagggcctggcacaaagttgccgaatcatctgtatcctcatgggtttgctcccaggagctcagagatcgcctctttggaaaagttgcggcagggaggccagaatgagccaagcgtaacccagtcacacccgtagctcgtccttagtagaagctaagaatccagggcaggtctgagagcacattcacagggtgctctgaggcttctaaacagctgtccacataggcactaacttggtatatcctcctgacaaccctatgactgaagcagcatcttcatgagagatgctttcgatgggagaggttgagtaacttgtctgaggtctcttggccgtaaagggacaatattgcaccagcagccacatgcctgaccatttatgtagcttctgactagcactaaatttctttaaggtctgatttatctctaacatgcttgtaaattttgcataatttttactccataattctggtacatgtttgttttaatataaaaataacagttgatcctaccagcttactcactccacttttttgcttcttgggctaaaagtgacacaccaataagattgcatcctggctgggcgtggtggctcacacctgtaaccccagcactttgggaggccgaggcgggtggatcacaaggtccggagttcaagaccagcctggccaacatggagaaactctgtctctactaaaaatacaaaaattatttgggcatggtggtgcatgcctgtatcccagctacttgggaggctgaggaaggagaattgcttgaactggggcccaggaggcagaggtagaagtgagccaagattgcgccactgcactccagcctgggcaacagagcgagactctatctc

SEQ ID NO: 201895 - DNA, 1000 bp, Homo Sapiens
gttgcagtgagccgagattgcaccactgcactccagcctgggcgacagagcaagatttcgtctcaaaaaaaaaaaaaaaaaaaaaaaggcttaagtccaactaactgtttccctgctgttcattttatccaacggctggggatataggctactgcacatgatgggttgatggatgtgaaatgataactcatgactttaattctaatttttctatattctggtgaggttgagcatatttttacaagttcataatccattttcctctgatgggagttgcctgtttgaatcctttgcccacttgctttttggggttatttgcaattttttgcattgatcttcaaacattcttaattaatcccaggtacatattattttatatataagatatattttagagatatataggctgatagtatcttttctcagtctaaggcttatcttttaattttgtttatggtgttttgtgtgtgttgttttgcagaagttttattgtatctgaattgtggcttttgtgtcttaagaaattctttacctactgtcataaaaatttttgtctaaaaattttatgattttgcctttctattttgttaattcactttgaaattacttttgtttatggcataaagtccattattttccatatggataatcagttgtcttagcagtttattgaatggtccaacgtttccctgctgattataatgccctctctgttatttatcctaaattcttgacatccggtaaggaagtctcctctgcccacccttctctgtatttcaaaatggttttgactgttcttgaccccttgctctttctgtgaactttaggattaaatgattatgtagaattaaacaatcgggttaaggttttttattagaattacattgaatctatagattaatttggggaaagaatgttatctttctatccatgataattctgtatctctccattaattcaagtctttaatggtttttaaaaataaattattgtctctttg

SEQ ID NO: 201896 - DNA, 1000 bp, Homo Sapiens
aacaagcttctgttttttgctcacaatgctatatttctaaatttttcctgaattactgagaagcagtcattagctttgttaagtttggtttggggacattgttggtatcaaaaatcgaagtcttattcatttgatgtaggccatgaatcatcaataactggttgctggaaagcttgactaccatccactggggtgctattttgagaaggatttttgggtatctttatagtctgcaattagttgatgattgctttctagtttatcaactgcatttatatttgcttttctgttcatggaaaatcctttatttgctggggttttttgtttgtttgtttgtttttcccacttacagcaagtaaaagtggtctgaggttatccttgtttttcttcgcggtttgccatgtgtgaaagtagatttcctgctattgatatattctcattatagacagaatagtggagaacagtgttgccatggacaaaatccagttttggtccactctggggagcatttggacctgtggtgcttctaacaattaaaagtctagatggtccttgactgtcccccagccatactgcatactactttgtgcattctactttgtgtcattaatgaaagattggttctgtccctgtaacttaggcatttattattcttaactcttcattcctgttctgtagccacccagcagtccattttccctatgttcaggccaaaccacagggcattggggaaggtttttgggattttcttattgagattttgttgaatctgtagtttaccccagctttcctaaggtacagtgaggggttggagggatctgtgtttggcccggggagcaattgtctctaccttaaggttcagttttgagggcataaaatactactttgcaatgtcatgagaacaccattagatctgaaatgtggaaatggtttctcacaatttaaaggaaaaacccactttgcacccatgatcccatcattttggttgagattttagaat

SEQ ID NO: 201897 - DNA, 1000 bp, Homo Sapiens
cagagggtaggggcctgggctcagcgtggggagtctgaggcagcaggtgcagagtgggaggagctgggcactgcacttgtgctttggctgagctcccgctgactctgaggggagcttggtgacattcttcatggtccacaggaccttgctcagaaagaactatgttctcatttaggagagctttgaggcagttgggaagcattgttggtaaggatgttgaggcttgagaatgtaatgcttttttctttactatggcccacactcagcaaataattgcctctgggataaatccccgacccatgcccaccccgatcagggaaacatagtggggagttcagaaacggactcttcagtaggcggtgcctgagtctcctcagatgacctggtgcattgggctaagctgctaaatgcatagcctgaagtggatttgagttggttcctctgcatggtttgaaggctccctcgccacctttcagcacttctgatgagtccctatttttattgtaaaagtatgacaacaatattaagatgaaaaaatgacctcttttatgtttttattttctacatgtcattccagtctttggttctgtgaatacacatctttacatggttataatcacggcccctccagttaattggcttgcccacagttttactgtgaagtagagctgagatttgaagtcggctgggccctctacatacatgtttccttccctttgtgggattgagtagaaggtgcaatatttaggtatgaccacagggtggtgccaaaaatcaacacatagctgcccccacctccattggactgaaaaccaaaccaaaaacctaagcctgtaatctgggaatttggatgaggatatagggagatggctcaggagtctagaagacctggcaagtatggtgtggatggggacagaatttacttcatggtctggtgtaacctgaatctgtagacttgatgcctgttgatataattggtttttaataaatttttgatcct

SEQ ID NO: 201898 - DNA, 1000 bp, Homo Sapiens
atcacgaggtcaagagattgagaccatcctggccaacatggtgaaaccccgtttctactaaaaatacaaaaattagctgggcctggtagcacgtgcctgtagtcccagctacttgggaggctgaggcaggagaatcacttgaacctgggaggcggaggttgcagtaagctgagaccacgccactgcactccaacctggcaacagagtgagactccatttcaaaaaagaaaaaaaaaaaaagaaataagaatcactaactgctcttatagaaattatgatattcaagtaaaataatgaaaataaagcactttagttttcaaattattagtattttttctctgtagatagtcttcatctaattttaaaattgcaatgataatataatagtttgagtatttgtatacatgatgaatttgagtatatatgatgaatattcatgtactttttatagaatctatttattagagatcccagtaagacctatatattatagattaaccattagtgatttatgtataatgagtagaaaaagacagcaggaattaatatttttgttgttaaagattatttttaaatagtagtaatgaagtaattttaaatcaaataaactttgaaatattgtttataattttattttaataagtccaatttgaaattttaaaatcttccaggccatagcctatctagagacataactagagtaatactaagagccagaactcagctgattgtggtggcttacgcatgtaatcccaacactttgggaagccaaggcgggtggatcatttgaggtcaagagttcgagactagcctggccaatatggtaaaaccctgtctctactaaaaatataaaaattagctgggtgtggtggcacacatctgtagtcccagctactcaggaggctgaggcagaatcacttgaacccaggagatagaggttgcagtgagccaagatcatgccactgcactccagcctgggtgacagagggagactccatct

SEQ ID NO: 201899 - DNA, 1000 bp, Homo Sapiens
gcgtttttagagaatgcctcataacccactgattctcattcacagagaatgggagaacggaatgaagaaagattccagcagcttatagaaggatagcaatattttgggacagggaaaatcctgtcatacctcatctcttcctcaggaggagttctgagctggtcctgcttttcatagttgtttcttttcttccacttaagaactcatagatttttcttactgtcctaaggaagtccttacctctgaggtatctcctcaatgaatactgttttcaaggctgaaatagttcattatgttaataaccttctttatgttctcagggaaatgcttaggtggtgtcacaaaatgtgccttttcttttcttttttttttttttttttgaggcagagtctcgctctgttgcccaggctggagtgcagtggtgcgatcttggctcactgcaagctccgcctcccgggttcacgccattctcctgcctcagcctcccaaggagctgggactacaggctcccgccaccacgcctggctaatttttttgtatttttagtaaagacgggtttcatcgtgttagccaggatggtctcgatctcctgacctcatgatccgcccgcctctgcctcccaaagtgctgggactacaggcctgagccactgtgcccagccaaaatgtgcctttgcaaagtttgcgaaatcagattttgtatcccaatagaaccaaaatatttatgaggatgctagcattttccaagcatagtaattagttcacaactgagaaatattatgtctgtagtagataaatattagttgtgcattttaatttaattctcctttttccattttgtctcatgaagtaccttattgcaaaaatcccactgagtaatagctcataaattataatctttcaaatagccatgctaccagcgtacaacagtgatacatgtaaccccaaatgtgatgtgagaggacgattactttgtaaataaaacttgttattgacatttt

SEQ ID NO: 201900 - DNA, 1000 bp, Homo Sapiens
tttaatacctggtttttgtttgctgtattcataaataacaagtgccttctattaatgtaacttcaaaaaagccctctcaccctgtagtcaagctggaactgaaagcttgtagctatcaaatgagtgtctatcttgataagcatattgcttagcttgataggttttgtttgtctaaatttttcattgtttctgcataatatgtacttcataagcatatcaagttttatgtgccatgcatatttcatggtatctgaaaaagaattctgacaaagtgtgtgtatgtatgcatttcacaatgcatacaatttttatgtgcatcaatacatgtttttccctggcctaaacatgttgtttcacaagtgtaatggatggcaaggttttcaaatgataaagaacatttcagtttaaacaatgaacagaatcaatcatggatcttaatgttaatgcagcaattttttcacgggcagtaaacaagaatgattgcatttaatagctctatacagtcacctcttgattatctatgttaatggaatagaaatgataactataatattacagtaatttgtcttttggttttgtgtaagcattttgctcttaacttggatgtagctgtgggggattctctgttaaaaaagtgagattgttcgatggagactaggaagagaaagtgtactccctatctgaagtcactcatctgtttcttcccattccttcttggcgaatgttaagaactgaacatttggcgtggacactagctacatagtagattaattatagagagttgttggacatggaaaatttggtgttttggtcctttgtggacatttactttgtattattgtcctcttaacaccaaattgaagtataatcaaactgctatatgaagaagggcctagaaaatgtggaggttttacactacttgccctgctttctatatctagtttaagctgttaggactcaatggctctgattttgaccataataaaagcattttgatttt

SEQ ID NO: 201901 - DNA, 1000 bp, Homo Sapiens
gccacatttagtgagacccctaaggtcctccaactagggtgggtccacagtggcccctggtgcatggaccacacactctcttccctcctctggctcaggactacggtctgaaattagggagatatgaatgtctttcttgaaaacttctcttcccagtcttcccactttgcttgggggtccttggtcaaggccagctttggggactagggcttgttgcgactaccagctgtctcattttgctgtactgcaaactcaggcttggttccaagcttatgggggccctgtccttcccctagtagggtttgttttggggtcacatctggtcatacccttcagagagctcttccccagcctctacatcagggagagaggtaggtagggaggagcattcaaggattagaagaaggactaaagtacaacagccttggaggaactgccaggaactaagggcgagcactggagaaggcaacctgggacccccctgcgcttctgagcaggaagaccaagaccttcaggggccctaagcactgaaaacatcattcctcatccccaagccctggcatccccctgttcttctaaaataattcttttctaggtatttctgattgcaaaattctggatgggttcatccaagctgacctttgctgtttttccccttcccaacaaggcctcactttttggagccaccttagctggtgcctaggcagaggggcagtcagcagtggttatcaggatcctggctctatgggttgccttcctcctggtctgtaaagcccctgcaggcagggacttcttagatagctgcttccttagggcatggcatgtagtgggtggttaatgaatgtaagagagggaatgagtgatcaagggagggaggagggagtggagtggagatttctcatcctttcctgttaatttatgacatcctcctgcctatgagtccttgactctggagttttacaaagcagtcacatttcaaataaaagtctgggaaagcaac

SEQ ID NO: 201902 - DNA, 1000 bp, Homo Sapiens
tctgcaggacaaaccaccccattgcttgtaaattttttttaaattaaaagaaatacaataaggcttttaacaagaactagcagtcccctaagtctcgctgcttagaagtaaccactttcaactctcttatgtttgcatttctacataacgtgcttacactttattttttaatttagaaacatctactggcttgctgtcacagtagaggaggatttcactcttaccataccgtgctttggttttccagtatagctagatcacatcatttagtacatttctattaggtgttgacattacctggagcacttaaggattgttgactcccaagcccagcagtgtgttatggttacatgtcctttctcctccaaatgtccccattaatttgctattctctctctttactttttttttttttggtgtggcacattctttaataacttcctgaggaagagaacatgggaagtaaatatggttgtaaatattttgagatttttgcatgacttaagatgtctgtattctgcccttaacagaaatgtggctgagcatagaatgacaggtggaaaataataccctcccctagcccctcccaagcgtgctggttgagatttctgatgccattctgattcccgtacctttatatgtgacttaggtttttttatccacccttcctggaaacatttaagatctctttattcttggtgttctgaactgtcatgatggtgttgtatcccgggtgttaaaccttgtgctgggccttcatgggaaatttcttaaattttcttgtgattatttacattctttctttctggaccacctattatttcaatgttggaccctcccctacacccaggctgatgctctaatattttttatcttttctatttttcgtctatgtttctgatctgctttcaggaagaattattcatttttatcttcccaatctgaatgttttattgaatttttattttccaagttaataaaacctttggttattatcctg

SEQ ID NO: 201903 - DNA, 1000 bp, Homo Sapiens
tagccttagaagtgtagttgtgttgggcctttccaacccgattgagtaactttcagctgatttggaatcccatcagcatgggccaaactgacgtcagcagggagacagacacagcattacgttgtttactctgtacaacctataagtgaattaatgacctgccatgtcactattttgatagcaacaacatcacccccattgtctaccatttatgaattatcttttttgggcttgtcaattgattggacatctgcatatcctagggcatgtgcagatccacatggtcacatgctcattctctgggtcttcctcctctgagaacctagcatgtggtgttctttgtgacttgcccatataaactgctattaaagccaaagactgggtgccctgtgctggctgtgtccctctgtgagagactcagatgctgaggtctccagtggcacttaatgctccaattgccattgtttgaagaacgacatctaccctgtagtcatacgtgcctatgttgacatctctttccacttactctttgcaattctcttctggtgtccatgctgctggtgatctttattaacagtaaaattcttcaagagctccatagccctgaaagaagaattatgccatcacttccattttactcaatttcatttttctggaagcattagaagatgagtgttcacattttccataaatttatttgcagcttgaaagaaggaaagattgagcgctgtggctcacacctgtaatcccagcactttgggaggccgaggcaggcagatcacctgaggttaggagttcaagaccagcctgcccaacatggtgaaactccatctctactaaaaatacaaaaactagctgggtgtggtggcacatgcctggaatgccagctcctcaggaggctgagccaggagaatcacttgaacccaggaggcggaggttgcagtgagccaagatcatgccactgcactccagcctgggtgacagagcaagactccatctc

SEQ ID NO: 201904 - DNA, 1000 bp, Homo Sapiens
aaagaactacccaattcggttgctgttgtcttgtcaggacaacctgcctgcagaaaggagccacccactgcagatccctcttcattgacagctggatacttctcaggacaacctgcctgcagaaaggagctacccacttcggctcttctgcctcttgatgaagctgttctgtctcctctccgccttggtcaccctcaaattatccatgtacctcattctacctggatgtggacaagaacttaggacctgccaaatggtgggactgaaagagctgcaacacaaacagggctgaaacacccccctcccccgcttaccacattatgggtgatgagaaggagagaagagctgcagcccttcagggatcccagacctaggggctccccaagccagggctgtgacaccctctttggagctctttggttcctggtgtctccaagcttcccagtgccactgtgctccccttatccagatgcaggtgcctatagctgaagccatgtgtggtacatttggtccagccacagccttgcatgaagctggcacttgtgctggtgcctggagctgtctgccttgccacagcagctagcatgcgtggctgtgcacagtggctggaccccatgctcattcgctcatacactctttgccactccgtgcctggctcccccttggcaggtgtgagatcgaggccagtagtgtgagccaagcgcagcctgccaggccaagtgggtggaacgagccctgtgggcgcgagcaatactcaggcagaaggcgctgcctgccacagaggtttctggctggcaaatcgacatcccaagggtcccgtgacaattatagcccctgcttctggatagagtaaagaaaagggaaacaaaaaaaatcgaataacccaacctccagacattgctggtgttaacttattgccaaattctttctgatgtatgtgtatatcatatgagtatttaacagttttatatcttagttctttgctaaatgcactttcagc

SEQ ID NO: 201905 - DNA, 1000 bp, Homo Sapiens
tatgggaaatctgaatatactgtgaaaatgcatatctggttagttgtctgctgcccagatcttatcaataccagtaactaaccagtatttaacataaaatgatacaaataaaggcctttttctatttcagtgagggtacatttttcttgatatatatgtactttaaggatattggatctgtttatggatctgttttaggaaacagatttgcaagggataattgtatatatagtagtatttaggtttatttcaaattcatcttagggatgcctagatgcataatttttaccaggacatattgaaaatattgcaaagagatagccagttatattatcccattcattagaaattaccagtgtaactaaacataaatattccagtttagagtgcttaaacgtagctatctttcttaaggccaggagggtaactttgtggtatctaaagggcttaaatttcagaatgcagaataaattgcctttttaaaaccaagcattttgtacaagcttttattttcagttttttaactaccaaataggtgtgatgtactttagaagtaaacaaagatgttcacccatgataatggatgttaaagctcctgcagttgttcttttcgtgtttaaagggtatattctaatagtggaagcatcaaacatgtcagtgatttcatctcattcagaaataaagagattaatattggtctttattttttggcattttaagttttatataaatggatgcagatggagattatcacccacaaatatatttaaatggatttttcttaatttgaatttcaagtaatctttttatttcaagtaattagttacgcatttagttacattgccagttttttttttttatcaatttcagtaagacaaaatatactaaaatgtttaaatagcctcattcaatcttacattttgacatttcagcaatcattctggcttacagtaattagatcccctgttacgacacatgccctttgttcttaataactagc

SEQ ID NO: 201906 - DNA, 1000 bp, Homo Sapiens
agaggatgagaatacattgcatatgaaagtgcttttaattttaaaagattgaattgtgagtttctggattttgtattacctcaaagtaattattaggcaattaatcaccattctgcactgttacagactattttaactgatttgaatgtggttaggattctggataaatgagaggtatctataacataattggtatatctgtttttatgtctgttattagcatcctattttgggggattggcgtagtctaagcaatgtgtctgctaactttttctgtttcatttcctcatggagccttggattaccttttatgcagttaagtcaacattaaaaagtttcagtaggctgggtgcggtggctcacgcctgtgatcccagcactttggggtgaattgtggggtgattcaccatgaggagggtgaatcacttgaggccaggagttcaagaccagcctttccaacatggtgaaaccccatttctactcaaaatacaaaaattagccgagtgtggtggtgggtgcctgtaatcccagctacttgggaggctgaggcaggagaatcgcttgaacctgagaggtggaggttgcagtgagttgagatagatggcgccactgcactccagcctgggtgacatagtgaaactgtgtttcaaacaaaaaaaaaaaaaaaaaaaaagaagcagcagcttcagtaagcaccggagagccattgcctcctttccacggggaccagctggttccataacagctgcttttaggggcatctacatgatgctctgctgggaggtcacaaggtacatgagctatgctagggcaggggcctgctgtgagttctcttctgtcctccttgggaaggagaagaaggttggttactttgtgtatttcagtttttttgtccttctgtcattctcctgtagcagctgtcgtcacccctttgtcaaacatactagcccaaaatatggactgttagctgataagacaataagtcaaactcttaatcatt

SEQ ID NO: 201907 - DNA, 1000 bp, Homo Sapiens
atggtttttgtttttgattttgagagagggtcttactctgtcggccaggctgcaggacagcggcataatcacggctcactgcagcctcaacctccccagactcaagctatcctcccacctcagcctcccaagtagctagaattacaggcatgagccaccacgcctggctagtttttgtattttttataaagatggggtttcgccatgttgcccaggctagtcttgaactcctgggctcaagcaatcctcccacctcggactcccaaagtgctgaggtcacaggtgtgagccatcatgcccagcatgtgacacatttttaacagcaattaatttctgtagagaacttgaatttgttccttctttccaaatcgtcatcaattcttatgacatttcccagaaacaaatagttaataagctcatgccctaacaaaggctggctgcactagcataccaaaaggtttctgtaccacaaaaagttttagctgatacaaaacttaacagcacattttttaaaagaaagaaaaagagtcacctggttatccactccctttcccagctcctaagatagaatcgtgccgaacgcaacactactccaccagtaagaagcaagttttgtttttttgtttttttttttgaggcggggttgccctcggtcgcccaggctgcagtgcagtggtgtgatctcagctcattgcagcatccgtctcccaggttcaagagattcttttgcctcacccttccaagtagctgggattacaggcgtgcaccatcacgcccagccaattttttgtattttcagtacagacaaggtttcaccatgctggccaggctgtctttacaaaatacaaaaattagctgggcgtggtggcacacccctgtaatcctagctacttgggaagctgaggcaggagaatcacttgaacccgggaggtggaggttgcagtgagctgagatcatgccactgcactacagcctggcaacaagagcaaaactccgtctc

SEQ ID NO: 201908 - DNA, 1000 bp, Homo Sapiens
ggaaagtgcttccgccagaagacaaatcttattgtacatcagagaactcacacaggctggagtacaatggtgcgatctcggctgactgcaacctctgcctcccgggttcaagcaattctcctgcctcagcctcccaagtagctgggattacaggtacgtgccaccacacccggctaattttgtatttttagtagagaaggggtttcctatgttggccaggctggtctcacaaactcctgatctcaagtgattggcctgcctcagcctcccaaagtgctgggattacaggcatgagccactgcggttggccaagtagagcaatttttttttttttttgagacggagtctcggtctatcacccaggctggaatgcagtggcgtgatctcaactcactgcaagctccacctcctgggttcatgccattctcctgcctcagcctcccagctacttggaggctgaggcaggagaatggcgtgaatcgggaggcggagcttgcagtgagccgagatcgcgccactgctctccagcgtgggtgacagagcgagactccgtatcaaaaaaaaaaaaaaaaattgtaacaagccagtcagagaacattggaataaataaataatacttcaatgcaaagacatcaatatacatccataagcaacatgcctaaagagggaaccgtgatctcaccaaatgaacaaagcaagaaaccagtaactcatcctaacaagatggcaatatgtgagctgtctgataaaaattgaaaatagcagttctaaagaaacttagtgatttccgagataagactgaaaagcaattcagaaatgtatcaaagaaatttaacaaagaaattgaaaaaaataaaaaaacggaaatcaaatcttgcaactaaaaaatgaaatttctaaacagaattcattataggctctcaatggcagaatgggtccaatagaagaaagaatccatgagctccaaaataagttatttgaaaacacaaagtcagagggg

SEQ ID NO: 201909 - DNA, 1000 bp, Homo Sapiens
ccagcgatctgctcgcctcagcctcccaaagtgctgggattacaggtttgggccactgctctggccacatattaactttcaaccagtcatggtagctgttgttaatattttaatatataactctccagatcttttctatgcacatatactcatttttaaattgatacataatattcatactgtatgtactgttctgtatgtaacttgctttctgactttatgatatctagtttttacactctcattaaaagatgacagacatggaaccagcatggaaaacacaattaaaggaagtttaagaatcaaatgcaccagctatggtagttcacacctgtaatcccagcatttggggaggccaaggcaggaggatcgcttgagcccaggagtttgagaccagcctgggcaacatggtgaaaccctaactctccaaaaaaatataaaaattagccgggtatagtggcgtgtgcctgtagtcccatctgcttgggaggctgaggcaggaggatcacttgagcccagcaggtcaagattgcagtgagccacaatcgcgccactgtcctccaacctgggcaacagagtgagaccatatctcagaaaaataaaaagaatcaaatggattcttaaatttatggaggacttccttacaacttttttttgacctcgtgatccgcctgcctcagcctcccaaagtgctgggattacaggcatgagccaccacgcccagctgcaaatttttttattactgtactggtacgtgctttttatatatttgatctatttctttgcatcagatccctagaaatgaaatttgggggacaaatgatatacagatttttaagacttgatacgttaatgccaaaatgccttgtgtggccaggcgcggtggctcacgcctgtaatcctggcactttgggaggccgaggcaggtggatcgcttgaggtcaggagtttgaaaccagtctggccaacatggtgaaatcccatctctactaaaaatctc

SEQ ID NO: 201910 - DNA, 1000 bp, Homo Sapiens
cactgttctcatcccactcattgtgatcgtggctagaatagaaacatcccagccatgttcacaggcaggcaggaacacctcactcagataaaggttattgggccagaaatgcatacgcttattgtaacttcactccgcagtaggattcagtgccccttctaatgcctcatttctccaaaacatcaaggaaggcttacatggtatcaacgtgcatgttggttcctggtggatgataccctggatatataggctatagatccaagagtacaatcctaaattgcacatgccttcaaagtctccattccatctgtctgcccaagtgggggtcctgctgagcgacatacccacctcaacattctttttttgagatggagtcacactctgtcacctacgctggagtgcaatgggcgcgatcttggctcactgcaacctccgcctcccgggttcaggtggtccacctgcttcagcctcccaagtagttgggattgcaggtgcatgccgccacacctggctatttttttttttgtattttggtagagacaggattgcaccgtgttgcccaggctggtgttgaactcctgagctcaggcagtccacctaccttggcctcccaaagtgctgggattacaggcgtgagccactgtgccgggccacctacctcaagattctaatagcccatctcatgggctcttgtcctttgctgtaagaattttatcgagggccgggcatggtggctcacgcctgtggtcccagcactttgggaggccaacgtgggcagttcaccaggtcaggagttcaagaccagcctggccaacgtggtcaaaccccatctctattaaaaatacaaaaaaattagccgggtgtggtggcaggtgcttgtggtcccggctacttgggaggctgaggcgggagaatcacttgaacctgggaggcggaggttgcagggagctgagatcgtgccactgcactccagcctggggacagagcgagactctgtctc

SEQ ID NO: 201911 - DNA, 1000 bp, Homo Sapiens
caaaagccttgaacagatactacaaaagaaaatattggaatgtccaataacacataaagagatgttcatatgaaggtaaaatgaagcaggcaaaaaaagaaaagatgttcaacatcattagttatgagagaaatgcaatataaagtcatgaagtaatactttcacatctatcagaatgactaaaatttaaaagactgataaaatgtcaataagaatgtgaaagtcagaactttcatacactgctgctaagattacaaaatggtacaaccactttggaaaactggcaatttctgatacaattaaatatatccttcaacctgtgatccagcaatcctactccagggtatatacccaagagaagtgaaatcatatgtccacaagaagagttgagcatgaatatcatagcagttctatttataatagccccaaactagaaacaatcccaatgtccttcaataggtaaatagataagtaagttacaatacagtggtattcagcaataaaaagacctactgatacaagcaaaacatgaatgaaaccaaaaatatgacatataaacaagtacttactgaatgattccatttatgtgaagttcaagaaaaggcaaaaagtgatctgtggtggtagaaatgaaaacactgtttgcctcaggtggtcaggtgagacattcattaactagaaaggagaacttcctggagtgaaagaagatacgttttgatggccaggcgcagtggctcatgcctgtaatcccaacactttgggaggctgaggagggcggatcacgaggtcaggagttcgagaccagcctggccagcatggtgaaaccccatctctactaaaaatacaaaaaattggctggacatggtggcacacacctgtagtcccagctacttgggaggctgaggcaggagaatcgcttgaacccaggaggtggaggttgcagtgagcctatatcacgccactgcactccagcctagatgacagagcaagactctgtctc

SEQ ID NO: 201912 - DNA, 1000 bp, Homo Sapiens
ggagttaagtatgtgtgtgtgagtatgagtttgtacatattttcagaaggaaagaatgatacgggaacaaaaatcattttaatatggtgactactataaaactaaaaacctaaaaaatgctgaaagcaaatgtatactttttggtttgtattgaatttattactgtacagtctatgacttagagttctgaatcttcccaagcaaattctctgtatatacttgcctggtactcatgctagacccatactttttttgtttcttacattttttttgttttatattttatgaagtattcattatgtgagctggtctgcgattataagaatttttatgaaatttagtgcacacaaaataatctttagatgtaattccaaaagtagtgtattaagttacattttatttagttagagcactccattttgttcttttaagaggagaacaatatataggttttctttagtgatttgttcctttcactttttataattgacataagcatatttattgagtcaatttgttcagctaagtactagggaggcttcattagtcatgaggatgtttttatatataaatgtagcaaacatatattacagttttcactgtgtaatagattatccataataattcataaatattcctgctgaagttagtttgtaacttcaagtcaaagatgaaaaatatcaatggtgaagattgattgttcatatagagaggacattttttttccagactgtaaaactgaatcttgttgaatttaaagagaaattctggcagaggcggatgaatcacctgaggtcaggagtttgagaccagcctgatgaatatggtgaaacccagtctctactaaaactacaaaaatagccaggcatggtggtgggtgcctgtaatcccactcgggaggcggagtcaggagaattgcttgaacccggaggtgaagattggagtaagccaagattgtgccgttgcactacagcctgggcgacagagcgagactccatat

SEQ ID NO: 201913 - DNA, 1000 bp, Homo Sapiens
cagctgtgtagcagtccatcaccctgcatgtcagggaatagtgctggcagagtgattaaaagcatgggctgtagtgtggcacagctctgggctgaggcctgcagatttgctgggagacccatctctctcatttgctctgtgacctcggatgagttacttaggccctgtgagtctgagtttcttatctgtaaaatgcagtatatttcctggcgttgttagaattgaataaagtcatcagaaaaggcattggttagacccctagataattctcagtaaatgatagctatttttataccaaatgcagagaagagtcaaatgtaagtgcaagatttcctccccaagacaggaatgatgtaaagaattcctttgaaccttcattccttcatctgcaaaatgagggcgtttgtcctaatcaatccctctccaagggctgttgttcaccatattgggtgggcaactgcacgatagaacagtgtggaatgtggcacagcccaggtcaccaggaccacaggcattggtcagagaagtcagtgttcacaagggcgagggcagcccggagaggtaggtttcgtgcttctaggacagggaaggatagggagaagtgggaggactttgagggactctccgtctctgagggagtagccagcagggtggaagaaagtaaaaatgccttgtactaatagaatgctttcaagaataccgagtatttggccaggtgcagtggctcacaactgtaatcttagcactttgggaggccaaggcgggtggattgcctgagctcaggagttccagaccagcctgggcaacacggtgaaactccgtttctactaaaaaaaaatacaaaaaaattagccaggcagggcggtgcatgcctgtagtcccagctccttgggaggctgaggcaggagaattgcttgaacccaggaggcagagattgcagtgagccgagatcacaccactgcactccagccttggcgacagagccagactctatctcagg

SEQ ID NO: 201914 - DNA, 1000 bp, Homo Sapiens
gcacgcatctaggaaaaggagctgttttgtgcaaaaaggtaactagctgagataggactggagtccctagtttggggctcagcaccaagctgggatctgccccaccaaagctgctgggtgcaggcagctaaacattgtcagccctgagcccatgagatcagaaagacacaggtggcggggacaggaccctgcaggacttctgtgcccactgggtcaatgaccattgcagagctgttcctgtaacctctgtgcaaggacctgagggtgtgaaccatcctctgtggtggtcctgagccaatggaagggaggggacaagaaataggggccctgctaagattccctctaccaggccccactgggcagaccgagggccaggtgtgagggccagggatggggtgggcctagaaagtgtcctcagccctgccttctggtgagccagcgggacccaccagctctagccagtgacaacaactgaccggtccatcaccctgatttccagaggttgccagcacactggctctttcctcgaaattccatgtaactcgcttctctatttacggcctcatcagctgatggagccccttatatttgcagggaagaaagagtgacgcacgcgcctacaaatgcctccaaactcaagcctgggtgggttttttctttttttaatatataagtaatttctcttttcatttctaatcttaaaagcctttattgctgaagctataatttgtctgtcagatctaatgtcaaacaactgcatattttttaaaataagaaacccgaattttgaaactaaatctttgaaacttgccatgtgagagtcgtgttcctgacaggaccacgtgggcttggatctgggtcacttttaattttgcccctagggattttacatctctgaagcccaattgatttcacactcctaaatgacagacagctggctccaggcaggaacaggaggctctgcgtgatggcgtcaacacaagtcagaactccactttag

SEQ ID NO: 201915 - DNA, 1000 bp, Homo Sapiens
gccaaggctggagtgcattggtgcaatcatggcttattgcagcctccacctcccaggctcaagcgatcttcccacctcagcgccgcgggtagctgggactgcaggcatgtgccaccatcctcagctaaatttttttttttttttttttgtagggacagggttttgccgtgttatccgggcaggtcttgaactcctggcctcaagtgatctacccatcgacgcctcccaaagtactgtattatagatgtgagctagtgtgcccagcccattttgacttctgtataatactatagcatgcatatatctacatttactcatgtgtcctacttttgatgagatttgtgttgcttgtagtttggactattacaaattattatactgtcattatgccttttggtatatatgtattttcatttctctagggtatgcctcagagtggacttgtaggattgggttagactatgcatttttctaatcccaataacataattttttttgagaaggattctcactctgtcacccaggctggagtgcagtgacgtgatcttggctcactgcagcttctccctccacggttcaagtgattctcctgtctcagccacccaagtggctgggattacaggtgtgtgccaccatgccaggctaatttttttgcattttttatatagagatggggtctcatcatgttggccaggctgttcttgaacttctgacctcgggtggtcctcccgcctcacacctgtaatctcaactctttgggaggctgaggcaggcggatcatgaggtcaggaggtcgagaccatcctggctaacacggtaaaaccctgtctctactaaaaaatacaaaaaaattagctgggcgtgatggcgggctcctgtagtcacagctactctggaggctgaggcaggagaatggtgtgaacccgggaggtggagcttgcagtgagccgagtttgcgccactgcactccagcctgggcgacagagtgagactctgtctc

SEQ ID NO: 201916 - DNA, 1000 bp, Homo Sapiens
ttcttcagtgcagattgctccctatctaataggggataaatatccattatgccaccaggaaatgcctctgacatttaaatgcatgccttatcctaactgaaataaaggatctcaattctccccagtttgcctgcagcaccactcccaggagccaagccctggcctggccaatgacaccacatgtgtagaaagatacactgggttttgcaggtgcgtcgggacgctctgaggaggggagggtaagacggtgacacgcactcctgccactcttacatcgaagcctgacccctgcactgtgtgatcacatacaggctcagcctcctgcaggggcacccgcattccagcctggcacggttggcacccagcacctcccaggggagcagggcagtgcaccgagggtcgagatgctccagcaagggtgggcataaaccagggctggtcttcctctacccttctccttcccttcccctccgagtaatgtgtgtctagccattaggtgagacagaggatatgggtgtgtgcccagagcaggacactgccctgagtccagtggggaggtcgggagggagccccctcagggccaagggtggcagaggagcagggaggtcgctgtcatatgggggactgaccaaagaagtcaatctattaagcatcacagaagccaggtttcttgtcagaaaacggagttgaaaatatgaggagggagaaaactagaattatcccttcaggtggagttggaatctgacccacccatctgaactggtggttttctaggtggctggtgtgttcatttcctacagctgctgtaacaaattgccacaaactgcggggctgaagacaaattgattctcccacagttccagagcccagatgtcagaactcaaggtgttggcagggccgtaatccccaaaagctctaggggagatttccttccctgcccctttcagcttctagtggctccacaacactgagtcctcacatggtgacctcgagagaaagg

SEQ ID NO: 201917 - DNA, 1000 bp, Homo Sapiens
gtaataattgatcattacaatgatgaccctaaagcatcaggaaaatactgtatactatatgctcagagatatatatatgtatatatatatatatatttgatggagtctcactgtcgaccaggctggagtgcagtggtgtagtctaggctcactgcaacttctgcctccccgggtttaagtgattctcctgcgtcaccctcttgagtagctgggactacaggtgtgcaccaccacgcccagctaatttttgtgtttttagtagagatggggtttcaccatgttggccaggctggtcttgaactcctgacttcaagtgatccactggccttggcctcccaagtctgggatttcaggtgtgagtcactgcacccggcctatttttctaaaaaaagaaaaaaaaagaaaaaaaaatctggaaagagggagctgccttacatttcagtctatatttattagactcctaatgtacatttctctctcactttctttattttgaaaaacaaagtactattcagtaaagagcctgaaactgcttcagtccaagctgattttgaatgcataaagatttacttgttggattcagtaaaaaaggaataagaaaaacttactatatagtaatttttcctaggtatatgacctcaaaattgtgcttagatgccattgaaatagatgttcatgttttccattccactcaacaaatatcacttaaaaacagtacagttggtgatttcttacagaaatcataaatatgtactgcggagtgaaaaaaccaactacttaactatgatgaaatgggaacttttggttaaatttgtagggataggccaggtgcagtggctcatgcgtgtaatcccagaactttgggaagccaaggcgggcagatcacctgaggtcaggctggtcttgaactcctgacttcaagtgatccactggccttggcctccctagtctgggatttcaggtgtgagtcactgcacccggcctatttttctaaaaaaag

SEQ ID NO: 201918 - DNA, 1000 bp, Homo Sapiens
atatgaattcctatactaatatgattgaaattagtttgatttctataataattgtgctcccagattgggcttctgttttgatagtagaactaaattattaggctatttcaagaaattaatatattactggtagaaaaactgaagctacaaaatggcctggtttctcacttcagttaaatttgtgcttctgagtgcttgtattctaggtgaaaccacactgagaaggtatttgtggcccatacactgattccttcatgagacttgtttgcacaggagagctgctaaaaattactgctctcagggaggtctgtggtgaacaggtatgaagaagaagactgttctctgcccttctttttgcaataaaatgttccaaactatcttgagtttgatcccttttcgggtgtttggggtttttttaacattcagagtatgacacagccgcatccttgccagggccggagggagggtggatggacttataggtgttgcttgtggctgggtgacttgcttctgccaacaagattttcacagacacggcacaagcagaagcctggaatgtgtggcactgccaggcctgccctcttaggctcttgattttccccacgagatatgcgtgccccagggaacggcggctctggctgtggaatgagaggcgtgtggagcaggcatggttcccaccctcagcctagagtcaaggccagactagatcagcctaagcccagccacgccacgggtgcagcagtgaagagcaaatgccaactgtccatgacagtgactttcaaaggggcgtgtcatgtgcctcatcccagcaacagggaaggcacttctctatcagtcagttggtaaatgattattgacaatgtgtgggaaggtggagttatttgagtagatttggcctctattctcatggagcttcctttctagaggggaaggcagatgatggatgaataaatataaatgattctaataggttggtgcagcagtcattaaaagtaatggc

SEQ ID NO: 201919 - DNA, 1000 bp, Homo Sapiens
gcctctaatctcaaatataagttatgttcaatcccctcaaggcagtaaggcttctgtcgtctcctgatgaatctatgcttgggtaagtgagattgcccaaattaattcaaagttaaggctgtttaaaaatctgctacaattttctcactgatgtgttgtttcacttatcctttccatatgtgtgtgtctttagcatggccaggtttgcatataacttactcctagttaagttaatatatgtaattcccgttgtttccagccacagtgcagtagtgcttttaagatgggcatctgggctgggcgcagtggctcatgcctgtaatcctagcactttgggaggccgaggcgggcggaacgagaccatcctggctaacacggtgaaaacccatctctactaaaaatacaaaagaaaaagaaattagctgggtgtggtggcgggagcctgtagtcccagctactcgggaagctgaaacaggagaatggcataaacccaggaggcagagcttgcagtgagctgagatcgcaccactgcaccccagcctgggtgacagagtgagactccatctcaaaaaaaaaaaaaaaaaaaaaaagatgggcatctgatccaacacagacaaatgccatgcaagcctaaaagttttttatgttaaaacttagaagttctcctttctgctggggtttatatcaggagagttacatttccttcatgtacagagaataaactcaatgtagaggaatagggagaatttggagaaggacattgatcatatttttgtgttttgttttcagatgaagtctcactctgttgcccaggctggagtgcagtggtgtgatcttggataactgcaacctccgcctcctgggttcaaacaattcttgtgcctcaactactcgggaagctgaaacaggagaatggcataaacccaggaggcagagcttgcagtgagctgagatcgcaccactgcaccccagcctgggtgacagagtgagactccatctc

SEQ ID NO: 201920 - DNA, 1000 bp, Homo Sapiens
tggcggtaagccagacgtccctccctcggggatactcctgcagtccctgcacggcctcatctggccccatgtgagggctctccctgtggaaagagattttaattcgttgagtcagggtgtagggaaattccagccacacagtcttatttggaattatatcaacactgaacactgggttcccaaagttttcagtgttctgggacacacttctgtccttccctgtggatgtagaagccctgtcagagccctgactaaaacccagatccacagcgttagtgtgtgcaaaacgagtaaagagcagcacattggcaggtgcgcacacgtgacgttggaattccatttcggaagccaatctcactttccttttgcattctgttagaatgttctgtgtctgaattccccttggaatttggatagatttaaaagtgataggaataagtagctggtgtttctagcctccgcctccaggcgggtgaggaggtgacacctgagaattcctccctctcacccctgaccctgccggaaagcgaaactgagatgcgggcattgggccctgggaagcgtggggaaggggaaaggagaaagccaggtgggtttttaggtcccttccagtgccacactgtggggtgttgaggggccgcgcgaggcaggcccttccatgaggcctggactggaggccttctctaggcgccggcgctggcctgggccgcctgccgccacacaggggccgcacgcctgggccccagggcccctttgccggcgggaggccggggggaccgactgctcttggcgcccggggtcaggggaggccgggaaacctcggctcccgggcgacaggcacccaggcccttctcagccccccggccgcggccgcgccgggcctcgcttcagccgggcgattcttcccctcatttgttgcattgtttgcattaatatgaatatcttgttctgtttgttttgtctcctgagagccaataaagctgtgttttttctttacacc

SEQ ID NO: 201921 - DNA, 1000 bp, Homo Sapiens
cttctgtactgtccaggaagggagtgccggtcaggaggctgggatcttagcattcacactttgctcccaggcccagtgtgggacttggcacaggctccttctccctcagatgcctctgattccgaggaaagcaatttcctgcctctgagcctccaggactggagagcctggaaatacagcgaaggctgtggagtggatagatccttcagacaaggcactcgttaaaagctgtctatttggagaatgctggaaaaaccatgatattgttccctaagactattagtgagtgcggctaagtccccagccccctctcctcccagcctctgcctgtcccacagatagaaatggggcaggccctctgataaggaagcttgtcccttgaattgttcttttctcaggagattcacccttttcctttgtttcttgctctgttcacaaaagcaaagcatctgaaatgcaggccagagataaagtgcagcctgatgcaattagctgagcgcagcccacaggtcctaatgggatacggctcccgttcctccagcaggcccttacataggcgctgtgtgtcgtctgcactatgcgtcaaagccccaagtgttgcccagcctccgcatccacaccccctttctgtccctggcacagaacccaggagagccactctggtcagaggggctcagcagcaggccctgtctcccaccagctgggttcctgggtcaagtttcatcagaagtcaccgtgaggaccatggtcctcacctgagaggcctgcagatgccctggaggctcctgtgtgcttctgtgactgttcctggcaggcatctgtatccacccctcatcccacacctggttggggtctggctgtgctcctgggagctgtgctgactcttcccggggccacctctactgacacccacacctgtgcatatcccaggtatcctatcccaaccttgccagcatgtatccaggattttttttttcctattacatataatggccatagt

SEQ ID NO: 201922 - DNA, 1000 bp, Homo Sapiens
ggtcaacacaaaaaaccaaggccaggagtgaggggctctttcttaccgtaaataaggggaaaaggcagttagctcaaggacttgtgacggatccactttggtgttcaaggacctgcttatgccctcagtgccaatcggctcttggtgagatgactgtactcctaaggaaaatagccacttctgcagtctattatgcttttataactgtttaaaggtacttttctattgtcatttttaaaaaataaagtgcttattccagctgtcacaccattgcttgacaaattcttttttagcaagaccaactacatgtatcccacactgcagacaagacgccagcagatttcattcccattgtcaggcttcggcagagctaagcaagcattggccattgagcttaggcacaaagagattaaaggaggaagcagataccggggaaagccagagagtaagtctgcaaacgcacaaccacagtggctggtgacccacaatgacaccagaggcagagggacctcaagggaggcccctcatctacctcagcctacaaagcttgactcaggattatctgaattatattaaaatgtcacttgggttttctgctgacttaaatatatcttacgccaggcatggtggctcacacctgtaatcccaacactgggaaactgaggcaggaggcttgcttgatcccaggagtttgagaccagcctggacaacacagcaagaccctcaattttaacattagccaggagtactagcacctgtggtcctagctactcaggggaccacagaggaaagacaacttgagcccaagaggtcgaggctgcagtgagccatgactgctccactgcactgaagcctcggcaacagggcaagaccctgactccaaaaccataaaaaattaaaaaaaaaaaaaaagtggaaaaccaggcaccaattgccaagagaatcgtgttttatatatactctcacctactcttttttccccccaaaggagaaagaaagc

SEQ ID NO: 201923 - DNA, 1000 bp, Homo Sapiens
gaagaaaggaaattgtgctaagagacgtctcagagaggctgtgcagctgctggaggactataagcatgggaccctgcgcccgggggtcaccaatgaacagctctggagtgcacagaaaatcaagcaggctattctacatccggacaccaatgagaagatcttcatgccatttagaatgtcaggttatattccttttgggacgccaattgtaagtgttaccttcaaaggatttccttttctaaaaaattattttaaatgtctaactttatgttattgctcacgggtatttgactgaattgttgatttaggataagtcaattcctggagggaaattaccaaataaaatgatatgtatttcttaccacatctcttgatgctgattggcaaacctcttttcataaaaagcctgatgacttaaatccagcgtggagttgaaaattgccttcttccctgcacgttttctgtccccactgttgtcattagcacctgctagtcatagggaagttttctcaaagaacttgggaagtaggagtagaagcatgccttctgaaaaatcaaagtttaaaattaattcagaaagaattttcagcattctttttgttcagttttagaatcaggattatgtttactccttatttttattggaataaaacatacagaaaggtgcattcatcataaatgtacagcttggtaaattttcaaaaagcaagcatatccagggctgggcgcggtggctcacgcctgtaatcccagcactttgggaggccaaggcaggcagatcatgaggtcagaagatcgagaccatcctggccaacacagtgaaaccccgtctctactaaaaatacaaaaaattagctgagagtggtggcgggcacctgtagtcccagctactcggaaggctgaggcaggagaatgacatgaacccgggaggcggagctttcagtgagccgagatcgcgccagtgcactccaggctgggcgacagagcgagactcggtctc

SEQ ID NO: 201924 - DNA, 1000 bp, Homo Sapiens
caacagaatgagaccctgtctcagaaaaaaaaaaaaaaaactttgcatggaccacaccatactagtaacctcattctcctccaaatttctataaaactgttatatgtaataggtgtcatttggcctctgcactgtgttactaccatttaatgtctaaagcttgtattcccaataaaaccattcttttttttctctttttttctttttggaacaggctctggctctgtcacccacgctggtgtgcagtggcgccaatctgggctcactgcaacctcagcactcaagccatcttcccacctcagcttcccgagtaaccgggactacaggtgcctgccaccacatccagctaatttttgggtttttgttgttgttgttttgctagagagggtgttttgccatgttgcccaggctggtctcacatcccgggctcaagcaatccgcccacctcggcctcccaaagtgctgggattacaggcatgagccaccacacctggccaccttctcaataaggattgtgtgttttcatgatctcttaacaatacccagcaatgttgtgcacatgggaagaatgcttatcttacaaataaaatattatgaaaaacattcttgaggtgacaggtatgctaagtaccctaatttgatcattacacattgtatacacgtatcaaaatatcacattgcatcccacacatgcataattattaaataaaattgaaggccgggcacagtggctcacgcctgtaatcccagcacttttggaggccgaggcgggcggatcacgaggtcaggagatcgagaccatcctggctaacacggtgaaaccccatctctactaaaaatacaaaaaaaaaattagccgggcgcggtggcgggcgcctgtagtcccagctactcgggaggctgaggcaggagaatggcgtgaacccaggaggcggagcttgcactgagccgagatcatgccactgcactgcagcctggtgacagggcaagactccgtctc

SEQ ID NO: 201925 - DNA, 1000 bp, Homo Sapiens
ttactttttcgtaaatactgctttctttctattaaatatagtccttatctgacaaaaagtccgtcagaagtagagcttatctttaggccaggcacggtagctcacaactgtaatcccagcacattgggaggctaaggcgggcggatggctttgagcccaagagttcgagactagcctgagcaacatggcgaaaacccatctctactaaaaatacaaaaactagctgggcatggtggcgcgtgtctgtggtctcagctgctcgggaggctgaggtaggagtgtggcttgagcccaggagacggaggttacagtgagttgagatcacgccattgcactccagcctgggtgacagagccagaccttgtctcaaaaaaaaaaaaaaaaaaaaaaaaaaaaaacagtagagctcatcttttcttgaagagtcatttaaaatcagtaagtaaaaacttgctagatttgatgattgtgtgccatgagttacacacagactcctaaatcagtttcacctgtggtgtcctcattctgtttactttgagcattttgcattctatatctgcttagttatatggatttattcgtcccatataatatgtgtggccacatggacacatgttctaaaaggttttaaattctgcaagatagtgacgatgatgtaaacacaagaaaagggcaaatggatacattttcctactctgtgctcatcaaacatattacaggataaaattattggctatctaataaaaacacagactaataagacctgataagttggacaaaatgtttaaaaattaacatgaagatgataggaagtatgaatctatattcactgtcattaatgtcaaacctttaccttatggtatattgtactttgagaaattatggccaggcatggtggctcacacctataatcctagcactttgggaggctgagacaggaggatctcttgagcccaggagttcgagaccagcctgggcaacacagggagacactgtcttt

SEQ ID NO: 201926 - DNA, 1000 bp, Homo Sapiens
ttcatgtaaccctcaagaatggccaaggaaagtggattccccatcattagaggtaaggaaatgaagaccaagggagtctaaataatgggcccaaagtctcacagtgggctagagagagagtatgggattagacccaaagtcttcttggctccaaagcaggtgccctgtgctgctccctctaaagatacatcagtgagagtttacgcctgttgtccatgatgcattgaccagagtagaaaaaggatcctttgtcttgcaggcagtctggttgccagttggctgccaaaattcagatgttggtggaagaagccacattatgtacagtctttgctccctttcctttctcattgaaataagtaaagattcagccgcagggctgtctacccaaagtgctccgaagacttcaaggcattcactcgcctccatttcaggcaggcagagcccactgaggttgatttttttgtgttcacagctgcagaaccaggagttgctgagggcaatgatgaagaaggccgagctggaaatcagtggcaaagtgatggaaacaatgaagagactgggggatcccgtgcagcgacagcgcgtcctagtggagcaagagagacaaaaatatcttcatgaggaagagaagatcgtcaagaagttgtggtgagtgccagtcacttgcatgttgagctgtttcacctgcaaaggaaaattatcattactaagaaggaggtccttcccagttggtggtcttgccctctctttattgagcacctactgtgtaaaagttagagttctgctgatgctggtatatgtggacacttcagcacctgtccatggaggcccaggaaattcagtggccctcaggtgactgaatttctttaaaagttgcggcattgctgggcatggtagttcacacctgtagtcccagttactcatgaggctgaggcgggaggattgcttgagtccaggagttcgagaccagcctgggtaacacagggagatcctgtctctt

SEQ ID NO: 201927 - DNA, 1000 bp, Homo Sapiens
acactagtaagttcttaaattgctcacaaagcacaaattttcttccagaaacacatttcctaacaactccactaatagtgctgaaactcatgtcatccttactcacttcatgatggtttcctaaaaccgaacaatgacaacaacaaaaataacctatttcattttgaatctgaattctccagaaatttttttaattcaattttcactgtgcctacaattttgagactgttttgatttatagtcagagcaagagaaagaaattaaataatcgagtggcagattcccaacttgttattgctttcacatgaattactttcaaaatccaattactcaagttgccattttgatatcaatcatagactaaaagcttagcatatatattttttcatttacttataatttataccttctttataaaacaatgtcagtaactctgtcaagtatatgacattaaagcaaatgcaatatagaagtgcctcccttcccagtggacagctgccttgaaagttaagtacccaccaggggaatgggtacaagggggcttttggaaaccctcacatgaaactttctgtgaagaattatttcttgcacagtgatcccattctcccttctgttttttaagtatagcatgaaggcattgaggtgtgttggtattatttgttaatgttactgattcattacaaatgtctgtgcaataaatttttctgttaaagagtaaatgagccaggcttggtgactcacacttgtcatcccagcgctttgggaggctgaggcgggaggattgtttgagcccagcagtccaagaccagcctgggcaacatggcaaaaccccatctctacaaataatacaaaaattagctgggcctggtggtgcatgcctgtactcccagctacctgggaggctgaggtgggagaatcacctgagcccaggaggttgaggcttcagtgaactgtgatcgtgccactgcactccagcctggacagcagagtgagactcctc

SEQ ID NO: 201928 - DNA, 1000 bp, Homo Sapiens
tatctcagaaactttcacacacattatttcaaatacagttctcccaaaaaaaccctgcggagagatacctgtaaaccaaggctgagactagcctagacagttggttctttagacaacaggagtggagatttgaacccagctattgtgactcaagcaagcctagggcatgtttctgagatctctaaggtgtgcgctgtgaaaccggtggctcattttatgggttggatttccaaacacgactatcacaatcatgccaggaatcaatgactgacttcttgcctccgtggcctgaagttctcctctgcacctcctacctttttgccatttcagtgatgcaccaaagggtggagttgaagaacatcagttttgctgctgcttgttggcaatactctcaaaaaggcgtggggagggagagatgtaactcacccctgaagtcaagcctggagattacttgtcaggagtgtcaaaagcatttgttaagcaaccttcttcctggcattttaagaagaaagccgcatacatagatcaaatcccttccttcagaaacctgtactctctgaacagagccttggaattcagcctagagaaagaatacttggtggttcatagaacttggttcacaaaagagtgcttgctgcccacgcattttgcacaatgactcccaaacacacagaatgcacattggcaacaattttacgcgtgtttccaaaagtgctgactggaattgaagggacacatttggcacttttttttttgaaatggggtctcactccagcctgggcgacagagtgagactatgtctcaaaaaaattaaattaaaattaaaattgagcctgatgtggtggcacatgcctgtagttccagctatgcaggaagttaagatgggaggatcccttgagcttgggagatcaaggctgcagtgagctgtgattgtaactactgcattctagcctaagaaacagaaagagacactgtctcaaaaaaaaaaaaaaaaaacaag

SEQ ID NO: 201929 - DNA, 1000 bp, Homo Sapiens
agacatgcaccaccatgcccagctaatttttgtatttttagtacagacagggtttcgtcatggtggccaggctcgtcttggactcctgacctcaggtgatccacctgcctcggcctctcagagtgctaggattacaggcgtgagcgacctcacccagccctaaacaactttttagaagtagaatcaacatacaataatttaaaggcacatttgataaattttcgtgtgtgtgtgtgtgtgtgtgtgtgtgtttatacccccttgaaataatcacataatcaacatactgaatgtattcatcacctcagaaatttccttatgcccattatttttggaatgtttatcaagagtgaatggataaacaaacttgtatatccatgcaagggaatacgactaaacctaaaaatgtgcatgaactattgatacatacaatacgtgtgaatctcaagataattatgctgaaagaatgcacacaaaaaatgttattccatttgcataaaattctagaatgcgcaaattaatctattactgttttttaagatgagaaaaacaaggctcagaaaggaaacatagcttgtattagcaatgctgttaataaatggtgatgcaggatattaatccagttctgctacatcctaaaacccaggtctatacaagacctcaataccaactgcattcgccatagcaagattagaacaaatattcatttggagtcaggggcggtggctcaagcctgtaatcccagcagtttgggaggcctaggcgagcagatcacttgaggtcaggagttcaagaccagcctgaccaaaatggtgaaatcccatttctattaaaaatacaaaaattagtcaggcttagtggcgggcacctgtaatcccagctactcaggaggctgaggcacaagaatcacttgaactcagcaggcagaagttgcagtgagacaagatcatgatcgcaccactgcactccagccctgggtgacagagcaagaccttgtctc

SEQ ID NO: 201930 - DNA, 1000 bp, Homo Sapiens
ggctttgtatgtgtcttggtaaagtagcaactggcttttatgatccccctacccccacaccctgtgtctaaaagggcacatgactgctacagcctcaaaacaaaagtacttgatctcagtccaatgttgaaaagagctcattctgcctggcacggtggctcacgcctgtaatgccagcactttgggaggccgaggtgggtggatcatgaggtcaggagattgagaccatcctggctaacacggtgaaaccccatctctactaaaaaaatacaaaaaattagccaggcgtcgtggtgggcgcctgtattcccagctactcgggaggctgaggcaggagaatggcgtgaacccgcgaggcggagcttgcagtgagccgagatcgcaccgctgcactccagcctgggcgacagagcgagactccgtctcaaaaaaaaaaaaaaaagagaaaagagctcattcttacttttgctcaccaagaaaaacctgggagacgagaagaccttgcaggcaattccttaactgtttaccctcatcacacttccttgtcagagcccagcttacctagcaagggtgcctgggaatcccctgtacttcaatccccttcctgttctgtctctgtcctgacttcatccagttgatagtggacaaaccctattgtagattgctgcctgaaccccagtcagcaagtcctgttttggcttaaatctaaggtcttgttggatgtgatggctcacgcccgtaatcccaacacagagactaagacagatcacttgaggtcaggagttcgagaccagcctgggcaacatgaaaccccatctctactaaaaatacaaaaatacaaaaaaatccccagcacatggggcacatgcctatattcccagctacttgggatgctgaggcaggaggatagcttgaacccgggaggcagaggttgcagtcagccaagattgtgccactgaactccactccagcctgggcgacagagtgaggactccgtctc

SEQ ID NO: 201931 - DNA, 1000 bp, Homo Sapiens
agggtggatcacctgaacgcaggagttcaaaaccagcctggctaataacggcgaaactccatctcaactaaaaatacaaaaattagccagacgtggtggcgcgtgcctgtaattccagccactcgggagactgaagcaggacaatcgcttgcacccgggaggcggaggttgcagtgagccgagattctgccactgcactccagcctgggtgacagagtgagactcaacaacaacaacaaaagactgcctctggagtcaataccaggcttttggcctttcctcctccatctcctcagcaactgcctctggtgtgaataccaggcttttggcctttcctcctcaaatcgcctcagcaactgcctgtggaatgaatacgaagcttttggcctttcctcctccatctcctcagcgactgcctctggactgataaatcaggcttttggcctttcctcctccaactcctcagcgactgcctctgaagtgaatatcaggcttttgacccttcctccatctcctcagcgactgcctctggagtgaataccaggcttttggcctttccttctccatctcctcagcagtttttcttgcgaaggtccggtctgctggactctaggagacggccacatcacggaaagcactgtggtcctgtctgctaccatggcttcctgaagctatatgttcatttaagatgtctcaagaaaacgggcaaaatagggccgagtgccatggctcccgcctataatcccagctctttgggaggctgaggtgggcggatcacgtgaggctgggagttcaagaccagcctgaccaacatgaagaaaccccatctctactaaaaatacaaaaattagccaggcgtggtggcacatgcctgtattcccagctactcaggaggctgaggcagaagaatcccttgaacccaggaggcagaggttgcggtgagccgagatcacgccattgcactccagcctgggcaacaagagcgaaactctgtctcaag

SEQ ID NO: 201932 - DNA, 1000 bp, Homo Sapiens
tctgttctggacactgtgttacttagacccaaagaaaagaacgatgtagaatattatagtgaaacccaagagctactgaggacagaaattgttaatcctctgagaatatatggatatgtgtgtgccacaaaaattatgaaactgaggaaaatacttgaaaaggtggaggctgcatcaggatttacctctgaagaaaaaggtgaccatcttaacttatatgcgttaaaaataactgaagagcatattcacatgtcaaagtattagctgaaatgtgtgtctgtgtagttggggggttttcttttaaattagaaatttctttttatgtgatatatggttagctcctctttttgtaaattcttcctctcttctaaaagtgattgatgatgtggaataatgaactcctttaagaagctggctggttctagtatattaaatgcttaaataaaaagtcctttcctttccacctagcaatgatattctcagttgtttctctcttgtggtgcagagttgcattgggttttctacattttcccactgagtcttccctgttgtaaaagggagttagaaagctgctaactaggattaagtttatagtcagggaacagtgttataatctcttcctagctaatgggcttactcaaagattcaccacctgactttgaatttgtcagcagcatactgtaaacagctgtaatgttcagaggcttgcaggaaaaaaacagagcatacttcagattgtactccatttaccttaacccctccaaaggaaataacagctatttcattatgtgcaatgtgttacaccctttcaaatgtaataaactcacaacaaaattgaaacataatacttgattataacttattaaatgtcttttatgtttttcctttgtcaggaaaacttgaaaactgtgcttttaattgaaataatattggatgaatgaaactgaattcagtattaaaatttgactgttagaaatgaaaaataaaatgatttaaaaat

SEQ ID NO: 201933 - DNA, 1000 bp, Homo Sapiens
catgccatttgggcggcaagagcgaaactccatctcaaaaaaaaaaaaaaaaaaatccacaactggctgggcacggtggctcatgcctgtaattcttgtttcggaggatgcctgtttgggaggatcgcttgggcccacaagtttgagaccagcctgggcaacatagtgagaccccgcctttacaaaaaatttaaaaattagccaggtacagtggcatgcacctgtggtcccagctattgaggacactgaagtgggagggtcacctgagcccaggaggttgaggctgcagtgagccatgattgtaccactacactccagcttgggtgacagtgagaccctgtgtcaaaaaaaaaaaaaatccaaaatctcacccagaccaatactgtatcagaattatcattttaacaatatctccagatgatttatatgcacattaaagtttgagaagctggccaggtgtggtggctcacaccagcactttgggaggccgaggcagataggttacttgagctcaggaattcgagaccagcctgggcaacatggtgaaaccttgtctctataaaaaatccaaaaattagcccggtgtggtggtgggcacctgtggtcccagctactcaggaggctgaggtgggaggatggcctgaacccaggaggcagagtttgcattgagctgagattacaccactgcattccagcctaggcagcagagcaaaaccctatctcagaaaataaatagtttgagaagcaatctttttttaaatgagtgaagaaatcagacctaaggagaaatctgatgaagccagagctgagttaatattgataaatggatgcagtcaggtggtctatacttaatttttggtgaggggaagggacagtggaggcagtattgattttgaggaagccaaacaggacagcctgatgaattcaagatttccagcatatatacatcttcaccaatcccaccaccttgctccagcctgtcatatcactgtgtctacat

SEQ ID NO: 201934 - DNA, 1000 bp, Homo Sapiens
gagcaccttattcccaaagggataatttccagcagtgttataagcgaggagggacatctggtggtccacgagcaaattcgagagcagggtggagtgattcttctcaggtgagcagcccagaaagagacaacgaaacctttaacagtggtgactctggacaaggagactcccgtagcatgacccctgtggatgtgccagtgacaaatccagcagccaccatactgccagtacacgtctaccctctgcctcagcagatgcgagttgccttctcagcagccagaacctctaatctggcccctggaactttagaccaacctattgtgtttgatcttcttctgaacaacttaggagaaacttttgatcttcagcttggtagatttaattgccagtgaatggcacttacgttttcatttttcacatgctaaagctggcagtgaatgtgccactgtatgtcaacctcatgaagaatgaagaggtcttggtatcagcctatgccaatgatggtgctccagaccatgaaactgctagcaatcatgcaattcttcagctcttccagggagaccagatatggttacgtctgcacaggggagcaatttatggaagtagctggaaatattctacgttttcaggctatcttctttatcaagattgaaagtcagtacagtattgacaataaaaggatggtgttctaattagtgggattgaaggaaaagtagtctttgccctcatgactgattggtttaggaaaatgtttttgttcctagagggaggaggtccttacttttttgttttccttcctgaggtgaaaaatcaagctgaatgacaattagcactaatctggcactttataaattgtgatgtagcctcgctagtcaagctgtgaatgtatattgtttgcacttaatccttaactgtattaacgttcagcttactaaactgactgcctcaagtccaggcaagttacaatgccttgttgtgcctcaataaaaaagttacatgc

SEQ ID NO: 201935 - DNA, 1000 bp, Homo Sapiens
tgcagctgctgttcctgcctctaaaaccctctcttggctgggtgtggtgggtgacatatgtaatcccagcactttgggaggctgaggcaggagaatcacttgaacccgggaggcggaggttgcagtgagccgagattgcgccactgcagtccagcctaggtgatagagcaagactctgtcccctccctccaccaaaaaaataaagccctctctgcatccattccactctccactcttgctcattctctcctgccctctaaaaggtgatctgtctttggcagattcaatcacttgcctttctcattctctcctgagcccactattccactctggtccccaccacttcccccaaaactgctttgaaccatcgcactgcaacctgttgcttagcccctccatctagtctcaggcgttaggactgactgcccagcagaggctggtgcaaccaatcacctcctttagtaagtttctccctgggcttcacctcttcacctgtgggctttccacctgtctctctctttttttttttaagacagtctcctctgttgccaggctggaatgccgtggcgcagtctcggctcactgcaacctctacctcctgggttcaagcgattctcctgcctcaggctcccaagtagctgggattgcaggtgcccgccaccacaccgggctaatttttgtatttttagtagagtcggggtttcaccatgttgcccaggctggtctcgaactcctgaccttacgtgatcctcacgcctgtaatcccagcactgtgggaggctgagacgggcagatcaccctggccagcatggcaaaaccccatctctactaaaaatacagcaattagccgagtgtggtggcgggcacctgtaatcccaactactcaagaggttgagacaggagaactgcttgaacccggaaggcagaggttgcagtgagccgaaatcgcgccattacactccagcctgggtgacgagcgaaactccgtctccaaaaaaac

SEQ ID NO: 201936 - DNA, 1000 bp, Homo Sapiens
cctgttcccaggactcccagaatacaccaagccttagcagggcggggcccgggagcctccatggatctctttgtcatgggcatacgtagcccacaggtgacattctgtcaacagcggcaggaggaaggagggtttcttcacagcccttccaccgtcgttacccattccttctgtttttccctggtctgcccagcccgtgactatgtgctgcgtgacttttgcgcacgtcacacgattgcgtgattagaccatgttggggattcatttttttcctctcttaacaatgccagaaatgtgtctctgcattgccacagtgccatcctaatgacctcaattgtcattctcgaaggccagtgacgtttcctcccaagacagagccaccagccctcactggccccctcggtgggaccttcaggctgtctccagatttctgctgttataaatacagcctcgatgactcatcccagacacaaaacctgttgggattttccctttagaataaattcaccagagtgggaccgctggatgggggatgttcttgtcatccgcattttccaaacggagtatgaagcccagaggtgctgggtgacttgcctggaagccaaggtaccggtgcccggctctgccgtttctcaccgctggccttgagtggagaaacagatgtgctcattacccttccttggtctcagttttcctcttttagaaagtagggccttggccaggggcggtggctcacgcctgtaatcccagcactttgggaggccaaggcgagtggatcacctgaggtcaggagtttgagaccagcctggccaatatggtggaaccccatctctactagaaatacaaaaaattagctgggcatggtggtggacgcctgtaattccagctactcgggaggctgaggcaggagaatcgcttgaaccggggaggcagaggttgcagtgagccgaaatcgtgccattgcactccagcctgggcaacaagagtgaaactccatctc

SEQ ID NO: 201937 - DNA, 1000 bp, Homo Sapiens
ggatgggggtcaggacaattttgcaaaagaagtagctggaagccatgggactggcgggagcctgtttgggggatctggatggttgactcctaggagtcaagttcagcatcttcgccgtggctgcagagctgcctgatgggcactagagggcacgccagccccacactccctgggtctggcttcctcccgcaacctcactctagtagagcctgtgcctgcctactagcgctctggggttcggagagtttgggaatttctcagagccaactggctcaggcttgggaaggctggctgctgccctcagctccgcctcatcagctatgtgaaggggtgtgtatggagtgatcctgccgccccctccctgggctggtccagagatctcaaactccgatgcccctggggccacgtatgttgtgtaaatggatgaaacaggcccttgagttgggagcctgcttcactttgactttcccactgttgctggagacaaagacatcgtgatgagagaaagttcgcacaatctagtcggtaacagccactttccttgagaccaagagagtgcggtggggatgggggggagagcacgggtccccgtctgacagtggccgctgccatattcaggtgtagctaattgctctggtgtgggaatgcaggcctaatgacagaaatctggagaagccagaaatacagatttgtatgtgagatgtcctgattttttaagttgttggcagaaattaattcagaaatcaaatctgcaggccaaacaaggtgcaggacccagctttggccccatgcccctgtaggtccctctgggacagtcaccgctggggtcctggctgctctgtcattgagggatgctgggcactgctgccgggtggccagggtatggggcatgtgcccagcaatgtggctccttggccccgctggccagtgtcctgggcccctgacaggcgctggctgtgagtggtttgtacatgctacaataaatgcagctggcagcatt

SEQ ID NO: 201938 - DNA, 1000 bp, Homo Sapiens
cctgatatttctctttttcctttaccccccggcaatccatcctctggaatatagctggagccccccaaagagaggtcagaggtcgcagaaaaccatggtggacatgtcagctgtcagggccactcaggcagccagccagccactcttgctggatgtctgttttctgttgtgtctgagttgttgtgaagtgaaggccccaaatacagagcgatgtgccagagacaagggcttacaggtggcccttcccacccgtgggcggccgggggaggccggacggtgtagtggctgtgatgggggctgtgtgtgtaagctcggagttggacagccttgggtgtcagtcactgttgcctgtgtgatctagcaagaatgttcgacctctctagactcagttttgtttctttttgtgaacaatgacagtgacatgcaacctgccctgtgcggttgttgagtgggatgcacagggactgtcctagcacaacactcaaggaagggtggccactgccttagtttgtcaccatcattatcctatctctgttgagtggcacctcctgcgggagctgtgtttgctcagccgcagtaccgacccccatctcccggtgtgggtcgggcacctgtccaaggcggaccttctgtgaggatggagggagggcgccttcacctcctgcctcaggagccaagagtcagccagacaggcagctctctcaaatggagatcctttgaagactataaagatttgtttgtacatctttctctgggatttgagaatatagatgagtagagaaaaatggagggaaggtggaagggatgacttaaaaagggaatgatagggaggggaacatcacacaccctggggcctgtcggggggtgaggagctaggggaaggatagcattaggagaaatacctaatgtagatgatgggtgtagcaaaccaccatggcacatgtataccaatgtaacaaacctgcacattctgcacatgtgtcccagaacttaaactatt

SEQ ID NO: 201939 - DNA, 1000 bp, Homo Sapiens
atgctgatgagggcttctgcccctgaatcccattcccttgcatagtgactcctcccttgggggtgtctttaagggagcagcaaggataaaggtatgacagctcacacaagtgcttgttctgggcctgtctaaattcatcaccgccctgtattattcccatttgactgctgaggcacagggaaggtaggaaacttgtccaaggtcatgctcttcctgcctgacatatttgggatttttgaatctaagcaggggagcttggtgctcttacctgatagcgaaccctgcacagtgaggtgggccccgggccactcagcctcacacctgtgtagagacatgacccaagtagctggggaagggcagaggtgggtctgaggccacctgcttcagaggaacaagtggcactggctgttcctccagccccacgccccaaatctctgcttctccatcaggcagcaaaacaaagactggaaggacgtgagggctgcctgggggttggggcaagggaggacctttgttcaagagcttccatgtttgtatgaatgtctttcaggacagtgtccaaatgtatgtctgtacacttagtatggtattccccagtctgaacatgtgttcccttcctctgcctcctggagtgctgctcccagccttgcaaagctaagtgacggccagaaactaagcaggcaggccgggcgtggttgctcacgcctgtaatcccaaaactttgggaggctgaagtgggtgaatcacctgaggtcatgagttcgagaccagcctggccaacatggtgaaacccaatttttactaaaaaccccaaaaaaaaaaaaaaaaaaaaaaaattagccgggcatggtggtgggtgcctgtaatcccagctactcgggaggctgaggcaggagaatcgcttgaacccaggaggcagaggttgcagtgagccgagattgtgccattgcactccagtctgtgtgacaagagcgaaactccaccccccccaaaaaaaaaa

SEQ ID NO: 201940 - DNA, 1000 bp, Homo Sapiens
ctctctgggtgtggggtttggacgcaccaggatagctattgattaatgttaagggtgttctacccacagcaaagcacaccctcttaaaccaggcactgcctgggtcctggtcccgagagccctaccaggatcaggttcctgcaagccgtcagaatgtgggagcccccagcccaactgattgtaactgtcccctgttacctgtgacatgaacctccaacagcatctggaaacggttccctctgtcagctgctctgtagacagggctggggagatctcagagttcacacctcgcctgttgtaggggaggttgggggtagggtttggaatggccaagtgcccttggaacctcccacagctatggccgtcctgacctcatcccaggaactctacggtgaccaggaaccacccctctgacgaggtctgtagcggcccttctcagagtggaacagcccacagtgctagttgtgcctggtcttacctgtactccacggacctcggtgaagcaaaagcttcagggcagagggaatgaggcaacccagtggcagccccgctgggccccgtggctcccgctctcctattggacgtagaggcaggggagagacctctatacaaatattctcatcacagaagggatgatccttgctgctctgccgtagggtttttgatgctgagctatgctgcacatgacgttaacctaaagaacttggactgagcttttaaaaaaggacagcaaacaattttataatccttaaagtgtaatagacggttacactagtgcagggtattgggggggctctttgggtgtggaggctgtcacttgtatttattgtgactctaaatctttgatagtaaaacaaatgtaaaaagaaatgtttgccaccagatgggaatagaagttccaataagcaggctggaatgggtggctatacgttgtatcacgaggaagttttagactctgaaggataataaatggatgatgtgtcaaaaaaaaaaaaaaaaa

SEQ ID NO: 201941 - DNA, 1000 bp, Homo Sapiens
ttttcccctaatctcataccttacatcttccagcatcatttgctacatcaatgtcttttcatcctcttcatcagccccattgagctgactccagcttatttttgcactgatttccaccatttccttcccacacccatcctttccctctatttaaagcctccatctcaccctcagtaatgctgctgatttactctcagatgtctcaagtctagcttcctttttgaatccttctcctactccaggggctgtcaaaggcagccttaaagttcagtgactgttaggtggctcaggccatttttcattgggtggtctttggtgtttgcatactgaatttgaattcagtttaaaagcaaactgttggatatgaggaagaaagggatatggccttagccctttttccaatatttggaatatgaaagcatattgtgctttgtgtaaaaaatgttttcttctcctattctgctcttgtctttactgaaggtaaaagtattccttaagtagcttttgcaaatttctagtctgatttccacattcattaagttgatttagcagacatgtaagtcagaagtttcacatatcccttgtatcaaacattttatagggaaacctagtaaatttatgatgcttcattttgggctttccagactatttgagttattcaagatagccataatgttttagtagcgacattcttttattacttctaattgccttgtaaaatgcattgttatggcccggcacggtgggtggatcacaaggtcaggagttcaagaacagcctggccaagatggtgaaatgctgtctctactgaaaatacaaaaattagccaggtgtggtggcaggtgcctgtaatcccagctactcgggaggctgaggcagagaattgcttgaacccgggaggtggaggttgcagtgagctgagatcgcaccactgcactccaccctgggcgacagagtgagactatctcaaaaaaaaaagaaagaaaaaaaaaaaaaaaaa

SEQ ID NO: 201942 - DNA, 1000 bp, Homo Sapiens
atggtctgagaaaaaatggtattttgaaaaatggcttgatctgtgacttcaagtttggaccgtggaagaacagcactttcaaacccacaactgagaatgatgacacagagacaagtagcagtgatacatcagatgacgacgatgtgtgaaggatttcctaacagctttagaaatcttagtgtgatacatctctcatacagtttggggtgaattgtaaaaatgaagaactataatttatgtagtgaaataccccactagaagaggattttttgggggacttcaatatgaagaaaaccaagaatgttttgttgggctgtgttgaacattatttctttgtaaatgaatgttgtaggaatgaggacttgggttggtccaacattgactttcttcatcactgcaacatttctctgactagcaatgtgacgatgtaacaaatgagattttctcatttaataataaaaaattgtgtaatgttttgcaaagcttctgtcttaaaatgtccaggtcttgagaaaaaaggcagcttacactgttttgcttgcagagtcatatctttttcgtacaatggaaatcctcaagtccactttgtgcggtctccctctccttcccccaaaaaacaacaacaacaaaacaaaaccaaaaaggaaaatgtagcatgttggctaaaactggagcaaagtgcactaaaacaatttcctgaactcacctgttgtactattcaccttttaaaccataaattgctctttagccatttgtagtgcagtaaatgttacaggaaaagacttggcacattttcttccaaattttaagaggtgattttcaaaagctttattggggtatgttgtcagaccagggttttcagagttgatggaaaagagtcttgtgagaaaacttattttgataaattattacacacgcagaaaaactgatcacactgactggatctgtccacgacatggaaaataaactggattttcagaaaaaaaaaaaaaaaaaaaaa

SEQ ID NO: 201943 - DNA, 1000 bp, Homo Sapiens
agcagtgtaaacgtcggagataagttgtagtcatttttaacattttaagtaagccaactcagctaccagtttttcaacaaactgaatttataaaaatgattttcatctcagtgtgcctgtgttgcctcacaagcctcaatgccaggtgtttggattgcaaggtgagactgcatagtaagcagccacacatccaccaaagggccactgctgcagccacggagcacaagcaaggcgaagtgccatggggcgttggcctgctggatctcatgtgacttcagggcttagattctgcatccatttctcagtttaacaaatgtgccaacttagtgtgtgcctcaacagggcctcatgggaatgactgatttgctgcctgcaaagctggttgagctcctgtttaaaggcactgtatcagtgggtgatggcagggtcagtgctattagcctaagatgaaaacacacagcaaaatgagtcacctggataggaaacttcttaaaaccaaaaaaccacctccccgtgatgtgtgtggaagctcagttcccttgcggtagagtcacttcttttttggcagagtggagtcttcttctgttgcccaggctggaatgcagtggtgcgatttaggctcactgcaacctctgcctcctgggttcaagcgattcttgtgtcttagcctcctgagcagctgggattacaggtgtatgccaccaggcccggctaatttttatatttttagtagagacagggttttgccatgttggccaggctggtcttgaactcctgacttcaagtgatccgcccacctcggcctcccaaagtgctgagattacaggcgtgagccaccacgcccagctgtcacttccatcacagttgtataaagcctcattaaagatcgcagtgttgctgtagcgacatgcagtgctgtagtcagcatctgccatagtatcagagccaacagcccatatgacagctgtcttcttctcacccccaaaaaaaaaaaaaaaaa

SEQ ID NO: 201944 - DNA, 1000 bp, Homo Sapiens
atgaactgtgttatacttctcagtgctttcttttttctttttgataagatggatatcaaaaatagttgctgtgcaaaagttagtagtcttcttcaagaagaaaaccaattctttttctaataatatcctgtgaaattgcttcattcattcatttatttttaagccaaatgtcagcagagtgctgctgcttttatctagtaattttgatatgtaagtattaatgcatttttaaaagatgtctacattgaaacatgttcttcccagtgtcctgcttatgatgctttgttcagattttttgtaagagaccagttagtacactgggggtgtatattgtgtacatgtgtcattttagttaggcattgtaggccaaatgtgattataaatgaagttgatgaacattaattttgttattagtgagttttttgaattgtaaatggatttccagtttaccttctgttgtctacagcttttttaattttaaggtttgactaattgtatccatctcattgtacagtgttttagttgcaagcagaaagtagaatttggtataaagcaggttatttctatattgaaaggagtacagttgaaattgtagatttaagattgttaaaatcatgacaattctaacttgtctattctaacctattgtgtacaatctgattttttaaaattgtaaacatgtatgatcttggtttcatgtgtttttgaaagtgttattgtttaaaaaatgaaaaaagcatatctgctaaagagctgtcagttttcattactgactctgtaaaatacactgttctttgtgtactgtgtgttattttgccagctgctgcattagccttcaaaagtatttggaaacttaagatgaactacatttcttgcaaagtacattcctttctgtggtattttgtcctgtaactgaagtatagtaattattttatggaaatgttagcaattctgtaccaactttgaataaaatgaaaaatttaaaaaaaaaaaaaaaaaa

SEQ ID NO: 201945 - DNA, 1000 bp, Homo Sapiens
cacctttcagtccccacccgcacccgtcccctagagccatagtactgtgttctgaaagccatttagaatttctttgtgagcatgtagtgctttgcacgccacagaagccgtctgccgtgtgtgaggagcatacaatggactttctaaagataaggcgtgggcttccacagtgtctgccagagtttagttctttataccttactgaaaaatgcctcgtggtcttcgcagaggggaaggcctgtctaaagtcaatcatccgagatgggttttccattccaaagaaaggcaatatggttccttccttccctcctaaaatatgacttaacttttaagagaaatgttctgacacccacctaaacacacaaggcacgttcctggcctgtgttcaagggaaatgatcagtcattgcattgttattccaaagagcagccaacagtggcctcccccaggccctaccctgcaatgggattcgctttcatttaatggaaacttctgggactgatgcccaactcagtgcactcaagacgcatctccagctttcgggggaagctggtattggacatagtgtgttaaacagctcctgagaacctttgggacactctgccatggctggcgtgaggcccagaggaccacgcagaggcaatggtagtacagatgtcacagctgagggtacgatgaggcctgggctcagtgagccaggacgaatgtgacagacaccccttgctgccacagtcagccctttgacgaaggtgggctggtgattctggaagtattggctatagcagtgggcccagtcaactcttccttgtggacttacgacagcagattttctctaggataagcttgtgtggttctgccagtgaagcagagaaccacctgtgctgttgtggagggcgtgccattgagggggaaaacgaagcccagtatttgctactgtttttcctttttttactatgacaggaaaataaatgcaattttagtggaaaaaaaaaaaaaaaaa

SEQ ID NO: 201946 - DNA, 1000 bp, Homo Sapiens
aaccatcccttcctctggtccatggaaaaaccgtctcccatgattctggtccctggtgccaacaaggctggagaactgctgtagtttacaggccctgcccactgaagccttcctcatggagtttcccatctctgttatgcacactgccatccgctgtgtcaggcaagctcaagtctgaagtcatgattttctcttctccatcctatggctcccacctgcaggcagccctcacatcctctcagccctcactacaattcctattccatctcaccttcccccctgcttctatttccaatgccatcccccaacccaagaccctccctctctcctggatgctaaccccatgccgtcctataatttcctatcatgtgcaaggaacacccaagcatttttattaagcaggctaagatgctcaaactccacgattaaaatgctcagtggaagaaggagcaactataattttttaagaagtaatgattagcacagaaaatacgtttggtctcaaatattcccaccaaaatatacctccatggcaatcggggaaagggagagggtggtaaatgtcaacccatgagaaaggaagggtctggaggcacaaatcaaaggggacctaagtaggcaggaagtatcactgaaaaccttcaaaatcttgcattatacaacagcattaatttggccatttaaaatgtaaaaatgggccaggcgcagtgactcacgcctgcaatcccagcactttgggagggtgaggtgggcagatcacttgaggtcaggagttcgagaccagcctggccaacatggtgaaactccatctctactaataatacaaaaattagctggtgtggtgctgtgcacctgtaatcccagctactcaggaggctgaagtaggaggggatagtttgaatcctggaggtggaggttgccatgagctgagatcatgccactacactgcatcaagcctgggtgacagagccagacgttggtctaaaaaaaaaaaaaaaaa

SEQ ID NO: 201947 - DNA, 1000 bp, Homo Sapiens
atccctctgaactagtctatcaaaccttctcctaaagagggtgagaacagattttgtcaggccagagaggaagaaagagatccagaatggggacgatcaatagcatgaaaatagagaagggcattgaaaagagcccagccttcagaacactccagtcctggcgctggagaactgcaccttaccttttactcctacctggttttccttttagaattcccccaggcatctatgctggagacagtagtgtctttgtctgttgttcccatccctgccttgctcctgccatttccaacgtcctgtgagtatatcttcacaggactcccccttccttttcacagtggccaccctagtttggatgtgcattgtcttacactgggaacattataagcgtttcttaagtggtcttcactcttatcccccggtaattcacagaaatagcatcagcgcaatcatcttctagtaacacggctttgcatctgtcactcttcctcaaaaactctcagttcctactgggaacagtctaaagaccaaaatgcattacggtctaaattaaaccaattactggttgcatttatccaactctattttccagtagtccttctcaaataaattccgtgagggcagcctacatgccttgttcctgctattagctcctagcacagtgcttgtacacagtggattttcactaaatattgattgaatgaacgaatgaacttattctcaggtttatgttttatagtctgcctagaatacactccttggtcaggccatttcctgtgactagatttcccttcccttttttcctgttcatctgaatccttaaaaaaccaagtaaggccgggcgtggtgttggacgcctgtagtcccagctactctggaggctgaggctggagaatggcgtgaacctgggaggcggagcttgcattgagccgagatcgcgccactgcacgccagcctgggtgacagagcgagactccgtctcaaaaaaaaaaaaaaaaaa

SEQ ID NO: 201948 - DNA, 1000 bp, Homo Sapiens
ttccatagtaacaaggcaatatgaggccatctttttaaaattccataggagaatttaagtaaattgctagatccttccagttttttctgtgtgaatgatttatcccagcttctaggaatatgtgcaatattattccacagagcacatctttcagaatcttgtttcagattattgttacttaaatagtccatttctcctgaacagcccttcaggtaagagacattcaatactcattagaatctctactctcatgatgcattgtatgatctgagaaccaacttacatggtacaagtatagacacataacatcaaagaagatacacaatggccaagattctggtttcattagttaccagggaaatataaattaaaccacaataagattccattacacacccagtaaaatggctgataatgccaagcaccgatgaggaagtgaaggaactggaactctcatacgtggttagtggaaatgaaaaatgatgcagccactttggaaaatgggatggcagcatttgataaagttaaacacacacttagcacacaacacggcaattgcactctcaggtatttcccgaagtcaaaatataaaacgtgtctacctacacaaagacttgtagtcaaatgttcatagaagctttatccataatagccaaaaactggaaagaacccaaatgcccatcacttggtgaactgataacaagtagtaccgcttatcttcagggaatacattccaagactcccagtggatgcctgaaaccagacagtaccaaatcctgtatatactgggttttttttttttctatacacacatacctctgataaagtttagtttataggccggggacggtggctcaaacctgtaatcccagcactttggaggctgaggcaggagaatggcatgaacccaggaggcggagcttgcagtgagccgagatcacgccactgcactccagcctcgcgacaaagcgagactccgtctcaaaaaaaaaaaaaaaaa

SEQ ID NO: 201949 - DNA, 1000 bp, Homo Sapiens
ggaactcaatcgtgcttggcactcggcacagagcttggcacagtaagcctctctgtaaatacacgctggactgaagatcaaggtgaaccatggcattttacaaaaggctgtggcttagttactgtggttgtctggaatgccagcaaccacattccacacatggttgaatgaaatgcctttcaattcacaaaaacctaatgtaaagacaacttttcaaggaacatcttcactatgcaaggctgttatatccaaaaaggaaaactgttaacaaccagcatctaagggcttctctccccaactctctgttgggatcccaccccatggatgtttctgatcctaccatatgccaactgctccctctttcgggagacctggacagggtgaaaagtctacatacacatctaggcagcaaacttcacagcagacaaacaggagtcaaaggggcaacctcagtgtaaatcaaagtcctctggtggaacaaagggtcccacggctccccccagcccactgggccctagtccatggccccagctgtagcccttaccagctctcctccaggatgttcatggacgagagcagcaagaccgaatccagcctggagttggtctccaccttccacctcttctgttgaacctataagccaagttccacacctggacacatgctccatgttcatgtgtcatatcataaataaccagtaaggccagatgtggtggctcacgcctgtaatcccagcactttgggaggccgaagctggtggatcacttgaggtcaggagtttgagaccagcctgaccaatataatgaaaccccatctctactaaaaatacaaaaattagctgggcgtggtggcgggtgcctgtaatcccagctacttgggaggctgaggcaggagaatcgcttgaacctgggaggtggaggttgcagtgagccaagatcatgccactgcactccagcctgggcgacagagcgagactccatctcaaaaaaaaaaaaaaaaa

SEQ ID NO: 201950 - DNA, 1000 bp, Homo Sapiens
tcgcttccttggatgagagtggggttctcaatgtatgggtgagtagtggcccaggccgggcacatgcggggcctgagtgaggtggtctgggtggaggtggcgcctgaatggcgcagggggcgggacccagttagctgtggtgggaaacggagagcaagactgggcttcttggtcctgagcagaagggatgcagaaggccacacatggcaggtttggggccctttcgtgacagtgaaatagggactctcacacagggctttgggaacgcggaatgaaagtgagaagggaacaaaatgttagggctgaggtgatgctggattggcttgtcctggaggatgcgccaagactgttgattaagtcaccaagtgaagagaacacgaggagatcaaagcaaaggagtcaacttgtagagtgttagttctgaggctaaagatcagtctctttttctggagcagttatgttttagtacctaaatagcactccatcttaattagagctatgctttgcttaggttgtttcataattataaaatgtatcaatattcattttcaatattctgtttttaggtggttgttgaattaccaaaggcagacatcgcaggttcaataagtgatttaggtaactattaagtaaaaaaattaattttagtgttttctaaaatgaatcgagattaaaagtactgataactgcggtcaggtgcagtggctcacacctgctgggagcctcagcacgttgggaggctgaggaaggaggattgcttgagcccaggagttccagaccagcctggacaacatagcaagaccccgtctctacaaaaaaattcaaaaattggctgggcgtggtggcacacacctgtagtcccaactgcttgggaggctaaggtgagaggattgcttgagcctaggagtttgaggctgcagtgagccgtgatcatgccactacactccagcctgggtgatggaatgagaccttgtctctctgttaaaaaaaaaaaaaaaaa

SEQ ID NO: 201951 - DNA, 1000 bp, Homo Sapiens
ttgtttgcataacttctggagagtctgtgtcctcctcatctaggccacctttccactttttgtgaaagatgaccttgtccctgcagtctccgccaggagtcacacagcttttcacagcagctgccatctttaattctttttcctgagattccagcaaggttgtgacattgtcacttttttgttctagactcttttaaattttctgcatttgcctgaaaagcacccctgtaagaatagatttctcatggctctaaaaattattcccaagaataccttacttggttcaaaagcagactgtttctcttcatttcatctcaaatcagacttctgggcaagatgttctttagagtaagcaaacctacaacctaaaaatctcttcaagaggcatctctggtcttgtgacgagacctcttcaaagacccacagtaaaactcccctccctccagttggccaccagtctgccaccaaacatgaacaaattctgctgctaatcggtttcccttgtgatctggttcctgaggtcttcggatctgtgcaatgaattatttattgttttattaaaccgacagtggtgtcccagagaggaaccataaataaaatggaaatctggtgctgtgataaagtaataactagcattaatgagacctggttttcctttcagaaagtccagtatacctgtaacaaaggttaaagcaatttatatttaatttgcattctgatgttaacatttaaacagcaattctaacaaaaatgcatcgagtctaattcttacctctatcaaaaaacaactgtataaatttatgaccaacattaaaacaaaaacaaaatgtaaattttctctttagaaatgattaactggaaatgagtgagacagcaccttgtgggttttttagtaataaaaagctcttttcaaccaaaaaaaaaaaaaaaaaaaaaaaaaaaaaaaaaaaaaaaaaaaaaaaaaaaaaaaaaaaaaaaaaaaaaaaaaaaaaaaaaaaaa

SEQ ID NO: 201952 - DNA, 1000 bp, Homo Sapiens
cttgggcaggtggcacgggagaagaatacgataagaggaggatggtacagacagaggagtcacaggctgaacaggctgtcaccggggcaagatgactgacaggtggatggaattcaccatcctttcctttcaatcaaaaaaaaggtagaaagttgctcataagtaagtttgagttatatcatcttcttcatagccgttgctcttcagacacaggtgctggtaatcaggaaaatgcaaggaaacagctctggggaaaaggaacaagcctcgttggccttgagagccccagtagaccatcaggccttgctttggatattgggaggtgacagtgccttctcacgtgcctgacagtttccctgcaccaccaagactctgtgtgactgaggccgtggcccgggtttcaggatgggcattcagaggaaggaagttccccctccttcacttacctcacgcttactagatgctgggttgcctatgcccatgttaaaggaagccagataactttctgtccccatgtgatccaggcccatcctgaagcctgggggttctgaacataagtatggcggttgcagccttccttctgtgacttctggaattcctgacagagagggtcatatctagccactgtcaaccggatgctagacttgttttgttaggcccttcctccttcccttcctctacttatcttccaataaccttaggatttggaggaaattaaaataaaccttcttctagaaaggtgtcagggacccatgcacaaatgtagcctttttgatgcttgagaaagaatgcctttttgacttccgtgaataaagaataagtcacggctaatgagtaagtaacagcatgtgcctgtggtcccagttattcaggaggctgaggcaggaggattgcttgatcccatgagttcaaggctgcagtgagccatgattgtgccactgcactccagcctgaacaacagagcaagaccccatctcttaaaaaaaaaaaaaaaaaaaaa

SEQ ID NO: 201953 - DNA, 1000 bp, Homo Sapiens
agccataagttgacctatcacttgagaacctcctcagcaaagatgccagaaaacattcaatcaagttggcgaatgacacagggagctggccctctgaccatcttcctggcaaacctggactggaagggccatttgcagcactgtcctggagctaatacactgtttcactgcctctgccatataatgatgccagcactagccagctggtgggtatttggaggaatcctgcatgaggattgcccaataaggggcaggtacacatacctggcaaagtgatgatgatgtgaattgtttccagtgaggggattgagtcaaaacttggatctcaggtacctcaatttttcccccaatttctggctactactaaaagccagaaagaacagaacagtggcctcaggagatctgagtttgaatccttgctctctaggatgcaggtggcttgaagcagaatgccacacctgcaagttgattagaactgcctttcttcccaggcttgacataggtattaagtcaaaattacatgaaacccagtggtaaaaaagcctctgaaagctgtaacaccctcagtaataacaaaagggatttttatttcacagctaaagggaaaataggtggagaagttaaaaaataatgtctgatcctgttcctaagttccaaactatagccaacactctgatgctgctctttttcttgtaggaccaaccgtcccagtttgcctgggactttctcatttttacagagtcccaaatcctaggaaactggagcaactggtacaactggtcacctactcttgcccctctgtaaatcaagccaactgtgaccatccaatgtgccatcttacagggaaaagttataaccactattcccctataacataatgctaatgattgtacttagtacatttttatacttttatgatattttactgattggaaatgtcatcctttattaaaaataaacatggttttccatagttgcctgccaaaaaaaaaaaaaaaaa

SEQ ID NO: 201954 - DNA, 1000 bp, Homo Sapiens
atcgacttttatccatgtgccaaaaattagattggctggttcctctcttctactccataccaggtcaggtatcataataaggactcagagtggtccaagctgcccaaatatctgtgtcttccactctgacctgtctgggaaccccaaatttatatccaactgcttacttgacaactgcagttggtagcctatcaggcgtctcaaatttgacctagccaaagcagaagtcctcattttccccgtaaatctcctccccagttttccctgtctgaatcaatggcataagcagctacaccattgctcaaatcagaaccttatgagtcctactgaaaccagccaaagagtcctatagacagttgtttttgtttttgtttttgtttttgtttttgagacagagtttggctcttattgccctcactggagtgcagtggcgcgatctcggctcactgcgacctccacctcctgagttcgggtgattctcctgccgcagcctcccaagtagctggaattacaggcacgccaccatgcccagctaagttttgtgtttttagtagatacagggtttcatcatgttggccaggctggtcttgaactcccaacttcaggtgacctgcctgcctcagcctcccaaagtgctgggattatagaagttgacccttttgcagttaaagctggaaacttacttgttttatccgagttccttcctcaggaaaggaccttcaggcctctcacaaaaagtatcaaagaactgaagccataaaaagtatcaaaagaactgaaaccagatcactgcactagatgctgggcccctcagtcaccatgattgcttccttgcccctcccatgttcctgttttcttacatattgttacatttctttcctgctatataaacccttggttttggtcagtcaaggagatggatttgagactgcactcccatctccttggctgcagcacctgattaaagccttcttcctggcaaaaaaaaaaaaaaaaaaaa

SEQ ID NO: 201955 - DNA, 1000 bp, Homo Sapiens
gaagtcttttgcttagttagatcttctttaatttctttcagcaacgttttgtagttttcagcatacaagtcttgcactactgcggttaaatttattcataagtattctattttttgatgctattgtaaactgaattgttttcatagttacctttttgggttgttcactgctagtgtatagaaatgcaactgatttttgtgtggtgagcttgtatcttgcaactttgctaaaatttgtctattagctttaacaattatttcatggattttttaggattttttgtgattaacatgtcatgtgtaaacagagatagtcttacttcttcctttgccatctggatgccttttatttttcttgcccaattcttctggctagaatttccagtacaatgttgaacagaagtggcaacagtagacatcatttatcttgttcctgctactgggaggaaagttttctctttcaccactgagtatgatgttgctgtgggttttttatagattccttttataagactgaagttctcttattttcctacatgttgagcatttttctcatgaaagggtataagattttgtcactttttgtgcgtgtctactgagcttttttccccttcattctactaaaatggtacattacattgatcttcgtatgctgaaacacctttgcattcttggaataaatcctgcttggtcatggtatataattcttttaaaaaaatgctgctggattttgttggctagtatttttgctgaagaatttttatctatattccgaagagatcttggcctctacttttcttatgaaatatgtgtctgactttggtatcagggtaatgcttacctcatagaatatttattcttttaatttttgggagagtgtgaggattcacattaattcttctttagttgtttgatagaatcaccagtgaagccactgtgctcctggaaaaaaaaaaaaaaaaaaaaaaaaaaaaaaaaaaaaaaaaaaaaaaaaaaaaaaa

SEQ ID NO: 201956 - DNA, 1000 bp, Homo Sapiens
atagagtcacgcatcacttaatgacagagatatgttctgagaaatgcatcgttaggtgatattgtcattgtgtaaacatcatgttgtttacttccacaaacctagatggtatagcctaccagtacacctaggctatatggtatagtctgttgctcctaggctacaaacccgtatagcatgttactgtcctgcatgctatagacagttggaacatgtagacttgtataaacactgcacacttaacctatactaaatttattgaaaatatttttcttggccaggcgtagtggctcatgcctgtaatcctaacacttcgggaggcctaggcgggcaggttgtctgagctcaggagtttagagaccagcccgggcaacatggcaaaaccccatctctactaaaaaaaataccaaaaaaagttagccgggtgtggtggcatagtcccggctactcaggagtctgaggcaggagaatagcttgaacctgtgaggcggaggttgcagtaagccgagatcgcgctactgcactccagcctggacaacagagcaagaccctgtctcaaaaaaaaaaaaaatcagtaaaaaatatgccgaaatagcttcagagtaattatgaattgccttccaaaaaccactgttttgcacttgcctgcaagaataggaaaaacaaaaggactgtaaggtggcaggatggcagaaccaaacaagagtagtacaccttggagttttttcgaaatatgggttgggtttttgggctcttggttgatttaaaataaaatttaaatgccttcagcgtctgtgataggtgccaacatgaagctaccgagttccagagaaagaggggagagctgatcactcatcagtgctgcgagactatcaaagggcccttcaggacctatctgttctttgtgtgtaaagagtaacaataaaagaacaccagtgtacccaccgtatagtttaaaaaaaaaaaaaaaaaaaaaaaaaaaaaaaaaaaaaaaaaaaaa

SEQ ID NO: 201957 - DNA, 1000 bp, Homo Sapiens
ccccatgctaattctagaatacgtggctatgtcaccttacatgataatccagagactttgcaaatgggattgagtgaagggtctggagatggtcctggattttccagggagccctaatggtaaccacaaggtccttataggaggaaggcaggagggtcagagtcagaaaaggagcagtgaagacgaagcggggtcagggtgattcaaggaaggggctgcgagccaaggggtgtaggcgcctctagaagctggacaaggcaagggaacgggttctttccgggagcctctagaggcagccagccctgcccacaccaagaacgtaagaggatcgacacgtattgttttaaacccctacacctgcgttaatgtgttaggctggactggctccagcctctcccctctagcctctcagcaacctccacagttaggccctcctggagacccctcctggctgcctcaggccatctcctgtacatccctcctcctcccctcacccagcttgttctttctccccacccccatcttccttatttttcttcttttctttgcaacctcaaaacataaaccctcaagctcatttccgcagcctgatgtgcagtcttcctctctgtcttgtgtctctcctctcacccatgcctccgtgggggacagaaggctacaccgtgtggctctggcagcccctcactccacacagtgtaggcatgcgctgttctatcacacatggacactaagagatcttgtcaagtagacagagactaagaggacctatgtgttcatgacactttttaaaggtctgagctgcccattcagctttgcatgaaaatggagattgggagttttgaccaccccatgtctgtggcttgttgtgagtgtctgctgtgaagtggcactgcctcttcacaatatcgttggaattccatttggccaggtgacaagaaagtattcacaagcctaaggaggaacttatctgctccttcctgaggaaatatgtgcccccacc

SEQ ID NO: 201958 - DNA, 1000 bp, Homo Sapiens
cctcagcctcccaaagtgctgggattacaggcgtgagccactgcgcctggcctagttacatctttttagtcttgattcagagttgtggctattcaggcatctaatctgaagaaaaaatatttgagctcagcatcgtctaatcataatagttttttttaaatttgctaattattttatttaaagtatatttaagttaaaaagcattaagttcaaacgtgcatgcttatattttaaactgttttccattcatgacatgccaaacttttcctccccagctaactttgcctttctcattaacagaattatgttttaatggttttcattgtcacttgatgctgtggccaaggaattgaaacttactttaaatgataattaagtcaaatacaaatacgttttgaattgttatactgctttttattaccacaggcactctagagctgagtttatgttgtgctcagtaggctagtctctttttctctactaagttaatgaatggtggcctggacttcagatggctagacagttatgtgcagtatctggagggtgtgatgaagcccagaaatattcccagtccttgaatttcgctagttggtaaaatgcgagctccgtttacccttgctaaggctgcctctgcagggtctctccctttataccttcatacccagtcccccaccaagatgaatgctggctggggagcagggctgcctccaggtgaaggtgtcaccagctctggtggctttggactccaggagccacaattgtgtgtaggcactaggcttctgttgggtgtttggatggtgcatttatatttacccacggtaaatataaatttacctttataaatttggtcaagcttcatgccttgcaaaataattggggtgactatatgaggacagaatactatatagtgagccattcaagtgccacttaagtgcagatgtttaagaagatacataaagtgatgaaaatgaatttaacttgaagaaaaaaaaaaaaaaaa

SEQ ID NO: 201959 - DNA, 1000 bp, Homo Sapiens
gtgtggaacatggcgatgcccctcggggaacgtatcactgggggtttcctcctgccagagctccagcccctggcaggctccctgcggcgggatgtggttgaagggaacttctacagtgctacgctggccggggaccactgctttgatgtcctagacctccactttcacttccggcatgcagtacagcaccgtcatcgggatggtgtccactgggaccagcatgcacaccgccacctctcacacctgcttctgacccatgtggctgacgcctggggcgtggagctgcccaagcgtggctatccccctgacccgtggattgaggactgggcagagatgaatcatccattccagggaagccataggcagaccccagacttcggggagcacctggccttgctcccacccccaccttcttctttgcctcctcccatgccttttccctacccgcttcctcagccctcgccacctcccctcttcccacccctgccccaggataccccttttttcccaggccagcccttcccaccccatgaattcttcaactataatccagtggaggacttctcgatgccaccccacttaggatgtggccctggagtgaactttgtgcctggccctctgccacctccaatccctggccctaatccccatggtcagcactggggcccagtggtccaccgggggatgccacgctatgttcctaacagcccctaccatgtgcggagaatgggggggccctgcaggcagcggctcaaacactcagagagactgatccacacatacaaactggacagacggcctcctgcccattcggggacatggcctgggtagactggatcttgggctgggactggatgtgccaatggcccttcagggcctgcctggcacctcaggtactgggctagggtgtctgctatgcctggtattgttcttgtccattgctgtcaccaataaaggcatggaagaacaaaaaaaaaaaaaaaaaaaaaaaaaaaaaaaa

SEQ ID NO: 201960 - DNA, 1000 bp, Homo Sapiens
aaatcagggtagagcttttcctttgagcagtttaatgagtgaattcagcagcaaagtcgcaagaaatggttctccagccaggagaggttatgtttatcctctgattgcccgttttctctgcacacagtgatatcgtattcagtgagaggtgctgttggcacccagcagcaccctgggcacacagcatttcatgtcatgtcacagtgtacaagctaccctctaattcagaaagaagagcattttgcacagagaaaaataaaaagatccatgaatgtcatcttttatcttttattttcagttggctgatgttggaatttttgttcttgtcatgaacttgtaaaccaatcttgccaagatacaagttgttttggtttttcactacaatgacctcttgttcctcctgtcttgactgctgacgttcctcaatgattctattgtctattttatgggaagcagccttcccataggtttccttttacacactgcagggctatctttatactttaaaaaaaaaaaaaaaaaaaaaaaggacaagaactgtcactaacctcatggaggggtttgcgtaaaaccatttagcccaccttgagcaaagggtagattccgtgttgtttttttaagctcactgtaataaaatagatctaattcagcattattgtgctacctcaaaggtaaaaaatgttttaaggtcttcttttggtcctgagttctatatacagtgtttgaaatgtctttcatttggaattattttttaaattcttggagtgaattttattttaatctgttttaatcttgtattttaatctcagaagaataagtgattgaaacgtgatcaattcttgctctgtggtgttaaacatataatgaacagtcattaagaattaagtcactgtttgccataaacaaggttgatgttctttttgttgttgttaaggaaaccctagggctcggctttactcttgattaataaaggctgacaaatcaaaaaaaaaaaaaaaaa

SEQ ID NO: 201961 - DNA, 1000 bp, Homo Sapiens
tgaagtctcatatattagagctgtaactgaagtttttaagtgtctcaattctgcaactattcgtttttctatcacatcactgtttggcatatatatagcgggaaaaggaaaggctggaaattagttgaccacacactgattaagcttgaaacatatttctactggagaaaaaaaggtactgtaattttggcataggcatcacatattgctggagtggaaagacccatgcactcaggtcctgctttctataatctgtgacctcgggccagtcactccatttctcctgaactagatcactgatgatctgttgaaagaaaaaatatggctagtaatgccttaattatctcacagaggttttacatggagcaaaaagacaatgtatttttaaatgtactttgttgaaggtgtgtgttgtcgagacaatacagcagtgaagagaaggcatgcaaagctgtcttgttggagtctggctaaagagcaccaaagcagcctgttgtgggatgtcctctgggggccacctggacttgctatgttaacatggagggactaggcaggggtatgaagaaggaagcccagcagagcaggaggcagcagcaacaatgagagattggttatccatatgacttggatctgtgtccccacccaaatctcatgttgaattgtaatccccaatgttggaggtggggactggtgggaggtgactggatcatgggggtggatttcttatgaatggtttagtaccatccactttgtattgtccccgtggtaatgagtgagttcttaagaaatctggtcattgaaaaatatgtggcacctcctccctctctcttttgctcctgccccggctatatgatgcaatttgtcttcagccatgattgtaagtttcccgaggcctccccagaagctgagcagatgccagcatcatgcttcctgtacagcctgccttccatgagccaattaaacttctttcctttacaaattaaaaaaaaaaaaaaaaaaa

SEQ ID NO: 201962 - DNA, 1000 bp, Homo Sapiens
cagtcagcagcttcagagcaggcagtctccttggaaggcccgactctgttcctgcatggcctgcagtttctactttgtgcatagagtcattttcagagtcaccgcgaccctgttggccttctagaaagtttcttttgttcttttctgagacaaccacctaagtgataatacgcttttttggaaactaatatatattgccagactgcatcataacctttatcatgccaagcatcctgatgcaactcacatttccctaaacatggggtacagttatgatttataaattgagttggcttaaatctccctcttctcccttcccaagtgttacaaagatcatttactgcaactgtcgttggacactgtagcttaaagggaacgtggacctcaatgctttctgccttcaacttttcagcattgtgaccccagggtggttgccaccccatcttttcctgaccccccccacccccccacctccaagaggttcggcccacatcactgtacctggtgcttgtaaatttggaattggtgccttctccttttggcaaccatggttatcaatcctttttctgttttagtgtcttatttcttctttcaagttatttgctagccaaagatgacatcactgagattaggagacaggggagagcttgctgcagattctgacagtgcagattttaaatgtcaggatattagaatagctggcgctggtttatgaaagctgcgcgttgttccgcgttctctcggtgtgcctgaccttttatgtggcactctgtatgtcagtttgtgtccttcatgtgctgatgtgattacacaaacaccatgcactctcttttcatatcagagtacaggacagagaagtgatcaatgtattggtctagtgagactgagatgaaaagaaataacctacagagtggtctgtaatgccttttggttggactgggaacaagtaaaaatttctaataaacattttgagacttccagaaaaaaaaaaaaaaaaaaa

SEQ ID NO: 201963 - DNA, 1000 bp, Homo Sapiens
aaatcatggaacttttagaaataccatatctgtatctctattcctgcattttataaatctgtaaaggaagaaaactgaaaggaagaactagactgagtcttacctttctctgacctaagataaactgataaaactttttacttgatatttggagaagtcattaactggattctagttaatttcccatattgggcagtttagaggagacccagccaaccaaattatgatctagcaaatttaacataggggaagagggatagtaaactatttttcagtagatttgcactttaaacttaggaactggatgttggtggaaaggacttccatagggcagatgggtaaatatctagcctgcacttggatgttagagaatcaaacctcacccttgctcgttctaaacccacatgagtagttaactgtcttttgacataatcagagtcaggatttccctttttccctacttgagtcgtcttccatgtctgttacatccaagatcatccctctgggggatgtgtcaagtagttctcctactcagaatagaagctttgcgaattatcattcccacctctagattttaaatgaatgtagagttgtctaacattatatgggtgggaggctctttgcctctgtgatcagtagggtacctgcctctgaggtgctactgcctggagggatcactcccatcaaaagactggtgagttggaagctaagagcacatgcgcatagccagctcctctcccaggctggcagtcatgattacgagcatcattccagaatctttggcttctagaaccaactccattctgaagaacattttaacatctatgaataccttggtaataatcttttatacacaggagttttgtagcatgactttatgactaaacttattgtgaattaagttatttagaaatgttgagtttctgaatgttattttgtgatttgtttcaaaatagtaataaattgtgttattttgtaaaaaaaaaaaaaaaaaaaaaaa

SEQ ID NO: 201964 - DNA, 1000 bp, Homo Sapiens
tcctgctgtaaaactggtgggtagctgggctgtccattaccaccacagctacatcttctgtttctttgaatagaaagcaccacagtgttttgcacttgcctccagtaaagtgccctgggaagggagctgggcagtgtttgtggacgagagactgtaacgatggctaataaaagctgcgggtctaggttttttttttttttttgttttttttttccatttcatttaactgtgctttctccacttttcatcattttgtgtttgatgatttaaaagaagcttgactattcctcagctcttgtgccaaggagggtttttttttttttaagactcttaaactcaaaactctgcacaaagatttcagtttcaaatgtgtattatacatgggtagaaaagtgtttgcacaggcaacttttggaagtgtttaagaatcagggtgggggtggcgggagggaccgggtgggggcaatgcaaaattgtatttggaaactaggaaaaatagaattaggtcaggaaatggaagttgttccaatggtgtgagaactaggagacaagatgattcactttattatttaaaccaagcttcatttttagtttttgttgtttaaatggactggaaagttaagtttttgcagggattgttttgaaataaagagatatgctaactcacagatgaactttgttaagacccctttatttttatataaagtctaatatttgaaaagcgattgttataaagtaaaattctctcttcctattctaatatatatcatatatttcaggcttctatttgaaaacaggtataagagatgatatgatccaaccctatagataatgttttttgcttgattgacttatataatcactgtttcatgattactgcttttggaataataggaagttttgtgaaatgctggccttgtgtatatcttagaatgcaaatttaataaagtgtgtatacatgcataaaatttaaaaaaaaaaaaaaaaaaaaaaaaaaaaa

SEQ ID NO: 201965 - DNA, 1000 bp, Homo Sapiens
aacatcttttcagagcccttttactggccaatttagtcatcttcaagtttagtggggaaaacactccagaagtggcatctgtaagatctcagccagtccaaaagagccagagtccctgatcaatcacgtggcacccagatgaatcctggggactatgggagccaactcagagacatttcaattcacctttgatagctgctgccaggctgtgtctgctatacctgctgaatctaatccataaaggaataagctatcgactcaattttaggtgttggctggcatcgtgaccacttgttggcaattggagtatgacatgatgccatgaagactcaagctagtgtcgctcctctaccgtacctgccccaggcatcacgaccagttgattggtcacttctgacagagtgtgccgtctctgcccgctgcgtgtggactgaaatgcctcaaaggcatgagcggggtcttcctcggcctctccttctgtctccagcccttcgtcaatggaggtctccatcatgttgctgggcagtgactggcatcccttccgcaccaggacaggaggcacagggtcaagcagacagccattgacctaaacgccaggggagagaggaaactcagtttctgcactgctgagacagaaaaatccacaaaggaaaacatgtcaagacttgtggcgaactagaaattaagtaaaatatttaaacatgcacatatttattatgcatgacaacacatagattagaagtgaaggcaagtcaactgcaggactcagaactctgagacagaagcccatgatgacccaaactggcactgctgcccaggtttctctgagtcatcattattacaataaacaacttttttagtggtttccagaagaacaggggtatattagtttgaggactaccagttattatttttttttaaataagggaaatgaagagggggaagatgagttgtttttttttttaactacatggctcattgctaaaaaaaaaaaaaaaaa

SEQ ID NO: 201966 - DNA, 1000 bp, Homo Sapiens
aaaaggaagtaaatgagctgatggaagagctgtttgaaactgtgagtaatgatcctcgagtgagaacatgggattttaagtcagttctccagcaagatgtgtcatttggtctctgtgatgctccctctaggagagggggtctgactgaaccaattctccttttagtctacctgggaaagaatataatgacaagggaattttgctaactactagactcttgattatatacatgtatgttgttcttattaacattttccttgaaacttctttttgtttgagggggttcttgctccatcacccaagccagagtgcagtggtgaaattacagctcacagcagccttgaccttctaggctcaagcagtccttcgtctaagcctcctgagtagctgggacataccaacacacccagctaattattttatttgtagagacagggtcttaccacattgctcaggttgttctggaacttctgggctcaagcaattttcctgccttgggcctcccagtgctggaattataggtgtgagccagcatgcctggcccctggaaaacttttgatgacttcccctactgtcatttggtgtgtccttaaagattgtcaactagttttaaactactttgtgtacaaataattacctttttcataaatttgtttcaaaagatttttcattttaagagattgatcattttgaggctgggtgcagtggctcacgcttataatcccagcactttgggaggccacggcaggtggatcatctgaggtcaggagtttgagaccagcctggccaacatgatgaaaccctgtctctattaaaaatacaaaaattaggcatggtggcgggcacctgtagtcacggttactgcagaggctgaggcaggaaaattgcttgaacctgggaggcggaggttgcagtaagcccagattgtgccactgcactccagcctgggcaatagagcaagactgcaagactctgtctcaaaaaaaaaaaaaaaaaaaaa

SEQ ID NO: 201967 - DNA, 1000 bp, Homo Sapiens
gagacgggctgcagggatgaggggctagaactgacaggaagacaggacagagagcagcacagcctcagaagtgcaggacagaggtgacccaggcaggcatgacgggctgtggctgcctgccctctgctctcacagcacccctgatcccactcactgtggtcccacgcagatgggttggggcctgtaaatgtcaggtgggaccagccagaggagctttgctgccagtactggcatgtcaggatgggggtctggtggtcagcacctcctctggccagtggtcttgtggggagaggcatccatgtggcctcctcctctgtcgggagggctgatgtgcagagaagtacggacttggagggcagctggatgagctggggcttgctcagggacacaggtctgtgtgttgtgccaaggctgaccccctcatcccacaccagaccctgcctctgactctgtgacctcagcacctgacttctgtctctcaggtcatctcccagtcagtaaaacatttgtgtgacgtgaggaggggcactgaagtgggtgatctttaaggccagatgtctctgtaaaagccttgactatcggaagcactgggctagggcagtgtagtacccagggggatgaggtgcatcagagcagcacctgctgaggccaagaacggaggtggctgctgccggcctccgggaggtccccttagggaagcatttcttcaggggtggcccagggacctccggcatcagggcctgcatggggattctgtgccagcccagccctgctaagtcccagccttgggaacctgaggagggtatctgcctatttttcttttaaacatgtttcttaggttattcactaaagtttgagaaccactgctttgtggctttgaaatgttcatttgaatttttctatgattactaagatttttgcccttaaggctctgtatataaacaacatactgtataaaataaactgggaatggcgtgaaaacaaaaaaaaaaaaaaaaaa

SEQ ID NO: 201968 - DNA, 1000 bp, Homo Sapiens
aaatgcctacctccaagccctttcttcctccactgctcccacccagccaaagcagacaggcagctgctcccccagaaccacttcctacttcctcatcactgctgatacggttctccctttagggatgctcttcccctaagatctgcctctaagattccactcaagggagcctccttgataccccaggtggaaggggtcactccttgagcaccaagtccacccccatcacaggaccctctgtgtgaccttctagtattgtttatggttgtgacctcactgccctaagactgtctacttctgaccccacaagggctagcactgccctcagaaagctcagccactgtttgctgaatttaattaaaaatacatctctaataacctctttgtaaaatagcttggcagtttcataaaaagttaaacgtacatcttcttcacgagccagcagttgtactcctaggtatattcctacgggaaatgaaagcacatgtctgcataaaggttcatgtatgaatattcacagcagcattattcataacagccaaaacctggaagctgtcaagatacccatccactgacgaatgattcagcacactgtggtatagtcataaatggaatactactcagccatgaaaaggaacaaattcctgataaacaccacaacatgaatgaattgcaaaagcagtgctctgagtccaagaagctgggcagaaaggagttggtgccctgattccatttttctcaagttgtagaagaaacaaactaatctacggtaggagaaattcaaattcagattctccccatccccaccagttacctctggttggtggagagggggagaattggcaggaaaggggcacaaagaaactttttggggtgatggaaatattttgtaccttgctttagatgttggtcagatggaatatacgtttgtggaaacctgccaaactgtacattgaatatctgtgtgtttttaccacatacagttaaaactaaaaaaaaa

SEQ ID NO: 201969 - DNA, 1000 bp, Homo Sapiens
catcctcattgccctgctgttattacataggccctggttcaagtccttgttacttgttcccattattgcaataacttctaattccaatgccgttgtgtgatcccattttaaacacggccagagcagtcttccaacaacatagctctaatctagtttcatccccacttttacatgcttcagtggctttcccagtgacttggcatggaacacgtcctcagttgccatacattccagctaactcttacccaacctttctttgttcacacagtttccttttccttcctcattgacccatccgcatctctgtttatccaagacttctctgtgatagctgacccttagtctttctctcccctattcctccagactagatcctgtctccttcctgcagccccgacacagccttcagttcatatcttttgcatgatgcttagcaccttctatccctaaggacaacttactcgtttgagatttctggcagggtaccttgcatgcagtggacactcagtatttgctgaattaaattccttcctatggatcccttctgattttttttaagtgcctctaatacacatatcattctagggctcatgccacttttaatgtcattttctaaaggaaaatcttatctatgatattttcccttataagagatagttgttttgagtagggttttttaaaagataaaggtagtaggaaattttttaaagcctaaatatcaaattcctttccctttggagttgggggaaggaatgaagggggagcaacttgctctttcatatgagttggtcatagcatgtaagaaccaatcttgaaatatcgttttttttttaatggcttataatgtatttctagaaatactttgtacttaaaatgataacagtttgtatctttttgtccatataaagatactttataaataaaaaaattagcattgtaaataatgttaatatgtatttatacaaaataaatttactataataaaaaaaaaaaaaaaaaa

SEQ ID NO: 201970 - DNA, 1000 bp, Homo Sapiens
aggaagaaggccaacctgcaggatctcgagcataatggatacaagggctcgccacgggccttgcctgagccatgtgcagagctggggtccagcggtctgcttccttggagccagtgtggatggttacagcccatccatttggtgcagttgtacttggtctgttatattcaatcaaggtttaatagatagggctgggcatggtggctcatgcacacctgtaatcccaaagtgctgggattacaggcgtgagccaccgcgcccggcctaggtcatttgtttttgggtttggatggcaagatcatggataagacagcaggctttgattatagagctctgagttcaaatcctggctctaccacttgtcagtggtgtaacttggaggaagatgcttagcctgagcctgttttatgttttgaagattgggtaattgtccttccttcagtgttcctgggtgaggagtaagtgaagtcatgtctataagagatgtagcacagtctccggcatgtagaaatggtcagtaactcctagtgtgtagctagcctctgatgagatggtaaactcaggaggctggcaccacggctgtgctactcacggtcatgctggagggatgcagaaactaaatgaatccacagctacttactcatcttgcctctggcaggttcaccttaaaattgttgctaccaagcttcctgtggtcaaagagcccttgaggaagcaagctccacggccaccatagataacccattcctgaaagtttttcataaacccccacttgttgcttttaaaattttataagcagcttacacatgtagaaaatgatcctccagcccaccaccacatagtaatcactgacactgtgaggtgtctcagctggggttctgctgtgtgtgtgtgtattttacaaaatatgtatggtttctgttcagctcttttcagttaacagatgaacttttgtatcattaaatatttttgaaaacatgaaaaaaaaaaaaaaaaaaaa

SEQ ID NO: 201971 - DNA, 1000 bp, Homo Sapiens
ggtagaaatggaaaccacgctgggttgagaagtgagtggatgtgaaaatatggggcctctgaatggaggtaacccttgaaaaattccactgtggagaagaaaggagagagagagggctggaatttggaatgaaaggagatatttgggattattttagtaagaaaacagaggtgtcatgacctcagtgtaaccctattagctgcaaaaaattcttcatgggcttgagatggagttagccatattcattattgaaaactatgttctgcacttatacattgttggttggagtgtaaattagttcaaccgctgtggaagacagggtgggtgtttcctcaaaaacctaaagacagaaataccatttgacccagcaatcccataactgggtatgtacccaaaggaatataaattgttctactataaaaacacatgcacacacatgttcactgcaacactatttacaatagcaaagacactggatcagtctaaatgcccatcattgatagaatggataaagaaaatgtggtagaggtacaccatggaatactatgcagccataaaaaagaatgagatcatgtccttttgcaggaacttggatacagctggaggccattatccttagcaaactaatgcagcaacagaaaaccaaataccacatgttctcatttataggtaggagttaaatgatgagaacacatggacatgtagaagggaacaaaatacactgggggctattggagggtgaagggtgaaaggaggaagaggatcaggaaaaataatgagtaccaggcttaatacatgggcgatgaaataatctgtatgacaagcctctctgacacagtttacctatgtaacaaacctgcacagttacccctgaactttaaaaaaaactatgttctatcaaaacctgcctctcatttatgtattaggaatcttgtgacaacggaacagttgaaaaattaaaataaaaattgcctgaaaatgcaaaaaaaaaaaaaaaaaa

SEQ ID NO: 201972 - DNA, 1000 bp, Homo Sapiens
gtggtctgaatgtgtcctccaaaattcaaatgtggaaatgtatttgccagtgagatagtatgtagaggtggggccttgaggaagtgattaagtcatgagggctctgggattaatgacttaaaaagaggtgtgaggcagctgttcagcccttctgtctcctgtcccttttttttttttttttttgagatggagtcttgctctgttgccccaggctggagtgcagtggcgtgatcttggttcactgcaagctccacctcccgggttcacgccattctcctgcctcagcctcccgagtagctgggactacaggtgcccgccaccaccacgcccggctaattttttatatttttagtagagatggggtttcaccgtgttagccaggatggtcttgatctcctgacctcatgatctgcctgcctcggcctcccaaagtgctgggattataggtgtgagccaccatgcccagccccttctgtcccttctaacgtgaggacccagcaacaaggtaccatcttgaaagcagcaactggggactcagcagacaccaaaccaactggtgcttaaccgtgacttcccagcctccagagctgtaagaaaataaatttctattatttatagattacccagttgaagatactttgttaaggcagtacaaatggactaagacaagggggaagaaatttgcattcctgatcttcccaacttcttcaaattcacaacacttgaatgacagtcttatttcagcacttactgctatcacctattacttttatgtgtgtcttacctatttgagatgccagattccttggaagtagagaccgtgtctgaatcatcattgtattaaaccgctcatccttaacaaatgcccaagccatggttaaagttcaataaatactttgttgaatttattaataaaatggcagaaatgtcattctcttccatatatgtttaataaatccctgataggtgctaagcactgcaaaaaaaaaaaaaaaaaaaa

SEQ ID NO: 201973 - DNA, 1000 bp, Homo Sapiens
atcttttgccggagtgtctctgagacccctggaggccccagctggtgagtttatccaccaggcttaggaggcctgtgggctccaccctctccgtccctggaggcttctccagctaccgggtggagagatgtaggcggcatctgtggggagcatcgggcagcatggggtcctgccgaggcacttgtctgctgagggcattctgagaaagcccctctgccccgagccctagcctggcgaatgagctgtcggccccaccatggagccctgggtggcacaggcccatgaaccggcctcttccccagctgagcgacctcctttggtcactggctctctgcctggagagtgagtggccgggccatgtgctccaagcagaggggcctcagcagggctccctgagcccagagagatgggataggtgggccttttggggccttgcccatcagaatccccaggccgggggactgctggtgagtgcagctgcggcagctttaggggactcagtcctggggttttgtccccacttcacagccaccacccaagagtggcgtggcaggcaggaaccacagcctcatagagggggcaggaccctctcacagccttgcctggcagcagctgcagggagccaggtgtcacccatgtaatgtcaggtacttggcctggttgctctttcccgtggaggttcgcagacaaccttgcaaacgtgattttgatggcttctcaccctggagagtgctcatgttatgcttaaaatttagtgcctaattcggatcacgaggtcaggagatggagaccatcctggctaacacggtgaaaccccgtctctactaaaaatacaaaaagttagccgggcgtggtggcgggcgcctgtaatcccagctactcgggaggctgaggcaggagaatggcatgaacccgggaggcggagcttgcagtgagccgagatcgcaccactgcactccagcctgggcgacataacaagactccgtctcaaaacaaaagc

SEQ ID NO: 201974 - DNA, 1000 bp, Homo Sapiens
ggttggataggcatgcataccatggtttggttatagaataaaataaaagtcggctgtttacttgtaggaggataatgatagtcaaattacaatgcaacacaaaacagttatttttccttaaaaataaattaaaagagcttttgtgagaacatctgtttcttctgagaacttaaagttttcctcctacatatatgaagtcctagcttcattcatgcctatagtgaaagaaaggagtcatagttttcttgtagctaaggaaagaatagtaaattgagagtcaattggtcttattcagagactcttcctagtttttagcttaaaatcactcagatttatgacaattcagactctgtaattgttagatgttattagtattatgacattttaaagtatttccctgaagaaaattcacaatacaacacacatcttatttttgctattagccattttgcacacagaaagtcaacatagaatacaaatgttaatcattaattattttaaattatcctagccaacataacagaaaataattgcctttctagtttttttaaaaacctaagtgatgtctgtaacttcctttgtaatatatccaaaaattacgttattaggtggatagatatctgataaagcaaatacggcaaaatattagttatagaaactagatggtgggcatgtgaatgttcattgttcaatttgttcaacttttctgtatgtctggaaattattgtagtaaaatgtttggggggtggtgaggagaaaaataactttgctatggaagtaacatagtacctctgttatatggcttttccttaaactctgccatcttttacaaactagaggtttaaacctttgcttcctaattggaaaaggattaagaaaatgctgggtatggtaactcatgcctgtaatcctaacactttgggaagctgaggtaaaaaaattgcttgaggccaggagtttgagaccagtctgggaaacaaagcaagactctcttctctac

SEQ ID NO: 201975 - DNA, 1000 bp, Homo Sapiens
aaggccaggaggtggggttgcttcggcagaagctggacagcctagagaaatgtaatctagtaatgactcagaactatgaggggcagctacagaccctaaaagctcaattttctaagctaaccagtaacttcgaaaagctgagattacaccaaatgaagcaaaaccaaattcaccgaaaggagtcctccagcaaagaagaactgccctttgagctgagcagtctgaaccagaaactagaggagttccgagcaaagtcgagggagtgggacaagcaggaggtcctctaccagacccacctggtgtccctggatgctcagcagaagttgctctctgaaaagtgcagccagtttcagaaacaggcacaaaattaccaaactcagctaaacgggaaaaagcagtgcgcagaggacagcagctctgagatccctcgcctggtgtgtgagtcggatcctggctgtgaagccactcaaagagatgagttcattatcgagaagttaaagtcggccgtgagtgaaatcgcgctgagcaggaacaagttacaagatgaaaaccagaagctcctgcaggaactgaagatgtaccagaggcagtgccaggccatggaagaggactgtcagaggtgaagagtgagttacagtcgcgagacgatctcctgaggattatagaaatggaaagactgcacttgcatagagaactgctgagaatgggtgaagtgcagactgctcaagataacaggaaaagagttgagtcatcatattccccttctcctaaagaagcagaaaggaaaaggaaggagttgtttccaatggtctcagatcaacccaatcatgaaaaggaattaagcaagatgagaagccagctctatcaggaggaaggcctatgctccgagcaggaacggttgaggagtgagatctcggaactcacccaggaacttcaccagaaggaggtcactatagcaactgtcatgaagaaagctgcccttctggaaagacagctaaag

SEQ ID NO: 201976 - DNA, 1000 bp, Homo Sapiens
acacacttgcagcgagaacccgtattccagcatcttccatctgtaagggtggttgtcttctaccaggagccacagagtcctgcacagggccgggatccctgccctctgggagttgatgctcttggggtgggaggacacagatgcttcaggatcccttagtgcttcaggattctagagtctcagaatttccaagccaaggcttggagtgcctcagctgatgtcacagtggaggttctagcagagtgggtagcacatatgtgtcatgtccctctggtctggaaggcgtgtagtgtctgagccccactgctgtcccctgcttaccacccaacactgagaaaatcaaactgggccacgtgcccacttgctgccttccttgcagctgagtccctaggcaaggaggccctggatgggggtggccgtgtcaccaaatatccgcttccctggtgataggaggtctgtgggccccactcatctcctgtgtgcttcccccagctaaccaggagatgcttcagaaggtcgaagttgagtatgaaacgctgcctgggtggaaagcagacaccacaggcgccaggaggtgggaggacctgcccccacaggcccagaactacatccgctttgtggagaatcacgtgggagtcgcagtcaaatgggttggtgttggcaagtcaagagagtcgatgatccagctgttttagtcacagactgagctgatcccaacaggccctggcagcgtctggacttgtgtaaacagcagcagtcacgttcctcggccgccacaaccaacaccaaagcaggaaaaccattttctgtacttttatatttctgttcaacctgttggtttctacaatgattttaaacattggaaagccagccttgtgtatatttttaaaaattatattcaaaatgagccaaagtgctcagagaccttctatgacacattagtgtcacatggttgcgtgtccagccgaagcagtgtaataaacatctccaatggccactg

SEQ ID NO: 201977 - DNA, 1000 bp, Homo Sapiens
aacaatgaagctactgagggaagcatagcccatattgtgaggtcagcatcaaataatgaaacaaaaaatgttttaagccctaatagtagcagtaattgaaaagaatagatttgagatctataaagtaaaatcaatgtcttaaagattagaagaaaaaagggagaacatccaggtttttgccttgaacatctgggtagaggatagtaagatctactaagatagaatgctctttagatgtgagaaatttgaggtgttcagtgggatatccaagaaaggatgttaggaagcagttatggatatgcttcctaaacatacggatctgtttcccaagaaaaaggcctgagctgaaataaggatttgtgaatcaacaaataactgaaaccatgagagtggaagagattacaatgagattactcattgtaagattgaaagagcctagggagtcggagcctcaaagatttaggaaaaaggaaggatgtatacaaaaggagacagatgacagtagttgagaggtaagaggaaagcctggagaatgtggtgaatggaaatgtgttgtaagaagggagaaggcaatgtaaactgttgataagaagtcaactaaaatgagccctgaaacggttccattgaatatagcaacaagagtttatcttagttgttgggaaagagtagctttggtggactaacagagccacaagtcatattcaaggctagatgagttaaatgaaggaagagaaagaaaattagcacagaaaactataattgaccatgaatggagagaatatacaaaggttagctagattaagctggggttgaagacaggtttaaaagatatatatttacatgctaatggaaaaaagccaatagggaataaacaattgaagataaagaaatgagatggcaaccaatggaaatggagtgaagcccctgtgtagattattgggtataggatctaggacatggttagagagattggtcttagccaaaagggtcacttttctct

SEQ ID NO: 201978 - DNA, 1000 bp, Homo Sapiens
catactgtttgtcctggtagagcaaaaattgtcaacctgggattcatggacaaccaatgatgtgaaaaaaacccagtaatttcctgcaagattctgtgcttttccttggagggaagtccctgaatttcatgggactttcaaaagaactgagacattctgacccccagaaagaaagacccaccacagtgataaaagagttccaaagcttcacctccagctttttactgtctctcccaccgccagtatctgtgacactgccgtatcaacatacagcaatctcctaatttgaatataatcaagaacttttccactacctgtttggatggagaaactgattaaaaaaacgtttctagaaagcatacctagttaagtgccagtgtcttaaaccactaatatgatcagtgatatatctactctatcaggcagaatgacttagagaaatttctcaaacctgagttaggaaaaaatacatagtggactcctaagtcccttaacatctgctcataaattaagtcaaccattacattgagggattaaaccagggaccagaatatcaaatgtctacacatgtcagccaaagaagagatgcagagggttgggtggggctggaagcagataggaggggtctccagggactataggagtacaatcaacttgagtaatcacctgcttttttccccaaaccctgtgtggaatgcagccagctagctggtttaaaccagttcatgacagacctcagcaatttacagatggatcccagtgtactttcctcattaccatgctagtatcttcaccctgggagatgctatagcttcattaccataacatgtgacctgtgtgctgaaataacgactcactgcatctgcacaactgcaacccctttccatgcaacgacataccctcttccctctctatcaccccataaaaccctcctgtcactttcctgctttggagactatgcccggtgctttatttgtgacaagtaataaaactattgctc

SEQ ID NO: 201979 - DNA, 1000 bp, Homo Sapiens
gtccatatatttgtgatactttggtttcgggaacatcacttttagaatgttgacataaaatgcacccacagaatgccgtatttatcaaaagtaactttctagcaaaatctacagcagtaggcatttggaatctgcatttgagacctctgcagtcatttggtcattccagcaatctatgtccaggttgtcaatttcagaggtcttattagtctatacaggtaccaatgagctttcagatgttcaacacctacccctggcctaactgctgataaccaaccataacccttgcagatgcatgcatgttttctgcaccttgctatcatttttcagtccatttttcacatgtatacatagtgattatttttaaatgcaaccctgatttcacatgcctcatgttgaaatatcgtgtggcttattgtggacttaaagtgtaacattctccttatggtatgtaaggacttttgtacaaaccaatgcctatctatctatcatttctgaaaactttttcctcctatgcaatattttctggcctctgtgaacaacttgtagttccttgagatttctattatcacttatgtttttgcaaatctgcaattgaaatgcccttgttccttgttaatgcctattgaatctatatgaacctgtacgtgtgtttctcactgtgataatataatcattgcatgttttatctttcccactagaaagcttctagaaagctaggactatcttttttgtctgtgtaatttttgcatcacaagctatatttaaatgtgggtgcagtgagtggctgttttctgccacatggagaaacatggtctgcagtgagagagaagaatgaagccatgatgaaagcaaaatcaagaaagagtcccgattgtgttccagtacctggttcttctggtcttcatgttcaggtccacctctgcccttttcatgtcttgattgttgaattcttctgtgagatactccaaatatcctaataaattctcatgtttgcttc

SEQ ID NO: 201980 - DNA, 1000 bp, Homo Sapiens
agttccgctcaagtggttgaagttgcaggctctatagtagatgttagcagtattcctatcttttataaggtactctagataaattaaatgtggttttctcctgaaaggtgtcccagctgcatctctggtgacccctgctgatgtcatcaagacaagactgcaggtggctgcccgcgctggccagacgacatacagtggtgtcatcgactgtttcaggaagattctccgggaagaagggccctcagcattttggaaagggactgcagctcgagttttcgatcctctccccagtttggtgttaccttggtcacttatgaacttctccagcggtggttttacattgattttggaggcctcaaacccgctggttcagaaccaacacctaagtcacgcattgcagaccttcctcctgccaaccctgatcacatcggtggatacagactcgccacagccacgtttgcaggcatcgaaaacaaatttggcctttatctcccgaaatttaagtctcctagtgttgctgtggttcagccaaaggcagcagtggcagccactcagtgatgagacaactgttgagtgtggcaaaatggcgccttgaagaaagaggcctaggagagcagccctgtaatgtatccagtcagctgcatggtactgactgagctgaggagtcaaactcttctttctgtatgacatatacatatacttgtttataaaataatcatttgcccagggaaaaaaccacaacgctgtttcaagctttagtcttatgtgttgaaatgtttttgtaagccttggcatgaattagtgttctagactctgctttgcacagcttgcacttacagtgattgtacatattgtacatctttgtacagagacatcttggcacctcatcccaacaaatcacatttgtagaaatgtaatgcggttctgagtggcttgaaatgtacagaatgttttgaaagtgttttattaagaatcacacaaaaataaatgtattaaaatt

SEQ ID NO: 201981 - DNA, 1000 bp, Homo Sapiens
atccaagtagatataaatatccaataggcaggtggatactgaagtgagatctgagctaaaagtagacatttgggagtcatcagcattgaaaccatgggagtgggtgaattcttatagcggagtatatacaatgagcagagagaagggtggaggatagatgcattcacatgtaaaatacagatgagggaatagaagctggtgagactagaaggcaggaagaaacccagaagagtatgactgtgaacactaagggaaaaggtgtttgttttcaagaaggaaggagttgaacaagtgtcagtggtacctagaggtcatgtataaggtactgagaagtggaaagtagctattgtgcaatatttaacgaaaagacatccttaatggtcttaatgaaagtagtttcagttaagttatgacaaataaaagccaatgattcaaggaataaatagcaggtgagtaaatagagaaatgaagatgagactgtttttctaagaaggttagtatggggagaggatggaaaatggaagagatagccagtaattggactgagcatggtggctcacacctgtagtcccaacactttgggaggcggaggtgggaggatcacctgaggtcaggagtttaagaccagcctgggcaacatggtgaaaccccgtctctaccagtaaaaaaaaaaaaaaaaattagccaggcatggtgacatgtgtctgtggtttcagctactcgggaggctgagatgggaggattttttgagcttgggaggcatgggttgcagtgagctaagatcgtgccactgcactccagcctgggtgacaagagtgagaccctgtctcaaaaaaactccaaaaattatctgggcatggtggagcatgccgggagtcctagctacttgattggctgaagtggaaggttggcttgagcccaggagttggaggctgcagtgagctatgactgtgtcattgcattccagcccaggtgacagagcaagactctgcctgtctct

SEQ ID NO: 201982 - DNA, 1000 bp, Homo Sapiens
aaggagtacagggtacacatcaacaccaatcacccagcaccccacagcgatggtcatgtcaccgtgcagcaggtcccttaccccagggctgccacatccacaagccttgcagtggcaaatacgctgctccttggatttaatgagatattttggttgcttaatgatgtactgatcagggaactgtctaaagctagtagggccaaggagttaatcaaagggcttcgggaaagtggacaagagccacgcacgtgattctgttccatgccgacactcattcatttaagaagtgtattcaagctggaggcttccatatcactcacgcttcttggcctcaccttgctcatctgtccaatgggaggcttgagccattattgctaaggccccttcctgatctaacattctgtttatgatctaggatttagaacgtcgtatgagatcctacaatggaagaataaaatcacctcattcttcatttcagatctgaacattagcagtgatctagatttttttttttttaaacaaaattaagtgtgcttagagtcattcctctacatgggctgtggctgtcagcccataggtttgtcagtttcacatcaaaactgtgggtataaactgttgaaaccaatcacattaaaatatttagctgggcacagtggtgtgcatctgtagtcccagctacttgggaggctgaggcaggaggatcgcttaagcacaggagttggaatccagcctgagcaacagagcaaaaccccgtctctaaaatacaaataaaatatttgtgtagtttttgattaaaattgactacagcggtcagtataaaatacatgtcgcttttaaggaagtgctctttatgtatctaacagatggaagtttttgcattggtaagagcatttatatatgctttgtttcagggtttatggatttgtattcatatattgtcaaataggtttcatactctaattttactttaagtaaagcttaaacacttggcatacaactg

SEQ ID NO: 201983 - DNA, 1000 bp, Homo Sapiens
tatcaacattatcactggtgcacttaaactgtacttcagggatttgccaattccactcattacatatgatgcctaccctaagtttatagaatctgccaaaattatggatccggatgagcaattggaaacccttcatgaagcactgaaactactgccacctgctcactgcgaaaccctccggtacctcatggcacatctaaagagagtgaccctccacgaaaaggagaatcttatgaatgcagagaaccttggaatcgtctttggacccacccttatgagatctccagaactagacgccatggctgcattgaatgatatacggtatcagagactggtggtggagctgcttatcaaaaacgaagacattttattttaaatttttaatttgaggggaaaagaaatgttttacagatgaaggaatgttttatagtaatttaatttgctcctgtagctgcattatttcttgattagaggtttgggcatataaccagattaaagtgagggaactttctgttgtttttgtagcaccgctcagctgtcttgtaaaacagtgaacacacgctttctggttctagtaatcctgggtgtttatcacgttcagagaaactcaagctattgcatgattagccccctatctggcaaggaaaccccatacagaagaaacaacaaacctgcgcctgcaccgcctctgcgtcctgggtagtctgtgcttgtaatccagcatgtttcacagagtaagcctgttgtgactttgcttttggggtctatgtcattggtttctgatgcttgtacaaacacgcacacacaaatggataaaacagcacctctggctgttacattaccataaaccatatcacatgcctacattttacaaatgatttctggtttctcttagttcttctctaacatagtactttctttccagcaaaagcaaaatgtgttttcagatttgttactttaataaaggttatccataccaataaaaagtgtacaacacagc

SEQ ID NO: 201984 - DNA, 1000 bp, Homo Sapiens
aacagagtgagactgggtctcaataaaaaataaaaataaaataaaacaataaaacgtaggggtttctgaagatttccttcaggtttgccgatttgctagaatgactcacattactcaggaagatgctgtatttacaattgttttattatgaaggatataagttaggaccagccaatggagagacacataaagtaaggtctaggagggcgctggatgcgaagctttcatgtcctgcattgtggaatcgggtgtgtcaccctctcaacacattgatatgttcaccaaccaggatgcttcaccatgcttcggtatctaaagtttttattggggtttcattatatatgtataattgattgaatcactggccaagtgattgaactaaatctccaccctaccccttactctgggtgtcaggctgactcaaagcaccagctatgtaatcacatggttgttctcgctggtaactggcctccatcttgggtcatctcatcttccagcccaaattcaggtgtgatccaagaggctcatgaaaaacaaagatatccctgttacttagggaattctaattattttgagtctgcctcctaggaaccagagacaaaagccagtcaaattctttactataaaacagaaagcatgtgaaaacatactgtgcacgctatgtcacacaacaaacacaagtctattgaacttgccaatggtggagtgttggttggtaggagaggtctgagggcatcattctttgcaaagtgtattctttctgtaccattttcttgaccaattttcaccttttctggggattattcctgttttgcactcaaactactcttaaaaataaagttacagtgcaggaaaacttctttagggcacaataaaggctaaactcgtggaaatggtactcattcatctgcacagaatgaagtctctcaagatgtttccttttattcctactcagttggtgcatgtacccaaaataaacattttgagttcatccaaacac

SEQ ID NO: 201985 - DNA, 1000 bp, Homo Sapiens
ctcctttcactgtactccattattccttctgtgatgttctaccttcttcaccttttgagaccagggtgagttgggagcagtttgcctaccttcttttagaatctggggcttatcttttagtacaagccattgaataagcctcttccttttttttgctcaaacattccacatccttgtggattcccctgcattgtttgttttatataacatttgatatttgttgtagcttgtatatgaacataattttctttagaggtagtcactgttctctccagtatgacccaggtttcttgactctgagtaatgcaccttctataactatctaaatttctattgaagctttttggattatgagtatgctgacttttcacgattggctggtgcatgtttagacttaaatgtcatatccttcatgtctcaaagccaaaatagtaacatctcatctcagaacagagctgtgaccacatgccaatatatgtgtcacaaagtctacatatgttacattccttggaagtctccttaaatgtttcacaaaatgtcaacaagcttgttttgttattgatatttccgagattgggcacatttaagacagtaaacgggaaaggtggtgaagatgctataagaagatgctgtatcttgagaattgaaaaatgagaatctgacatggtttgaaaaatcatgaagggtatatataaaggatgcatgtgtaggagccattaaaattcataacagtatgtgccccttcagcgttttaatcttatgaagtggttaagagataagtcttcggagttggacaaaaggatttgaatttaggttctgtggattattatgggtccttgataaattctcaaagcctttttttttgttcatctctaaaataggaatataggattacctaccacattgactcgtaaggactatatgagaccatgtatatagaatgtttaacatagtaccaggctttacaaagaactcaataaatgtttaccattattgaaat

SEQ ID NO: 201986 - DNA, 1000 bp, Homo Sapiens
aatggcactttgttctttcagtgtgtttccctcagtgtcacagggtatatcaatttgatagatcatttgacatttgtcaaaaatacgtttcccattttaaaaatatgtataattggttgcatagacatatgtcactttttgcagtgtcttcatcttgatcatagttttagacatcaactatgtctcactttccaactgccatagaaatttggtacatttgcaaattctggtggaatctagtgagctgaatgtattggtagatcaaatgatccaaaggacttgggtgttatccttcagtctgtgttgaaccattcagatattgggaatggtccttacacaagggaagtcttttgagaatatttgttctcttattttttgtttgtttgttgctggcaaaaaaaaaagtaactttaaaaactcagaaaagccactgaactgtattttgtgaccttatgattagttttatctttcaactgatttttattgttacttttactcaatatcaacagtacttcaatagatatttattagttatgttcaatctaatgacttaaaacagttgaaaaggaggaaaatcaactccagtccacacatacagtcatgttacattaagatgtcatgttgtatgtcacacagtttctagattgatttctcttgtgtataagttataacatcaaaaatgccaaagggtatataaaataagctacaataatattcaacagaacttaacctggaccttatgttgtaataatttattcatattagctgtagtcttctgtatttatattttcagtatttattatgaatgacatggaaattcgtgtatttattgtggctttttattgcagtgtgtatatatatataacaaataagcatttttaagtcttatccttaagtttcttttattagtggcacttgtattatgctgtactttttattacatattgtacaatatcttgtccatttgtttgcagcagagtaaaaccggtttctaagttgt

SEQ ID NO: 201987 - DNA, 1000 bp, Homo Sapiens
cgagctgagcccccctccataccatggccctgggagggagagtgcccttggaaggaaaccacctggtctgccactgccctgtggaggccctgggagcacagccttcctgtcccctcctgttcccctggctgccaagctggccttgagacatcccatggccgtggcccaacttggggatcacagaacactccagtgaggcttggtcattcatggctttaaaagaagccttgctccaggacaggtgaaggaaagagcagaaatgtgcaaatggctcctgcctggcctgaggcaagggaggactgtagggtccctggccattctttctacctttgccaccagtagtgcagttcagtgcagatgaccttgtgacctcgtggacatcctcaggctcttaggtgctgccctgagcaaggcaggcactgcaggtgggaggaacccagccaagtgggttccgagttccttccctgaacttgggtgaagcccccaaccctgggcctgagagaaggggctgtggccctgaagaagcccctcatgggcacatcagttataaggacaagtggggggcaccccagaagcagccccaggaagtgagacaaaagtcacattgggtttggtcatttggaggagaaggcccatccctggctactgtggagcagggggcccctcccagagagctgctggatgcttctgtgcctgacctcacggggcttccagccaccatgccttgaaaggagcctcagatgctcccattttgattttcttccccatgtggaatgccagggaaatgcggctgcaagattccgtgacaagctggggaatgttctgtcttcattattgttttagtttagttaaatttaccgcacacagtggctcatgcccgtagtcccagctacttgggaaattgaggcaggaggatcccttgagcccaggagttcgaggttgcagtgtgatcacgcctctgcactccagcctgggcaacaaagtgagaccctggctcttg

SEQ ID NO: 201988 - DNA, 1000 bp, Homo Sapiens
aatgctccaaggagcaagtaattacgaacgtttattgacactacaagtggcccacagggagcctttcgagtttattgatgtctaggcaaatccagcctgcattaatgcatttctgttagattgacttctgttagactcacttttcttctggcaaaaactgccagaataaaacagcttcttatttaagttaaaagggatccggggctgagggcaggggtcgggtgggagagggatgcatggttaggatgctaaattctcaaggataaactttgatttttaaacagtagacaactatattttagattataggtaaaacatcactctctgtcagggatagagtaatatgcatcgtttcattaaactcattatttcttaagcaatggttatggggcaggcaatgtgtgcggagatgggaacacaaagatgaataaaacttagcatctagtcagacacaaatcctactcactcaaagggggcatcttttaaaaataataatttacagtatggcaacatgaatcagaaacatcatttaaaatatatatggtatctgagtaagctcctgggttgaagcagatggggtgtttaagccttttgaagcccggaagatgagtttccgggtgaaggggacacacagactcctgttttcaaagctgacaaggaagtaagccaagcagagggaggatagaacattgcaggtggaaaaaggagtatgcgcaactccagagagtaataaaactctggtgctttggggcaactttgaagtggctcagtactgttagaagggaaagtggtaagggagagtgctggtccaaaagtttcggtgtactcataatattctatggctccagagtgtggaacagtcttctgtaatgagaaagccacaagaaaatcttcaagaggaaagtgagtataatctatattaagctttaaattacattaggggaaactacttacctagcccaaacaggaaaaaacaaacaaacaaacaaaaaaagaaaag

SEQ ID NO: 201989 - DNA, 1000 bp, Homo Sapiens
aacgtggagcccggctttttgctacagatgagagattctgtattgacaatggagcgatgatagcccaggctggctgggagatgtttcgggctggacacaggaccccactcagtgattctggggttacacagaggtatcggacagatgaagtagaggtgacctggagggactaataagatcaacagaatcagagtagatagttccttaatcggaacccaaaggaccccgtgcctcaatctctatcctgatgtcatgggagtcctagcaaagctatagactccaagcaaggcttggggtcctttatggaaccccaggatgactcagcaataaaatatttttggttttttggttttgtatgttggtgattggattgtgttgttcaggaccaatgtagatttggtgctggataaattcttgttggagcttgctgctgtggaaccaagaatgaggtatctttttttttttttaagaaacggaatcttgctgtgtttcccaggctggtctcgaactgggctcaagcagtcttaccacctcagcctcctgagtaaggatgccattgtgcctggcaacaatagtagtatcataactattattatagcatcgggtcccgtgctaactgctttacattcattctctcatttaaattctttgaagtaggtgtgcaagacttctctcaaaatagcctggaggctcacacctgttatcccagtgctgtgggaggccaagtcaggaggatcccttgagcccaggagtttgagcccagcctgggcaaatagcaagacaccatctatttgaaaaatgtaaaaattatctgggcatggtggcgcacatctgtagtcccagctccaagggaggctgaggcgggaagatagcttgagcccaggagtttgaggttgcagtgagctgtgattgagccactgcattccagcccgagtgacagaacaaaaccttgtctcttaaaaacaaacaaataaacagcctggagattggtctaacttgt

SEQ ID NO: 201990 - DNA, 1000 bp, Homo Sapiens
gtgaacttcggggtaattcctttcagaaacctgaatcattttaggatctgggaagcattactctgtggcaggggctcttaaccaaaaagcccatcgctagaattctagggtctctgaatttggatgggaggaaaaacaaaacaaaacaaaacaaaaccctttattttcactgtgccctagctgaaatttagcatttccttcaattatgaatatagacagcaaataatggttgtatttgaaatgtgaaattgtacttgtgaaacatgctactggcccctagattttatgctagtagtcctattattcagtgttattaatggagaagcacaaaacgactctatcagaactttgctttttaagggttagataattgtatttcactttaattgtttttcattgtaattacatgatttttatgcctttaaaaacattattctgaccaggagtccataagcttcaccagctttccaaagggggttggttctatgttagtcctggctctaagccattcttctgacatctccccctgtccctctgccagcactctggagagctgagatgtggctttgaaaggcccagcatcaatcactggaatccctattataatcttgactccagcaatgaagattctgtggccatttttgtcagtgctttatatgtcttaaaggaggaggctttctttagcttttctgtctttccaggacaatgccgtctacacagacttccaatggaagatgttgattcagcgacaatttactagaaagctggatgctgtgaaagcaagacacagaaagcagagaacatcaagcagtgggagtgtggaggagagggagagagcatgtgtgcttgagcagaggggtgataggaggcctgaggggagagctggtggaggctgtgaaatgagatggggaagtagggagttgggtggaataatgaggagatggagaagtaattaaattcaagctttcaagcctcctcctggtggtggcttctctttatc

SEQ ID NO: 201991 - DNA, 1000 bp, Homo Sapiens
aatgataaaagaaagtttcctttcatatttttaagagggaaaatattgaaactgttgtagcaaatgccatttaacaagatttctaggcactgcttatttcaagccatattcaagactacagaatttatgcataaggaagtaattaacttggagtttatttttataggattttggatctggggtaaaggtcagttttcatgtttgtaaccacttaataaaatgaattgtgcttatgtatttataggcacatgtttaggtaaaaggaaattttagatccattctaaatagagttaaatccttttcaccaaatggccttctgttttctagtttggagctatttatagttttctcttgtgcacatgagagaaagttggaagacaatattagctgcaatgtgtaaggaagtggagaaaacctgttatgctatcagcatctcttgtagactatgatgataatgttatctgtgtacttgtatatattctcatttatgctttttttagatatgattttatacacatcaaattatatacttaaactgtgtgcatctttgcaagtatttatataagtagtaatattgaacatttacttgagtgtttatataaggttttttgttgttaaagatacctctgctctggggagaggacttagattgaggccttggaaatccatttcagaacgtgaaaactcaggaaagggttctggagtttttttaagagtgaataaaatattagttaattgtttcctctttgatgtttctttaataaaacttctaatgcatgccgtggataattacttaatggtttgtatatctgttactgtcaggtggcatgagccttgtagaggctattgcatgactggtgtgtgctagctacagtgtaagtttgccttggtctcaccattgtccacaagtgtactggagatcctgttcagtactattagattcaggtaacctagataagcagttatactacattgtgttgtcagtagctgccatgcattt

SEQ ID NO: 201992 - DNA, 1000 bp, Homo Sapiens
gcatttctctgatgactgacaatgttgagcatcttttcatctgctaattgctaagctccttaaatggaaaattataggaagcataaagcatgtttgcaaagaagtgattatattcgctaggattaagattttaagtgaatatttaagatgcccatgactagtgtccactctctcgaatcaagttttatttaaaccattgacttttcctcataactggaaatggtcccagtgaaagtctccctcacttgctggaatgtggggccatctctgctgtctgtcaagccttgatgcccaagtggccattttctcctggagtctgcatcagatggtagagtgtgtgtttcctgagtgtgagactggatctgctccacaatgctttgctggttaactccttccaagagtgcaatacccaggggtcactcctactcttagtgctctggggcctgggcccttaacacactcaacgtttcttccccttttctcacttatctgatcttctgctacttctttctcctttgtccgcccctgctctctggtttctcttgtacactctgtttatttaattttgatcatttgtttgtttgttcctttcttcctcctttaacaaattcaaataggatacaagccactctgtcccatctcctgcccttgccttctcttctttcattcttttattaactgatttttctcttgagaaatcaccactgggtcaggtgtggtggtggctcatgcctgcaattccagcagtttgagaggctgaggcaggaggatcacttgaggccagaagttcgagaccagcctgggcaacatagggagaccctgtctctataaaacataaaaaaattagcctggtatggtggtgcaagcctgtaatcccagtgctttgggaggctgaggtggggaggatcccttgagcccaggagtttgaggctgcagtgagctgtgatggcgccactgcgctccatcctgtgcaacagaacaggaccctgtctctagaaac

SEQ ID NO: 201993 - DNA, 1000 bp, Homo Sapiens
ggaggtccttgttctgtggtctctgtttagtgactgaaacttaaacccaaaggcaagcccagattgtctggccgttcatccccatgctttgataggggttaggaggaaccctttccgtatgaaagacaggccctactagggcttacaaccaagccaaaggaccatctcttctttcttccacctcccttcacccctgccccgcagcagagccgagatgtgagacattcattgtcacggagcaaggagacaaaggcaagttcaagttgagaagcatatggcagcaaacagaaatgaaaaccatatgtcccagcaaggggaaaagcagtcatttccagattataaaaatcaatgaagtactctccacctaggtcagctgaaattcgagccctcacagtcaggcctgtcagagaagttaagcagaaacatctcggggggacttctaaaatttagtgaagacaaggccttgcaactccaaagaaacttttttcccccctttgaaacagggtcttgctctgttgcccagcctggagtgcagtggtgcagtcacggctcactgcagcctcaagctcctgggctcaagcactatccccacctcaacctccttagtagctgggactacaggtgcacaccaccatgcccagctaaccacagaaactttcatctcttcattttttctttgggcaccattaatacctaagacaggtagaaagggtcccagaaagacaccattggtaatggccgattgccggctgcagtcatcgcccccagatcaggctggtacaggatgccttaaggtgatgagaggtgagggtgcatgaagaataatgagcacagggaagagagaagcaggacaaagtagcagataaaatgccggcaaagcacagatgaatgtcttcaagaagctcttgtatttctctgcacagtgtaaatatccttgctatttcaggatggcggctggcctgctcagtaacatacatgttccaaataaagattttgcatg

SEQ ID NO: 201994 - DNA, 1000 bp, Homo Sapiens
gtccatatatttgtgatactttggtttcgggaacatcacttttagaatgttgacataaaatgcacccacagaatgccgtatttatcaaaagtaactttctagcaaaatctacagcagtaggcatttggaatctgcatttgagacctctgcagtcatttggtcattccagcaatctatgtccaggttgtcaatttcagaggtcttattagtctatacaggtaccaatgagctttcagatgttcaacacctacccctggcctaactgctgataaccaaccataacccttgcagatgcatgcatgttttctgcaccttgctatcatttttcagtccatttttcacatgtatacatagtgattatttttaaatgcaaccctgatttcacatgcctcatgttgaaatatcgtgtggcttattgtggacttaaagtgtaacattctccttatggtatgtaaggacttttgtacaaaccaatgcctatctatctatcatttctgaaaactttttcctcctatgcaatattttctggcctctatgaacaacttgtagttccttgagatttctattatcacttatgtttttgcaaatctgcaattgaaatgcccttgttccttgttaatgcctattgaatctatatgaacctgtacgtgtgtttctcactgtgataatataatcattgcatgttttatctttcccactagaaagcttctagaaagctaggactatcttttttgtctgtgtaatttttgcatcacaagctatatttaaatgtgggtgcagtgagtggctgttttctgccacatggagaaacatggtctgcagtgagagagaagaatgaagccatgatgaaagcaaaatcaagaaagagtcccgattgtgttccagtacctggttcttctggtcttcatgttcaggtccacctctgcccttttcatgtcttgattgttgaattcttctgtgagatactccaaatatcctaataaattctcatgtttgcttc

SEQ ID NO: 201995 - DNA, 1000 bp, Homo Sapiens
cgtgtgtctataatcccagctactcgggaggctgaggcaggagaattgcttgaacctgggaggtggaggctacagtgagctgagatcatgccactgcactccagcctgggcaagaaagtgagactccatctcaaaacaaagaaacaaacaaagtattaatatgttccccttgatcagtggggtggttcacccttgtaatcccagcactttgggaggcagaggctggcggatcgcttgagtccaggagttcgagaccagcctgggtgaactagcaaaaccctgcctgtactaaaaatacaaaaattaactgggcttggtggtgcgagcctgtaatcccagtggaggctgagacaggagaatccttttgtaatgcctgaccttgtttttttactaaccctattttaaccttgtttttactaaccctatttttaaattttccctttttgtctccttaattacctaggcttgtttcccatatgagtagactctcccttagctgggaaagcctgacgaacgccatctggccccttgatttacaagacattaagggctacttacccaacccccttcctcaaagagttaacctgcgtaagcagatcctcagcatttcaaaggagcccaattagctgataaggtactggaacaaacaatgtacgaagttcccaggattttgctcaaaagcataacaacataaagccttgagtctgtgtctggcatagcatccatatctaactcttatgaaggatttagagcccggcacctggttccgttgctttttttgtaaccatttgtcttttaaattgtttatttctctgtaaccatttgttttttgattcttgcatgtttttacttctgtagaattattgcatttgagctccgctccccttccgaaccaaggtataaaagtaaatcaagccccttcctcggggccgagagaattttggaaagtcaagccttctcttggctgccggcttaaataaaggactcttaattcgtctcg

SEQ ID NO: 201996 - DNA, 1000 bp, Homo Sapiens
ccatgtgagtattaatttggtacaaataggctgccaactctaaaattatttgatgtagggcaagtacttttatctttttagccataaattttctcatctgtaaaatgagaggagtaggcatgtgatcattaaatcctgggttacggtaggaggcatcaatatgaaatgtttagcttaatatagatacagatgggtaaatatagaaatacttaaaaatgcatgtggattcatgtttaatacattagtatacacacatatatttccaagttctgtcctccgaaggcctagaagcaatgacaagcagaagcaaggagcacacccagcatccagttttttgtttctaatactgttctccaacaaagggaaccagagcccttgagaaaaatgcctaattctaggactggggcaggggatatacaagatgagtctgaaacatcttatagtgccagaaaataaacaagtgctttaaaaagacacaaaaaactgatggtatatcaaagtgacataggagccaactaaaagagctcccaatagctaaagctagaataattcaaaaaataagtaattcaccattggatttaacccaaattataaaataagatccatgagttcatactgatacaagtaaatgattgaagaaacaaataattgggagataattctcatattgaaaaattccaaaaaatttatgtactctaccctcgagaagatggaacataattctccaccccataagcatgagtcgagcctagtaaatgtttttccaagagcgcagtatggaaaggaggaagaacactacctcaaccagctgatcaaggctaacatctctagtatgtcattagtggcatgtaaccttgatatgatatgatgagaatagcatttgatctttgatctgtttcctccccgaaactcattgccccagcctaatcatgaagaaatatcagacaatctcaaattaagtacaaaataaccagtactcttcagaactatcaaggccacc

SEQ ID NO: 201997 - DNA, 1000 bp, Homo Sapiens
gatctcttgagagagagactacgcattgcctgggcactttcagattccttaggaagtgcccctttgatatttggaatgtggatatatttataaaacaaatggattgttattccaaatccacatggatttataaccaagccccagaagaataggcagctttgaaatagctagttcgtggaattgaacagaaccttgatggaatgcagttgcctgtgtgaggacagaaaacaaagaggctgcctcagaccacatgcctatctagagattaagtgaatttgtgagggacattttgtggatgccttaaagatgaccagtggtgggttctgatgggaatatatacactcatctggactaggccaatggaagcagtctctttcagttcacctccgtacagcacaagttgttcctgctcatgacctcattgaggaaaatgagaattgtggtgctggtgactttcatgtgtcttgggaggttgaggtgttcaacatcgttaaggcactcccaaaacgcaaacctccttttttaaatgccaattgtacatctacattaattcatctatgcaaacttgtgttttcatggtttgttttttacactatatttctcattaggttctttaaacatcaggtttaatattgatattatgaataatttttaaaccaaagtattctataagtttgtgtgctttgttttcctggatggtttgaccaaggtaaacatcagtcttgtccttctctcttaataaagtcatccatttgttaagtcagtggtctctgtctcatgtttttgttttgtttctttacagcattcaaggacagggaaacttacgagagtcttattataattattattatttacaaaatgaccctaataggtctgtttagtaacagtgaaattttttcttactccatttccatacactttctgtaaatatgtataacatgataatgatgcctggtgtattgaaatcctcaataaatactgccaagtgtggatcagttgg

SEQ ID NO: 201998 - DNA, 1000 bp, Homo Sapiens
gtgtcctcaaggacctgctggtggcagccatcgtacactgcaagcaccacagtctcatcgcaccaggttcgctgaacgcggccagcctgagggaggagcagctccacctgtccttgctggtgtccagcggctggagaacaatcagcttccacgtggtgcccgtggtgagaaggaagcttggggcgcctgccctggagggggtgcagcagatgcccggattccctgagggcaacttgagaagaatcctcagccaaggggtggacctggtgccggccagtgcccagctctggaggacctccactgactacctgctcacgaggctgctgggggagctgggctccctgcagggtcatcgcctggacagcctctccatcctcgaccgggtcaaccacgagagctggcgtgacagtggccagactgacggcctgacctttggccacctgaagatggtgctgctgtgggcctctgtgctcttcccggcgcccgaggactgggcagagctgcagggcgccgtgtaccgcctgctggtggtgctgctctgttgcctggccacgcggaagctgccccccgccgcgcatcggctccgggctgagctgggccacctggtctcagccacctgttcttggctccccaacagactctgcactgcaccatgggaggctcctgggatgtttggaagaagaaacgggcttctccttgagggggtagtggagggattttgtccccagcagtggcctctgagagtctttcagtgcctggtggggcagggcaggcctcttggagcacctcctccctgggtcagggcctggatgcaggtgccaagctctccatgtggtgcatgttgacccagccacgtggtgttgtcaagcaaacagcatcggcaggagacctggagctgaggacttggccctgcctgcactgtatgccattccttggtgatgaaatgctgtatatttggttttgaaaaaatgaatgtgctgggtatacacagcagaaaggg

SEQ ID NO: 201999 - DNA, 1000 bp, Homo Sapiens
taggaataatttctacaaaatagcgtggccagattggagagagaagttgcactcagttggctggctttttaatacttaccttatagccatttttagactgagagcttaaactgaacatataatcaaattttgtgttaaggaagtgagattttagcagtatttttcagttttgaagttcgaaaccatcccaaggcataggagccatagcctcaactgaaattgaatttttgtagggactgttaattgccatttgtacctaatactgtatatatacatatatatacgtgtgtgtgtatatatatatatatatatatatatatatatatatccgtgtatgtatatatacacacatatatatgtatatatacacatatatatatatgaaatacagcctgtcactgtgtgacacagattgcatatttgggattgcaataagggcttggtgagctgggggaatagtggatatttaatgactacttgttttttaaataatgaacacttagcctttctatgcgcataatggtgtaaaagttagatggttaggtgtttgacaaacagatggttgcaattcagttacagactggggaaatagcccagtgtttgggattaaaactgtcaagactggataggtgttagtcatcactgtctttcgtccagtggggatttaataaatactttcaagcttctggtttgggagtttagataggtttgattttggatttgtaaatagtgattgctaaatttggtcagatttctcctgactggctgttcctaaattcttaggatatgtcccagtaaaattatactttgtgaattaattgtcatatgtgtaattgttgcattttggatgtacctaatttgataattaaaacaaaataatttccgtttaaggtatctgtttgcaggtcagaaaatgagaaaatgtaattgtgtaatgctctgaaatgtaaaaaaaaaaaaaaaaaccaaaaaaaagctgtaaataaaatcaactaaatcc

SEQ ID NO: 202000 - DNA, 1000 bp, Homo Sapiens
caaactcctgagctcaggcaatccacccgccttggcctcccaaagtgctaggattacaggtatgagccaccacacccagctattttttctttcgttttttaattttaaagttggggggggtctcaatttgttatcctggctgatctcgaactcccggacttaagcgatcctctggctccaagcccactaccagtctcaggtttctttactaaaagatcactacctttttttctcttatctgctgccatgtgagatgtggctttcaccttccgccatgattgtgaggccttcccagccacgtggaactgtaagtccaataaacctcttttgtaaattaaaaaaaaatcactatttaagatactaggatggattgtgactgttgaggagtacttacatatcctacatttgactacattatttccaaaccaagtattccatccaaaggaacatactgctataatagagaccaaggagggactgtttaaggttgccaaggtgaagcgagctgagaggctttgtcctcatgccagtaactctgaaatctctcttaattcctgctgtccaggcagcagaatgccatggtttccccaagtaggtagctgctttagcagttaaagcccaaatgtctgttctgttgatcagaggtctctgaatttctgaagtggtgtttcgtttctggtgactgagttaatcctttacaatccctcttgtaaagtgtgctaatagaaagaatccacctttcaaagctgcagaaccagaccgtgccctaaattgaccaacgtagctgatgtgcctcaggaagtctcttgccagctgtccctgtgaagacccccctcttcccccccagctgctgccttgcacactgaagcatctcagactgtgcaaagccatgtagtcatcaagacagtaaatcccagggcttggttaagtgctgtgtgataacttgtttggatgagacttaacttaaaaccacttacaataaacttgggagactaccgtc

SEQ ID NO: 202001 - DNA, 1000 bp, Homo Sapiens
ataagggattctatgaagtccatagataggatttgctttgggagtagatgatttcttcttattttggtgtaaacatcaatttggatggcaattagaatgtctttagcctctttaaaaagcccttctggggcaaacctttgcaagtcactcagctggcatgtaatgagatttttatttgcatggctttttttttctaagtctctctagaagaacataaggacattctgaacatgcaaggaatacagttattctcacatcaaggatcaattttattttgtatcttcattttatgtcattttcctttattttattcacattaatctagcattaattccccccagagggaatgatatttttggttgctgccacctgtgttattaagtgacagcttttctttatctgcttttctgaatttcatatttatatactttattgtagttttttaaaatctattctagctgggctagaatcttccaagtattaattcataatgaacttccctcttctggaattgtttaggagggctaatgttccatgttcccttcgttgctatagatatgaagttatttcgatgttctttgagtgctttattatagcgataactggtactgcctttgattaaaggtgagctatatggagttaagcatttttatactagtaactatttattgagaattttcagaattctatagctacttgtctttaacagttataagaggcatgtatttttttttccttcatggtctggaagttagttttctctttgtttgggtagatcggaatgagttgttgagctgtgttgaaaacacacatgaatcaaaaaagcagatgtattgtagaaatgtgatgttttcatgtttcgggaatttgaccggaaagctttatgtatgggttttatttttaacaaagcagtaagggcttactttttaccaacttgtgtgtgtgtaaagatgtatttgttcaagctttaagaataaacctgccaatgtacaaatgcctg

SEQ ID NO: 202002 - DNA, 1000 bp, Homo Sapiens
gggtcttgctttgccacgcaggctggagtgccgtggtccgatcacagttcactgcagccttgaactcctgggctcaagtgatcttcctgccttagactcccaagtagctgagattataggcacacgccaccacacccagctaatttaaaaatatttttgtagagaccaggtctcactatgttgcctggtttggtgtcgagctcctggccttaagggatcctcctgcctcggcctcccaaagtgccaggattataggtgtgagccatcatgcccagccagagcaccagaaatagctcccaactgtagaaggagcctccctgtagcgctgttggctccctccttcctgtggagtctccacagcagtccctccccaccatgaggccagagaggctaacagctttgctgtcacccaacagaaatgctttaagtactgaccactgctggagggaaaggctaccgctaacacttgggatgttttctgacagcctctgaaacttctacgaactgctgaggcataggatcctctcctaaaatttctcccagatcttaacgtcagggctgtctggccctttcatgagtatgtgggttatagtctctggcaggcacttgtgaagagtgtgactgattgacacttttttgccttggttgctgggaagctcagatctcccctctgcatgtcccttgcttaggacctcccatggtgtacttggagttgggacctcacctggctctcccttatctttccggctgccattttttcccctttctaactttctttcccatacacttatttgaaatattatctcacggtaacgaaataaagtgtctgtcacctcctgctgtgttgtcatcttgcatgagctatctaagttctctgttcttcagtttctgcatctgtaaaacgatgacaatgacagagccaacctcgctttgaggatcacatgagttaataaaggcctggcacacagttagcactcaataaatgttagttatgattttt

SEQ ID NO: 202003 - DNA, 1000 bp, Homo Sapiens
gttctatatcttaaccagctgagggagcttgtacaacaccttatgtatgctggttgggaaaaactgattttaacgtaactaacttataaataaatctagagtaagaagatctcagaaataaatcacacttttgttatgatgacatttagatttgtctttgaaatatttatactattgcttccttttccccatatggtcatttcttatattgaatcttgataaaatccaagattataactttgtgtgaaacagtgtagggcatttttatctaaggacataagctaatgtccagatatattactttctggtgatgtaatatgatagcaagaactgaggaaggtgtgggtagtatcctgtgtgttagactgtcttcccaaacatgaaatgctacaagcctgacttgaccagaaaagcaggaaatcatttcaaggttggacttgctggcaaaaacctagagtatagtaattttgtactgctgatttaaagatgcgccccatgctttgatatatataaatatggcaaagcttaggcttctagtataaaagctgggactcttggcatgttattacttagagagaagaccagtcgaattttgcatagaagtagacctgtgatacctataggtatggaaaatatgtcataagaagtggtttttgattatttcaagtgtctgaataagtatttgattgaaaactctgaaaattctgtgccatggacaggtgtaatattaaaaatatttaatgattagtatggcatgggcacaaatcaagcagaacagatacctaattaatcagaacagcctttagcccttatgccacaccagagcttactagctaaatgtcatccttgaccatggaacatggttaaaatgagctgctggctgggcaaggtagctcatgtctgtaatcccagcactttgggaggtcgaggcaggaggatcgcttgagcccaggagtttgagaccagctaggtaacacagtgagatcccgtctctgttatt

SEQ ID NO: 202004 - DNA, 1000 bp, Homo Sapiens
gcatagcccagcaaagccaagcaactgaatctcaccatcagaacagctgagagcagctccatcaaagcagtcagtggtacatgtgatcaatttgttttttgtatttctgggctacaaaatgtctcttaagtttcatcattggacctatcgagaaaggagaaatcaattgagttgtggagataaaagaaaattacacacacccatgcatgaccaggcaacagagtcccatgcctggggctaggctgggtggctggctgtgccattgactttcagggtgtgtaacttttaccatctgtatggggatgataaaacttccatgtgatccttcagctgtggtgaggattctgtgagctggaaggtgaagagcatggtgcattctgtgcctgatgtggactgtgcacccaatggaggagggatatcatcatctcaaaccatacccctatccccattttacaggtgaggaaactggggcatagagaggaccagttcctctgaggtcagccagcaagtgcacggcagaatcaagtctcaaactgggagttgtctgctccctgagcccaggactttcattgaaagcctctgagtcaccaggggcattgaagcccctctgggtgtctcaagcaaccccacaaggactgtgttttcaacttatagatgagaagaccaccagcctggacaacatggcaaaacaccatctctacaaaacaaaaagaggatagcggccaggcacggtggctcacgcctgtaatcccagcactttgggaggccaaggcgggttgatcacgaggtcaagagatcaagaccatcctggccaaaatggtgaaaccctgtctctactaaaaatacaaaaaattagctggacgtggtggcacgcacctgtagtcccagctactcgggaggctgaggcaggaaaatcgcttgaacctgggaagtggaggttgcagtgagccgagattgcgccactgcactccagcctggcgacagagtaaaactccgtctc

SEQ ID NO: 202005 - DNA, 1000 bp, Homo Sapiens
attttctgtaaagagccagaaagtagatattttaagtcataaggtccctgttaacaactacttgactctgccattgtagcacaaaggcagccacagacaaaacaagcaagtagtcatgtctgtgttccaataagactttatttacaaaaacagcaggcacagacaagatttggcccacaggcatagattcccaactcatggtggtgaagtacagaaaaaaacacctgtctacaagcttttgtaagaaatcaggctaaatgttacctatgttttggttggaagatttctttggtttgaggaatgctttcctcttgcattggcatgccaagaggatagatgactctgaaagacgcctcttcagacatacctgtcatcacacaagatcaacttcttcagtttaaatgacacaaatccatattgtggaaggaaaatatgtagtgccttagcttcactaatagttgtaaaacttctttttaagacatcaaaggctagaggattcattttatgcagtgcgaacatctaataacactctctgtgtcaaatatatattgtacattaccttaaactattgtaatagctaggtaaaaatccttgtataaaagaatgttttcccccacacaaagggcagagtattgagcactaatttcctattaaaagtatatatatgtatctgtgggtcactggtgtccagacttgtatttgcatttgtgtttacttgaggaacttgaacactaacaactggtaaaatcccattgtaattcttacagcattttgactttattttcctgcagtgaattgtgttgtgtaaagattagggctttaaaatcttattagcaagctttgttttgttttaattattgttgctgttgtaactagatttaatttatttttagttggaggtttgacctaagtctggaccaattgattgcttttcaatacaactttgcaaagaacttcctttttccacaggtggctttgttcgattaaagtctacactaat

SEQ ID NO: 202006 - DNA, 1000 bp, Homo Sapiens
tggctgcagagctgtctgctccccacgttgggcaactccagccaagattcctacacccaaatgtgaccgtgttgctcacgaagaaggctcagctttgcgtgtgcccagccgtgtgcacagctcgtcccaactcctgcgggtggcacctgcctctcccacctccagtctttcccctgtgatgagcagatgaccaccgccctccagggtcagcgtttggctgtttgtgtgcctgcccacccgcctccctgtgcctgggcctgccctgtgcctgcacacaggagtggctcatggcgtttgccctacacggatgggctgtcctgggagctactggacagtcaccttggtgggaatgccagaggcatgggcattaggtccccccggccagcctccgttgccacatgggctatttttgtccatcgcgtgggacaacctagtattgggggaaaactcagtccactctaaagaagcatcggcgttttggatggacgaatgctgcttcatgcgtctccatgtcaatggactattttattcaactcgggtatttatgagtgtctcctctgtgccagccacgtgtgaaagaagaactccaagttactggacaccaggacaaaccaggagtctcgctgtgtcacccaggctggagtgcagtggtgtgatcttggcttgctgcaacctctgcctcccaggttcaagtgattctcctgcctcagcctcccaagtacctgggactgcggatctttagataagcactctttcaaccaaatgccaatcagaaaatctttgaatccacctgtgagctggaagccccgctgtgctttgtgttgtcctgccttttcggaccaatgtaaatctcacatgtactgattgatgcctacatctccttaaaacgtataaaatcaagctgtaacccaaccaccttgggcatgtgttctgaggacctcttgaggctgtgtcactggtcatgatccttaaccttggcaacataaacttctaaactgat

SEQ ID NO: 202007 - DNA, 1000 bp, Homo Sapiens
tgtgcatcacagtcacctgtaagacttattaaaacagatcgctgggccctacacccagaggctgtggttcagtaggctgtagtaaaccagtaatttgtatttctatgacgttcccaggttctaatgctgttccccaaggccacaccttggaaaccaccacattaaaatacccagaaggcattaattcccagtccttcctctacacagctgcaaaacaatggtcctgaccatttcatctttgcactacatccttcactgtctctcttttgcccataggataagtacaaactagatctggttactgcctgccccaccagcctcagcatctctcacaactaggactaactttttcttctgacaactataaaatatttcccttgccttctcaagtttgctcaaggtcaagttatgccttttgcctggaatgacttgacttctcttttgttttacttagctggctgcttttcatcttgtaggttaggtcaaggactccaggaagtcttccctggacaagtaatgaagagggcataatccaagggccaactcccatgtttggaacctgactccattttcaggcacgtaatattgtcaaattccttttaaaagcacctgtctgtctgttaacgttggtgcagatactgctattcccctcctccataccattgctgatggttactgagggtatgggaagggccgactagtccagctgttcacaaacagcccttaatgtcaaactgaatactgccaacgtagttccagtttctgtatctaaagactcagcttggagtcacttgtctggactaaaggtaacccctccttgtctggtttgtgactttctgtactctgatgcccccagctttctgccttctagaaatttgtcagaatttccaaaattcttgggccttccttcttgctctatatatggttttggattcattccttttaaaaaatatttactgtcatttcagtagaattttgacacaataaatataagcacatc

SEQ ID NO: 202008 - DNA, 1000 bp, Homo Sapiens
gtttctctctggctttagcctttgagaacctgtataagaatacgtaagtaatccagagctgtgaagagtttaaaggccaacttctccagtgaactcaacctctgggtcacttgcaaccagaaattggatacctcataatgatgcaggaaagacccgagttcatgatgagtttcaaaggccacgttcatttaggaaccaactctctctggatttacctgctgagttccagcagcgtgatgggctgacatcccacctacaagtatgacacctgtgtaacaccagctaggtacggctggagaaggctgaagagagaatgccattaaatggaagaatgtactgattgtagtgaccttctccacacacacacacacacacacacacacctacagtaatacagcaagcgtggaataatcagccaatatataacattccatcagtattttattaaggaaataacctgaatgtggttgattttgacatagctgcaattacagttttcttctatttttcaagccacaataaggaaaataaactactcatggtctaaatactagagataaagtagattcatggcttggtaaggaaattttaagcattccttcaaagattgacgtgctaaaataagcattgatgttttgagtttttttacacctaggatttttagcttgggtgtgtaggtgaaggccaagactctctgcaggaaaaagcttattttcaaactcagaaaataaaatgtcaatcataaaaatctacttcaactttagcaaaaagaaaaaaaaatcaacaaaaagtatactctgtatgctgggattccgaggttccaacacactgttacaaatctgtggggggtttctttcttctgataattctagagcctgttaccatagaaaggcatttcttcaatggctggttgtagttagttcatgtttttcaatcaaatttgcaaatgtatttgttgctgtatagtgattgttttgcaaaataaaattgcttgtcacct

SEQ ID NO: 202009 - DNA, 1000 bp, Homo Sapiens
tgtcactctctacgtttcctggctgctctacctgtttctgattctgggagtcaccgcagccaagtttttctgccccaacttgtcggccatttctaccacactgaagctctcccacaacgtggcagtatccttttgtccagtgtcctgcaccctggagggagggcagttgtggggaggctgggagatagggtcatgtctatccccgtgtggggaagctgggggatagggtcgaaggcctgggtgggctgcagctgcgatcctggcccgccttgacatgctccccacatggcgtcaccttcctggcatttgggaatggtgcacctgacatcttcagtgccctggtggccttctctgacccgcacacagccggcctggcccttggggcactgtttggtgagagcagccccagtgaggggggcggggaaagcagcaggagagggtgcagggtggctgagctctggcctcctccccccaggcgctggcgtgctggttaccacagtggtggccggaggcattaccatcctacaccccttcatggctgcctccaggcccttcttcagggacatcgttttctacatggtggctgtgttcctgaccttcctcatgctcttccgtggcagggtcaccctggcatgggctctgggtgagcagctctggggctcaggcgtgagatcccagggctgatgggcaggaggtttaggaggtgcctgggacagagaggtgtgaggggtggtcagtgggggctttgatttgattacaagtgacagaaaccctcctcaagctggcttgagcaaaaatgggaacatgtgggtcacataaccaaagaggcctggcagagctgggggctggggagggagtattcaaaagtgtcacaattttttggccaagcgtgatggctcacacctatcatcccagcaatttgagaggctgaggcaggaggatcactttggttcaggagtttgagaccagcctgggcaacatagcgagactacatctctac

SEQ ID NO: 202010 - DNA, 1000 bp, Homo Sapiens
attgtcagtaatccccaaggaaccaatggatgtcagtaggagtttctgttaaatgtctccttgatggggactcagtactgtgtagagacgctgtgtttctcttctgggggtgtgcatcagaaccactggggccttttaaaatctacagatgccggccgggcgccgtggctcacgcctggaatcccagcacttggggaggctgaggcgggcggatcacaagcgcaggaaattgagaccatccttgccaatatggtgaaaccccatctctacaaaaaatacaaaaattaccggggtgtggtggcgtgcacacctcccagctacttgggaggctgaggcgggagaatcgcttgaacccgggaggcgaagattgcagtgagccgagatcgcgccactgcactccagcctggcgacagagtgagactctgtctcaaaacaaacaaaaaaacagatgcccggagattttgagtcagtaagtttggatggggcctggcatacaggtttaaaagttccataggtagttataacgtttacaccttgttaagaaccactgcaacagagagatttgctttatggaagggctcctgccacgcattttcatacatgtctatttttctgactctaagctaaaagtgcgccgacactacacttgagctggtgccaacgtggtgaagattctctactgataacagctttcattttaaacttgtgttgggtcaggcgcggtggctcacgcctgtaatcccagcactttgggaggccgaggtgggcggatcacatgaggtcacgagtttgagaccagcctggccaacatggcaaaatcccatctctactaaaaatacaaaaaaaaaaaaaaaaaaagcaggcaggtggcgggtgcctgtggtcccagctacttgggaggctgaggcaggggaatcagttgaatccgggaggcggaggttgcagtgggccggggtcccgccactgcactccagcctgggagacagagtgagactcagtt

SEQ ID NO: 202011 - DNA, 1000 bp, Homo Sapiens
tttttcccctttaaaggaaactttgaaaggattgtgaatactggaaaatgacaaaactgaaggtagatctatcaagccaattgtctgtttatctgtttgtgtggtttttacccccttgcaatacctttcctccaaaaaattaaggcactatggaaagaatctcagaggagaaaaacagataacttgtgataacttccagggaccgaagtctatgcattggtgagggtggacttgtttgcaacctgttgttattttttttaagtgacccaactgttcaagtccaaacttggcccataattattaagagaatcttatccggttaatcagtattaatcaggattcttcagagaaacaaaaccaataggatatatatctatatattagagaatttattatggggattagctcacccaattatgaaggctgagaagttccatgataggctatgtgcaagctggacccaagagagatgatggtgtgatacagtccaagtccttaggctggagaaccaggggaaccaatgatgtaactgtcagtccaaggctgaaggcttgagaacctgggggccactgtaagtcccagagtctaaaggcctgagaaccaggagctgtgatgtcctagggcaggagaggtggagttccagctcaagaagacagcaaatttgcccttcctctgtctttttcttctagtcagtccctcaactgattggatgtcagcccacatcaatgagggcgtatctcctttattgagtctactgattcaaaggccaatctcttccagaaacaccctcacacacgcgctcagagtaatgctttaccagctatctggatatcccttaactcagtcaagttgacacataaaattatccatcacggccgggcacggtggctcacgcctgtaatcccagcactttgggagaccgaggcgggcggatcacgaggtcaggagatggagaccatcctggctaacatggtgaaaaccccgtctctacttaaaatac

SEQ ID NO: 202012 - DNA, 1000 bp, Homo Sapiens
tgatggttttataaatagcagtttcctgtgggcttttcacttactgtttttcctgccaccatgtgaagaaggtctttgcttcccctttgccttccaccatgattataagtttcctgaggcctcctgggacatgcggaattgtgactcaattaaacctgttttctttataaattacccagtccccagcagttctttatagaagtgtgaaaacagactaatacaatcctgaagcatttcatcaaagaattgtaacaggagatgaaacatggcttcaccagtatgatcctgaagaaaaagcacaatcaaagcagtggctatcaagaggaggaagtcaaagcaaagcagaccagtcaagagcaaaggttggagtggctctggtgacaactcactctgttctcatggtcacaaatccctgctcactgctgccactgctgctgccaccacagaccaagagctccacttgcacagtgctgctggctaagaagaagttgctgtacctgagcactggaccacatggactcacagagactcccaaccaggtaaaggggtgatatggcttgtggatgtcaaccatattctcttcttgatcacctcgctgctggaataatgggccatggtcagagtagagtggtcatggaggttgaatagatgccatgaatgggtccaagaacatggacactctctttcaccaaaatcaattcgggtcttgccactgttaatcacctaacttgccaacagcagagactaccgctgagtctttgagatggcactgctcttggagagatcaggcagccatccagtgagaggttgacccctctgctttggaggggatggacattcatccttatcaccattgatacttgctctagacatgagttttccttctctgcctgaaattcctctgccactaccaccatatgagggcttacagatttcccaatccatcaacctgcttctcacacacattagctcagagtaaaggactcattttatggcaaag

SEQ ID NO: 202013 - DNA, 1000 bp, Homo Sapiens
taatagcatgtggaccctttgtagtttcagcagtaagcacagggcttggtttctatgaatacttattgagtgaatggatgaatgaatgccaatcttgtacattgttgatgttcaccacattgaacccagttctcaaaccaggatcacttgggagattctgagtcaataatttgaaggtctgtatcattcctactcaaagtgtggtccataagccagcagtggctatattatctgggagcttgttgcaaatgcagaatatgtattttaacaagatccccaggcaattcatatgcacattacactttgagctatatttttaacaagctcccaggtgattcctttgtagcccggctgctgacctgcattttgtaaccactgttctagaccttcatttgctgaatggagtggtccctgtgtgattgcctacaggtttcttctagtctcccatttttcttcctagttaacaaagcccaaattttgtttggaagggtgatcagcccttcacccatcaggcctttgcctcagggaagcttgaccccacctttagaccccatgttgggcctgagtagtccaaaggcatatcccattcccctggccagggattagtttagggatagacatgtgaccaaattcagctcaataaaatgtgagtctgcaggggcaatctagaaaaagtgtcctcttccctaagagaaagccacaggagggtaaaaaaatgtctcagaacattgtcctgcctaaacatgatgcctcggacattctgcttctgtcttgctacctgcagcacaaggaaatccaacactgaggggtcacagcagagggacggaaagcacctggatcttacaacattgttgagctcttttgtctcttgacttctagttatgagatgtaattttcttactgttaaagtcatttctgttccttgcaaccaaaagcattcattgatacactgaatatagtacaatatttattcaatcaataaatgcctggcaaattaccc

SEQ ID NO: 202014 - DNA, 1000 bp, Homo Sapiens
agggggtggcatcctggcctctaggataaatgcctggagtatagggcagcgccacgggcacttggagaccctgtcctgcgcatctgccaagcctggcagtttttagagttttttgaaatgttttgatactttttgatacaatttgctaataactgttttgtagaatgcctgccggggttttccacctcatccctttcctccggccccttgatttgtgctggacaacaaatggcagcaccaggacctcgcctcatgtggctttgtcttggatcttgcccttctccatcgctgatgtgatacagctctagaatttcgtgaagttgcatgcaaagttgcatgcagcccgtgggtatgactgtctcaggcccccagctcatttgccaagaggaaaccttaacccccctgagagggtctgcgtttcttctagagctcctacctcagtggtgtgcacagagttggagacacctgagggctggtccacgtctcacctttgccatacgggtcatttcttgatcaaatatatgactggggtcctggtttactcccgcccaccctttcttttaaagtattcttaacatgaaatccacaaaagcggaaacaatgaaccattcttgcactttacagaatcattgtccttagctttagaggttgttaatttcttgtttttaacatgaacagaatgtgtggttctgaaggtgtgtgggggtctcaagaaattgtcctttggggccgggcgcagtggctcacgcctgtactcccagcactctgggaggccaagggggacggatcacctgaggtcaagagtttgagaccaccctgaccaacatggtgaaaccccgtctctactaaaatacaaaaattaggcagtcgtggtcgcctgtaatctcagctcttccggaggctgaggcaggagaatcgcttgaacccaggaggcagaggttgcagtgagccgaggttgcgccactgcactccagcctgggtgaccgagtaagactgtctc

SEQ ID NO: 202015 - DNA, 1000 bp, Homo Sapiens
aaaaacctattcttggactcttcagaatttatctttctacttttacagatcacattcctctgacttttgtatatttcatttgtatctgtgtccagagtttaacactttaatattcctgactttgagaacagatgtaagtttgaatgcccagattcatttgcaaagcaaaatataatagtaaagttcattcccaaacttctgataaccccaaaaatgaattagaatgtaaaatatgaatgtaaagatggttaagtttgaatattgattattttgctctatttcaatttatttgtcattgttataatctagctgaaatgtctgtatagaacaaaaatttttaaaccctgcctcatcacaattcccccaacaaaaatattaatttttaaaatccagtttatcaatttctacttactctatcaattttgagctatgagaccttgcaaaagaattactaggccaggtgtactggctcatccctgtaatttgaacactttggaagaccagggtgggaggattacttgagccaaggagttcaagatgttgaactcctatgttgcctgggcaacatagtgagaccttatctctagaaggaaaaaaaaaaatgagctgagtatggtgacacacacctgtagttccagctactcaggaggctgaagtgggagagtcacttgagcccggaggttgaggctgcagtgagccgtgatcagaatttctaaaattcttttcattctacaattttgctgctttctatattaaaagcctctttgggtaatttatattttaaaaaaaattcctaattatctcaataaagtttgtttttcttgggtctttaagaatttagagagaattaaaatagttttgtgtttaatagctctgattctggaatcggtcaattaaggttgtaacatttaacatctaggacatccaggaaaaattaacctctctgagcctctgttttcttttctataaaatgatgtgggacccacatcatcaggttgtt

SEQ ID NO: 202016 - DNA, 1000 bp, Homo Sapiens
tccaattctctcttctgcttgaccagcttgtacttgaagatctaggttttgggagattcccgggattgctgccaggcactgcctgcccccatctgagtaaggggtgtaaaccccaagagtatctgagacaagtgtcagttaatctaggattgtatattgccaaggttaagaacatgcccaggacacagccttgggaggtcctgaccacatgtgcccaaggtagtgggcctacaacttggttttatacattttagggagacataagccatcaatcaatacatgtaacatgtacattgttttggtctggaaagttgggacaaccggaagggggagcttccaggtcacagtcagattcaaagacttcctgactggcagttgattgagttattatctaaagacctggaatcaagagaaaggaatgtctgggtgatggtaaggggttgtagagattaaggttttgtcatgccgatgaagcctccaggtaacaggcttcagagagaataggtcataaatgtttctactcagacttaaaaaggctgttctatcagtcattcctaaaggaaggagggtatcaagaggctgttctatcagtaattcctaaaggaaggagggtatcaagacgcacgtctggctcccccttcccctcatgacctgaactagttttataggttaactttggaatgccttggctgaggggccatgcattcagatggttgggggccttagaattttctttttggtttacagggacttgcactcacagtggcctggctgtctgtctgtctgtctaacctggcattatgcacacactttgagttatcttattcctgctctgtgttctcattgcatgagatccttgggtgcaggaactacgtctcctccttgttctccagagtacaaatttttctttcaataactgtgcactgagctccaattttgttccaatggctgtgctaagctctgtagatgaagtcgaaaaaaataaagaagtaaagacatc

SEQ ID NO: 202017 - DNA, 1000 bp, Homo Sapiens
cctctttcaagtcattttttatctgccttgtcgatactctttttgttaatttgcccaactcatctggatcttcctttgtcactggctctgtaaatttgagtatttctccaataatgctcctgtcaactttatgaaaccctttgtcttttgcaagatttaaaaattccctttataataagcattctacagtaagtgaagactcactagcaaatatatgagtgatggatcaagagagacaaagtgttaaaaattgacagatgcaacttttaaaaatgaaattcttggttaccatctaacaaagtaagtacaggacctgtatgctgaaaactacaaaacactaatgaaggaatcaaagaaagtgtaaataaatggagagatatactatgttcacgaattggaagtctcagaattattaaaatgtaaattctatccaaattgatctatagattcaacccaatcacaatcaaaatcctaactggctatataaattgacaagctgattccaacattcacataaaaatccaaagaatgtagaagagccaaacagctttgagaaaaggagaaaaaagttaaaggattcacattatctgattccaaggcttcttataaagctacagtcattgagtcagtatggtactggcaaaaggagagacacattctatgtatctatctgtctatatatctatgtggaatataataaagagttcagaaatagatccacaaataagatcaattgaattttggcaaagatgaaaaaataattcaatggagaaaggacagaattttcaataaatgatgctgaaacaattagacatccatatgcaggaaaaaaatgtttgacctatatgttcattttatacaaaaaattaattcaaaaagaatcatagacctaaatgtaaaacataaaaacttttaaacttttaaaataaaatataggtaaaatcttcgtgacctacaattaggcagagttcttggagatgacatcaagaatttaattcat

SEQ ID NO: 202018 - DNA, 1000 bp, Homo Sapiens
attttcatcaccctaaaaagaaatcctgtacccattagtagtcactccctgtttcccctactccctcccaaccactagtgtactttctgtctctatgaatttgcctagtctggacatttcataaaaatggaatcataatatggcacagccttttttgtctggcttttttcacttagcataatgtttgccttctcaagagttacccatattgtagcattgtgtcaatatttcttttaatgtaatgtaattacaatgtaaatgtaataagtgtaattacaatgtaattacattgtaaaaaatgactgaggcagccatttttaacttcctgttttcagttttttagagttgtctctgtatttctaaatgggagattttttaaattggttttttcctaattcattaaagttatatttactctgttaactccctgctatgaaagatgaagaaaaagagtttcattacttatttttaggtcttttatttttaagttaagataatgaatcaagcagatgtgagatacttggatataaaacaagatttaaaaatgatgtctctactttgtgcctccccctcaaattaaaaaatattattgaaaccgcccacagtttcaaatctggtgggtgaagtccatcataagtatgctgttcccacttggcagtgttgctatccctggtccaggtgagatgggaagcagaagggcctgaaccatatgatgcaaggtgattgttgcctggcatcagaacttgggcaactatgaggtttgctgctcttacaatgtacagtcattattaaatcctaagacagaataatcagtagtgaagctagactagcctgaaagatggcccctgaatcagactctgaggagtagaagttagctgtaataaaacactgcgaagaagccctgttaaccaccatgctacactctgctgttaatttatgctaggctttctgagaattatctaagttaatgctgagaaaataaaacagaattaaaaataac

SEQ ID NO: 202019 - DNA, 1000 bp, Homo Sapiens
tgtgtcatttgagattttctttaactgtataattggacgtttaattaacaaaccagagaggaggaaaaacaatgaggtgggtagagcatcatgttcagcctcagggctgtacagcaaagcaattttagactgcggatgttgagtctccagttaccctgagtgccagttacagtgattcacatctgaaagaacagtactgcaggagagggacagcccagggtggatgggtggggtgggcaggagctggctgccaactccttccctgagctgggcctgcagagccctgaggagtggggcatgctgtcctttttgcctgatttccaaggattctgcttaacgaattacttcgttcattttagtaagcacaggtggctggtgaagattttccagctaggtagatctttttgtgtgtggcttatgacttttagggggtgagggaagaaaatagacgaaaatagacttagttacaaatgtgagtctgtgcaggaaaatgtggaggtcagtcgttagttgtgttgtatcaaagacgtgaatgaggaactagctgaagtgtaagaggttgattttcctgtacgattaaaaataaacctgcctctatgcatttcagtcgcaatgtatctgctgagcaaagagatgaaaacaaagaagcaaagcctcgatccctacgcttcacctggagcatgaaaaccactagttcaatggatcccggggacatgatgcgggaaatccgcaaagtgttggacgccaataactgcgactatgagcagagggagcgcttcttgctcttctgcgtccacggagatgggcacgcggagaacctcgtgcagtgggaaatggaagtgtgcaagctgccaagactgtctctgaacggggtccggtttaagcggatatcggggacatccatagccttcaaaaatattgcttccaaaattgccaatgagctaaagctgtaacccagtgattatgatgtaaattaagtagcaattaaagtgttttcctg

SEQ ID NO: 202020 - DNA, 1000 bp, Homo Sapiens
ggatgtaacaaatcacacctggaatccgggaagatgttagccaatcttgatttcaaggtcatttactcaaaacacagttctgaaacccctgctatggaatatgcagccagcactgaactgggggccagaacataggctgccatccacccacccattcaacagttgttcttcacattgactctgggcctcacactagagaaactgttcacaagtcagacgctacccctgctctgatggagttcacattctttgaaggagaaaggcagtaacaagttcacaaataaacaggataacttcagatggtgatagcagctctgaaggaagcaacaatagaataatggtatggagtggggcctagggtgctactttagatggggtgactgaagaagaactctttgaaaagatgacatttaagctgatacctaatgggtgagaatgagtcagcctttgaagaaggatgaaaagggtttcaggcagagactggcaggtccaaaggtcttgtggagagaccaaggttggcatgttctaggaactgaaaggccactgttgccagtaagcacctgcaggaagaatgtagaaagaactcggagagggcagcagaaatttaaatgtttttcttagtgggaatggaatctactggaaaactttgagcaagagagtgatatgatctgatcaacattttaaaaagatcaccctggtttttgtgtcgagaatggactgcagtaaaaatgaaatcaaagagccctgggaggaggctgctgttagcatggagcttagtttaatcaagtgagatgggaaagcactttgcaatttataacattgtggaaatattagcagctattgcaatactagttctgatttaagcgttcatgtctggttcagaattgcacataggccgcacaactataatcccagcactttgggaggctgagatgggaggattgcttgagcccaggagttcaagactagcctgggcaacatggtgaaaccctgtctctac

SEQ ID NO: 202021 - DNA, 1000 bp, Homo Sapiens
aggaaaatagcaggtggcagtcacttgtagtaggatttatttagtttctgttttgagaagatgtagtcttttaggtataccattaagtctttaaattactcccttaattccacccgccaattctaatgcttacatgttccagccccactcccggctcacactcttaggcagaaattcattgctcctgtaaattaagtaataattaataccgctaatgagaaatctgggagtacaggatgtgattttaaaaaatgctcgtatttcctttgattagagtagcaattgttagggatacatgagccagatttggttttatgtaaaaaaaatctttcagttgatgagttcttgtttaaattgtattgctgtggcaatttcttattgtaataatatgtaggagaatttctaatttgaatccctttatttacagaaagctcactgtaaatttgtaggaatgtcatggtactaccccattaagttatttttattagtgtttagttattgattcagcagtctctaattgtgccaaaaatggtgcttagattagattgccattgctacccatgggagctgctacttaattattcccacctcaaattcccagctctcaagttagcactactcctttgcaatttactccttctctgctcgtataaataccctcagatgatgatagttggtggccactatacctttgaagaggttgcccacttctacatggaaaggaaaagatggttttttttttttaaaagatgaatttgataattaacttgccactatttcaccttgtgatgaaacctcaattttaaacatagtgttaattgttttattgtccacagaattaagggtaagtaatgtcatacaatttttgtctttagtcttttagtatggtttctttaacttctattgagcttctgttgcagatattggacatgggcgtatcttctaacgatgtcgtcaccattagtatattcttcctgctaaaaataaatatcaaaccctg

SEQ ID NO: 202022 - DNA, 1000 bp, Homo Sapiens
atcattgtaatgatatgtttatgtaatattttgattaatgtctctccttcactgacctagcagttctagcagggcagtgattttgctgtgttgcatccccagcacctagtctggtatgtggcattcagcatatgtttattgaatgaatggccatgtggttattcagatcctccttgattattggggttaggattgtggcagaagtggcaaaatcagggagagtagtccctgtcccctctgtatcttatacactgcccacactcccaacacacatacacatacagagaattttgtctcaattagataattaacttctgcttggttgtaaaccaaaccactggttcttaaactttcattggatcattttattgaagaattaaatagtgtggttctggcctaatgtctggaaagccttgcagaggagtggattaggtctttgtgataaacaggcagccttccctgctcctgtgtctttataaaatctatttaactggagtagtccaccctccctcaggctcttacaggaatatgttggaggctgtaggaaggtgggaaaccgagagggaaaggactgggccgctggagacttcactcattccctagcaagaaacaagagcagtaaaaggtggcccgaggacaacctgaagctcactccttcagcacttttggctggaggtcacttgttggagccccactcagagctcagcacaccaccccaccagcagcctcctcctcccagctgaggctgcatttcatcccttcccccagcctgctttccctgagataggggagtgtttcccagggcccatgtgacttccactggcaagtgacgattaccaatggtttactagtcagtgaaactaccaaaggcttttgtgctgtagtaatccttttcctgtttaaaactctggggattttctaatgttgccaatagtttttcaagtcagcaattactgtgtggattatgtaatggctcggtattaaaaatagaaaagactgg

SEQ ID NO: 202023 - DNA, 1000 bp, Homo Sapiens
ccctcacttcccactttctctgccattttgcttcagtagctctttaaagctacttaaagttgttttaaaggggctttgagtgtctagtggctgtcccccagcagtgcaggagtttggtgttttaagttaagtaaatcaaaagtgaggggctgaggtttggctgagggtggtgaagtgaatgtttttatcccattaaaatgagttaacacgtaggtttttcctcctcaggatgaagattctgaattcacattagcctctgattttgaaattggacactttttccgtgagcggatagtcccgcgggctgtgctgtacttcactggggaggccatagaagatgatgacaatgtatgaggctcggggaaggggggcttccacctgggtgcttatctctgttggtgcagagtggccctgaattgtggcttaggaaacccccatgcctaatctttttattacatcatcagccagatatgtagtccaagctgctgtccttgttgtggggggaatacgcttgaagaggagaagtctgaggaacagagcaggaaaagcaggtgtctgtgaagcagtttcagaggtgattgccagtttcctatgtgagccctgcctagtgactcaacaatattctctcaaaacctaagcttcagggaacttgtgaacacagggaatatctcttttatggaggtctggccacaacaaacatttattgacagtggacttatgctagcctgtggttcatcaacccaaaagaaatagaaattcctgaacttctatctaattaggtaaaaaggaaaaaaaagaaacccgtgctcccgaagaaaacaacaagattgcatgtcactttcctttctgggctcgagggaagccagctcttccacagtcagaacttgcgggtgcacagcccaagtaccgcttagaaactcccatcctcaccaaggctcaagcagcttcaagtcttcttgatctgtggaaaataaagttttgttttatagactgttactgg

SEQ ID NO: 202024 - DNA, 1000 bp, Homo Sapiens
aatctccttgtttcccttgtgttcctggatagctcagctttgtatgtgtgtttggggggtgggggtgggttctggcttgagtgggtttggcaggggtttgggaagggttaggggaggatggaggatgaagtctcctacccccttccccagctccaggccacagaagcctgggaagggagggtgcctactctcgctgctgtgtgtcttgcagatgtgccaaaatgggggtgggtgggaggggagggtgcctggcagagcagcccctggggtggctctctcaaagcaatatagttcccctgcgggggacagcaagacaggggagagggttggggtggggacctgggggttccccatgtacagctatgtatattcaggggtgttctccgtctggtacccgctgtgggcatctatgtgtgtgtgaacctccccttccccatgccctgcatgacctgtgatgctgcagacaccaccatcctgtgtgcaggtgtgtgttggggggcacggaggggcatgttccatgtcctgttgcaccctccaccctgtgacccatgtactcggttgtaggaagtaaagagaactgagcacaattcactggattctagtggaatctttctctaagcaattttcccattcctgcctctccctgccccggaaccacctgtggtgctagtgttgggatcgggggcgtttaacgctggtgggcagcaataaggggcagatgtgcccagatgcctgcatccccagggtgccgagggcagcaggaaaaagtggggacctcggtgcatttgccccacccctcccctccctgggctaaagcacaatgttctccccgcagattaatgaccctgcaccctccaggcccctactcacatcctcccccaaccggcttcgggtcctcccaccacactctggttttctatgctgttttggtgcaagtacaactgtcgtagtcatggctttgggatgggttctgtttattaaaatcctattgctcctactg

SEQ ID NO: 202025 - DNA, 1000 bp, Homo Sapiens
caaagggaaccctcaaagccatgcaaatacatggaaattaaataacttgctcctccatgatcattgcatcaacaataaaatcaagatggaaatttaaaaattcatttaattgaatgataatagtgacactgttcccggaccaaactgagggttgggctgttatttctcacagccccataatgagatgcagataaactggggaggaagagagtttttatttctgtaaccggttacagggagaagacctggaaattatcactagaccaattcaaaattataaagttttccagagcttatatactttctaggctatatgtctatgtgtaagtgtgtattcgcctaaagacacagtgatcaacttcttttaatctgtaactaaggtctgagtcctgaagaccttgctctggagcctcagtaaatgtcttacttaatctacatgggtccagatactggggtaattacccttatcttgtctcctgctaaatcatggaggtttgaggagttcttcagacccccaataaacttgtttgtggaggtctgggaagtttctttagacccacaataaaactttagtcctaaatgggtcctattaagaattccttcgttattttgtcatgctttaaggcccaggaaaggcctaggcaaaactcctgatgggctttttgttacatcccagccattgtataagggcactggcttttaatatttaacttaaccactcagtcagtactgaaacagctgttagtgagagctgacctaccacaacacaacctatcaaaacctccgggaaacagcaaaagtggtgctaagaggaaagttcatagcattaaatgcctacattggaaagtttgaaaaagcacaaatagacaatctaaagtcacaccttatggaactggaggaacaaaaacaatccaaattcaaactcagccgaagaaaagaaataactaagatcagaacacaactaaatgaaatttaaacgacaacaacaacaaaaaacaat

SEQ ID NO: 202026 - DNA, 1000 bp, Homo Sapiens
aactaagatacactggattgtactggatgagtctgaaattagtgttaaagaagtgtggtgcctgatgttataacaacacctcattcttaactgtgtggccaatgtcaggtataccaaagcattcctctgactgctttttggggcagtgttgacgggagtgaggcattttggaaactccgagggaagcctgtgtttgaggccagagttggtacctgctttaagaaactgttacagggcttgttggtaatgttttgaatctttgtaaaaattgatattctgtataacagagtgcctctctgttacttttggcctatgttgttagaaataagatgctatcttgcatagttagaattaagcgtttgtccatctctagataacattgaaaagtttgagtgttacaggctctaaagtgcaatggagaacaattgcttaggaggaggaaggggaaagtatacttatgttggtgtgtaagcatgcatggaggcctcgaggcaccacaacaaggccaggttcttagcacatcctctgttctctacctgtcatgcttcaagagttccagctggcctgctgtgaagccagtagctattttaaaagtgctggctgcaggattaagccaaccctttacaactggcccagaccgtaatggccatttcttcttaaaaaaaaaaaaattgttgttttttttttttttggtgtgtgtgtgtgtgtgtgtgtggggaagggtgtgggtgctgggatgggggtgaatttcaagttgaaacacgatgatgtggtctgcttgctctctgcttagacaggctttaagaccaattggattttcatggaggccaggacagagagtggtaattgatggcttgtgtacagacaagcatttatccaggttgcgttatccaaactgatttgttaaagctccaggtcacgttcttacactaagaaaatcattcagtaaacatgagacaagtttaggaaaaactaataaaataaacctgtcttaaacttg

SEQ ID NO: 202027 - DNA, 1000 bp, Homo Sapiens
atttgtgccttccttactgacagggaagtgaggttagggcgaaatggtgtagaagaaatcaaacgacatctcttcttcaaaaatgaccagtgggcttgggaaacgctccgagacactgtagcaccagttgtacccgatttaagtagtgacattgatactagtaattttgatgacttggaagaagataaaggagaggaagaaacattccctattcctaaagctttcgttggcaatcaactaccttttgtaggatttacatattatagcaatcgtagatacttatcttcagcaaatcctaatgataacagaactagctccaatgcagataaaagcttgcaggaaagtttgcaaaaaacaatctataagctggaagaacagctgcataatgaaatgcagttaaaagatgaaatggagcagaagtgcagaacctcaaacataaaactagacaagataatgaaagaattggatgaagagggaaatcaaagaagaaatctagaatctacagtgtctcagattgagaaggagaaaatgttgctacagcatagaattaatgagtaccaaagaaaagctgaacaggaaaatgagaagagaagaaatgtagaaaatgaagtttctacattaaaggatcagttggaagacttaaagaaagtcagtcagaattcacagcttgctaatgagaagctgtcccagttacaaaagcagctagaagaagccaatgacttacttaggacagaatcggacacagctgtaagattgaggaagagtcacacagagatgagcaagtcaattagtcagttagagtccctgaacagagagttgcaagagagaaatcgaattttagagaattctaagtcacaaacagacaaagattattaccagctgcaagctatattagaagctgaacgaagagacagaggtcatgattctgagatgattggagaccttcaagctcgaattacatctttacaagaggaggtgaagcatctcaaacataatctcg

SEQ ID NO: 202028 - DNA, 1000 bp, Homo Sapiens
ttcttaagccagcaccagttgtgttttccaggtgagccgagcagttctcatgttgccagacctgaggttcctcactgcctgggacctcctgtccaatggaaggaaaaaggaaaacttgcattattgacagatggatcctgaacccctcagctcatgtaacccttgcagcagtcacaggcaggtgccattcgcacccattttatacctaacacctcctgatgagccaagtcttctcagactccacagtccctgctggtccctggactctggggttaccccggctctgggccccatcagaacctccctggggcctccaccttgaaaacctgcctgagcgtggatggtgcatgcatttactgcaggctccttgagtgatactgctccacaactgggtctggggaggttggccccaggtggccacctctagtggtctctttctggctggtggttgccagcatcaagaaccaccatcacttctcacaccattcaagaagccctcagggttttctctgcatttagaaaagagcacaaaaacataggctatatcctggaagtgggcaggggataggggaaagcctctcccactttcctcttccccaaagtatcttccacagcttccagacttgtcactatggagtgtcacagtcttaggtttggtaatgctcactccaggttctgcaaaagtttgaaggtcagcctcttaaagattgtggtcgctggccaggcgcggtagctcacgcctgtaatcccagcactttgggaggccaaggcaggcggatcacgaggtcaggagattgagaccatcctggctaacatggtgaaaccctgtctctattaaaaatacaaaaaaattagccaggcatggtggcgggtgcctgtagtcccagctactcaggaggctgaggcaggagaatggtgtgaacttgggaggtggaggttacagggagccaagatcgcgctactgcactccagcctgggcgacagagtgagactccatctc

SEQ ID NO: 202029 - DNA, 1000 bp, Homo Sapiens
tggtgaaaccccatctctacaaaaaaatacaagaactagctgggcatggtgatgcgcctgtagtcccagctactctggagggaccacttgagcctgggagattgaggcttcagtgagctgcagttgtgtcattacactccagtctgggtgacaaaaaaaaaaaaattataatcaagttgagttttaagtattagaaatatcctacccaaatgaaatcaaagaaaattgttatattaaacttagtatactcattatcaaatattttcttgaaataacatatggctgcctatgaaaacaataaaaactgacgaatgagtggcatctcagaatgaaagaagtatgttgtttaaatcacgagaggcagtttttaactggtcatgggagtacgctggtagtcccagctacttgggaggcttaggcaggggcatcacttgcactaaagagttcaggaccagcctgggtaacataatgagaccttgtctcaaaaaagagataggtgcaatattttaaagtagacagcacctagaatattgtgtttttagaaatggagcaaatttcaaaaatccaatgtatgacaaaggatcaatgagtaaaacttttagtttttatcgtgctgaggggagttattaaatatagagtcaagcttaaaaaaaaaatgaggcacatagtattgttttaggagctgattcccaatactattttttcttttaatattctaggaaatagaatggatacaggaatatcagaaataatatcactttagagattttcctcagtgaaaaactatgattttaataaaatttccaatgatagtctgtcccattgtaattgtaactcttaataccctttcaacattctctataaagaatttaattgctgggcgcggtggctcatgcctgtgatcccagcactttggggggctgaggcgggaggattgcctgggctcagaagttcgagaccaccctgggcaacacagtgaaaccctgtctctactaaattt

SEQ ID NO: 202030 - DNA, 1000 bp, Homo Sapiens
gtttattctccaggtagtgtgaaagccatcagaagttctgaacagaggagtggtttgctcatatacttaattaagcaaacacttagcaggtatcacggctatagaggtcaacaagacggatccctgccaattagataatttacctgtgtgatctacagttaccttgaaattaatgtgtctaaacccatatttccctttacttctatctgattctcctatattctccatcataattagtgacattgtcatctacctaataagccagggatagtggttaagagtgatggttctggagttacactgcctaggttcatattctgaagccttctgttgtttggccttctgctgggcaatgttacggattcagagatgggtcagcctggttcctgacttcaaggagcttctagtctgatgagatagaaaggcagagatataaatagcagtagtccaacttgatcaagaatgtgacagggattataggattccagaggacagtgtatttgagctcagacttaaaagagtaggcaaagatcagatcctaggcagtctgattctggaggcttttctcttaaacatgctgtcttgggtaactggatggatgtagtgacattagttagaattgaaaacagggagaggattaaagagaataggagattaaagggaaatatgagtttaattttggacatatttctagattcttgtgggaaattctgatagatagaataatggtcagccgggcacggtggctcgcgcctgtaatcccagcactttgggaggccgaggctggtggatcacgaggtcaggagtttgagaccagcctggccagcgtggtgaagccccgtctctactaaaaatacaaaaattagctgggtatggtgattggcgcctgtggtctcagctactcgggaggctgaggcaggagaatcgtttgaacctgggaggtggagtttgcagtgagccgggatcgtgccattgcactcaaactggacgacagagtctc

SEQ ID NO: 202031 - DNA, 1000 bp, Homo Sapiens
tgtaggaaagcctgtagtgtgtcctcaaaccttactaaatgtaggagaattcatcctggagagaagccgtacaaatgtgaacaatgtggcaaagcgtttaactcttcctcacacctgactcagcataagataattcatactaaaaagaaaccctacggatctcaagaatgtaggaaagcctttagtgtgtcctcaaccgttactcaacataagagagttcatactggagagaaaccctacaaatgtaaagaatgtggcaaatcctttaagagatcctcacacctcactgcacataagagaattcatactggagagaaaccctacaaatgtgaagaatgtggcaaatcctttaggaagtcctcacaccttgctgcacataagagaattcatactggagagaaaccctaccaatgtgaagaatgtggcaaagcttataaatgctcttctgcccttactagacataggagaattcatactggagagaaaccctacaaatgtgaagaatgtggcaaagcttatatctgctcttcaacccttaataaacataagagaattcatactggagagaaaccctacaaatgtgaagaatgtggcaaagcttataaatgctcttcaacccttagtaaacataagagacttcatactggagagaaaccctacaaatgtgaagaatgtggcaaagcttataaatgctcttcaagccttactagacataagagaattcatactggagagaaaccctacaaatgtgaagaatgtggcaaagctttttactgttcctcacaccttactagacataagagaattcatactggagagaaaccctacaaatttgaagaatgtggcaaagcttataactggtcttcaacctttgctaaacatgagaaatcatgctggaaagaaacccgacaaacatgaagaatgtggcaaagccttcaaccagtacttaactcttactaaatataagaattcatttggaaaataaaccctacaaatggtg

SEQ ID NO: 202032 - DNA, 1000 bp, Homo Sapiens
gtaaaacaatagggtttgagacaattctgtggcattagaaatgaaagaggaaggtgaatccgggagacggagcttgcagtgagctgagatcgcgccactgcactccagcctgggcgacagagcgagactccatctcaaaaaaaaaaaaaaagaaagaaagaaaagaaagaggaagtaataatctgtgaaatttttccttaggaacttattggcaatttaaaaatgaatttgttaagccatgctggttctgacccaaaagccattccccagccttcctcactcccctctttcactactggcagagattgtctctcattttacaagctgaaaatgccagatgcttgcttttacagtcttccttacacccagagcatgtgcatatgtttaaacggtcaagaagaagtcataacatgggtgtctgggagagcttttatcccacaaaaacaacacttcactcaaaaaacaaaccaaacaaagaaaaattctccttcctgccattggatgtgaggctcagacctctagtaaccattttgtgaccacaaagcaacaagcctgaggaaaagtcctacacgctgagcaacaggcagaaatattgctatcgctgagttgcagaaacaaatctagagatgttttgcttctgtaattattttttatgggagattacaagtgggtttactgttcacttttcaaatcttatttctctatgatgtttagcttgggtaaattttaccttaaatccacttttttatgtaaggtaacatatttgtcggtttcaaggattaagatgtgggcatacttggaggccattattttgcccaccacaggtgaaaaaggaagtgttattcttaaatcatttggaaggatctctgtgtaaatgcaagagcgagacaagaaaatgctgtcattcttttgatatggactcgaatttccacttcatggttgtctgcttcctttttagagtattatttatcctcctaataaaaagaaagtgaaatttccc

SEQ ID NO: 202033 - DNA, 1000 bp, Homo Sapiens
ggatgctgctttggttttaatgttatgatttctgccagatacagtagctgtacacttgggagcatgatgctttttaaagttgctattattttttaaaaattagaaacaacttaaactaatttccttccaattttctcctaacctcaggtgaggtacaatatgtatctcacaaaaaccattcaatatgtctagaatacaaatagaaggtacactataatttgagacaatttgctgatgtcagggttaatagaagtctcttttcttggtttgtcttacctttattcagtatttggaagcttaatgaaatataaaggtaagtgctgtgaacaaatgtaatcgctgttattgctgtgggaatatctcagattgcattgtaatttaaagctctgggactttataaactgatcaagttatgtcagaaacaagttttaagctgtagaagcctgaactgagaatgaatgctctattcctgagaagcaaaagcaaatccaaagtttcatctgtgttaaaagattgataaaattttaataaagatgaatatcgcctctggtacatggagaagctgtgggcctgaatgggtgtaagctgggcctcataaataggtgttctgtctttatactgaaatattctgtaagattaaatgagatataatgtatgtcaagtgcctaacacgtagttccctggaatctaataggcactttaaaaatgcaagttctcggccgggcatggtggcttacagctgtaatcccagcactttgggaggtcaaggcaggcagatcacttgaggtcaggagtttgagaccagcctggccaacatggtgaaagcccatctctactaaagatacaaaaaattagctgggcgtggtggtgcacgcctgtaatcccagctactcgggaggctgaggcaagcgaattgcttgaacccggaaggtggaggttgcagagagccaagatcatgccattgcactccagcctaggtgacagtgtgacactccgtctc

SEQ ID NO: 202034 - DNA, 1000 bp, Homo Sapiens
ggatgatactgctttaccaacgagtgacaggaccatgaacctcacagttgtgaggttcaatgagggctggccctgccacataaatcctctgagggagatgatgacaattcactgctgattaatgccattctgcctttactgtaattagaaggaaataaccccagaatacaaggaatttagcaagataaggaacccctgctgctacctaaacatccatctaaacaaagatgtttggcttttgaagcaaagagtttggttctcaagactgtgttctttgacagttaattttcaagaagactgaagactgaattatcattgttgagaattctctaggtctcagtaaccctctgaaccagcagtttgggtggtcgatgcccagcaaataggagtgggtggccttttctctggtgtataagattcatctaatttttaggaatttttgtaccattttccccctctagaaacacatttactccccaataattgtacgggaggtgatcgaggaagaagaaccaagtgaaaaatcagaggccacctacatgaccatgcacccagtttggccttctctgaggtcagatcggaacaactcacttgaaaaaaagtcaggtgggggaatgccaaaaacacagcaagccttttgagaagaatggagagtcccttcatctcagcagcggtggagactctctcctgtgtgtgtcctgggccactctaccagtgatttcagactcccgctctcccagctgtcctcctgtctcattgtttggtcaatacactgaagatggagaatttggagcctggcagagagactggacagctctggaggaacgggcctgctgaggggaggggagcatggacttggcctctggagtgggacactggccctgggaaccaggctgagctgagtggcctcaaaccccccgttggatcagaccctcctgtgggcagggttcttagtggatgagttactgggaagaatcagagataaaaaccaacccaaatc

SEQ ID NO: 202035 - DNA, 1000 bp, Homo Sapiens
gattttttgaaaagttaaacaaaattgacaaacctttagccagactaaggaaaaaaaaagaagacccaaataaagaaaatcagatatgaaaaaggagacattgcaactgacactgcagaaattcaagggatcattagtggctattatgagcaactatatgccagtaaattggaaaatctagaataagtggataaactcctagacatgttcagcctaccaagatcaaaccatgaagaaatccaaaacctgaacagaccaataacaaataatgagatcaaaattataataaaaagtctcccagcaaagaaaagcccaggactcaatggcttaactgctgaattttaccaaacatttaatcaaagaagaacaagtaccaattgtactctaactattcagaaaatagaggagagagtacttccaaacgaattctacaaagccaatattacactgataccaaaacaaatgacacatcaaaaaaagaaaactacaggccaatatcactgatgaatattgatgcaaaaaattctcaaaatactagcaaactgaattcaataacacattaacaaggtcattcatcatggccaagtgggatttatcccagggatgcaaggatagttcaacatacataaatcaatacatgcgatacatcatatcaacagaatgaaggacaataccatatgaacatttcaattaatgctgaaaaagcatttaataaaaattcaacatcccttggccgggcacggtggctcacgcctgtaatcccagcactttgggaggccgaggcgggcagatcacgaggtcaggagatcgagaccaaggtgaaaccccgtctctactaaaaatacaaaaagttagccgggcgtggtggcgggtgcctgtagtcccagctactcgggaggctgaggcgggagaatggcgtgaacccgggaggcggagcttgcagtgagccgagatcgcgccactgcactccagcctgggtgacagagcgagactccgtctc

SEQ ID NO: 202036 - DNA, 1000 bp, Homo Sapiens
tgatataatagtatctgtgattcattttttattgttgaataatattccactgtatggatattctgtattttgttcattagttgataagatatttgagttctgatttacttttggattctcagaaatagttactcagaactttaaaattgttttacacttttatgggttttacagagttactaatttttgctttgggcagctaagtttgatgtttctgtgggatggacagtaagttggctttgaagctgagaggtagatctaggctaaggccaatgattgggaatactgagcacatggatggtaactgaggccacaggagtcaataggattgcccagtgtgtgtgtaaagggtaagaaggaaaagggcttaggatagagtctggaagaatcacagtgtttaagtgtgacttgctccccactctctgttatggtttgctccatgaaatggtatctgtaacatttaaatgaatttactctttgttttacatagcagttcacttctagaaattttttctacagatagtctcacaattgggcaaatacttaacgttcattgcttgtattttcacagaatcagtctaaaaagggaagaaccctcccagatgttcaggacttttgatacctgttagtcacttgatttttttttttaatgaaaggaatatgtatactcattgcacaaataaatcataaacacaaggaaggataaagaaaataagataggccaggcacggtggcccacgcctgtagtcccagcactttgggaggctgaggcgggtggatcacgaggtcaggacttcgagactagcctggccagcatggtgaaaccccgtctttactaaaaatataaaaaattatccaagcatggtgatgtgtgcctgtagtcccacctacttgggaggctgaggcaggagaattgcttggacccaggaggcggaggttgcagtgggccgagatcacgccactgcactccagcctgggtgacagagcgagactccatctc

SEQ ID NO: 202037 - DNA, 1000 bp, Homo Sapiens
agaatccagtcaaatgatgtcagccaaggatggcaagcccatgcccgaaaaactggcagcagctcacccataccaagccacctgagacatttcctgggctggaaacaacgttacggaaattgaacttccgtgccaaatttaccacacctcgccaaagcctgggcacctctcttattcatgggtgcctcaggagtaattacagctttatagcatatctactaagaactttagtgaaagtgaaaaggagtcggtaaccttgaattttagcaaactagagaaggaagatgtgggtgtcctttcctcacgcgttaacaaggatgctgttaggttgtctatctactctgaatccctacttaggaggaaagtcacgtatctggttgtgcaaatcaaagagctttgacagtttgttttttgtttgtttttatttgggtgcaatttttctagaagactaaataacctgtaaaagattaaaaaccatgattgagtgtgcctagaaataaagaccacccttgactgggctttttctacccaagtccaagtgaactgctttatccatttagtcaatacatattcagtgatgctggttatttacaaagtattttatctacattctgtattaattctcaacagtcctgtgagatcattgtttattcttgttaatacacatatacgcacacagaagagagaagtggggaaccccacaagccttgagaatttcaagaatttgtggatttcagaatggttgagcagctcatagcttttctaacactgaacttttctctctccaagtcccagtcgctcgtcaaaaactgtgccatcagcgcaagaccctgtgatttctgtggtattctaattttatctgagatttattagaatatatgaggtgggaaaaaaagttgtgcaacaggagattggactctggcatcccacagcgtatcttccctgccaacttcctaataaagggtgaactccaaatattaaaaagttattaacgtgcttg

SEQ ID NO: 202038 - DNA, 1000 bp, Homo Sapiens
gtgtgcggtctggtttcgaggaggaagaacctagactcatcagggaggctggctagaagtcgaccacgaagtgctccccagagccccaggcagctttgtgaccccacagcgctttctacttgacgtttgttttagtgccggccatatcgctttgcctgtctgtcctctccattggattgacccatggagcacagagcatctctgtcttctctttatgtaactgccctagtacctggcaaaagaaggaagattgagacaaaagccatagctttgtaagaagaaagtgatacctctccttctagagataacttttttctcctcagtggctgtagccactgtagcagatttccaaatggggtatagcagatttgtaaatggggtgacaagttgtccatggcctggcacagaataggtatttgataagtgtctgttgactgaatgcctcctagacttcagtttgtgttttcatttcttacagatttggaagaggcgagataatgatgaaaccaaccagcagggggcttgaaggaggcgtctagggctttgcccccaagggctgtggctgatgatggtaaataagaacacagaagctgtagctgaacacaggctggctggtgggcttcctaggccagcccagcttgtatgggttctggctacaccagagcaccaagagcccacttgcctgggatggccccacactgtcactcagctgttctttgatcatttttttctagattgatgctcctttctcccatgcattgagctcccatctagcttcagcagggcagaacccttctccagatgtgtgtaacttatgtcttgagtatctgggagtagttgaagaacagataattccttccaaacatcaagccttgggattcttggagcaagcagaaagccagtaacttcgctctgttagaggtggaggattttcctatggttccccccatttcctgatttgtatttttagatggattaaatagtctcctgtttttaaacc

SEQ ID NO: 202039 - DNA, 1000 bp, Homo Sapiens
agaactatgcagatccccaagtttaaaagtacaaatacagcaccagtagttagctttctagctgggggagaagacaggagatttttcttccacagatgtttattttgcttcctgataggtactgcagcaaagccatgttgatgtgtagatgcatgacttcctcactaagctgctgcacaccagctttgcctgcatgattcaaatttgtgcctcagtaaaattataaattattgcatgtcataccttgaataatggaaacggcaaacattaaacctgtgattacccataatgtactttaataataaaaaacatggcagccaggtgcagtagagtgcacctgtggtcaggaggctgaagtgggaagattgcttcaacctgtgagtttgagtcccgcctggtcaacagcgagaccccatgtgtctgtctgtctctctctttttttaaaggacagaggctaagctgtaaggttagcatggttctgcctgggctttgcttctgtgcttctgtgcaggctgagctgtaaggttagcatggttctgcctgggctttgcttctgcgcttctgtgcaggctgagctgtaaggttagcatggttctgcctgggctttgcttctgcgcttctgtgcaggctgagctgtaaggttagcatggttctgcctgggctttgcttctgcgcttctgtgctagcaggtgcccacaaaatgtctttttgaatttcttaatttttgggttctggatgcaattcgtgcacgccaagaaactacttgcttgtcagtattttaattctgtagtacatgtgtgtgaatatcagccagtacttacagtaggaggatgaacagaaaaactgagaagacctgtctttcaaaagatgggtttatccactttttaagggaaaaagtgacagtttggcatgggatttgaaaagtggaaattgtggaaaaattgagctgttgaagtcccacatataaccagatttaataaagcttcacatgtgaattagc

SEQ ID NO: 202040 - DNA, 1000 bp, Homo Sapiens
tgagaatctaatgcctgatgaatctaatgcctcatgatctgaggttgaatagcttcgtgccgaaaccatcccccacccccatcctgctaccccgagtccgtgaaaaattgtcttccgtgaaaccggtccctggtaccagaaaggttggggaccactggcttaaaataccaataaatttttgaaccttaaaaactttgaagaacaaggtaaattggtgttttatttaatgtcctaccctttaatttgttgcattttcctatactctttacactattttatcccaaactatgtatatgaggtgaaaatatatatgaaaagggatactgaagaatatttagtttaaaattaatttcttacgatcacgagcacatggtggcataattacaaagcatggaagtattcaaatagaaaatcaaaggtgtttcaatatagtagaatcccaggactgcattttaaaattgcctcacagatcacactcgctggtggcaaatatcatcatcgttgctaaaggacagaaaatactgatgtgtgttttaactaactggtatattgatccatgggaggctgcacagaagaccctgcggccaggaggggcattgtcagtggctgcttctcctgagctccacgccttcattgcagctgcatgttcgatacaatacacctgcttcacagccccatggacatccctacaggtactgtcatgtgaagccttgcctagtagttctctccagggcaaatgaagctcacagttttgcaaggtggaaacctcttattcacatttgctttgattccccgatggagtagactgcctttgttccatacaggcaaagtaaggatattttaatatcatcctacttcttattagcatttcatttgtctatgtactgtatttcatttgtatgtctcctgaaacatccaaatagagaacataagaacactttatgtacaatctggaaaaaaattacctgagaaatcaattaaagatttttccccttttctg

SEQ ID NO: 202041 - DNA, 1000 bp, Homo Sapiens
gggcacggtggctcacacctctaatcccagcactgtgggaggccgaggctggagaatcacttgaggccagggagtttaagaccagcctgggcaatatagtgagaccccgtctctaccaaaaaaaaaaaaaaaaaaattagccaggtgtggtggcacagcacctgtagtcccagctacttgggaggctgagtagggaggatcactgaaccctggaggttgaggctgcagtgagcagtgactgcactgccctccaacctgggtgacagagcaagaccctgtctcaaaaaacaaaaaaagaaaagtggaatatgagaaagaaacctgattgatgtaggaaccatgcagctgtctctgagccacgcaaagaaggcaagaaatcttccctggtaatttatgttactatatatagtggctgtaaacaataacaaaaaggaaaagacaggaaaggaagaggagctaaaaattgtctcgttagcttgtgggctggtgtgatccaatcatagccaggagaaatttaaaggaccagagagaggacagacatccttcctggactgagaggcgaggttactgttctggtgagtggagcgttaagttgaaggcccctccttggacaggctgaggccctccggggaccttagcagtgtgttcacacggtcatgtgtttttataaaatctgtgaacataatacgttttgtatttttcttcagtagaaccgctaaaggccagtgtggtggctcaggcctgtaatctcagcactttgggaggccgaggcaggtggatcacctgaggtctggagttggagaccagtctggccaacacagtgaaaccccatctctactaaaaatacaaaaattagccgagtgtggtggtgcacacctataatcccactacttgggaggctgaggcaggagaatcacttgaactcaggaggcagaggttgcagtgagcagagatcgtgccagtgcactccagcctgggcaacagagcaagactctgtccc

SEQ ID NO: 202042 - DNA, 1000 bp, Homo Sapiens
acgggtcatttcttgatcaaatatatgactggggtcctggtttactcccgcccaccgtttcttttaaagtattcttaacatgaaatccacaaaagcggaaacaatgaaccattcttgcactttacagaatcattgtccttagctttagaggttgttaatttcttgtttttaacatgaacagaatgtgtggttctgaaggtgtgtgggggtctcaagaaattgtcctttggggccgggctcagtggctcacgcctgtactcccagcactctgggaggccaagggggacggatcacctgaggtcaagagtttgagaccaccctgaccaacatggtgaaaccccgtctctactaaaatacaaaaattaggcagtcgtggtcgcctgtaatctcagctcttccggaggctgaggcaggagaatcgcttgaacccaggaggcagaggttgcagtgagccgagattgcgccactgcactccagcctgggtgaccgagtaagactgtctcaaaaaaaaaaaaaaaaaaagaaaagaaattgtcctttggttgccttagttaccagagttgaatgaatgtacacatttcggtagtgggggggcagagcggataaccccttccttgtctgtttcctttgagaaaggacactccaccttttcaaaggtacttaaagccatctttacagattgcttgtaatgtaaggaaagagtcatgtcctttggattgattgaggttaaatcatcaaccactagccccctttcaaaatcagcgagatatttgatgattaagtgattcattgggtatgttctggctactgatgttactgaaatctgcaatcgtgtatgttttttaatttgttgcttttgtatttgtaattttatgacatttcaaagtttctgtgtcttaactctttttaattaattttctgcacgttgcttttttctctttgtttttaattccatacagagtattcaattcttgaaacacattaaaataatttgcttgct

SEQ ID NO: 202043 - DNA, 1000 bp, Homo Sapiens
ctgcttggccagtggttgcattaccaggccacttggactaccagaaaatcacctccgtgctctttcaagccctcggatcccaaactgcttcctaaaacatcggatcacccagccctggtgtgcttacccacaggaagtaagaggtcaggctccgtcccagccagtccatgatgttgaagaggaggaagcagcagatggggttgaagaactgacctgggagggaaacggctgcagctcatactggtctccaactcccctctcccgtcctctcccctttgtaccccctgccctgccgtcttctccaccctgacactcactccacttcccaggactggtggagctggtcaccatggctgtgatggcggggaagacggacagggtgactgtgaagaccaacacaaggcacagcgctgtcagccagatctgggagccagaggcaggggtgtgagcaggcagggcagtcccagggccccaccctcttgcccaagccccatgtgggagcaggacacttggggcctggcccagctgtgtccctgacccactgtgaccctatgaccttggagtcaatgtgagccccattcttccccaaagatggtggttgggggctgtatccaagccaaaccttctggaagacagtgaagactgaaggttttcctggcttctggggctcatctggctctgatcccggctccttctccaggtcaagatccagggtcagagctactttctggggactactgggaatcccgttctcatctggggtgaggggggacggggaagggtcatgcttgtgacccaggtttcccgacagccaggcccaacgaagggagattcccagcagttaaaacaagtgatcctcagctcggcatggtggctcacgcctgtaatcccaacattttggaaggccgaggcgggcatattgcttgagcccaggagttcgagaccagcctgggcaacatggtgaatccccatctctacaaaaataaaaaaattagccggg

SEQ ID NO: 202044 - DNA, 1000 bp, Homo Sapiens
ggaaaggaagtagaacttgaagaaatcagaaaagcttacagtacactgaatcggaagtggcatgataaaggagaacttctatgtcatcttgaaacacaagtaaaagaagtgaaagaaaaatttgaaaacaaggaaaagaaacttaaagcggaaagagacaaaagtattgaactacaaaagaatgcaatggaaaaacttcatagtatggatgatgcctttaaaagacaagttgatgcaattgttgaagctcatcaagctgaaatagcacagctggccaatgaaaagcagaagtgtattgattctgcaaatttaaaggtccatcaaattgaaaaagaaatgcgtgaacttttggaagaaacatgcaagaacaaaaaaacaatggaagcaaaaattaagcaacttgcttttgctttaaatgaaattcagcaagatatgtgatggttctgagaatgaatttaattgaaatagaccagcagacctattgtaaaaatgattaaatattgtaatagtagtaactgctatgactttgaaatgtctctttctatacatttcattatgaatatatttttaaagacttttgatcaagtattaattgtataggttttttataataaattgttgacaattttgtctattagaaaaaactatcataactagacttacaatatttttcttgtttctgtactatacgttgtttggtaattacacatttgcctacaaatttgtgaatgaaaagattagtattttcaccatatgaggtaaaacattttaatcattgttatcttattgtgatgatgaagaactaattatatttgttatttaattgatgtagctcaattcttttaaagtacttatgtagccaaaaagcatttgaaatctgtatgataaaagatgtggcattcttaagaaagtatatgtagccatctccacatcactcattatgaccccttcttttataatgcttatatcttttcattaaagattacatttaaggttttat

SEQ ID NO: 202045 - DNA, 1000 bp, Homo Sapiens
atacctaggaacacgtataaccaaggaggcaaaggatctctacaaggagaaccataaacgagatgctgagtcccagcgaggtcggaggtgccactgagccctcatcgtggtgccgttcccgctctgggttatttatctgttgctcatctcagctgttgttcctacctcaaatttcaagtccctcaacaaatataacagaaccacttctagaatgaacctttgagaagggaggtagcagtgcattgtataggaattggcattctatagaaaaccacagaaactggaaataatgaagggttgtctcttggttttaaaataatgtatacacctaaatcatccccttatgatactcatcctctaacagcaattgaacttcaatacaatgagtcattcctgagttcactcgcttcacattacatatgtttctctataaccacaagcatcctggcttggtagtgctcccacagcaccaaaaatccctgaggaggctgacaaacattgtgctgactcatgctggagacaagccacagagaacttccatcccccaccacatcagccacggagccagcccagcctctgcccacccaggcctcagtccccagtgttaagttctgatccctgatgctggcctgccagtggccagtcaagattctctttctgaaagctagtattttatgaggactgactgttgctagacattacactaagcacattatatgttgtacttcattttaccctttcaacaatcctattagtagcttactgtgggtctgcaaagccttactcaaaacatatagggctagaggttctcaggattctgaattttaaaaaaaatttgtaaaggcttatggctctcaccactgttattcaacgttgcattaaagtttctacccagagaaggcaataaaaggaaattaaggctatacagattggaagtgaagaaataaaagtctttattctcaagaatacaagacactatgtatagaaattgtaaggaatg

SEQ ID NO: 202046 - DNA, 1000 bp, Homo Sapiens
tcacatgcagaagaaaaatccttttctccataataaaacaagtgaaagtcaaagtctaatttgaaatgttttcaataataaaatgtgctatattatcaaacatataaactggttatttagtaaaccaatgttcattaaattactaaacactctcagttcctggttcaattactctgttattggcggggggcgggggcagagggaagcataataatttccaccaacccttacgtgaagattttttttccttttaaattaccacccaatttggcatttatttaaggtcagggctgtgcttcccataactttgcagagtgtgtaacccgttgacgatttcagcgcaagagacattatttgatttcttgtggaaggcttacaaagtaaagtatcaataccaaacaagtgcttgttgagttctaaagttaaaaaattaaaatcgttctttccttaggtatacaattttattgccaagcaataaaattggcaagaaaaccaaagttattgttcagtactttgtattgttctactctgtgcccaccaaatgtcaaagcactggaaggacagagggacaagagggatggccctttcaggacgggaacccacgtctggctggagagataagaccgattataatcagcaagacatggccaggagctaaattataaggaagaaactgctactgagggggatcaggaaaggatgcagaaggatgtgctggaaaaacagaggagggtttctcagaaaaagcatcttccgtccaaagaaacagtgtttgtacaggatgaaaagtctgaggaggtcatcttgggcaaaggaaacggcagctataaatatttgtgaattaacagatatgcttccctgcacaatgaattaccctttttgtctccagtaagcacccagatcttaatgtcagcttttgcaagttttgaaatggtttctggaactccatcctgtagcttatcttcaatagctgtagctcccaggagctagaatgtatatt

SEQ ID NO: 202047 - DNA, 1000 bp, Homo Sapiens
ggccaggggcagagaaccccaacagcaagagagccccaggtgatgctggctctccacgtgcatccggcacgtttcactgcagccatcatcaacttggcaaagtaggcaagctcagcttgtggtttccattttgcagatgggcccccggggtcagtgatgggaagagcagaagaggatgccagcccagcctggcccaggagcaggtgtcgttgtggaggaaagcttaaactcaacagcctctacccaacatctgccacctgcatggccccagatgcccccggtgcaggccaggtcaaggtgggagtaaactttctttgcctccctccccacagaagcaccagacccacctgagccccagagcctcatgccagcagctcctggctgttcctcacctgaggctagagcagcagctgccagcttatagatggggcggatggcaggtgatagactgggaagcactgctgggtggtggaggtgggcagtggcaccatgacgggcccctagccacacagctgtcctcactacggggcagggagcagcctcggcaacaggcaaaggccagagtcagagtggtggggaggacaggggctgctgccccgctcctggaaagccactgcagaggggcagtggctggcagtgccaggcctgggggaagtggaagcgtcctgtctgggggcagattcccaagcaagggtgacccatggttaagggccactggaaagctggagagagcttgggatcccttccacctggggccaatggtgttgattgcagactggaggggtaacctccgctgagggtcattatgtgccaggcatggcattgggtactttctgcattgggaccaggcagccgggcctgccatttgaggcagcgagcctccgtgacctgtcctccctcatttgtaaagtggggtaacagctatgtcactggccagttgtggggattaaagtgctgagcttagtgcccagcccaaaatgctcaataaagctattcagtg

SEQ ID NO: 202048 - DNA, 1000 bp, Homo Sapiens
agggggtggcatcctggcctctaggataaatgcctggagtatagggcagcgccacgggcacttggagaccctgtcctgcgcatctgccaagcctggcagtttttagagttttttgaaatgttttgatactttttgatacaatttgctaataactgttttgtagaatgcctgccagggttttccacctcatccctttcctccggccccttgatttgtgctggacaacaaatggcagcaccaggacctcgcctcatgtggctttgtcttggatcttgcccttctccatcgctgatgtgatacagctctagaatttcgtgaagttgcatgcaaagttgcatgcagcccgtgggtatgactgtctcaggcccccagctcatttgccaagaggaaaccttaacccccctgagagggtctgcgtttcttctagagctcctacctcagtggtgtgcacagagttggagacacctgagggctggtccacgtctcacctttgccatacgggtcatttcttgatcaaatatatgactggggtcctggtttactcccgcccaccctttcttttaaagtattcttaacatgaaatccacaaaagcggaaacaatgaaccattcttgcactttacagaatcattgtccttagctttagaggttgttaatttcttgtttttaacatgaacagaatgtgtggttctgaaggtgtgtgggggtctcaagaaattgtcctttggggccgggcgcagtggctcacgcctgtactcccagcactctgggaggccaagggggacggatcacctgaggtcaagagtttgagaccaccctgaccaacatggtgaaaccccgtctctactaaaatacaaaaattaggcagtcgtggtcgcctgtaatctcagctcttccggaggctgaggcaggagaatcgcttgaacccaggaggcagaggttgcagtgagccgaggttgcgccactgcactccagcctgggtgaccgagtaagactgtctc

SEQ ID NO: 202049 - DNA, 1000 bp, Homo Sapiens
aggcggtcctgaaaacacctaaccacatactgaggattccaaaccaacaccgaaacagctctttccctggtttagaactgcaggtatagtcattttccttgagcagattagttctctttcatgagcctctgttttctcactggtgaaaatgaggataatcccacctactccacaaggttagtgtgagaagtagatagaaacgtgtgtaagtcctttttaaatggaacagcatgatggagaatagtggccatggctattgtcagactgtttgagcagtttgatttcaagattggctgcatatattcttgaagttctcataaacaccaaattgtttctgcctttacagaaattagctgggaagatgcatctaggagctcattccattattcattacatattaactgaacagttacttaatgttaggccaagtgcatgcaggataaacaagaccagcacagtgccagctgtcagggcagttcagtgaaggggacacacacactgtgctgagagccagagggtaaaaggaagaggctccgtgaagaagtgagaatggacggaatcacgtgtgcagagacactgagtcgcgctagacactccaggatacatttgaagcatgtttctctgctacactgtactgacagtagtaattgtaatatgttcataagtactgcacattttactctagaaaatttaaagcaaaggccacgcacgtgtgactcacgcctataatcccagcactttgggaggctgaggcaggtggatcacctgaggtcaggagttcgagaccagcctggccaacatggcgaagccccgtctctactaaaaatacaaaaattagccagatgtggtggtgcgcgcctgtggttccagctactcgggaggctgaagcaggagaatcgcttgcacccgggaggcaggggttgcagtgagccaagatcgcaccactgcactccagcttgggtgacacagcaagactgtgtctcaaaaaaaaaaaaaaaaa

SEQ ID NO: 202050 - DNA, 1000 bp, Homo Sapiens
aggtactcaaagacagtgttactagggtaatgattttccagtatggccaaaagacatcttctatgcaaccaagcctcacctggccttacaaaacaaaagtggtttggccagagcttgaataacagctgggatggatggcccaatgtaaaggagcaggtggcaggccagtggaccccactctggggtggccccatggtggacagagcccctgctccctaaaatggccaacacctgtcccaaggaaggccacctagccagaagtgcccaccatctgctgtaatcaaatttgcaatcacaggtaacttttcctctcaagggtccagctggcaatataaataaatggaatgaatggggctcctcagatgagtacagcatcttccatgtatggggagcagacattactgagctgctgccatgtgggaatctcagtccagttgtgccaggtcttctgagttattccaagagaagcaagaattcgtctttgtgttatagtttccagtttctaaatattggtagcattttaaaaatatgtagtccaaagaagacagtcctgtgggctgactttggcctgcaggcaccagtttctcatctctgcttgtgaatgtcaagttctagagagaccattgctttagtcacctctgtcctctccctcctcttcccactcctgcctcaccaagaccaaattccaaaagaccagttctcctcaaaagttgtgtttcataaggaccttaaaattggctactagtctaacagtaatttatttcagttgaggactttttaaactccatgactaaccattgagggtactttctggatgattaagttaataattttaaaggaattgccttggtttttgaggggtagagggtatattatttgggaagtggctgtttcaaagtgagtgggatctaggtttaaatccagcttcaccacctgtatcacttaagcaagtgatgcagcctctcttagtttctcattatttaaaaaaaaaaaaaaaaaa

SEQ ID NO: 202051 - DNA, 1000 bp, Homo Sapiens
agcctagcagccatgatgccctcggaacctggccctatggtatggatgtgaggactacgcactggctgccctgagcccggggctggaaatcatctttggctgccaaggatctggacctattttggagtggagagtcatggttaaaattcccagcccggcccaggtacgggaatcccagcattttgtgaggccgaggcagggggatcacctgaggtcaggagtctctactaaaaatacaaaaattagacaggtgtggtggtgggcgccactcaggaggctgaggcaggagaatcacttgaacccgggaggcagaggttgcagtgagccagatcatgctgctgcactccagcccggccgctcaccgtgtgtgttgctgggtgctggggctgtgacttatcccctctcctttagccttgccataagtgtagtatcctatgaggctgagattgggaaaggttacatgcaggtaagccagtggacgtggccgatgcttcaggctccttccagccaggtccagcagtgttaccatctgcttctcctgggaggacaaaccaggcacccccaccatgaagtggctgcaggcaccatgaactatgttaacaaccccagtctgtactacagaaagggctgcagccacatgagaattcagtccacacaagccccatggccgtgttccccacttcagccacagggctcagggagccccatctggcgctaaggggaactgctggggtgtgggtgacacctggcctttggcgttctgccttggggaggtttctggttttgttacggggtggaagaataggacctgggggtctcggatgcaacctgcagaccccgtggctcacccaaccccaggttctgcctcccagaccagaacgggcatggcctggtccttggcaccgaggtgcctgctctgtaaatatcaagggattacaactttaataataaagcagaacttgaaaacaaaaaaaaaaaaaaaaaaaaaaaaaaaaaaaaa

SEQ ID NO: 202052 - DNA, 1000 bp, Homo Sapiens
tttgtgtgtcatggtaagaaattcgaacttaataccaaggtagtcagaacaaaggacaacttttatacacgagggcgtcctgaatattcatctaagaaacaatgtctgatcaaacgggacaatccagccagcaatcctgagtcccaccggattatgtttggccagctttctagccttcacattgttaatttattagcaatcttttcaggagaaaggcaattattaaaattatgtggacttctagtaaaattatctcgaagatttacaattatgtataccaataacaaaaaaactacatgttttctgctcccctgcctttgtaggacaagtgagcattccagagaatttctacatgaccagctgttcattcttttaagaggatgacattcttcagctcatctggaaaggatacttcctttaagtctgttattcacagtctccaagggcaggtgtagttgggaaagacatttcatatggaaaaacaaacttgatagggtaaaaaaaaaaaaaaaatgagatgtaatctggaggcccaagtcattttcttaggagaaactcaaatgtgtttggtgttatctaaccttctgcagtttatcagtctgaaacaaatgcattctattctcatttgaaaatgtctgaacagccaccaattttcaaaatcacccatttaactagagactttaaagcccagaatttgcagttacgtatttcagaatgatttagtaattttgtgagcagctcagaggttaagtctacaatgtctgactacggtgcattattgaaaatatcagtagtgtaaggatcccgtagattggtgataactttgctcttaatttgttatttcaacagttaccaccaacagttggtgacttaacaaattaagagcatagttgccatatgctcatatttggcaaatatgtcaaaatggccatatttgccaatttttaagacaataaattcacagaaaatgcattacagaaaataacttaaaaaaaaaaag

SEQ ID NO: 202053 - DNA, 1000 bp, Homo Sapiens
ttagccttgtgtccttggacaaattacgtaatttctctgtgtcctcatctgtaaatgagctagtaactgtcttgcagaataatgaatattaaatgagtaaagaaaagtgcttggtgcgtaaaagacataccaataaattttagtcatcgttgttactgcaggactctaggaaatgtgtttgattctcgagatacagccctgagaattaggcattatttgtaaaatgagaacactgaagcccagagagatgatttgcccaagggtactgtgtcagagccctgactccaacttagataaacctgattccgttttatgacttccagtacacagactattttctgagcacctcaaatccccataactgaccctttgcccaaagaggtacatgaaactgtcagtaatttcccccctctaacctttgagtgttccaagtgtttcttcctttcttttattgtagaagcactggatttattgagtgaataaacttaatatagcttgccagccataactttatattagaatagtttggcttgcctcagtgcttggaaataggggtggagtcctcaaatgtccccccacatccaagtcaacagttcatctcttctctctaccaaaagcttgaacgtctctcagcatttttggaagcataaggaaaggttcagaaattagaatacacattccaaaagcacttattcagcacttgctatgtgtattgcttgctatttgcactggagagaaacaagaaaagtaaaactaagagaacttagcatctgattgactgttccctttcttttatcccctatacgtcaaaggtacctaaagcttggaatttatgttatttcaaggatattggttccatcaaatacataatgaagattttgtgaagaaaaagcgatgttgttttgaacattgagagtttgaagttccacctatgggggcattcagattcagcattcccttcaggattggtgcttgggagatagattgagtcatcatttac

SEQ ID NO: 202054 - DNA, 1000 bp, Homo Sapiens
gacgtttggcctccctgaacgcctcgagctccttggcgagcacgtgaccccggcgggcacgcaggagggcaggcaggcccctgcgcaggcgctgggtggactgcttccaggtgtcatattggaagaacttgcccacggggtatctggggaagttgtccggaagcacggtcggaggggtcgacacgtccctctcggacttggcgggggtagcacagtacgtctccaggagggccaggtcacagctgcggaaacagcactcctcaacgatgccacggctgcgacggctcacacggcttgcgggcctgctgaagtagaagccgcggtccccacagacgaactggagggtgtccaccagctccccgccgcacagggtctcactggggcggtaagcagcaatgcagcacgaggcgaaggccaagaaggtgagaagcaccagcatcgacttccccattgggattcccattggtgtctggaagccggcgacgctgccgcccacctccctgctgcgtgtcgcaaaccgaacagcgggcgttggccctcctgccggacactcctctgccagcgccgctctggccgagtcgcgggggccgaatgtgcgacggggcagagcggggggatggcttttttttggggggggggggagaattcgtctgattgtccagggaggacgggctgtcttcgggctggggcgggccagatgttgtacttttcgggggggaaaaggtatcgggaaatgaggtcagctgttgtatcaaggatagaggggggcagagatagtgggagagacagagtgaacgtgaaaggggggggccgaagagagggcgagggggagagatgaaaaacaaaatccaatcagggcgataaatggcggggggcaggacgtggtggtctccaggctggcttcgtgcgttcttgcttttgtcactgcccccctgttacatggggggggggtttaatttggtttctgagcgcataaagctaaggaggggtaaaaaaaaac

SEQ ID NO: 202055 - DNA, 1000 bp, Homo Sapiens
gtttttttttttcattttgttacccacttgcattttgttttcactcagcagaaattctccttctctgttttccttttatcccatccccaagaatgtggaaggaaggtgagaaacatggcaggatgggaaataggagagtatgactctctatagctcatccaggagtaatcaattaagaagataaattggatgactgtggagaagctctgtgataggaacacttcagtgtggttgctgagaggagacagtcattgaggtagaaggtttgccaaagatccagagctcagagctccctttgtgctctttgggaattaccttgcattcagtttagaaacatggatctaaaagttactgggaaataagcagatggagacacactctgttgtttacgtattggaagaagggaacaagccagttttgttagaggtaactcattttccatgaccaaacagactcaacagattcaagtactctgcttactctaattgactagactctaggttttatttgacatcatagcattacataaatcactctgataacataagtgcacagtaatatgcctgatctcttcctttttaaaagccaacttgagttcagtaccatctgaatacacacacatgcacatatacccacacacgcatacacacatactcctgtggcaaacataataatgtatttatttagaattataatatgaccatcatgttaattattttttacctaatcagagttgttattgacaaatgtcataagtggaaagtattaattcttattgtcatcagtatttagccattatttagtagctcaagaatatctttatgtgaatgtctctgtaacttggaattgcaatttcactgtgttaagtaatcagaactctgcttataagatttatctgtatcttgtttcataatttaataatgaaactaaattcaagttaatgtaatgttgatctccgtcgaaaaataacttgtgagcattaaaatatctgtatggcatt

SEQ ID NO: 202056 - DNA, 493 bp, Homo Sapiens
ggggagcctagtgtgggttttgtgagtcggtcgggttaaccggccccgaggccgcccggctggagcggcggggtcacctatgggccagtcgaaaagcaaacccagagagaagaaagaggaggagaagagcactaccactttagttacaaagtctaaggagaaagtaatggagaaggaggccaagcagtctgacaaggagtcgcagcctgccgaaagcctgttgttcgcgacatccaagcactcaaggccgtcgtcttcgtctgaagacaaacctgagacaaagcaaaggtcaagcaagaagagaagtgtcatcccgcagatcatcatcacccgggcctccaacgagacgctaatcagctacggcatccccgacaacgatgaacagagaaccattcgggagcatgccgactggggtccttaccaccgacacaggagccccagcacaatagcagcctatgatgtacacaacacagaataaatgagagctctcggt

SEQ ID NO: 202057 - DNA, 1000 bp, Homo Sapiens
cattttatttgaccagtattacccagacaaagatactataagaaaaaaaactttaaaacaatgtcttcatgtgctaacatctgtagttaaattagccattctttttacatgaaataatgggaattggtatatttcttccatttcatttttctatttctttgctaatataccacctgtaacaaattcaatctagatgctatctgtccacttgcctacatttccattctattcaagccatttttgctcttcaagtaccttgatcactttggaatcatagcattgcaagctatttcaaaaaaagttgcgtggttggattgtgctagctacttttaaatttataaaaaatgccccatatattttcttgcttgtctgggaaatatagttgctatctaactagaaaaataagagggcattattaaagtaactctttaagcatcgtactaaatgtttgacttccattaaccatatttcttgtagtagctgtagctattatgatactgtgtaaaacagaacaggttctatatatgcaaatgacattttcatttaatgtaccaaattgtgtatctaacttttataatataggttaaacagatcctttctaagatggcattatttaatctttacttaaaactatgaaaaatatgtgtaagttattgtttataaacagaagagactataattaaaatatagagcagattccaagtgaccatcattttactttttagatttaaaacagaatgaaacagaagatttagtcataagaagatgcttgaaaaacaatccaagtatccaatgcagtggctataaaatattatttcatcatttaatcttaatcattttgaaacaaagacagacttcaattttacactgcttgcactttattttgtacagacatttcattaattattactcaattttgaggtgcaaaccttctgaatatagctttcattttggaccaaacaatttgttatggcaataaataatgatgcattgaaaaacc

SEQ ID NO: 202058 - DNA, 1000 bp, Homo Sapiens
aatttgcatgcagtaaagtctcgtctttttagtgtacagttctgtggaatttcgataaatgtatccagtgtgcaaccatcacatcaagatatagaagggttccttcacccctaaatccttccttggggatgacaacctctcttcaccctcagtcctttgcaactaataatctgttttcttttcctatagttttgtcttttctagcatgtcccataaatggaatcttatagcacgtagccttttgagtcttgcttctctcacttagcagaatgcatctgatatccattcacattgtgcctgtatcagtagttcattcatttttaataatgagtggtgttcagttgtaggcctacactataatttgtagagggacattaggattgtttccagatttggcagttacaaataaagcccctataaacattcacgtacaagtttttcatgagcatgggttttcatttctcttgggtaagtaccgataagtaggattgctatgttgtctaatacatgcatgtttaactttgtaagaaatggccaagctgtttttcagagtggctatactattttgcattcctaccagcaatgtacgagagttccagttgctccatatcctcatcagcacttgatgttgtcagattttttttttgtttttgttagtctaatgggtatgtactagtatctcactgtggttttagtttgtattttcctgatgactaatgatgtttaacacctttttatgggcttatttaaaatcactatattttctttggtgaagatttcaaaccttttgcccattttaaaattcgaattgtttgtgttttattattgaacttattgagtatttacatattctggatacaagttcttttctagatatgttattagcaaattattctgctagctttcttattaattttcttaatgatgtctcttggagattgtattaattagtctgttctcatgctgctaataaagacatacctgagactgagtaatttat

SEQ ID NO: 202059 - DNA, 1000 bp, Homo Sapiens
cccgggaggcagaggttgcaatgagccgagatcacgccatcacactctagcctgggggacaagagtgagacttcatctaaaaaaaaaaagaaaagaatatgtataccccctttttcatgtggcagatgtttagctatttggggcgaactttcatggctcttccctaatcatcaagtattcaaggtaaagattctcggttcctgtaatggttcctcaccaggcataatttgtccttttaccatcctactttctgtcttctgaaaaacattctttatctgaaatacagcaattaatattaagatatcttaatatgaagtgcctggagtcaaatataacattccaaagtagtctgactggaagaactagcacctgcctttcttcaaacaatgcacttctgttaatgcagtgtaaggtaacatgagttgtttttggaaactacatcataatgtgggcttacattctagcacttatcacttaatgacagggatacatttgaggaatgcattgttaggcaattttgtcattatgcaaacatcatagagtgtacttacacaaacctatggtatagcctactacacatctaagttatatggtatagactgtttctccagctatatggtgtagactgtttctcctaggctacaaacctgcacagcatgttactgtattaaatgctgtaggcaattgtaacacaatggtatttttatacttaaacatatctaaacatagaaacggtacaaaaaactttacacattatatagatgtatcaaattattcatatgtgctctgaaaatgtctatatctgttatgtatcaattttttaaaaagtgaatgacataattcatttgaaaaaatgtggacacacaaattggaaaagaggtataaatgcagtattataatctaatgggaccaccatcacatatttggtctgtcattgactgaaactgcaatatagagtttttcttaacatttgcatattaaagactctgcctatatatgg

SEQ ID NO: 202060 - DNA, 1000 bp, Homo Sapiens
atttggcaaaatataggttatgaggtagccatctcctagaaacacttcatcggggtttatatatgaaatgtgaaatatcgtaggtttaatcctggcacagaaccaaaactgagtgcattgcacttgaacagctgaccaatccccagcacaggtccatatgaagaaacggagaagaaagaatccttttaaccacagaaaggtcttcatttgcccaaactgaaaaccaaatttcactcaggaaactaatgttgggtttaattaaaatataaatcggtcatacgttttcaaaattaaattatatatgtgtttgtctctataaatatgtccccaactttgctcctggcttatcttccatattttttggctgattttcagtggttgtcttatcttgtgaggatgaatagtcattgaaataatcttaatttcacaatgagtttaattataaatctatacttcctttgtgtgagagaaaattttttgtgaacaaaatttaatttttggaaagctttataagtccatatttttccttttaaaaactgcgattgtggtaaaaacacataatgtaaaatttaccattttaattctttttaagtgtatatttcattagcgttaagtacattcacatagttatgcaaaagatctgtagaacttctatgtcttgcaaaactaacattaaatgtcttttaagacaattgcccattttaccatctcttcagtccttgacaaacaccattctaactatttttttcctatgagtttgtctacttaagatacctgattatgaatggaatcatagactgtcactttgttcctggcttatttcagttaacgtgatattctcaagaataatcatataatgtgactttttaaagactgaataatattcgactttgtgtatgtgccacttgttattaatctcttcattggtcaagggacagctgggttgtttctgccttttggcttgtgttagtaatgctgcaataaatttgggtgtgcaaat

SEQ ID NO: 202061 - DNA, 1000 bp, Homo Sapiens
gtcattcagccgggcaggaaagatgggatgaagcccagcaagttcacagggatccgggaagttgtgtggctggaaacccaggcagggctgcaccacagggaccatttgctggagatgcagcacttgccacagccaccaccactgacagcatgacacccacaaaaagggagcctccagctgcacccctgctgctgcgagtacttcctcagctgtcttccatgagcttaaggttaagtaccaggagggaggatatgattgggcaaacctcaggcatgtgttcattctgtagcttccagaacatgcgaggagagagcatctggctcctttgtctcgaggaggagggggcaggactctgccagaactcactcgataaaagattttcccaaaaggaagggtgttcagatgacaaaagtccactacaccactttccttggctatctgatgcacccccatcttcccatgcgcgcacctcagaaatcaggctcccacctgacataacacaaccatgcctcacaaaaagacagtggtttatcccttccctaggagaaaagagaggcaatgccaagctgcttcatcaactgttaatacttcttccagcccgcaacccaggatatctgcaggtgtctctccctctggtttggtcatggctctctctgttctagaatgtatgggttaaagtcggctgccacaccatgccctcggcagtgtggtccaaggacccctgagggtcctcaaggtccttcctttcccaaccccacgtggttttcttcagtcaggataccatactgcaacagaccgaaggcggaagcagctatgaggatgcagcagccttctgttaagccaggctttaaggatctgcaaaaatgtaaaacgatgccactcctactgatgaaatatattgttttggaaaatataggtttaaaaatttttttaaggtaacatgtaatggatgtatagtcttcaaatggatgaataaatgtttttcagagttattggcttt

SEQ ID NO: 202062 - DNA, 1000 bp, Homo Sapiens
tgtaatctctttctggcagaacatctcatgttttgatgttagagattcagttaccaaccacagtaaataaagcaaaataataatagaaaaatagtatagaactcaccctaaaaacaaacattggccaaccatgtttattttttgtctctctttgcactcctgagaattgataggggaagaatgtaccacctctaattcaggtgatttctgattagcaagctatggaaagtcttcaggttgagttttagccagttcacgctcccctaaatggcatggaatagactattttctgttttaagaaaaaatagaacaatggcactaaatgcttgactgaatgtttgactaaatgttgactgaatcatggataggaaagattgggcagaaaagacagccactgcctccagacacaggatgccacaatcctgggcaccatcattattccatacaaccttagggtcatttttagggtttagaactttctcaatagggtttcaagattttgaaaagtgtcttccaattctgatctccgtagatcctgttatgggaattaacctttttggaaggggattcttgttcttaaagatgaaattccctactttctttcctggagggaatcagtatgggcagagggaagaggagatggcgattctgacctgtgtgtctcatgtcacctaacacctatggggtggcatgaaacttgagctttaaaacacaccaggggccaggcacagtggctcatgctggtaatcccagcactttgggagaccgaggtgggtggatcacctgaggtcaggagttcgagaccagcctgccaacatggcaaaaccccgtctctactaaaaatacaaaaatcagctgggtgtggcggcgggcacctgtaatcccagctacttgggaggctgaggcaggagaatcgcttgaacctgggaggcagaggttgcagtgagccgagatcaggccattgtactctagcctgggtgacaagagtgaaactccattt

SEQ ID NO: 202063 - DNA, 1000 bp, Homo Sapiens
ttaatagttctcattttttaaacaaaggcttcagatacttgtaataatgagtaaagaatatgaagaaggtagagaatattttaagaataagattttgagaacagctggtaattctgatttcctgtttctgcatcccaaagatcagtatctgtcaggaatttggaaacacttgttgttcctccagtccaaatacacacacacacacaccagcctgaaatacagtttcccagctatccacctggtttgctcctctctttcctcaggcgtccgcttcctcaggagggcctttcccaaccaccctgtataaaataattatccccatctccacactccctaccctctgtcccctcaaccctgctttatttttttatgaagaagagagatgacattatttggattttgatattaaacagctaggttatcttaggtaaatacataagcttttgtgggccacagtttcttcatttgaaaaatgaagttggactagttttgcagtgcttaactgcacagagcattagaatcacctggggagacttcataaactacacaaccaggggtgtacctgagatcaaatgaatctaggccttctcaactttaatgtgcagacaaatcaccgaggaatcttgttaaaaatgctgattcaaaaaaaaaaatgttgattcagtatcaggtgagacctgagactaacaggctcctagatgatgccaatgctccccgtccaccgaccgctgtttacctagcggcaagacgagatcattgccaagtgcctgcacggttctcatacaccataaacgaaggccattctttccagtttttaatttggtgactaatagtgtccactaagaaaacaataccttcccaatttctcggggggggaaggggctgaactaagaaaaagcggacctatgattactgctgttttcatttttttaactgttgtttttaaaatgcaacataagatgcatataaagcaagtgaaaataaaattcgggttccacgt

SEQ ID NO: 202064 - DNA, 1000 bp, Homo Sapiens
gggtgaggccccttgtgtggggccacaccttcatcatgaaccagaccagacaaaaggacaaaggactcacttccccctgccccattgcatatacccactgtccgacccccatacccacaagggctaccttatgtcatgtgtgtctgctccaagatgacacttgataaggaccgtaagcttcacttgggaccatgtggggttctgtcttaggttctgtctctaagaggccacttggaatcacatgaccagctttagtgacaccacctagcataagctgctcagactatgggtatgtttgcacccaaataaaccacaaatgcctcctgaggtgggagtgtgtgttgcaatattcacaaggtgaatattcacaatgccctgctctgggcactctcagagctggcactccataaacacctcctgtccaattaatgaactcactgaatatccaccagggacccagacatgcccccaaggactctgatttggctcttcatccacaagcaagaagaggatgctcttggaggcaagtgcccagatggcaggagatgaaaatggcagcctgatgtaggaatgaggtaggggtgggggtctctcacctcagaaccacccggaactggttgaacacctccttgatctgtctaaggctgattatctggagggaagacagcaaggcagaggttagaccaagggcacctcgagggaccagggggcatctatgttagtagagaaatcaagaccccttggctgacccctggaccatctgtctcgagaagaggacgtgtgcacacagcctctcagcgaagtggcagccaagccctcctccagagcagagaaacacctgattaataattttaaaactaagtatttgctgaggctataaaaaccaccttttcgaagtggagacctctataaaatgaaatgattctataccttgaaaataccttctaaaggtttttttttttttttaataaaatgtacttctcagctttctcttacttcc

SEQ ID NO: 202065 - DNA, 1000 bp, Homo Sapiens
gtctcgctccgttgcccaggctggagtgagtgcagtgtcgcgatcttggctcactgcaagctccgcctcctgggttcaagcaattctcctgcctcagcctcccgagtagctaagactacaggtgcctgccaccacgccaggctaattttttgtatttttagtggagacagagtttcaccattttagccagggtggtctagatctcctgacctcgtgatccgcctgcctcggcctcctgaagtgctgggattacaggcatgagccaccgtgaccggccagctgtcattatttttaacattaacaattcatctattaccttagctatggatggtgctatgtaatttgccctgcctgctccttcaccttcacatcctgccactctcccctgttaagtcagaaactgtgaagtgtcttagagtttgtccttcttgcaagctaataggttagcttgccacagtttcatatacatatactgccagaagacaccagactgctgggctggtgccgtaaaagatttgctactgaaagcacaaagcatttacaacaccttgtgtcatttccccatgccccatttcccgtaaggcaacagatgtttcctgtgcagtgggttgcatcacaggagaagaatcttaaatttagaagcctccaagcttttatcaaagctgctggtgacctacccattcctcccattcaggagagaaattattcattatcttgaaatgtaagtgaatttcctctgggaagaggaagaaggcccctctaggtttatcaccctggaatgtaacacactctggggtttgggaggtggatattaatatcattatgcgctttctcacctacagaagactagtctgaacttgtggcaggaacctagccagcttgattgcctgctaaaacaaaaatatcaacattcttaataggatttaaataagatccagcatctcaaaacagaatattcaaaatatccatgatacggtccaaaattacaaagcaaacaaac

SEQ ID NO: 202066 - DNA, 1000 bp, Homo Sapiens
aggaaagggtgtttcggaggcgcagccacacacacagcgctggcagcctcacggtcacgcccatcactccctgccccccactgcccttgagaagttagtggtgtcacatccttagttttatagacggctaggaatagattgtgaagaacactcagttcactactgtgttacatttatatcacaagcttcaattaaaatggattttaaaggattttaggatttacctttagtattaacaacgtatctactgacatactgttaggattcaaaaccagttaagtataagaattacttcatgtggttttcctagggtacaatttataaaaggtagaaagcatccaagtggctcctcaacaattacaattcttaatgatttttctcacagctgtgcccttctgtcagggtcagtgtcaaaattcgttatcaaaggcaaaacctactgtgccaagctggggcgctatatgtgaacggagtggaaatgcttcagtcacctctgccgcagcttgtgattccagcagttctcacaaaccttctgtcacatgatgaaaagaagcagcttgtataattccaactggtgtttcatttctgttctaatgctaagtggtaacgcttaacaaacagactaaaagctgtgtgcagaagaaagggctgaatgagtaccgcctccctaggttccagcacagcgctcgggtctaagaagtagagccccggggtagggtgggccatccactgtcaggccagtgtctcaagaaagcctgaccagctgagctgctgctttttttttgggggggggggggggaggggcgtcttgaggctttttttttttttacaaagttagtttgtgatcaacgattcactacaattgaagtgttactttgtcagaatatttattcctttgtgtgacatgctagattccctggatgtagctgatcatttttattttgtaaatattacctaactttacataaactatatcataataaactatttttgcatcacc

SEQ ID NO: 202067 - DNA, 1000 bp, Homo Sapiens
agcgagaactccgtatgttaatctgtttcaaagtcataccttggttagttgggtctgactttgtgggcatttttttcttaagttgggttatttcactccccactgggaaatgtggcagctgtttttgatcagtgacctcagatactaggtggctttaaactttgaatgtgaatgttggcttttttcctattctgcactcattctctaaatttaggcctatcgaagaagatttggcatagtataaggaatagcaaggagtttggtagtttttcccaatgagaaaattatggttacctcaagaacaaatttaatgaaatgagttaatgagtatggtggctcatttgatttccactgaaatgagttaataagtatgctgaagtcttgagctgctcaagaagctaagtttttttctaaatttttatatttccccttatattactaatttagtcaatacatatttgagaacactgactttgaactaagtctgcagactacaaaaaacactaaggcagagcctctttcctaagaaaaacactgtttagaaaataataaaccaagtgcatcagccaaagccagttgtgagatcttatttcttcctgatgatttaaattattttaaatttttcattgctaagtggtattagaatagcagaggttggaaagacgacagtggatgtaggatgttttgagctctgtgagagcagaaaattggaaattgaatctatagaaaaccgtcctttcacaaaatgttgctttattattttgctagccctgtgttcagaaaagtttaacttcctggccccaatttatatgaactatgaccattaacttaatagattccagtgagtaatgtacagcctcctactttgattaacctagcatttattccctcttctggatcaggtacctctcagtctgtggtgaagggaccacctttcattttgttttcctagtttattgtagactaatactttatcgttaaataaaaaatgaatttctag

SEQ ID NO: 202068 - DNA, 1000 bp, Homo Sapiens
cttataaaccacaaaagcacccattctggggagaagaactgtaaatgtgatgaatgtggaaaatccttcaattatagctctgttctggaccagcataaaaggatccacactggggagaagccctatgaatgtggtgagtgtgggaaggccttcaggaacagctctgggctcagagtccacaaaaggatccacacgggggagaagccctatgaatgcgacatctgtgggaaaaccttcagtaacagctctggccttagggtccataaaaggatccacacaggtgagaaaccttacgaatgtgatgagtgtgggaaggccttcattacttgtagaacacttctcaaccataaaagcatccactttggagataaaccctataaatgtgatgagtgtgagaaatcttttaattatagctctcttctcattcagcataaagtcatccacactggagagaaaccctatgtgtgtgataggtgtgggaaggccttcaggaacagctcaggcctcacagtgcataaaaggatccacacagtttcagatgaactcccataatgaatgatgaatttgtgatgagggataacctggaagtggtattcacacattatgctacaataaaaggttctaccgtggagaggattttgacacattcagtaactaatggaacacaccgtcaacatgaattcgcaccttacatgacataagtgattcagggattcctatgaatagaaatgctgagaaggaacgcattttattgcagaagctaaaaagctaaagtaccagtcatctagagagaaggaaattaatgtttcttaataatcctgttaaatgtttgattgtttttggaatgtgttattgtaaagatgtcatgcaggacatgtatatgttgtctgttgtaaaatgttaacgaatactttgttcagggctcactctctctttgtcatgaaagccagctccttgtggcgaggtaaagtggaattccaataaagaaattccttaaatc

SEQ ID NO: 202069 - DNA, 1000 bp, Homo Sapiens
gaactcctgaaccgccttgtgggcaacccaagagacgggaaccagggctgtgactcccgaggcccaggacagaattcctcccaggatcagcagtcgcctcttgagatctctctgactctctccaattctcaaacagtccaggccaaacccagagaccagcaggcccagaaatcccagcccatttgacagaaacattaagatcctggagaccctgagttcagcaggcaaagccaggaaggagtcaaagtccttgcattgcatccccacttcctcttggatgacacaggtttgccagagtcccatggtccagttttccatttcatttaagtccaggttgaggttcttccagtgtggcaggtagtttgtaagacaggataaaacccatcccagcaaagataatgaaactccagctagttgagctacagttctaaatactaaagccattataatgtcctgagagctttagccaaactaactcctgcccttcggttgctgtgaaaagaagtgtgacacttgtgttataacttatgaaactcagaaatatttcttcattgtgtatataggaggattcttgccagagttgctattgtttgattccatgttgaatgggtttcacaaaaggatagggaaataatgccgccaaccagtaatgccaaggtgtggccaagattgtgtttgtgtcctgtgggctggatttgacagaaagcagtttgtcactgaaatataattaagtgataatctcctttcattgtcaaggttaaaatggctttcatgttattcccaacctttctaacaaagaattaagtctaaatgcaaaatgtttaactgatggttttggttcaactcctcctgctttgtgtttcactaactgcacctgtcagattttcatctcttatagttctcacatttcaaatgtgcatgttatggtaatactgagtgttattttttaaaaataggtttaagaaaagtatttcttaaccaaataaatcaatcttatcag

SEQ ID NO: 202070 - DNA, 1000 bp, Homo Sapiens
agcttttgattaagttataataaccacatacaccagatattcggctcagtttttctcaatattcataagtaacattgaaaacaaagagttatgtggtcaaagaaaggacaaactggtcaatgataatcgtcccctgtgggccctgggcgttggtgtcacacagaactgagaagcaaagcgggtggtgacagaccctggtaatgtgcagggagcgtctggatcggagtctcgacctggtgggtggtttgtccagggaaggacagttctcttctttaggtacacacggtagggactatgattaaactacttgacagcggcacctctgtgacctcattttcgtgtgacacatgcagatctggaagccgccgtcaccgtgagtctcagttggctctctctcacggtcttgcctctgaaaatgcaactgcattgtgcacagaaatccttttctgggtaaaactgggtcttctataactgctgtccgtgtggcttcatgttcatggtgtgatgtgcatgtgtcagccaccagcaccaggtccctgttgggatgtgggagccccttgggctgtctcatcatttagcagttgtctttacagtggtcccatcctctgtaaagacacacagagccacatcacacatcctctatcctaggtggagcccggggtctgcctcccagctgcaccacctttgtctgtctgcaggtcgccagctctgctggggccttctgaagcagcctctctccgtcttgccattcttttcacactgctcccatgttaagatttctacacgtttcgaagacactaaattcttacctaggattattggggaatggaatatatggttagaaatagatgaatttttatttttaaaaaatgacaataagggctggacgaggtggctcatgcctgtaatcccaggactttgggaggtcgaggcgggtggatcacttgaggccaggagttcgagaccagcctggccaacatggcgaaaactcgtctgtgcg

SEQ ID NO: 202071 - DNA, 1000 bp, Homo Sapiens
tattacaaaaatattgtttgttttgtggctcattaaaccctatataactaacagcttttaaggacattaacagaaatatatcttcagatggataaataagatagggacctattcaagacagcagcatttttgtattgtgatacctcccctaagttactctcacaataaaaccttatttgagaattttccttcacttcaatctgtgacatagcattaggcatttagtataccttatttgtgaaacctaaggttcattcaacagatgaagctgcaaaacagttttcttggtagactcttggaacttgctcagttttttccttactttacctgcatgacacacattgggttgaaagttgtttggttttacccttcatttctcttagatatgatttggttctttttcatgcattatatttttgaaatatatggaggaaatattttattgaatcaagaaatagaaaatattccttaaaccagtagtaaaaaggtgagttagaactccatgtctggaagacaattcaacatttaaaatattaagatgctataccacttaacaagtgaatactaaaatttttaatttaaagattgattgttctgtttttatgaccatgagaaaaatgtgacagcttcagctgtcatatgtttatcttgaatgcttttctaattatgtatttctggattattgactttgaatgccacagaccaactactttacatagagtaaaatattgattaacctttgtgctttgggtcactggcaaaagttgaacatcctgataagtcaatgttaaccagaaacctttttgttcacgtctgaaattgaatatttataaaatgtgttagtatgtttcctgccttgataagttcacctatattgaatgtaatttgatctttgataattttttttaatcttgagaattctctgatactgttttgaataccagtgttcaccatgttataaagttaaacataaaaattgaaataaattgaactaaatatg

SEQ ID NO: 202072 - DNA, 1000 bp, Homo Sapiens
gtctcctactactcctatttctctgtttttcctctgcaggagcttgctgctgttaacagttattcttccaagttgttttctttgtggggagatgggaggtgggaggaaatataaacatatatgtatagatctttcaaaatatatgacggtatacccgtatgttctgagtcttgctgtttttacctggtaatatttagaaacatttattttgagataaaggagagcacttttaagttgaacctgtagttttaaaaagtacatttcaagtaagccaaagcagagaagtaaatgtatttttcattgttgtatcagaattttgaatttactattttaaaaattcaagagttttgtagctgatctatttcttcccctcagccatcccaaataggtcatttgtcaacagatttaagaatgtttagaaacaacaactttgggaaacgggaaacaatttggtataagtgggtgtgccataacctctctcgtagccattcattcccggatacataccctagagaaactcttacacatgcgtaccaggggatggatttaagcatttgtgtgtaataggaagaaaagaagaaaaaacccgggaagatcccaagtgtccaccaacagtgtgttggataaatactgtggtatattccaacagtggaattccacagaagtgaaactgaactgcagctatgtatgtgaacatggacaaaactcaacaatagaaggatcaaaaaaagcaagtcacagaagaatacatcactatggttccatttcaatgaaagtcaaaaacaggctgtcaaatacatgataaaaggaaacgattaagacaaaatttaatgttagccgttttgatggagggagaggtgatcatgagggcacaggggtcttcagaagaactggtgagggtctgtttctgaagcctgtgggcatttccttttttaatctgtatgtttatgtgcttttgtatgtatgatatttcttaataaaatttaaaaagaagaatggg

SEQ ID NO: 202073 - DNA, 1000 bp, Homo Sapiens
ctgtgcgcctcattttctagctggcagcagtcctcaatcacccaggagtggagctccctgccatccttgggcttcccctcatgccaggcactgggctgtggacataatgaaagccctggaaatgtgggtacagtttgcggagcttccagggggcatcctcgtggtggggtgtctggggggctctgactgctctctgctctcatccctgcccagctccccctccggggctccgcgggacactggatctccaggttatccgcgtgcggatggaggagcccccagcggtcagcctcctgcaagactggtccaggcacccccagggcaccaagcgtgtgggagcaggtgacacctcagactggcccacagttctgtcagaatccagcaccactgtggcagggaagccggaaaaagggaatggagtgtaaattcttgctttcctggggagggagggagggatgaggcagcgtcccccagtggcttataactcagagctgcctggctcacccacctggtggagagagtagaaacaggtgccagggcaggagggggctggggcagcatccactgttatttcggggcactggaaagtgtctgttcctggccaggcctgaggtcggcgagggtggctgaggctgttgtgcagtagggcactgggcctgtggagaacacctaccccagtccttcgctgacccccacctctgtttgtcccccatgacctcctcccaccctccccctgctccccaccattctcccttggcacagtgccttacacaagagtggtcataagggggtttgaactgagtcccactacctcgggggacacctctcctccccacttgttcaggcttctaaaccaggaggcctccattacctcttcctgtcccaaccctgcagaggcctgaagctgggcctgggcaccccattcactcccgttctcatttacatctgttttcctgttgtatatatcacctttgttgacaataaattatttttttttatt

SEQ ID NO: 202074 - DNA, 1000 bp, Homo Sapiens
aatcttcaacctccccatttaattaaaatacaattatactaactgctctaatgtccttttcttctatgtccaacatgtctgtcaatttcaactagattattagattcttcattatgtgtcatgttttcctgcttctttggctgcttcatattcttttatttttttttttttgcggggggatagagttttgctctcattgcccaggctggagtgcaatggtgtgatctcagctcactgcaacctccacctcccaggtacacaagcgattctcctgtctcagcctcccaagtagctcagattacaggcatgcacaatcatgcctggctaatttttttgtatttagtagatatggggtttcaccatgttagtcaggctggtcgtgaactcctgacctcaggtgatccatctggctgcttgatattctaagatttgatgctggaactttggtgtcaatgctcaaaatgcccaaagacaccactcaacctcagtgtctatgcacacccaagcttttgcagcaggacaggtagagcagagatgagtgtgctacaacatgctggtagagggtacccccaattgtgcttggggatttcctattcctcatggaaaaatgtgtcttccttaatttttcccataagaaccaccctacttcatgccctgtctctctgtccaaacaccaggacagtcctctcaccagtctcaaccacccaatggattgacaaaggtgcaaatatgattcagtggagaaggcattctcttgtcaacaaattgtgtagaaacaacttttttttacacaattttttttttatccccaaaggaaaaaaattcacctgaacctcaatactaactcaaaaactaactcaaaatggattatgcaactaaatataaactataaaactagaaaaagtatagcagaaaatataagacaaaatcttcgtgacacagagttaggtaaagtgttctttattatcaataaacacaaaccattaaagaaaacattgat

SEQ ID NO: 202075 - DNA, 1000 bp, Homo Sapiens
acacttttcagggaaaatcactttaaacttgggggagggggtatactcaagaatggagtggtgcttttaaactttgatgagcagctaaactcaggtatatatttggggaagggactactcttagtattaatggttttggagctgggtccagtttacagaattttcatgttgccttttaaaataatttttgttggtggtgaatgtattgtacataaagtgggaagggtgggtggggatgcggaagaaatgggggtcctaactggtgggcacacagcactggagtgatttttatctgtttacaatcatgtcacactgaatacttatgggagccggagatgagggtaggaaaggtttgatcttgtaatgtgtcactgtgtttccttagtggccagccagccttcagaatagctaaaggccttccttccttccagtcagcctgagagagaacacctgtcccctaagcacctggtgtctccattggaggcagactgctctcaggagactactagaagcttcagcccggaagacaggctgctctctcatgctggtggcccaaattgagaaagtggtgtcccttcctgattttgccaccagccctaccgaatagttgtaaaccagtatcaggaattgggatcgctagagtgtttcacgtattagaagatgaatcgtcctcatcacagacctccctgtcaggactgtgatctagaaggcatcacacacagctttctggcacgaatcacattttgtggaagtgactactcaggtttgtatattttagtatcaataaagaattgcacaggtttgaataggaaaaatgtattctatagatttacagtttgaatttaggaatatttcagtatatatagtttttattcgttttaagtgaatcatagtaaaatcagtcatggtgatttaaaatagctatcaagaacaagttcttggaattatctgttgtatctgtgataggaaaccattttacagtattaaattactttattac

SEQ ID NO: 202076 - DNA, 1000 bp, Homo Sapiens
gggtctctgccctcaccggtgctgaccgacttgtgcggggcttgagtataacttgccaaaatctttattctttcgatatttgcagatatgtgccactgtttccaacttttcatcaacaaaaaggcctttccaactccttccaaattagaagaccagttggtgacacacagcacctctggacatgccccctgtgcggggccggaggcgggccgggccctgggactgctctcagatgagaagcggccgccgagctccccactccagagacccacgggaacctttgtaactaaccccacccccagggaaggctaggagcgccggagcccgcgctgggggctgccggggaccaggcccggccggacgctgcaggctcgctgcatggagaagaaggcagctcggccccacgcccggcgctggccagcgcgacgaggcccagaggggcgggggagtccaagcccgcccggcccggctgctcctggggggcgctttcctgcccctcccctcctctgctccttcctgcatggacctctgccgttcctgctcctgctccggaagccgccgccgccgccgcgcttgccttgccccctctttttggcctccccctatttcctaggatccgcattcgggtggactctgccccaggagcttgacagggtgcagggcctcttctggcctctctcctctctctgtccatccactgtgccccttgggccacgccgacgcgctcggtgccacgtgccgtgtggtgtctgtgccgcagacgggccatctgcccgctcacttgtggactttgcgctcccggttgtcgcgccctgtgctcccgaccagcagccccaccgtccacctcctcgcccccgcttctcttacgcccccgccccgggcgtgctcctcgcgccctcggcctctctgtccttgctcttttgtaaggggcgggcccggctcagtgacctgtgctgctctgtatggtgccgtgtgtaagaataaacccgttggaatactc

SEQ ID NO: 202077 - DNA, 1000 bp, Homo Sapiens
ggcctgtttcatctcgaggggactgcgtttgctctgtgtggtttgagagaagctgctcttctctgttacttcccttctatgaaggtagaagctttcagtgttacaacttctgatggcggaaaatttagtttttattaataattccttctttgatagtctagtgaactatattaatagaacagtgtactgttcacagaaaagaacttgtagggagttttttgtagtgatatgctctattaggatacagaacaatctaagagtaagcttgatagacatgatgtgacttcacttaaatggagtagagtgaataatgtaaggacactcacctctgttgaaattggtgatttctgcattttgtagacctttgccctctaagtttatcatcatattatctgttgaatctgaacagcatttgaagtcctctcaaagagtttgagctttcaggattaggttcccctgtgagtctttcacttgtgtaatggtaagtcaacattgatgatctttctaaggaaatcagatttacaaaatgctgagccgcttgatgtctaagtgttggtggttcttgctgttgctttgctgttccatgaaagcgctccctggctgcttggagggctgtgcttttccaggtcagtgccagcttggctgtcccaggccgtgcacagtgcccattgctatagctgggcccagtcctggccacgccggagcctcggcgggggcagctgggttgtcacggcagcacagtgcacatgcagagaggaccaggccatgtttttcctgtgctgagaaactcttgggttatttaatttttccaatgtgttttcataactcatgattatgtgaaatacacttgtgttagtaactgcttctataattaagtggtcactgtaaaaaggcaaataacctatttttatatcagaatgtccaaaactcatgggtttgctttgttatagaaaaatgtgccattcatttgttgggtagaataaagttgtcttgtaattgt

SEQ ID NO: 202078 - DNA, 1000 bp, Homo Sapiens
agcctcccctgattgcccccaagctttccttttccagtaccccataaaccccaggaccagtcccagctagggtccaaccggactcccctggaatactctcataattcctgcctccttatcctgccctcctatgtcctgcttctcctctccagtgccctggcagatggcaagactaggtttccttatagggtgtgtgtttttaaaccctgacttctttgcaccccatgagtgcctctaccagcaaactcatcacatgctgcttaccccatgcctccagagccctcctacagactgtggtccttatgcttgccggacagaagctcagcagaaaagatttgtctgcagtaagctatttgcatcttcattgcctaaacactgcttggaacaaaataaacacttaaaaaaacgtttgccagaggaatgttgaacacgtgggcatcataaaccaggagtcccccaggtggctgcctccaggagcgggaaggaaggtttgagtgaggagggctggtgtgaggcaatagggagtagtaggggctgaggaacggggagctgggcgacctttgaaaggagcagccaagcctcagtttcccagcctgtggccatgaaggggtgtggcccgatggcctgatgttttcaagagaagctttaggtttggctttttgtgtaacagcctctggttttcagtgctggcaatgaatttaggattttagaaagcaccagccgggtgcggtggctcacacctgtaatcccagcactttgggaggctgaggcaggcagatcatgaggtcaggagtttgagatcagcctggccaatatagtgaaaccccgtctctactaaaaatacgaaaattagctgggcgtagtggcacgtgcctatagccccagttacttgggaggctgaggcaggacaatcacttgaacccgggaggcagaggttgcagtgagccgagattgcgccactgcactccagcctaggtgacagagcaagagactccatctc

SEQ ID NO: 202079 - DNA, 1000 bp, Homo Sapiens
caaggccatttccctgggagaagaaaggagaggtgagcaggaacagagaggcaattatttgattgtggagacccgcaaaacctatgaactatttggggtccccatccctagtgtcacctaccctagggagatgggtgtggaaaggaagactctttactcgctcattaccaaatcgtgcagttagtcaagttctccgcaaaatcatatcaactttgttaagagataggaattaaataaatgtctaagtatttctctgtgaccgtcttttagcaagcaaccttaaaactgggtgaattttggggatccagcaaccaattctgaaaaatttgatgaaaatctgatttaaacaacttttttttttctaagtgtctagacctttctgtatcagaaatgaaagtttatcacagtgtctttttcgagccccagtcatttcaaggacacgatgagaaaaagctaatgcatctctcctgctcttctcactactcaagctcaggaaaaactgcacccggcatccaaagagtgggtgggcttaaggatgtaaagggtccaaccttgacgggtgggacagcgactggctggtgaagtcacttagctcttgctctagtctccaccagggtgacaccagccagtcgtctggccattcaggcacttgtttgtcctgctcttgctaattgggttggcatttggcttgtcaccaggtatttgggatgctcgcagggaaagtgtggagaaatacaaaccatcaccttaataattggtatgatatttcaggatctctgaatttcttcctttgtgtgatatttctggagagaaaaatccactaataaacctttttaaaattaatattaatgggcctcttaactgtagctaagatatgagagtatctttctctcaagatggtcactgtaggaggctgattaaaaacactttgacttcgtcagacagaagggagtattgtatcttgcatgtcatcagttaattaaacttttcagcatcatcc

SEQ ID NO: 202080 - DNA, 1000 bp, Homo Sapiens
gcaacaaattcatgctgatcctggccagctgccaccccgagcagttcgactgggccatcaatgcctgcatcgacgtgatggtccacttcgacctgccagggcaggaggagcgggcgcgcctggtgagaatgtatcttaacgagtatgttcttaagccggccacagaaggaaagcggcgtctgaagctggcccagtttgactacgggaggaagtgcttagagatcgctcggctgacagagggcatgtcatgccggaagatcgcacagctggccgtgtcctggcaggccacggcgtatgcctccaaggacggggtcctgaccgaggccatgatggacgcctgcgtgcaagactttgtccagcagcaccagcagatgatgcgctggctgaagggggagaggcctgggcccgaggacgagcaaccctcatcctgagtccatggggagaccacacctcacggagcctggccgcggacccctcccacccctgcctttgcggccccgcacatttaggaaatactccccgtaataaagtcccacgggggccgcaccgctgtgtctattggctgacacggggcggggtttggggccccctaacgtccccctggggtcaaaggtgacagaaaaggcagaagctggggctttctggaggatttaaccacagaggggtgggcttcacaggaggtggctgccacggcggggccgggtgcccgtgccccatcctgaggccgtgcatacgcgggtgccccttcgcctccctcccctccgccagagctgcctgtggccagacacacggtggagggaagtgcacgcgaaacagacacagcggcttcaaatagatgccgcccctgcccgcgctttgcagctagtccctgcaaaccttgatgatggggctgggcgcggtggctcacgcctggaatctcagcgaggccaaggagagtggatcacctgaggtcgggagttccagaccagcctggccaacatggtgaaactccatctctcct

SEQ ID NO: 202081 - DNA, 1000 bp, Homo Sapiens
accttccctggagccaggcgagcccacgtttgagtttcaaatctcccacctcctggctgtgtgtcctcagccaaggtacttaaccttgctgtgcttgggtttcatcctctgcaaagtgaggatgcttgtagcacccacctcacgcagctgttgtgaggattaaacgaatcaattcgcacaaggcatttagtgtagcagcagtcagggcgagccataggcatttgtctcgtgatgcagggtgccctggctgagggcacaggcccaggccgtctgcctctgccctttccttgctgtgctgcagggacagcgacgccctgagcctcagtgtccatatctctgcagcgagtggtgtttctgcgagatgatggggaaggatcccagcacacgggctctgacgtggccgttccttccttcattcacttattcactcattcattctgctccggatccccccaagaccccaccttcttcctccaaaagaggagcctggcgcttgggtggtggggacattgtgtcctgtgaggggcatggcagtggtggggggggctcctgctgacgagccatccccacagaggctctgaagtcactgcaggagcggcggcgggagcaggagctgctggagcagtacgtgagcaccgtgaacgaccgcagtgacatcgtggactcgctggacgaggaccggctccggtgtttccccccgggccggcctgccgtgacgatcacagccctgccgtctcaggtcacggttttggattctgcgctaacgaggtctcccaggtgggctggaaacactgatgaagacggatagaaaaaacaccagcccaccggattattaataaagataatcacacacaccccttcgtcggcagccggcctgacactttataaagcacgttaggatataatccaattgaaactgcaatatcgagaacatctcatcttatcacaaattgaaattatatcacattcctcttttcttaaattaaaaagctaaaacctt

SEQ ID NO: 202082 - DNA, 1000 bp, Homo Sapiens
tagtcattttcattgacacccatgacgaacattggtgcatccggtgagggcgcggagatgaccacacgttgagcacctgcagagatgtggtcctggggaggaagcgcaggtgtcaggggcttctggcaccatcatccccccagctagccctgggcacctctccccagcttaccgaagctgcctgtatggagaggtacacgcctgtggactccaccacgtaggggctcccgacagccctccaggggatctgtttgggctctttgctgtggggaagtggcagggctgagtcagtctcccctgcttgagccccaccttcatagtccatggctttcaccatttgacaggctgagcaggtaccggcccacctgcaaccacctgcgtcccctaccccacacacctacttgttccagatgggctccaccccgctggcctagcttttcaccactgccccacttcagaccactttccctttgctgattgcaccacccctgttatgcctgggtacaggtggtgacctccccaactcagccctcaacctcctcagaggcgccaatgctgactgctgtcagccagcccagaccctttctccatatgctgcccgggacgtggactctgtgactgtgaggcctgcccggctgctttctgcttcccagctctgacaacctcgccatgaaccctcctagaccctcagctcctgcaataggaagctggctgccaaaggccaggagggtccctgaaaacagacactgcattaaagaaaaagctcctggaggactcctgaagcctgaggcagccttggggcagcagtggctcatggtttacattggaaaggtaagggaggtttctggtttcctgttttataaatttatgtttttacttggtattttgacaaacatttgtatttgaagcacactaaacatctagtattgccgttttctacttggctttagcaaacaagcattaagtgaataaactgttccactttcttccttcccaggtt

SEQ ID NO: 202083 - DNA, 1000 bp, Homo Sapiens
tacaggaagactagaaatatagttttcattctgccacctgcccaggaaaaacaaaacaaaacgaactagtgtttctcaatggggttcagtattagcattttgggaaggacatttcttcattgtaagggaatgttccatgtaagacatttaccatccctatggcctagccactgaattccagtagcaccccctgggtttagtgccattcaaaaaatcctgcttttatttaaccatagctataggagacagagagaggggacactgggggcacaaaaggtctcttccagataatctatgtattacctggaagataatacacttggtccctgaacttcctaccagcagaaggaaatcatagcccatgtggccccaaatggtatttaatctagaaatcattttgacattggaatatggatgcgtcagatactccatgaattcataatgctttcaaaaatataatgtgcccacactgtgatggactgactggggcagagctgaaaatggttaacatctgtcatccagcttttcaattctccatccccgtctttcaggccaatgtaagttagtcacacaaagtcaagcttccctctcctttgccaaatgttttgactctcacctcccgctggtaggaggaataaataatgttttaaaaggactcctcctcctgcggcttttgtggaactatagggtaggtcactggtacgagaaaggagaaacagcgtgggtgcggtgactcacgcctgtaatcccagcactttgggaggcctaggaaggtggatcacttgaggtcaggagttcaagactagcctgaccaacatggtgaaaccccgtctctactaaaaatacaaaaattagccaggcatagtggcatacacctgtaatcccagctacttgggaggctgaggcatgagaatcgcttgaacctaggaggtggaggttgtagtgagccaagttcacgccattgcactccagcctgggcaacagaatgagactcagtctc

SEQ ID NO: 202084 - DNA, 1000 bp, Homo Sapiens
cagctggcgcatgtcctgtgctttgtggacgctgctgtgtgctcctgaacacggcaggccctgctatcacaccttgggcttggaggtcattgggagtgagcagatgtgggggtggccagccaggctggccgcactccatcactggcactgcctgccttgggacccgcttcccacctgctgcggtcaccatggtggcgagcacagcaaccccaggtgtccagagcactgccccatgcccaccctgtgtacccaggtccagagggtccgtccaccacagcagccccaggtggagggctggtctccctgggggctccccagtggctctgccctggctgtgggggtggagggaccttgccaggatgaaccccccagtcccaggcaccctctagctccctcagccgaacagcaccctgcatctgggggattgaagcagtcgctgacccccgtccccagcgggcccgggccctcactccctgaaccacacggggtttatttgcggatgttccctggagaggtcgctttgtgaagaaaccatcagcaggctgtgagcatcgccaggctgctgtgggggcgggagcagcctcagtgtcaagggcccgcccactgacccagccgtacctattcgtccacggtgccccgtagcagcaggtcctacggccaaatctgtctcccttcatgggcctcccagggaaggaggaagccctgctgtgcagacacctctgtggccccccaggagtgtgagtggcctggggagggggccgtggcactgaggccgaaagtgcctgccagacggcacggtctgggtgcgggtgtcccctgtgagcccgagtccgcttcaggaggggagcctgcaggtgccggctggtgaggggatgacgcactgtgggtgggaggaggcagcgcccatctcagcagcaccaggactgcctgggactccctggcaacccagcaccggggaagccgtcagctgctgtgacaataaaacctgccccgtgtctgg

SEQ ID NO: 202085 - DNA, 1000 bp, Homo Sapiens
cctgccatggcaatgacagaggctgtattttactgaagtggagggaagaggtgaatgcgaatgcctatggcctaagtatacaggaaggtgtagggagaggtaagcagtgtgtatgtggaggagacagcagacgtaagcagagagaaatcagagagcttagttcttcctctggggcgcactttgtggttaattaggacatgcaaatgagctagaagctcatttaatatcctccctgacatgtagccccaccccaccctgccccacttccctggcaggtacaagggccacctgattggcccaggtatctgtggaaggttccacctgcttctttgtggcccagggaacagaaaagagtccctgctgggcatggctagtggggccggcctggtctccctcctccctttctcttcccaacctttcagacttgggacctctcttttccctctccctcagacacttcccttgtgccccgcccctcagggtgatctctgaacccaaacttgccccaaagaaggttgctctgtcctctccacatccccatctcctccctagggccttgttggggagaggctcctccatctttcccaagtcacaccatcgtttcctacgtggtctggacaagagcaagagcacaccttgtccccaccttctccagagcagccagaacccacctcaggtgccttccccatccggtgcagttaaggcacttctgccagcaccatggtatgagcactagacttggagttaagatttgagagccccctctgtcactgtggaagcttgagcatgttgcttgatctctctgaaccttgtgtttctcatctgtgaaaggtgataatgtggggctgctgtgagatttaaaggacataatgcacctacggtccaagcactgcctggaatacagcagaagctcagcagatactggacaacccatccccttagtagaggcactaaccatgtgacccaaggcaaaagtgcttaagaaaaagtgctttctctg

SEQ ID NO: 202086 - DNA, 1000 bp, Homo Sapiens
tgactctcctctttttttgtgggagggatcctgcaaattttgggtattgtcaattattgctgaatcctgtacccatgttatgactctcccaaatgtgccttacctgttgtggcacaatatatcacattagacattgttaaatattgttgggttcaacacctgggtgatggatgtaacttttttttctgggcctgcctacaggggaccttgtgacataactcaatgcccatcatcatggtaatgttactctcttctcctgcctgatctctgctcacagagaaattgtgacacatcactggcctagcatctaggtgatgtgactctcctctttttttcaggctctgcatatttgggtattgtgacatattgctgaactcaacacctaagggatgggagtctcctacctaggcccttcctacaggggacattgtgacatgtctctgcattcctcatccaggagatgtgactctccttttctgcctacaccctgcctacacagaaagttgtggcatattgctgtggtcagcaaccagatgatatatttctcctgcctgggtctttattacaggaaagatgattgacatattactgggcccagcatccagatgatgtgactctcttcttctgttggtccttgcttacagggaaactgtagcatattgctacacccaacacctagcttatgtgattcttcttttaggtttgccttcagggaacattgtgacatattgctgggccctgcactgataatttgtgactcttctgcctgtgatttgcccacttggggcattgtgacatattgctgggtttaacactcaggtgatgtaacttttatgcctaggccttgcttacaggaggcattttgaaatgtctttgtggctgggcatggtggctcatgtctgtaatcccagcgcttggggaggccaaggtgggcagatcacaaagtcaggagttcgagaccagcctggtcagcatggtgaaaacctgtctctactgaaac

SEQ ID NO: 202087 - DNA, 1000 bp, Homo Sapiens
ctgtgcgcctcattttctagctggcagcagtcctcgatcacccaggagtggagctccctgccatccttgggcttcccctcatgccaggcactgggctgtggacataatgaaagccctggaaatgtgggtacagtttgcggagcttccagggggcatcctcgtggtggggtgtctggggggctctgactgctctctgctctcatccctgcccagctccccctccggggctccgcgggacactggatctccaggttatccgcgtgcggatggaggagcccccagcggtcagcctcctgcaagactggtccaggcacccccagggcaccaagcgtgtgggagcaggtgacacctcagactggcccacagttctgtcagaatccagcaccactgtggcagggaagccggaaaaagggaatggagtgtaaattcttgctttcctggggagggagggagggatgaggcagcgtcccccagtggcttataactcagagctgcctggctcacccacctggtggagagagtagaaacaggtgccagggcaggagggggctggggcagcatccactgttatttcggggcactggaaagtgtctgttcctggccaggcctgaggtcggcgagggtggctgaggctgttgtgcagtagggcactgggcctgtggagaacacctaccccagtccttcgctgacccccacctctgtttgtcccccatgacctcctcccaccctccccctgctccccaccattctcccttggcacagtgccttacacaagagtggtcataagggggtttgaactgagtcccactacctcgggggacacctctcctccccacttgttcaggcttctaaaccaggaggcctccattacctcttcctgtcccacccctgcagaggcctgaagctgggcctgggcaccccattcactcccgttctcatttacatctgttttcctgttgtatatatcacctttgttgacaataaattatttttttttatt

SEQ ID NO: 202088 - DNA, 1000 bp, Homo Sapiens
taaacatcacatgaagactttaccacctcttctgggaaacgggttagagtgtttctggtggaatgctggattgttaatcgtgttagatggaattatgaccttgttgttgtctttatgtggcagttaagtatggtttaaagagatgtttatgggtgccaagttgacaagggtagacttgtgatggttaattttatatgtcaacttgaataggccacagggtgccagatatctgtttaaacattattctgaagtgtcttgagtgtgtttacagacaagatttgcatttgaactgggggactcagtaaaggagatagccatccccaaggtgggtggacatcatccagtttgttgagggcgtaaataaaataaaaggcagaggaaggaagaattcaccccccttttttttcctgcctcattgtttgagctgtgacatctcatcttctgtcctcagatggatttacatcactggcttccctggttctcaagcctttggattcagactgaattataccacaggccttcctgggtctccagcttatagatggcagatcatgggacctcttagcctccataatcatgtaagccactttcttgtagtactggtaaaagatatattagaccaatctataaaacagctagctatgaaagagaaaggtgacaggcacaagcctaggcaaatagagaagggttcctggagagcctctgacttgcctaggtcattgtgcacacgtggcttgcctgaatgaacatgcccactgtgaaagattccatttctcaacacatgtgcagtaagggaaataaatcaatgtggctcagactaagcgcccacacatggggtggagccacgaggagtttgctccttatgcaggggagaagccgtgcctcttcagctcgtgtgtggtggcctggcattcaatttgtgaggtgtaaaacctgcatgaaggacccctctttttgtggagagctttccttttgcctaataaattctgccctcctcgcc

SEQ ID NO: 202089 - DNA, 1000 bp, Homo Sapiens
agaagattcagaagcctaactgaagtttggccaagcaaagaatctttaacacagtctcttgattgttgagataattgctcgcatgatttttttttatataacagctttattgggatataactcacataccaaacaagtcaaccatttaaagtataccattcagcgatttttagtatatttccagatatgttcaacaatcaccacaatttgagaacattttcatcacatgtaaaagaaacccataccctctagctgtcactcttcctaactctaccctccaaaccccagccctagcaaacaataatcaatttcctgtctctatgggtttgcctattctggatatttcatataaatggagccatacaatatgtggccttttgtgtctggcttctttcatttagcgtaatgctttcaaggttcatctatgttgtagcatgtatctgtacagtacttcgttcctttagattgctggagcatattctgttgcattttgtttatccattcatcagttgatggacatttcagttgtttccacattttggctattgtgaataaggctgctgtacacagtcatgtacagtttttttatggacctatgtttccatttctgttgagtggaattggaatctaagagtggaattgctggatgtggaggcgaaagcagctccatcttggaagctaatcctccgtgttgacttctgattgaccccagttctgggaaggcctctaagatttctactttatctattgttccttgtgtaagagcaggtatctacccagtatgttctgtccttaattcaaacaacttgatgttattatacttcaattgtcctacacatcccttctgaaccacccctcccctatggtatataagccctaaggggctggagtgatggctcatgccggtaatcccaatgcttttggaagttgaagctggaggattccttgaagccaggagttcgagaccagcctgggcaacaaagcaagaccctgtctctac

SEQ ID NO: 202090 - DNA, 1000 bp, Homo Sapiens
cttacatgtcctgtaacaggcttttgatgttgtgtctttccactcaaatgaatttgctaggtctgttctttttgaagctccccatgtctaactccattccaaaagaaaaatgaggtcagtagacagtctatggtgctagaaacccaccattgcctaatgacctagaaggctttgttgtctctgagcttgactaagaccatacctagatcacaggtattatgactccacatgaaccttcacatttgttcgctcataatctacttactgcctaaaaactacaaaaccaggctaagaaataccaccagtcatagcatttacttctgcttctcctggattatgtgctacaaatgtgctttggctttagaaagggatggatgagaagacagacctgagaccaatctgggtagaagcaaaaagttgaaccttttaaagtgctgaacacaaatccaaattcgaatggttcaagcagccgtgaaatcgctcttcataaagtgggcttaattctctagtttaagttcttttgatggaatgaattaattaatgtgtcaggtggcttatttgtggatgccatgattgatgatgttcattttaagctcttacctatagtacaagtacatgatgctactgaatatttttccacttggaaactgtgagctggttgttgcattaaaacacacatacaaacaaaatcaaaaacactgcggactttcactcaagctggtctttcttccccagtgtaaggcaatcctgcctactaacaacaccaacaacaaaacactccatctgtgaagctgacgcagttaagggggctaggcagggcatttgtgccaactaagaatcaccagatacccaccataagtacctatcgcagttttgaagtcgtttctccccaactcccaactcctgaaggttgctgcctgcatatttactcttcattagtgctattttcctgtatgtcattgtgagcaagctgtgattaataaagaattggagttctgtg

SEQ ID NO: 202091 - DNA, 1000 bp, Homo Sapiens
ccaactaaccttacacataatttgagggattcctggattcttctagtgatactgaaaagcacacttgactaaagcatagtgttttttgtttgttatggaaatacggtatacgttcatttaaaaataaatggacatacaaattgcatctccttaggagatacattttatatacatttcggtgcgtttttttccagtatggatttctatttgtttctctcttcctcttgttttttctgtgtcactcttgtatgtcctcatatctttcatacctcttgtgtagtctctagaagcagaacacctaagtcctgggtctggataatgaaaccctcagtctctggggcctctgaaaataaggaagcattggagctattgccatgttgagtaatgggcttcctagaactattgtcatctatcctgccagtgttttatgttgtagctgtttttctttgacaggtgagttccagctatgttgttagtcatgatcctgccattattttctgtgttctgtaggatgtctccaggctacttaaacatattttatgagtttgcaataaaattgttgaatcttgtatgatcaagtcactcctctgctcagaaatccacagtgacttcttagtaagcccctacattatatgcatacttgtttttttcttaactttactcccacttctacctaacagagacctcaacttaagtctcttcagttcttcaaggcctggccttgttcctgattcctcaaaaaatcttgactctaaggcctattttattgtctgtctctgaatccctataaagcttcaagtctgtatgacattcttaacgccaaattatatattgtcttgtactgttcctagctggtacatgtatattagtcttgtctccctcatgagaatgtaagctccttaagggcagggaccatgtcttaatttttgtatccaccacagtgcctagcacagtgcttggcacatgggtgctgaataaatacctttgtttattgatcagc

SEQ ID NO: 202092 - DNA, 1000 bp, Homo Sapiens
aataaggctttaaattactgattcacctttaaaggaatgttgtgagaattgatgtaatttctgtttctgtttccatctaaacttctttataaaaagagggattagtttttttgttttggggtaagcacctaatttatccagtaaccaacaaccctaaccattggcatatatagtctttcactcagaaataaacaaaaactgtttggtatatctgtatcattgctaatcttgtgcactttactttttgggcagtaccatacatagtctgaggctattgacttaaaccaataactgtactttatgtaatgactcttaaatttggttacctgggttcacagcttgcttgaagagaaaggatgctagaataaagtaagcagctgaagagcgagcaaatcaagacaaaacacagtggtctcagatttttcgtagtgtgggaacagtggttttgctctataccactgaaaagcactataacataattgttgtccattatactgaggcttttcccctcacttctaggttgtttacattcagagctctatcaataagaggaatacatattacagtgaattcgacaaccgcacaagttggcagtaggtatccccaacctaatttatcttggtaaattcaccctgtttcctagtgctgctggataaaagagtgtttactttttattgctcttagacagagtagtctagataagttttcaatttatcaacatagcctagacttctgtaagtggaatgttcattagtaactcatctttttgttgttataattggaaacagaaacgaggcttattgctattgcagaaatcccaaactggcaaaggccagtatatatggtattccataatataaccagcttttgaaatttatgtgtttggattagtgccttctggttaccagtattgactctgctagtttgcacctttccgttcttaacagaaaatttgtatttgttattcctcttaaattttgtcgtaactagtgaaggaagc

SEQ ID NO: 202093 - DNA, 1000 bp, Homo Sapiens
gctcaagcgatcctcctgcctcggcctcccaaggtgctgggatgacaggtgtgagccccgtgcctggcctggtcatttctcttgctgtgcccaacctgccattaatcccatccatcctgagcccgacgtggtcatttctctcaccacccagcctaccgcccgacgtggtcctttccctcaccacccagcctaccgcccgacgtggtcctttccctcactacccagcctaccgcccgacgtggtcctttccctcaccacccagcctaccgcccgacgtggtcctttccctcaccacccagcctaccgcccgacgtggtcctttccctcaccacccagcctaccgcccgacgtggtcctttccctcaccacccagcctaccgcccgacgtggtcctttccctcaccacccagcctaccgcccgacgtggtcctttccctcaccacccagcctaccgcccgacgtggtcctttccctcaccacccagcctaccgcccgacgtggtcctttccctcaccacccagcctaccgttaatctcatccagtgcttttgtcacctcgtgttgtaattcaattttttttattttttatgagatgggggtctcactatgtggtccaggctggtcttgaactcctgggctcaagcgatcctcctgcctcagcctcccaaagtgctgcgatgacacgcgtgagccaccaagcccagccaacatgttataattctctagaggcttgcttggggtcccctttacgtcttccatgtctctactaaacttttgcagattgggattcagttgtaagaactgctgagtgcccatgtctgctggttctgatatcagggtcggtttcaggaggctgcttttcctccttgtttggggtcctattatgctgccttcctgtgggcctggtactctcgggttgatgcctgaggcattgcgaattttaccatgttgcgtgctgggtgttttagcatttttataaatcatcttaatctttgttctgg

SEQ ID NO: 202094 - DNA, 1000 bp, Homo Sapiens
tcgctctgtcgctaggctggagtgcagtggcgcgatcttggctcactgcaacctctgcctcctgggtttaagcgattctcctgcctcagcctctggagtagctgggactactcgtgcatgccaccacgcccggctaatttttgtatttttagtagagacagggtttcaccatgttggccaggatggtctcgatctcttgacctcgtgatccacctgcctcggcctcccaaattgctgggattacagcactgtgccctcctaggaaattattttttaagtgaaattttatttttattttttttaggattttggtagagaatgagtaggcctactcatcaatatcaaacaggacatttagtttctttccttagaacagacataaatttaatttcatggtaatatgataataagaaaatgcttctatttttctttagcacctccatggttctcatatacccatgtctgtaaaaagtgacatgagaattttgttgggttacattttattgtatttattagattcgcttatatagatgacttaggcagaaataaagtcatgtctttagaaggtgaacaagccaacttgtgatggcctgccttttgcttttggcagttgggatgagaacaattgactctcccattggttgttagatagttgaaatggtgcgttggtggtcatacttagtgttctaggctgtgaaatcatggagttcttccacttccaagaatgactcatttgctgttggattctagtacagaatttagcagcctgatgtgtccccaaactgatttaatttctactgaagtgcccttgtgtacatttgttttgtaatttaccaaagtactacctgagtgtataatgactcctgcagtgagttaatgtaattgctgctttgaccattgttttaaatctgtgtactagagtaactgtgagcagaatgaaatcacattatctcagtgttcaaaatatcattctaataaagtacatgcattaaacaatttt

SEQ ID NO: 202095 - DNA, 1000 bp, Homo Sapiens
cggatggcaactgctaaaagagcatggattgtaacacatccctaaatgctgctgttgggctggagcccaaaagtgctcatcgaagccctggcacccgcttgcctgcgtgctcccgctcccacagagagtttgagcatggtggtggccaagtaagtaggccacacccctgtcgcaagtcccgagaaggggtcaagggaactctcccatctcagaagtatggcaatttcttataaaattggacatagggttactgtacaacctggcaatttcactcctaggcatttagccaagtgaaacttatgtcctctaagactgtgtgtacaaatttttatatgtgctttactcataatagccgaaataccctggaaatagcccaactgatcttcattgagtgaattgctaaataagctctgtgttatattacatccacacaacagaatcctgaccatcattgaaaaggagtggactattaatacatgcaataacttggatcaatctcaaatgcattacactaagtgaaagagaccagacttaaagcctaccttctgtgacattagagataaggtgaaaccacaggaacagaaaacatattagtgttgccaggagcaaaaggtgggggaggtgttgactttcaaagcacaggaggaaattttttgttgttgttctttatcttgattgtgttagtgcccacatgactgtatgcatttctcataattcacagaactgtatactaataagggtgcacttcactgcacataaatgaatctcaacagacaaaaggttaaaaaagaaagaaatctcgggacaggaatcatggatttttgtattatccttgtatttgatggttgtttccagtttggtcactcatctgttcattcctctaacaagtatgtgtcgagtgcctactatgtgctgggcactgtaggttcaatggtaagaaaagcagatacaggactgctcttgtgaagttccttgaaagaaataaaacaaagtgcaaaat

SEQ ID NO: 202096 - DNA, 1000 bp, Homo Sapiens
aatagaactgaaagtgagatgatcagaaaaagattgtccttgcctcaagcaagcttctgaagcctaggcaagttagctaggtccttaatatgggattctggcatcctgattttaatgtgctctgaaaacaaagtgtgtgactcatgaaataaaggacactaaaccccaaatttgaaattatgaaaactttaggccaaagaggtaaaataaaaacagctgttgggagtgaaaaatggctgtaggaatttagttacaagtacttcacaaaaacattttcatcacatttacataatatagcattacaatacaaagctggctgctgtcctgaccaagcaagttctcttatcatctaacaaaaataatttagatacatttctttgcatggaattgtcatatttttccatttttggtacaaaacatagaaaaaaacattggcacattatgtagtgataagtcattttttccccatgtacaagttccaagtattctgcattccaatttgtattggaaaaaagtaattactgattcaattaattcagtctctgtttgtttataccttttaaaaatgcagcatgaagtacagagaaagaaaaatgaagtttgtttacggagtctaatatttataatacataggaaggatcagctggtaaaagagaaaggaaaatctcgagtctgactttatgtagatcacagggagttgtgaaaagagcagtataaaaatatgcacttgtgctttagaagcttttagcatacaattaatagcttaaaatagtatttactgcctccccatatgcctattttctgatatatttacaccacacaattttaacattgttaaagctaatggcatgatttcaaatatagactggttaaaaatatctgaaccttgaaacttcccctatcccctcccaaaatattacgtatagatggtgcatggcacaacatactgcatgggcttacacccagaaaatttggattttaataaaaattttaaacatgt

SEQ ID NO: 202097 - DNA, 1000 bp, Homo Sapiens
ggaagtaggcattaatttttatatataatttttttcttttaagggagaagtctgttggaacttggaggaaacaatgccattattgcctttgaagatgcagacctcagcttagttgttccatcagctctcttcgctgctgtgggaacagctggccagaggtgtaccactgcgaggcgactgtttatacatgaaagcatccatgatgaggttgtaaacagacttaaaaaggcctatgcacagatccgagttgggaacccatgggaccctaatgttctctatgggccactccacaccaagcaggcagtgagcatgtttcttggagcagtggaagaagcaaagaaagaaggtggcacagtggtctatgggggcaaggttatggatcgccctggaaattatgtagaaccgacaattgtgacaggtcttggccacgatgcgtccattgcacacacagagacttttgctccgattctctatgtctttaaattcaagaatgaagaagaggtctttgcatggaataatgaagtaaaacagggactttcaagtagcatctttaccaaagatctgggcagaatctttcgctggcttggacctaaaggatcagactgtggcattgtaaatgtcaacattccaacaagtggggctgagattggaggtgcctttggaggagaaaagcacactggtggtggcagggagtctggcagtgatgcctggaaacagtacatgagaaggtctacttgtactatcaactacagtaaagaccttcctctggcccaaggaatcaagtttcagtaaaggtgttttagatgaacatcccttaatttgaggtgttccagcagctgtttttggagaagacaaagaaaattaaagttttccctgaataaatgcattattatgactgtgacagtgactaatccccctatgaccccaaagccctgattaaatcaagagattccttttttaaaaatcaaaataaaattgttacaacatagccatagttact

SEQ ID NO: 202098 - DNA, 1000 bp, Homo Sapiens
caaagtcgacccataccgctcctgtggcttttcctacgagcaggaccccaccctcagggacccagaagccgtggctcggcggtggccctggatggtcagcgtgcgggccaatggcacacacatctgtgccggcaccatcattgcctcccagtgggtgctgactgtggcccactgcctgatctggcgtgatgttatctactcagtgagggtggggagtccgtggattgaccagatgacgcagaccgcctccgatgtcccggtgctccaggtcatcatgcatagcaggtaccgggcccagcggttctggtcctgggtgggccaggccaacgacatcggcctcctcaagctcaagcaggaactcaagtacagcaattacgtgcggcccatctgcctgcctggcacggactatgtgttgaaggaccattcccgctgcactgtgacgggctggggactttccaaggctgacggcatgtggcctcagttccggaccattcaggagaaggaagtcatcatcctgaacaacaaagagtgtgacaatttctaccacaacttcaccaaaatccccactctggttcagatcatcaagtcccagatgatgtgtgcggaggacacccacagggagaagttctgctatgagctaactggagagcccttggtctgctccatggagggcacgtggtacctggtgggattggtgagctggggtgcaggctgccagaagagcgaggccccacccatctacctacaggtctcctcctaccaacactggatctgggactgcctcaacgggcaggccctggccctgccagccccatccaggaccctgctcctggcactcccactgcccctcagcctccttgctgccctctgactctgtgtgccctccctcacttgtgggccccccttgcctccgtgcccaggttgctgtgggtgcagctgtcacagccctgagagtcagggtggagatgaggtgctcaattaaacattactgttttccatg

SEQ ID NO: 202099 - DNA, 1000 bp, Homo Sapiens
acaagatggaataaggcatgaccccagcctttaaagatcttggtactgagtgaggtttttggggagaggagaggcaggaaccacatcatcacagtgtatttttataagtactgtaattggagctagggcagcagctggcatgaagcagttccccttatgtgcttgctgaatgaatcaacagtcctgagggagggtatcttcagagatgacatcccagaggaggtgggatatgagctgggtccccacgggggctggtaaagacaatatgatggtccctggttttcagtataggaatgctgggaatgaggacacaatttcaaatctgcctggcttccaaagttctgttagagtaaaaccctttcccacaaaattcacctacttgtatcctgtatgtttatatttaaaatattggaaagaaccatataggaaataagctggaaattgatttctcaaggcttcaacaaacaccaggtatggtctgactgctccctgttctttcttcttccccctctgaaacctcccagtttcttggttagcagcagccttgtcatttcccctttggaacattggtctctgtaggaagaaatcagttatccgttacggggaaaagactaagcagagcagattcactgtccgtgtctcctcctttggccctttggtttctattgatggatctggaagggtggcatcaacatttttttccatttctatttagatgtgtatgtgaataggctgagactacagttattcatctgagaaagtaacattcttacattcaggttttcagtttcagcaagctgcaaaatgattgttcataaaatattgaaaaacaacatgtaatacaaatattagccaggtgtggtggtgcacccacctgtggtcccagctactcaggaggctgaggtgggaggatcacctcagcccagggaggtcaaaggtgcagtgggctgtacttgtgccaccgcactcaagcctgggcaacagagtgagacccagtctc

SEQ ID NO: 202100 - DNA, 1000 bp, Homo Sapiens
atttgccctgtttcacgaatgaatgaattgtggcctcaggaaccacaagcgcatggtgtagcaccagtacaatataaggctgcactgccatctaatgttaatgaatcgccattacagtttattattcggcaggctagattagccggagatcttgatgcctggcagtttgcagtagttttgcaacccccacgacagcaaggtggagcccatcaagcggtatgggaaccattttcttttaagctgctcaaagatcttaaagcagctgttggtcagtatggtcccaattcgcctttcatccgatcgctattgcaatctgtggctcagaataagctattgactccgtgtgattgggagattttaacgaaagttacactttcgccctcccaatttcttcagtttaagacttggtggaccgacgaggctcaaaatcaagatcgaaaaaaccgtgctgctaatcctgctattgccattacatttgaacaacttctaggaatagggggtcaatggggaactgtaaacaaccatcaggacttcgagatgatgccattgaacaaattcgcaattgctgtttgagggcatgggagaaaattcaggatctgggaactacttatcagtcttttaattctattagacaaggctcaaaggaaccatatcctgatttcattgctcgccttcaagacgcagcacagaaggctctcactgatgaaagtgccaggaaggccgggtgcggtggctcatgcctgtaatcccagcactttgggaggccgaggtgggcggatcacctgaggtcgggagttggagaccagcctgaccaacatggagaaaccccgtctctactaaaaatataaaaattagccgggcgtgatggcacatgtctgtaatcccagctactcaggaggctgaggcaggagaattgctgaacccaggaggcggaggttgcggtgagccgagatcacgccactgcactccagcctgggtaacaagagcgaaactccgcctc

SEQ ID NO: 202101 - DNA, 1000 bp, Homo Sapiens
acggtctctgccgtttcctctcaggcgcgccctgagtgggggacccgcagggctggaaggaacgcggggctggggccgcgccccccagcgctaagtggaaacagacgcggaaaccgacgcccggggcgcgatcccgggcgcccgcctccctgccccgcgcccgcgcgccccgaggggagggaggaagtgggaagtcacccctgtccccgccgagaagggctgtcgcaggctccacccttgccaccgcagaggcccggggctgaaagcaggcagccaggcccaggccctgctgacctaagccgcgacccctgaccctcggcctcgccctctagccccacccagccttcaggagcaagattcccggccgcacccgaaagtgccccggggaccagcgaccccgcgctttgtttagttgtattggctctggggattggagatgttcccctcatggagggtgctgagaccttagggtgggctgccaggctgggcggatgcgggctaagtgcacagggccttgggcagagctggctgcaagaggcgggtacgccagtggtgggtaggcgccgcgtcctgcagcgtctcaccggggcctgtctgtgcctctgcagccgagagggtgacctctctgggcaaggactggcatcggccctgcctgaagtgcgagaaatgtgggaagacgctgacctctgggggccacgctgaggtaggtgggacccaccctggtggcaggggccaggggtgatggcaccccctcacggcccttctctttgcagcacgaaggcaaaccctactgcaaccacccctgctacgcagccatgtttgggcctaaaggctttgggcggggcggagccgagagccacactttcaagtaaaccaggtggtggagaccccatccttggctgcttgcagggccactgtccaagcaaatgccaggccttgtccccagatgcccagggctcccttgttgcccctaatgctctcagtaaacctgaacacttgg

SEQ ID NO: 202102 - DNA, 1000 bp, Homo Sapiens
acctgtgcccagcgttctacaggcctggaccccgcccccgctccccaccctccccccagagcagggcgcgggaggaggcggctcgggctggctcggagagctgaggggcgcacacccgcttcgcagggccagggtgacacggaagcatgcgacggctgctgatccctctggccctgtggctgggtgcggtgggcgtgggcgtcgccgagctcacggaagcccagcgccggggcctgcaggtggccctggaggaatttcacaagcacccgcccgtgcagtgggccttccaggagaccagtgtggagagcgccgtggacacggtgagtagcatggcccgggcaggagcggggagggtcgtaccccaggagaccagcgcattcccacgaagggggacagaagtgcttgggctctgagccccagccctttggagaaaaggccactgtccagcctgctggaatgtgactgcgtgagggaggtgcggatcacaccagggcttgctctgcaccctcagctggctaccggccatcctctgcctgcctgtctgtccgcagccctttcccagctggaatatttgtgaggctggaatttaagctgcagcagacaagctgccggaagagggactgggagaaacccgagtgcaaagtcaggcccaatgggaggaaacggaaatgcctggcctgcatcaaactgggctctgaggacaaagttctgggccggttggtccactgccccatagagacccaagttctgcgggaggctgaggagcaccaggagacccagtgcctcagggtgcagcgggctggtgaggacccccacagcttctacttccctggacagttcgccttctccaaggccctgccccgcagctaagccagcactgagatgcgtggtgcctccaggaccgctgcgggggtaaccagtggaagaccccagcccccagggagaggaacccgttctatccccagccatgataataaagctgctctcccagctgcctctc

SEQ ID NO: 202103 - DNA, 1000 bp, Homo Sapiens
tcaggctcacagctaactgaataaccatcccattttctctatcctttccctccggagaagggattctattagggagaaacctaccctttctccacagggaaaatacagtgttctatttcatttgatctcttttgggttcttgtgatctatttactgtttcctgtctattgctgacccttttgtcctcatgattcaggctcaaccgaatcaagagcagtattctatcctacattaacctagaattcccatgtcaaattccacaaatttgggcttatatattaatagaagtggatgctatgatttgttaatgcttgacattggtgttgatttctcataaaatttaaattactaaaaagttaaatttgtattaaagcagattaattctgtttttaagcagctaatgaatgttgctttcaacatgatctgcagatcctaaaacccacattctaacagcatgggcaacatagtgtagtgagacttcctctccaaaaaatttgaaaattatccaggcgtgatggcccatcctctagttccagctaattgggaagctgaggtgagaggatcacttgagcccaagaagtcgatcaaggctgcagtgagccatgttcataccactgctctccagcataggccacggagcgagaccctgtctcaaaaaccaagaagccacacacattctagttttcagattctaacactagatattcaaatagagaaaggggattaggccaggagcggtggctcacacctgtaatcccagcactctgggaggaggcggcaggtggatcgcttgtgcccaggagttcacgaccagcctgggcaacatggtgaaaccctgtttgtataaaaaatacaaaaattagccggatatggtggtgtgcgtctgtagtcccagctacttgcggggctgaggcaggaggatcacttgagctggggagatcagcagccatgttcacgctattgcactccagcctgggcaacaaagtgagaccctgtcccc

SEQ ID NO: 202104 - DNA, 1000 bp, Homo Sapiens
gaataaatagtacttgagcatccctgactctgagactgtggggtagctggttgttttaagatgggaccagggtattgtgcacttattgccaattcttgcttcagtaagtggggtggctgtgcagagtgagtggcctgtgtatgaaccagggtccgtcccatctaatgagagtccggtcaggctgagtcctcactaagacttcagcgtggattcatcagtaaccttggttcactggcaggcttgctggactttggagaaaaggctgaccctcccccaaagcagcccattgctgccactgccctaggaacagagggcctggagccagggcttgacctggtacaggagcttttgcacaaggccggctcaaacctccaaacctggggaaacaggatgcatggtgaagtgaagaagaaagaaaatgcatccaccgttccttcctgttggtgtcagcacgatgaggaataattacctggatctggaaagcaggcgtgtgggaggctgcaggcccccctggtctgtgtagttaggcacttaatttttcatcctcctccttctctctgccctcccgaaaccgccgttttcaaaggaaaaacagaaaaacgtatctgggtaacccgtgtaatactgtttacatcagcccacttggcccagaaaggataccagctccttactgatgctcagataacagggttagtgcttaaaaaaattatgccttgggccgggtgcggtggctcacgcctataatcccagcactttgggaggctgaggtgggtggatcgcagggtcaggagatcaagaccatcctggccaaccaacatagtgaacctgtctctgctaaagatacaaaaagtagctgggcgtagtggcgcatgcctgtggtcccagctgctcgggaggctgaggcaggagagtcgtttgggcctggcgggcggaggttgcagtgagctgagattgcgccacactgcactccagcccaggcggtggagtgagtctccatctc

SEQ ID NO: 202105 - DNA, 1000 bp, Homo Sapiens
taacaatagaagcaacctctagggggtaaaattgtctttgataatcactgactcttgggtgacctcagtacagcattccaggccaaagatccagaatgttcccttactgggggcagacacgcctatgattgcactgacctttgtcctccgagcagatgatcctccagagtactggctagctcttagattcagaggtaaatcccagcccatgctgtggccttgctgttccccacagcccaactgcattaactataatttttttttctccacaaaaagaaattgttggtgaaaggaagacaaccttcagtttttctccccaccgacctggtttcaggaggccgtgtgctcagtggagtgtctctgcctgtcttcgctaagcttgcccctgaccattgtggaggtagatgccacctaagagtggcagggttagtcctgacctctggggtctgaatatccagcaactatcttaattccagtcgctgctgtctgttgtaccaccagtacacagcagtacagctgtgtctctgttgttgaccgactaacttagattcactgttgaagtccaattagccagagtgggggtgaaaatgcaagagtggacggtgagagtggtatgtgccatgtacgacaggacagtggagagagccctctctgatacctgttagtccctcctttaaaagatgtgggaggtggccagggagtggggatttcagaatgtggtggcagaaatcagtttggcatttattggatgacagctgtaggcaggcactgtgctataccttaggggggtagataaaaaaggaaatatgacattgcaccttccatactgagtttgtaggtttgggtatttatgggggaaagtggtaccctccatcctttttttaaaaaattgggccaaaattgtaagaattcttttaaaaacctgaacatttttagatggatttgagcatctcaactgtatgttcgtatcttgaaattccaaataaactcaggagtggat

SEQ ID NO: 202106 - DNA, 1000 bp, Homo Sapiens
ccgggtggggctggtgctgctgaagcacgcgctgggctcccctgagaaggtcaaagcctgccagggccagtacgagaccatcgagcgactgcggagcctcagccccaagatcatgcaggaggcctttctggtccaggaggtggtggagttgcccgtgacagagcgccagattgagcgcgaacacctcattcagctgcggcgctggcaggagacccggggtgagctgcagtgccgctccccgcccaggctgcatggtgccaaggctatcttggatgcagaacctggtccccggcctgccctacaaccttcaccatccatccgcctgcccctagatgcccccctccctggctccaaagccaagcccaagccacccaagcaggcccagaaggagcagcggaaacagatgaaggggagagggcagctggagaagcccccagccccaaatcaagccatggtggtggccgctgcaggagatgcatgtcccccacagcatgtgcccccgaaggactcagcccccaaggactcagcccctcaggatttggctccccaggtctcagcccaccaccgctcccaggagagcttgacgtcccaagagagtgaggacacctacttgtaaccctggcagctaaggcctccagggcggggtctccatataactacacggttcatgaactgacattccacatcctgcccaccctctgagggccaagctgcctggccactgggctgggctggagtctggctggtccaacacagattctgcctggtccaacacagattctgcctgagcctccttatttattttctttacagtggcactcaggctggcccagccagggcaggcagaagctagggcctggggggtggggcctccttcagccccctcctcctgggggatgctccccagggttagggtgctggtgtgaggggaaagggtggggtgttctttgtgtaaaatagaaacatggttttgtacagaaataaacagccttgtatagag

SEQ ID NO: 202107 - DNA, 1000 bp, Homo Sapiens
tcaaaaaacaaaaagcaaacaaacaaaaaaagacctactcaagcccaatcctatctccaagacaatcctgcaccccagttctccacttgccaatcttactcagcttccttcctccttccttatcaccttaatcttaaccatggttaatctttaacagctgctccctcctttttccaactggtaaacttcagcatattcttagaatcataaacgaagatattccaagagttttccctgcattctctttcctagaagggtccatgcttctctggccctgctgtctggactcttaactgtgtcagttagatcctatgcaaagatagttccaaacccaagcctttagagctaatctggaactaagccttccccaccctggcctgccctccctgagatcaacctagtggccacacttccagccccatccttaacctcctttctttctctcccagctcctgcttatgtgtcagtctgtctcctcctcttgtgtccaagggaagtcatcgctcccgctggctcagaaccatggctgtgccagccggcacccaggtgtggagacaagatctacaaccccttggagcagtgctgttacaatgacgccatcgtgtccctgagcgagacccgccaatgtggtcccccctgcaccttctggccctgctttgagctctgctgtcttgattcctttggcctcacaaacgattttgttgtgaagctgaaggttcagggtgtgaattcccagtgccactcatctcccatctccagtaaatgtgaaagcagaagacgttttccctgagaagacatagaaagaaaatcaactttcactaaggcatctcagaaacataggctagggtaatatgtgtaccagtagagaagcctgaggaatttacaaaatgatgcagctccaagccattgtatggcccatgtgggagactgatgggacatggagaatgacagtagattatcaggaaataaataaagtggtttttccaatgtacacacctgt

SEQ ID NO: 202108 - DNA, 827 bp, Homo Sapiens
ccctgaatgcttatgccggtggttggtagaggaaatggaattccccagactgtacctcttgacttgctactggtacctggaagagatgtaacacctgaccatgggacatcaagtgactgtgtgaatcaaactgcccatcatgaattgttgttatttgactcatcaaactgtacaactggatgaacacaggagcagtgcactacatatgggactggaaccatgaatgagcaggtgactcagactcctatagtacctgcctctactccttcagcacttctccctcaacccacataaactgtcatcataatgagttccctctgaccagttaatggaagagaaaaaagtatggatgttatggatatcctaacatatttctggccattggacccctagaaacctgtggcaagtcctggaagtttttcaaggttcatcttgcaccttctagcatgcatatgtcgtaccaaagcatgtagaatgctgcctacttctgctcttcagtttcatttaatataatttcattactctgataaatcagtgtgatgttctatggaataacaaaagaccatcaaggtcccttcataccatatagagaacaggagagttgatgtagcctgagacaagacagtaaggacttactgttatccctcctatttaaacgtagtctgtttctgattctccttagaatgggggtggggggacatttccagatcaatatcagatcagtatcatgtcaacatgggtattaatttcttccgaagaagataccacacctagaacagcaaccataattggcatccctacctaattaaagtttgcagtccactgtc

SEQ ID NO: 202109 - DNA, 1000 bp, Homo Sapiens
caccatgcccggctaaatttttgtatttttttttagtagagatggggtttcaccgtgttagccaggatggtctccatctcctgacctagtggtctgcccgcctcgacctcccaaagtgctggaattacatgcatgagccactgcgcctgaccctatttagtcttaagtaactaactgaattactagtaatttttaaaaggttggaatggtgggccaaacagtaagatgaagtttcgacgagtaggtcagttcttttccttgggtccaggaaactattgagcagcaacagaagatcagagcagagatgtggctaaacagtagcaggtatgaaaagacttagaggttctggtttctgtaagcttcaaatatctgtgatgcttgtgccaaaacagcttaagtagactgtattgtttgagagttagtatcgagaacaagggaagaactggtttcactctgcacttctgatctttacaacagggcaattgaaggaacagactaaaaatcgtgtcctggaaggaaactacaggtactaccagggattttcagtctgaagaagaaaagacaaaatagatgacagaaggagtattagaagggagagcgatgagactcagttggacaccgagagagcaaagaagcaataatacgtgaagatgaaaatgaaatcaatttcagcataagaagacaagaacttatggtaaagctgcccacagccagaagaggatcctagaaggacaggaattccctgtctgcagcatttcataagcatgtaatattgttgcagggatactgcagaaggagttgaagcagtggacagacagatgatataggtgattttacagcctaagaaagccctgtgcttgtgcccccaaaacatgaggtgctagtgaatgaatgctgggggaaagcccagggcctaggtgttgcaatgttctgtggttggcagatgctttttgttttgttaaaaagtgcaacagataaaatttatcaatacttttctgct

SEQ ID NO: 202110 - DNA, 1000 bp, Homo Sapiens
ttcggccaactgaatagggaagagtgatgctgtgctgtttccaggcctgttctttaaaagtacttggaagcttctgccttggcctctttgtgcctgagttgctgtataagaatctgactaccttgctggagagaccttgtggagaagacttgaccttatatgcagaggtagaggggccctggttagtccagccatctagccatcctgtcaaaatagcaggagtatgatggccaatggatccaaaacctatcctatatctacatgttggtggccacattaatctgacatctgacagcaagagcgatgattgggttcactggaaatctttgtgaagtacgagtgaagtccttgtgaagtcagagtttcctcttcatgcctctactcctatgcagtttgacctctcagtgtgcagctggtgatagatggaaacccttgttcataagctttgtggcactgtcggcaggatgaggggacttctggatcctcactggtcactgtggcagagtggttggtgttgtctgctccctagacaggaacccactgaagaatctgacattttttgatatgctggcattcattgttacagcccatcatcccagccatcaatccaggacatggggtctgtgcccacggtgggaaggaggagggggaagctggctttgttctgacgttgggcttcttctgctccaccagtactttctgtgggggaaataggtaaagaaatggctgttcagatgagaagatgtgtcagtaaacttttgctacagtgatgctgcaaaacaaatcactggtgactttcagtggcacacagcaataaacatttatttagctcagggattgacaatctttttttttttttaaagggccaaatagtaaatattttaggtgtttcaggccatacagtctctgaactctgaacttgtagcacaacagtagccttagatgctatgcaaatggaggagcatgactgtgttccaataaaactttatttatggacact

SEQ ID NO: 202111 - DNA, 1000 bp, Homo Sapiens
ccccaacatgtaggatcccttcactgtgtcacatgtgtccctaacacacttgctacatctcatgtcctttaggttctgtgttttactccagataatgttctttgaatctaaattacagtttactgatttctcaaaagctgcacctaatgtgctatccattcagacagacatactcacttagcaaatgtttgttgagccagcactcagtggcagattctgtgctagggcgtgccaagtgcagacacacgtttgccaagacacagggtcacatgtgcatgcacactcagacttgcaggcttacaccagtgttcagcctgctcccaatcccagggagctccagggaggacagagagaatgtcacaacacccaacccctcccactgcatgctgagtccagttcccgatacgctgccaccccaacagcatggcccagggccgagggtctctctgcagacctgccctgaccacattcacacacacacacacacacacacacacacacacacacgaagaggcatgtgccttgttcagatatacataaagctcacccatcgccaaattccctgcctgtgcctgctgggaccagactccgctgtcatgagggtgacatccgccacctgtgctcttctgctggctctgatctgcagcgtccagctgggggatgcctgcctggatatcgataaactgcttgcgaatgttgtgtttgatgtgtcccaagacctcctgaaggaggagcttgctcgttacaaccccagtcccctgacagaggagtccttcctcaatgtccagcaatgctttgccaatgtctccgtgacagaaagatttgctcattcagttgttattaagaagatccttcagagcaacgattgcatagaagcagccttctgatctgaggacccctgcagatcagatattggccctcctgccttccttggggctccccgcgttcctggcctggctctgttcatcactacagagaccccaatgaacacctgcagctc

SEQ ID NO: 202112 - DNA, 1000 bp, Homo Sapiens
gagcaaggaagccagtcccagtcccacagctgaagcacctggagtctgatgttggagggcaggaagcatccagcacgggagaaagatgcaggctgggaggctaagccagtctagtctttccacattcttcttcccgcatttattctggccatgctggcatctgattagatggtgcccaccaagattgaggatgggtctgcctttcccagtccactgactcaaatgttaatctcctttggtgacaccctcacagacacatccaggaacaatactttgcatccttcactctaattaagttgacactcaactatcaaccatcaaactttttaatcttttattgggaaatacaaatacaggttgattgtctgtaatctaaaaattagaaatcacaaatgttccaaagttcgaaactttttgaacactgacatcatgatgaagatgaccttaacactataggaaatgtacagaaacaccgtggtgagtgtgcgatgggcttactgaagagctggagcagcaggacacgtaacagagcaagaaaccatggcagtgtacaaaatcagagtgatgtctaagacaaaaaccattgttagtgaggcagatgaccctggaggaatcactttaaaaagcatctggcagaatgcccctcctccctagaggaccacttcctggtccctcagctgcatctgaggtttcttctcacctaaaaaatgaaacacaggccgggcatggtggctcacgcctgtaatcccagcactttgggaggccgagaccggcagatcacgaggtcaggagatcgagaccatcctggctaacacggtgaaaccccatctctactaaaaatacaatgaaaattagccgggcgtggtggcgggcacctgtggtcccagctactcgggaggctgaggcaggagaatggcgtgaacctgggtggcagagcttgcagtgagccaagattgtgccattgcactccagcctgggtgatagagcgagactctgtcgc

SEQ ID NO: 202113 - DNA, 1000 bp, Homo Sapiens
ggacgtgcagaagcgccaccactccgagtctcactggagggtttatcttgccccacctcactgctcttcctgtgggctctcgcagtctctcccacccggggctgcgtctgcagccgggcaggcatagagcaggggagcagcagagaaggcgcgagaagaaagggctgaggccaggttcgacattgagcctacagctaagttagtgatctcagtcagttcagcaaaactcaggagagggaggagagggccgccacgtccctgccgtcccatagctggaaatcggcaggccctttctgtggtgagttccacgcattaacacgtgcccagcacctagacagcgcctggccacggtgaggcgagagtgctgtgtaaaagcttccactgcaattgtcactcaagacacacaagtgttttccacagtggcagtgaccagaggagcttgaggactgctgacagcaccagctggtcgagacttgcttcatttttggattgtcctttgctgtttgattttttttttaaaccatgagcaggtattacttaagatgacttattttaattaagaaaaatataagaatgagacacagtagctgctttcattgattctgttcaaccgttgattggaattccaagcaaatgcagcaagacaagaaaaagaagtcacaacggaagaggtggggaggaaggccaggacaacagctcagtaaagctgaggtgcaaggctgggcacggtggctcacacctggaatcccagcacttttggaggccgaggtgggaggatcacctgaggtgaagaccagcctggacaacatggtgaaaccctgtctctactaaaaaaaacaaacaaacaaacaaaaattagcgggtgtggtggtgggtgcctttaatcccagctgctcgggaggctgaggcaggagaagtgcttgaatccaggaggcgggtccagtgagccgagatcgcgccactacactccagcctgggcagcagggcaagaccctgtctc

SEQ ID NO: 202114 - DNA, 1000 bp, Homo Sapiens
atatggtgtttctaccgggaataatttccctcaactcttccactgaactgacttttggtcaacctttagcacttagctatcatcttctctgggaagcctgtgacttctccagtctggactggatttctgaagcactttgatcataactctgaggtagttatatatcaatactgaatttacaggtagccttcaaattttatgtatccaaattttgaagaagctgtttttttgaacgttgtatattgacacccttacagtgcattatcatttttacttcctggtcctcttattaaatgtttccatagtaaccattttatttatggcacttgccgcagtttctaattatatatttattcatgtgattgatgaatgtttctctccactgctaagactgtaaacaagtaagaaccagaatcacgccttttttgtttcattgcttggtgtacagtgctttgcctaagtatttaatgactgcatattaaagcttttatgctggtctttagctattttgttgcatatgaatatttttgcaagttcttttttaattaaacgagtaaggagaaatgtaaaaatccagaaatatcgaaatgctgatattagtgttaccggacaagtgtcttataaacttaatataacggagacagatataaattagtaggtgtgaaaatctttcctcttaatcagttatttattgttttaagacagccaatagttggccgggtgtggtggctgatgcctgtaatcctggcactttgggaggctgaggcgggcagatcatcaggtcaggagttctagaccagcctgaccaacatggtgaaaccccgccagtctctactaaaaatacaaaaaaattagccgggcgtggtggcgcacacctataatctcagctattcaggaggctgaggcaggagaatcacttgaacccaggaggcagaggttgcagtgagctgagattgtgccactgtacttcagcatgggcaacagagcaagactccgtctc

SEQ ID NO: 202115 - DNA, 1000 bp, Homo Sapiens
gtcccccgtgtttcccccttttttttttccaagtagtttgggaggatttgtttttccagctgaaaaatactatggttaaaaataaggtttaaaggcgaaagttgaagtctttgagggttgggatacgtttctgttcttaagagtcttgtaaattcagatgctaagcaaatttctttaaaatgatttctaccctccccctttccattataaaactggatatgtttcagtggaccaaatcccaagtaggctgaatttgaaatttgtgggctgggcgcggtggctcatgcttgtaatcccagtactttgggatgccgaggtgggtggatcacctgaggtcaggagttcgagaccagcctggccaacatggtgaaaccccatctctactaaaaataccaaaattagccaggcgtggtggcgggtgcctgtaatcccagctacttaggaggctgaggcaggagaattgcttgaacctgggaggcggaggttgcggtgagccaagatcgccccattgcactccagcctgggtgacagagcaagactgtgtttcaaaaaaattaaaaaagaaatctgtggtgtgaatactggtacgtggtgtacacagtgagctcttaataagtatttgaattaacaaatgagacaatgattgaataattggatgaacaaagagaatgcaggtttttaaaaggtttctttagaaatattgtcggcccggcacggtggctcctgcctgtaatcccaccattttgggaggccggggcgggtgaatcacctgaggtcgggagttcgagacaggcctgaccagcttggggaagccccgtctctactaaaaatacaaaaaaaaaaaaaaaaaaaatagcaggatgtggtggcacgtgcctgtagtcccagctgctcggaggctgaggcaggagaatcgcttgaacctgggaagcagaggttgcagtgagccaagatcgcgccactgcactccagcctgatgacagtgtgagatgctgtctcc

SEQ ID NO: 202116 - DNA, 1000 bp, Homo Sapiens
ttaattggagtgcttctagcactgcctcggtaaacatgatactgagttttggaggtcagggaaatatttagctgctcatatgttattgagagttttttaaaaatcaagaatagatgttgaaatatctattaacatggcaaattattatgagatcctctaattttgagtcatcctggcattcatgaaacaaaaacccttttgtgtttatcaattattattttaatatgctgctggattttgtttgcttatttgtgcatctccatttgtttatttaattcatccttgcatctccattcataagagatatgaatgtgtatatgtgaggtatttctgttatgttttcataacagtgttatgtttgttccatcaagtttgtgtgagagctgttctcgtttctctgctggggcagtgtttacacagagaattggaaggcgctgtccttcaagccgccgcaacacccctggacatctgggccagatgcctttgtgtggaggggaaaggggagtaggacctttctttcacaacattctctagtttttctgtttctgttttcttgttttttgcaatccattttggtaaatcctatttttgtagcaaattatccatttcatccatagaattcaccaagcccttaccaatttagtgttttcttggtattttacccatgctgcaatttcagttttgatttccttttctgacctcataattggttaacaatgaggttttttcgactgggcacggtggctcccgcctgtaatcccagcactttgggaggccgaggcgggtggatcacttgaggtcagagaccagtctggccagcatggtgaaaccctctctactaaaagtacaaaaattagccgggcatggtggcacgtgcctgtaatcccagctactcggggctgaggcaggagaatcgcttgaacccaggaggtggaggttgcagtgagctgagatcgcgccactgcactgcagcctgggcgacagagggagaccctgtctc

SEQ ID NO: 202117 - DNA, 1000 bp, Homo Sapiens
atagttttaaacatatattttgttcattacatcttcttctgtacattcaacattttgtcagaacaaagtaagagaaagagtggcagggctttgtgtgtatgtggtttcagagctgctgacctctaggatggggtcctgctacatttactcttctgaggcctccggagctggccttggctgccctatgccataccctgtgctatgtgccgtgcctgtggacctgccctgcctgcgtgctgccccgtcccgtctccccaggcagttcctgcacctcctgccgtgtggatgctggccgttgctgtctgactcgcattcttggagacactgacccaggctcctctcagcgcttccagccaggtttggcagtgggaacattagggggagattagagggtgtgtggagcgaggcagggcctcacttgctctgcttccgtgggagtttcatggcgatggccgtctaccctcatggctgtggccccagttcttcctgggtgggccctgctgtagttctgctatacgctgtccctgttctggactctggtgacgccacaccttccctagtccctccagccctaggggtggcagccccacgacgtgctggtctctggtgcttgcttcttagtgcatggccgtgccatgccctggtgcctgcccgggatgcctgtgtggaatgcccagagtgttctaggcagggtcccctctgtgattagctcctcaagggtggtgtctgtgtcacagacactttggggtcctgtcagtggcctctcgaggctcccagggtaccctgtactttctcaccccttgttgctcatctattgtgggtttgtctgtgtgctgcaaaatgcacggctgtactgagcgcaccagccagcagctgtaagctccatgtgcagggccaccatctggccgagcacctgccatgtggtgaagatacagtacatacttgttgaatgggtgatgaaacttgcgcagacctcaaataaaagctaataatttaatgt

SEQ ID NO: 202118 - DNA, 1000 bp, Homo Sapiens
agatcgcctgtatgactctatcttggcctctctggacatgctggctggctgcacccttatccctgacaaaaagcccatggcggcaatggagcacccatgtgaaggggtttaacctggcatcttctcaggcagaggtgcaacctgtcggccaaacactggctagtgagaaaaaaatccttcaagaagtccttgcaagagccattcaacactgaagtcaagggggaaaccttcaatatactagctttaaaatgcctttctcctccctgaatggagggctgagttactatttttatttacaatgaatccttccaaactaaggttttccttttggtgcttctccacaaagagcgtgtagctttgcaatttttgataaaataagacgtgttgccttcccctctatcccattaaaaaagagcagataaagctcaaactattccacctggtagggtcatttaccaagggctggtaggagattccgaatactcaatattctcaggcatgcaagaggacctaagagactgaaaaaagtgaattgttggccagaaaccttgggtcttttcataaaaggaaatttgggcttgtcaatccctctttaaagatataggtagaaagaagagatttttaaccctttgtctgcaaaagaaaaagggttaaatgaagcatctatacagatgactttgggagattatgacaccttttgccatcttcagggcttacgtctttactttcttggctaaccagtttcttagaagaaaatgtgtcagggacttggggatctacagtcatgctttagcatggctatggagctaattatcaagcttaaagggtaactttgggaggactcctcccttcactcctagtctcccttggaagagcagtccaggctcagggaagggaatggataggatgacacagtaagtacagaaactgaagctgtcaatagtgaaggaaaaaggggaattcttcgttgctttggcattgacacataagtactttgatt

SEQ ID NO: 202119 - DNA, 1000 bp, Homo Sapiens
ccccacttacagctcatgtgtctgttttgccgaactaagaaagtgagggcttctctcaatttggatattcatatttctggtttatctgctagctttcctcccagaacttctgaaagcatactctgcttttgggaaacctaagatcacaataaaagtggcagacctctttatccctgtctcacaaataaatggaggcacagaatggggaagtggaggccgagggaacaaagccaactaagactgccagcccggttccctggccacagcactgagggtttgaggggtgcctccagtgagggctccccatccccgaccttggaacaccagctcatagtttctgccaggcctatttcatacgcactcttccaactttttcctgaattaaaaacaaacaaacaaacaaaaacctctgttatgaagtaatttcacacttacagaaaagttgcaagagcacaaacaatgcccgcccaaactcaccagttgcaccagttagcactttgctcatgtacacgtgcatgctcttccctctgtttgtatatgcatgcctgtgtatatgcacacatgtgtatatgtgtaattttcataagcatttgaaaatgggttcattatgcacctttactcctaaataattcagtatttatttccttagaacaaggacaaatttgcataaccacagtagggttgtcaaaatcagcaaatctaatattgatacactatacaatcctatgaccaatctcatctacaactttattcaaattttatagaggctgaggtggaaggatcacttgagtttgaaaccagcctgggcaacatagtgagaccccgtctctacaaaaagtaggaaaaaaaaaatagcgaggtgttgtggtacacgcccatagtcccagttactcggaaggctcaggcaggaggattgcttgagtccgggagttcaaggctgcagtgagttattattccaccactgcactccagcctgggtgactgagcgagaccctgtctc

SEQ ID NO: 202120 - DNA, 1000 bp, Homo Sapiens
ttcaagccattgtggattgaggagccaacctcccctgatgacattctggggcacgccaccatttccaaggcactggtcccattaggaattggcattgccacaggagaacagtgccacaatagagtgatatttaagcaactcctacaggcgaaggccctgcagttcctccagattgacagttgcagactgggcagtgtcaatgagaacctctcagtattgctgatggccaaaaagtttgaaattcctgtttgcccccatgctggtggagttggcctctgtgaactggtgcagcacctgattatatttgactacatatcagtttctgcaagccttgaaaatagggtgtgtgagtatgttgaccacctgcatgagcatttcaagtatcccgtgatgatccagcgggcttcctacatgcctcccaaggatcccggctactcaacagaaatgaaggaggaatctgtaaagaaacaccagtatccagatggtgaagtttggaagaaactccttcctgctcaagaaaattaagtgctcagccccaacgacttttttctttctgaagtgaaagggcttaaaatttcttggaaatagttttacaaaaatggatttaaaaaatcctaccgatcaagatgagttcagctagaagtcataccaccctcaggaatcagctaaagcaaaaagaacttttacctcggcatccagcccaacccctaaagactgacaatatccttcgagctcctttgaaagcaccctaaacagccatttccattttaatagttagatgcggattgtacccttcaatctgaaagtcttcagctttgaagtcatcaattttctcaacttttcgaagaatcctgagctttgggaaaggtctgggttctcgctgaagctaaaaacaaaataaggccattactttgccataattgtacgacctgttgtaattgctcctcatgtccgtgaaacaagtacacaggatgtgatcaacaaagttctattttacagg

SEQ ID NO: 202121 - DNA, 1000 bp, Homo Sapiens
caaataatttaaagattctacctgttccatgaaagggcaaagcaactcctaaatgccaaaggagatgaaaaaccaaagaaggaggtgaacaaatccactttgttggttttgggtaatttattatggggaatttacaggcacaagtgtggttttgggcatacgcaagataggtagatctccgtacctcaagcccccagacccagggcttatatcttgagaagaaagcatacatgctctggaaggaatgtgtagccagttttgggcatcacagcccgtgatttctgtgataacaagcgttgttttggaggaaaccttcaataagtagatgtttctacataaggagtaatacatcagctagccattttggaggcattccccacctcctggttaattagaaattgcatggcagattcgcttttaaaataaagtaactcttgtccccataatacctttgtaaaatctttccacctatgtttgctatgcctgtagggagacaaatacttttattgaatttgtacatacaaggcttattttcattaccactttgaacttattcaatctaatttcacatctgatttatttccatttcaactatacctcaaagtcaaatttattttcattctatattaaaatatacaatgatcactatgatttccaatcttgcttttgagatctgacaaattcttatgtgtaaatatagttttctggtaaggggagtaatagatttgcaacaaaaattatgaattacttgttttatctttgagtgtatatacgtatacctgtatgtcttatttatctaaaatacaaacttaagcatgttaagaatagaagcctttcccattattccacacctccgtgggggctttagaactgactgatattctgtaaactgataacatctattacatcacttttcactttgtattacaatattggattatatggccattctgtacccacccacaactgagagctgaatgcataaataaatgaagactgc

SEQ ID NO: 202122 - DNA, 1000 bp, Homo Sapiens
gactgggcatctgtgttatctatcctgggcccatctgtttctttccccttgacacccaccacaggggtctgtgtacaagagggttggttgataccagttttaatgagggaacctatcttcttggaaccatccagaagctgtggtctttttccctggaacaccccacccccgacatcccagtgctggattcaagctggtgaaccacaggtcaaaattttcagttgctgtcttccagggccttggttgttccattgtcccctctccctgtaccaggatcatcgtgatccaatggatttgatggagttgctacacccagcttggcgtgcaggggtgtttggcacatccctgcctgtggaattctacgctctaagggagatgctgccagggtattacctgattcacgaggcatgtcctaccatctgtgttatattttttttaagatcagaattatgaatatttcaggagtcatctgggatctgaagaagcaagaacccactttctgagtcttttccttaaccattcatagggggtaagaaatgtcacaggtttgttgtgaaggtcaaatgaaagagaacttgagaaaatttgcaaatccttcagttcaaggtgaaagaaggtaatttattattaattcatattgttattatgtagcatttcttagaatatgtataccaaatgccttttttgactggtgcaatctttctataattccattctgggatgttagcttatttgcttagagaatggtgtaaagaggggagcccgaggccggcagatcacctgaggtcaggagttcaagactagcctggctaacatggtgaagccctgtctctgctgaaaatacaaaaattagccaggtatggtggcgggcgcctgtgatcctggctactagggaggctgaggcagaattgcttgaacccaggaggcggaggttgcattgagctgagatcatgccattgcattccactctagcctgggtgacaagaacgaaattccatgc

SEQ ID NO: 202123 - DNA, 1000 bp, Homo Sapiens
ccagctatgacatcatgtgaggctgcaattttttttttttttttttttgagacagtatcttgctatgttgcccaggctggccttgaaatcctgggctcaggcgattctcctgtctcagcctcccacgtagctggaacttagggcgtgagccaccgcgcccagcttctggaaaggacatgaatggggaggtggaacttgattggacctgttctgtgagttcaggagaggtcctctgacaactcacttggggtggggaaaggaggtaaagagtcctgtggaaacttttggctgtggggaccccatttcactgatgattgaatgggtccacctctgtcaaaggaattcagagtcccactcatcattcagactgggggaatcaggctcagttgactggcccagccttaaatccactgaattcgtttttatctctacatagaaaaacggaattacagttgcttctcactgtccaatggggattggttcctggagcctccctgaatacctgtccatggatgatgctcaaatcccttacatgtaacctatgcacatcctcaggtatcctttaactcatctctgcgctactcaaatacctcataccatgtaaatgctgtgtaaatagttcttgtgctgtgttggtttttaaatttgtattattttttcttgtatactttccatttttttttcctgaatatttttgatccacggttagttgcctccatgggtgcagacccacggacatggaggctgcaccttctgaaatgagcatggcggcgccctctgggtcctcgtgtcgtcctgtctctggtgctgcatccagcacggtggcgaacagcagaactaatcttttgcaagttatcacagtggagtggagttccgctctgtttgcttttgccccgctctggcttaccagaggtcccctggccttggccacagcatacctagcctagtgcttggcacctcaggcacacaataaatatttatgaaatggatcttctctggt

SEQ ID NO: 202124 - DNA, 1000 bp, Homo Sapiens
ctttaggtgcagcagtgatcaatggctctcagcatccatcatcatcgtcgtctgtcaatgatgtgtcttcaatgtcaacagatccgactttggcctctgatacagacagcagtctagaagcagcagctgggcctctgggctgctgtagatgactacttgggccattggggggtgggagggatggggagtcggttagtcattgatagaactactttgaaaacaattcagtggtcttatttttgggtgatttttcaaaaaatgtagaattcattttgtagtaaagtagtttattttttttaatttcaagtgatgtaatttaaaacctaagttgtgtttcaaaacagcaacaaaactgtattgtattttttttgctgtaattaactgtataatgtaaacctaattattttatcatggtttaaattttttgcatatttgctttatcttatgctgctgatttttttaactgaatttgtaagattttgtttatcaaagcaactattatgtggtaacttgcctatatcatgaattatttaagatttttatagttttttttaattagaatttatttcagatgttttgttcatgatactatccttcagggttatgtgcttatcaatgaaataaccccagaggagtgagggaaaataacttgtagccagttatattcaggaataactactgtaaatgatgaacgtgttaggagacctccaatatttgctacttgccaatcctaatttagttacaagaattggtaggcaatcctacttaattttggcaaaagccccgtcatctaaatggcagaataactcagagcatgtctttgaagatgctgggcgtctaccaccaccttatgtccccaccctacccaacaaaaataagtaaaaagaatatggtgtattctacaaatttgtggcatgctcaaagtttatgatcacataaaggcaagaggatacttcatgaataatacatttcaatgcaaataaacagatggttcacttct

SEQ ID NO: 202125 - DNA, 1000 bp, Homo Sapiens
attgtaagcttttgtataaaccagcctgttaaggattaccaacagaataaatgttagcatattttgaacacctaccaaatgccaggcactatgtatactaggtacactaggtatattgtattcctagcttatttaatcttcaaagaaccctacatggtagaactttttcttcttacaacttttttgaaatataatttgcatactagaaaaatcactcatttaaagtgtacaatttaatggctttcagtaaattcacagagttgttcatctatcactactaaaatcgaatctatcttagaacagttttattaccctcagaagaaattctacgccccttaaccatgacaccctaattactccctggcttccagtcctaggcaaccactaatctaacttctgagtgtggatttgcacattctaaacattttatataaatgaaaacatagaaaatgtgaccttttgtgtctggctttcacataatatgctacgtgaaaggtacatccatgtcttaacatgtgttggtacttcattcctttttattgctgaataatattccattgtatggatataccacattttgcttaattattcattaattgacagacatttgacttgtttctacttttggccattatgaatactgcagctatgaacactcacatacaagtttttgtgtggatgtatgctttcattttccctgggtatgtaacctaaggatgaacttgcaggatcatatagttaattctacatttaactgattgaggataagataggaatttgtatcttcactttaggattgagaaagctgaggctcaaagaagttaaaatagctgcccaagattatagaacagagaagattgaaacacatattcatcatacatcaaagctctagacttccatggctctacatacatacaaaataagacagaggtctcttttaacaagtctcatcttaaaatatacatttctcaagagcagaaatttttgtctgttttatctc

SEQ ID NO: 202126 - DNA, 1000 bp, Homo Sapiens
ttgagaccagcctggccaacataatgaaaccccatctctactaaaaatacaaaaattagccaggcatggtagcatgtgcctgtagtcccagctactcgggaggctaaggcaggagaatcacttgaaatcgggaggcggaggttgcagtgagctgagatcacgccactgcactccagcctgggcaagagtgagactccatctcaaaaaaaaaaaaaaaaaattgtccccatgtagacagcatgatattatgaagtgtttttggaaaagtgcttcatagctaaagagcagagagtaagagttcgttagtgtttcttaaggaaagcaatggcaagttctcttacaaatggacaaaataatcttgtatgtctgaagtgatagtgtacagtacaggaaatgtagctgttactgagctataatgggggcttggttctaccatatctctactttgtgtttatgtttgtgtatgcatgtactccaaagtctttctaatgttgctttaatttccaaaaatgtatgcattgctttaacaatacatgtgatgtgtcatattacagatggggtcacagtggttataaagagttataccctgaagaatttgaaacagacaggtaaggaaaataggcttactgaaagaaactaagatggtacaaaatctgtattataaattgatttcttaacttttacgaagaatatacttgccatcaaaaatgtagctagagaaacaataggtgatttagttaggaggtgatccctgttttcccattctctggttgatgtttggcatgtctgtaagcattttggtttttatatatagtattccatacagtaactcagtatggcagcttagaatttttaccttcattttaaagatgaggaaacaaaaactcaatgagaatattaaagtgttaaagtatacattaaagtgcttatttaaaattcagatgttaacctcaattttttaatctagaatgcaaaatattaaaataatacgctttttttt

SEQ ID NO: 202127 - DNA, 1000 bp, Homo Sapiens
acgttaattatttaaaggcacttttctgaaaacatgtctcaaatcctaatgattctgttctttgcctataaacattagcgatgccattctacacttttcactgaaatggttctaaaaatataggagggaaattttgatgtgtgataaaagttcaggacgatcacatttttctgcctgtgtacttttgcttagtattactttgaaaaaccagctggaatttttgaagcagcctccgttttgctaaagtcattttgtagggtgggcctaataatggcctggcacaggacctgaacatcgaaaacacctaaagaacctgacacacctgcaaggcattgtaggggcgggagagacggtagagaagtgagatgagtgtgttttctttgggaaaataagtgatttttgctgaacagcttaaggcactctgtaaacattagccaaaaaataaatattaattctcactgtggcctcggtcccttagtgaagccatgcttactccaggaactgctgcgatgaagagtggtgaaaattctgaatgaaaagcagccctcaaaaatgttaaaacccatgctattaagctttacaccaaaaaataaattcgaatttttaaaaagtgagaaatggggaaaagaagaggaggcttaggatggtcaagtggcacctttagcaccttgtacttaaccagataagttcaagactgtgttttaggccgggcacggtggctcacacctataatcccagcactttgggaagccaaggcaggtggatcccttgagcccaggagttcgagaccagtctgggcaacatagtgaaaccctgtctctactaaaaatacaaaaattagccagacgtggtggtgtgcacctgtagtcccagctattcaggaagctgaggtgggaggattgattgagctcaggaggtggaagctacacggagccgtgatctcacccctgcactccagcctgggcaacagagtgagacgctgcctcactgctcccccacc

SEQ ID NO: 202128 - DNA, 1000 bp, Homo Sapiens
ggtggatcacctgaggtcaggggctcaagaccagcctggccaacttggtgaaaccctgtctctactaaaaatataaaaattagccaggcgtggtggcgggcacctgtaatcccagctacttgggaggctgaagcaggagaatcgcttgaacccgggaagcagaggttgcagtgagctgaggtcgtgccactgcactccagcctgggcagcagagcgagactctgtctcaaaaataataaaaaaataaaaatgaaagaggggccaatccagcctccaactctcctagcctagggtgaggggtgagcttgtgatcaggagagtcaggggtgctcagaggggcaccccaaaaccaggaaatatccattgtgcccacttatgcctgtgtctgccccaaatggagacattaagctctcccaggagaggtcttcatggcctgattggctttgggcagctatggctagtgttcattggctgcttcaggcaccaatcaggagccatctgtgcctttccaccaatgaggttgacctcctgggtctacctccatgttcagctcagctccagccctgcagggaaaggcttggacagcaccttgccctctgtaggaaacacccagggccatgccaaggaaactgtgctccctccagtccctagcggcaaggtgccctgagaggtggcagcatcttttgtcttctcatccaaacagtctgccagtggccgggctcggtggctctcgcctgtaatcccagcactttgggaggctgaggacagaggatcacttgaggtcaggagttcgagaccagcaccagcctggccaacacggtgaaaccccgtctctcctaaaaatacaaaaattagccagatgtggtgacagacgcctgtagttccagctatttgagaggctgaggaaggagaattgcttgaacttgggggggagaggttgcagtgagcccagatcacgccagtgcactccagcctgagagacagagtgagatgccttctc

SEQ ID NO: 202129 - DNA, 1000 bp, Homo Sapiens
gatcttgtcgggaagctactgagtttcaggtgttttctatctattgggagagtgcctttccctgatgccggctgtcaccaagtattattttagagagacagttaacaaccacctgaccatcacctgatggttgcctgacattcctggtgtgtgttgaggtggaaccatctgtcctgcctattcctgactagctacctactgtaacaaaaaagacaatgtattacttattaagaattctcaactgggcatggtggctcacgcctgtaatcccagcactttgggaggctgagacgaacagatcacattaggtccggaattcaagaccagcctggccaacatggtgaaaccccatctctaccaaaactacgaaacgtagccaggcgtggcggtgtgtgcctgtaatctcagttactagggaggctgaagtaggagaattgcttgaacccaggaggtggaggttgcagtgagccgagatcttgccactgcactccagccagggtggcagaatgagactccctctcaaagaaaaagaaaaaaaaaagaaaaaaaaattatctcatgcctttatacctatcagagctaaaaaacaaacactttattgattgcaataagtatagaagtgctctacgcattcaataattgctcagtaatttctaatttaaaaaaagttttgggccgggcgcggtggctcgcggctgtaatcccagcgccttgggaggcagaggcgggtggatcaggagttcgagaccagcctgaccaatagggtgaaaccccatctctactaaaaatacaaaaattagccgggcgtggtggcaggcgcatgtagtcccggctactcgggaggctgagacaggagaatcgcttgaacccgggaggcagaggttgcagtgagctgggattgtgccagtgcactccagcctgggcgacagagtgagaatcctttaaaaaaaaaaaaaaaaaaagaattctctcatgctttgtacctatcagagctcaaaac

SEQ ID NO: 202130 - DNA, 1000 bp, Homo Sapiens
acatgaaaggacattgttgtccgtgacacagatgcattgttccctgggaaacaaggccgtgctgtcgggagctgccgggtcagcaggcaggggaggagggaaggcctgtgggaagtgggtgctggggaaagtgatgggacacccccacaggggttgggaggggaggggcactgcaggatgagcaggagccccagggaaggcgccctggtagaggccagagtgaggggctgctgggcagagttcagggtctgaacaggcccttgggacctctggacagaggatcgagggatggggagggaagtgggagtaagtgcgaagagggcatgcgctaagaaggccctgtggatggaggccaagtctgctagacctggaggggaaagtgagattgagacgaggtggtgccagacttggggacttggaagacatctccggttccctctgcgaagggtctaggaggccccagagcctctgcttaccacctcctgcccagctctgctccagatacaacaggctcagaagagacagataatgaaatgtttgaaccaatgtttgaacccaaccgaaccaatcagggatgagtgtcaagtaactgctgcctgcaagtctctactgcagggttcagggcacacactccagaatcagggaattggattcagatcctagccccgccatggactcagagtgatccccattttatagatgagaaaactaagttcacagaggccgggcgcggtggcacgcctgtagtcccggcactttgggaggccaaggcaggcggatcacgaggtcaggagatcgagaccatcctggcgaacacggtgaaaccccgtctctactgagaatacaaaaaaaattggccgggcggggtggcgggcacctgtggtcccagctactcgggaggctggggcaggagaatggcgtgaacccgggaggcggagcttgtagtgagccgagatcgcgccactgcactccagcctgggcgacagcgagactccatctc

SEQ ID NO: 202131 - DNA, 1000 bp, Homo Sapiens
tggtctgaatgtatgtctataccccccaaattaatatgttggagcttaacccccaaggtgatagtactaagaggtagagccttttgggaagtgattcagccccttataagaatggctgagaggagtgctcttgctccttccctcttccaccccttctgccatgtgaggacacagcaagaaggcaccatcttggaagtggagaacaagccgtcaccagaggccaaacctgctggtgcctgtcttttgaacttcccagcctccagaactgagaaatgaatttctgttgttcataaattttttaaagcctaaaaatggaattaccatatgatctagtgatcccacttatggatatagatccaaaatcattggaatcagtatgttgactaggtatctgcactcccatgttcatttcagcattattcataataaccaagatatggaatcaacctaagtgtccatcaatggatgaatggataaagaaaatgtggcatatatacaatggattactaacagcctttaaaaaggaggaaatcctgtcatttctgacaacatgaatgaacctggaggatactatgctgagtgaaataagccaggcaagagagataaataccatataatatcacttatgtgtggtatcttaaaaagtcaaacttatagaattacagtgtagaatggtggttaccagatactgggggtgaggggtggggaatgcacagatgttgaccaaagggtagaaagttccagttagacaggaggaataattcttcaagatctattacccagcatggcaaccacagttaataataatgtattatatatctcaaaattgctaaaacaatagattttaaatgcactcactacaaaaaaggataagtatgtgaggtgatagatgtgtcagcttgatataatcattccacaaggtatacatatatcgaaacatcacattgtaccctgtaaatttacaattgttatttgtcaactacaaataaaaattgaagtt

SEQ ID NO: 202132 - DNA, 1000 bp, Homo Sapiens
tgacggagtctcgttctgtcgcccaggctggagtgcagcagtatgatttcggttcattgcaacctccatctcccaggtttaagcgattctcatgcttcagcctcccgagtagctggcattacaggcgtgcactaccacgcccggctaatttttgtatttttaacagagacggggtttccatgtaggccaggctggtctcgaactcgtgacctcaagtgatccacctgcctcggcctgccaaagtgctgagattacaggcgtgagccactgcacccagcctctgccaccagctgtatggcctcctcttggttcctttctctgtaacctggggagtgcagtagcacctgcccagtggggctcttgagcccaggaactgctacactctgaaccccactcgtactaggggctcagtaacaagcagccgccagtgtggttcctatatcccgggacttcgcctgtctcctgcgggtcacagccagtgactactgtgctcttggagaaaggtccagcctccagcttcccaggcttcatttgcatccatctcgcaggccccagctcaggctcgtgcccacccaccaagttccagtgccgcaccagtggcttatgcgtgcccctcacctggcgctgcgacagggacttggactgcagcgatggcagcgatgaggaggagtgcagtgagtggccacgccccttggcggggcttacagggggcggggcctgagggtggtttgtcaggggccaggcacgcggaggtggagcttgtgggaaaggcagggccgcagggatgggtgcgacttgggtctgtgggtcataagaagcggggtctaagatgggcttgggctgggtgcagtggctcacgcctgcaatcccagcactttgggaggctagggtgggaggatcgatcacttgatcctgggaggttgccgctgcagtgagctaggattgtgccagtgcactccagcctgggcaacagagtaagactgtctcaggaaaaaaaaag

SEQ ID NO: 202133 - DNA, 1000 bp, Homo Sapiens
tgctacgtgctctttagctactccttttcctacaagcatctcagtgagtgcctctgcggcgtcttgcctttagttcccatgagagggtggtggtgactgatttcattagatacagcagcccaccttcttctgaggctgagggacctttagttaaagttccttatgtttccacctaaaagaattggagggacctatcagagtacagtatgtgggatattgtttgaaatgagaaaattgtgacaaagagaacacaggaaaatcaagatgaagccagggtaaagagagtacttagaagcattctttaaaatacagcacactgtgaaaatttggctcgattttcctagtagccaatgcagaaagagaaatgagttgagtgggataatctggtaccccagaaaagcatggctgttccggctctgaggcttgagaggagcttgtctggtgggagattggcgggaggtgtcggtggcagcctctggctaggctgtttctgacagtgtagtgtacaccccctacccccacctcactcccattctgtggcaccagggcggtcctgcctctgaaggacgggttctctggggctgtttgtctgagcgtgtgttccctctgttccttctggaaagaaagtggttggccaggtggcaggttggctcctgaggtgtctttgtgccccccgggtctgctgattctgcagagacaccggcaggcgggtcatgggtcatctctgaagggaattctcaggaaggctttgtgtgatctcagcctgcttcctgccatgctgtgccttcactgtaaccttttaagatacttaccatcttgccttcctgacttcagagcacgagcggctccgcaaataccactgaagaggacacactctgcacccccccaccccacgaccttggcccgagcccctccgtgaggaacacaatctcaatcgttgctgaatcctttcatatcctaataggaattaacctccaaataaaacatgactggtacgtgt

SEQ ID NO: 202134 - DNA, 1000 bp, Homo Sapiens
tatcatgtgggaagaacctatagtatggaaggttaagtgtgacacaggtcttaatgtatgcatatctttttagcctttggagatacaaatctagaaaatgagaagtaactatttattggttaatagcataacttcttaagcaagtatattctagacagcctcaagaaagcctcagaaccagaaaaacaggctgctttaggttggaaaggaggtgttacagcagaggaactggccatgaccaccatccttggaatgtgaaacgcaaatcatcctgaaagcaacaagaataatggttgtaataattgtttccaggcctgggaccctgcatcttgttttttaagttgacctgatgaactagtaattgtaggaataaactgaatgtttgccagcaggagtcactctaggcttcctaataaaacgttagtaaattaaactctgtccttaaagctctgaaaggctgaggtgattgtgtgatatcagatggctttagggaaacactgactcttttcgttaagcatagcagcattcttagattattccttgggccttcttttgttcaccatcggttcttggatcttgttcctttcaagattggtccttaatgcatttttaaaaagcaacgtatatgggtaaggatatcaatatcttagtatgctgtattctgtatgttagctcattttggctttctaggatgaactgactctatcccacatcatgtaacttgaaatgaatagactcatatcctttccactgattgctgtccattctaatcatgcagcagaactcagtggagcgagctgtagtgtgaaaggagatgtcagttcatgcttttctgaaaagaatgggtccggtgtgatgatattctgaaatatttcagcaatagccatgaaatataatagtttcccaagcacacaaagctcaagaagttaattgttcatttatgtttgatactgggattgaaacattggattaaaaccaattaaatgttcctagaagcaac

SEQ ID NO: 202135 - DNA, 1000 bp, Homo Sapiens
tcaggtggtgtgaggtgtgtctgggctctgtgcctctgtagctcctcctgacaaacgtctgggaaaacagcctcaccccactctcctctctcttccccatttccttgtagctttattccttgcatctttgggtctactgagcagtgggtgctgaggcgacaggggaggaaccagttgttctgtagcctaggaactgcctcagtgtctttgccagaaaaaggcaaagaggcggacagtgcagggctcctccctcctacctcaggcctgatccatcgtgcccttgactttgccgtctcaaagtttcttagctgactttggctttcacatttgttctttccagagctaactgataagagtggaggaggaatgccttctcctaagagtcagttgaaagaaagacaagagagtcacatcttagcttttgcacaaggcattcgtggtcaggaataggttagggaatggtcacttctgattttccaacagttgctccttctctgaagagatcttgattcctttgggaagacaagaatttttcttaataacaaaggtccctttatgagttattccttctttcagttcatctcactggagcacagccaagatggacatgtttatggacagtgctctagatgtgaaaacagatagaactggtttgtgggacaggggcagcttgctcaggagagggaataacgcaggtcccttttcttggaaggcttgtactatggccatgacagtgacattgccctcaccatgatccctctccaaagtggttgtctttctttaccttgtgtcttctcttgtaaaaatgaaactcaaaaataaaataaatgtgtcaaattttgaaaaaaaaagaaaactgaaaaagctaacatgaattgtgtgaaattgcataatgctgtaatgctaatctacaatatgtaatgctatcttgtatgttgaatttgttaatgcaccacacaagtgcaaaataaagactgattcacattaaaaaaaaaaaaag

SEQ ID NO: 202136 - DNA, 1000 bp, Homo Sapiens
gagtgctttggaccccacaccaaagcatgaatgtcacgtgtcaaagaatgccaatcgaattacatcacttttggcttacagagcctatgagcttactcagtattatttttatgagtatggctttgatgagctaaggcgaagaccaagacacgtttgtccatatgcagttgtgtcttttacttacaaagatgatatacaaactccgaagtttgtaccttcatcaagatctaacagctttaatacagatagaaacatagataaatataactataccttgtggaaaggacagcttttaaataaaggaaaacttttgtgttatatttctctgaggtcagccactcgtgcttttttgcctatcaaactacctgagaaattagatgttgaaacagttatgagtattgatcatctgaaacagaaaatccctccagcactgttttataaggaaacatacttaggtccaaatgaagttttgaagaatggaatgtattgcagcctttatgaagttgtggaaaagacaagaattggaagtaacatggagagtttactgcaaaaactagacagagaaaaacttgttcttgttaaacctttgggagaccgaggatacctttttcttctctccccttatcagatggttcctccatatgaatatcagactgccaagtctcgagtcctacatgctttgtttctatttcaagaacctagaagcatagttacttcacaaaaaggttcaaccaatgcagcaccacaggagaggcatgagagcatgccagatgtattaaaaatagctcagtttttacaattttctttgattcagtgtcgaaaggaattcaaaaatataagcgccataaattttcattctgttgtcgaaaagtatgtaagtgaattttttaagcgaggttttggttcaggtaaacgagagtttattatgtttccatatgattcacgattagatgataaaaaattcttatactcagctcccagaaataaatcccatattgat

SEQ ID NO: 202137 - DNA, 1000 bp, Homo Sapiens
ttttagccctttgggatctgtaaaatcagaatggtacccacctcatggggacatgaaaggattcaaatgaattgatgaagatgggccataaagcccagcacagtccaagtgctcactcactgagagttacggttatcacaggggttgggcccccagcccctcccaggtcatctgctctaccactagctggtaggaaagagcctcctgccctcccaacccccgtcacctacttggcccaaatttggctgcaggctccccgagtgcctgggcttctctacccagggtcctgtctgtcggctgcaccatacgtccctgaccacaaggcatccacgtgcacaggagtatgcgcccagcagctgggaaggaggctgacctcagacggtggcctgtggatcccagctctgtcatttcctggctgggtgacctcaacctagtcaccctttttgagtcttgttttctcagattatgaaataggaaaaatttccttcctcgtgagataagcacgtgccattagctattaaggacacgcacataaatgagctgcatgtgaatccacacatgccattccatgaagacatcaaagaggatcatgtggatctttggtgccttccggttggcccctccctaggtctgtgagggtcagacctgtcctgaggcttttacaaattggcccagaactcatttaaccacagcatcatttcattagagggctgttattagagactgaatgtttgtgtcccccccaaattcctgtgttgaaaggctcacccccactatggtagtgttaggacgtggggcctttgggaggtgatggggttatgagggtggagccccagagagctctcacgccctttccaccatgtgaggttatggtgagaagatggtctctgaggaagctggcccttgccacacaccacatttgccagcgccttcatcttggatgtctatagcctccagaactgtgagaaataaacacttgttgtttaagccaccaaaaaag

SEQ ID NO: 202138 - DNA, 1000 bp, Homo Sapiens
acacataagtcatgcagtaactgtatttttattgagagtattaatcccttggtttcaacattgtttttgaaattagtaactaagtaagtacttgaatatgattggatgggatctcatactcaaaaggctgaaagcatcttaatatgactttctcaaaggaacctaaaacttaaccaagtccaaaagggaatcatttttcattttttaacagaatggcgtgggatggatttatgaattttctaggtaattgtcatttaagtattttgcaaagttcgtagaggtcaccaatactgcaaatatgtatgagatgtaactgtaagatacgcagctaattttttttctctttgtttcttttttagacataccagggtctagagagtctagaagaagtctgtgtatatcattctggagtacctattttccatgaggggtaacttatgcatgacttattaaaatagtttatggtagaatttagaaagttaaacctttctgtctttaaacattgtttgccatgcagtgttattaggcattttacttacattgccattaacatcttcacaatagcctacacaaacacaggggtttgtatgttgtgtgtttatacatgagaaaacagaaacaaggttacagttcttaagtggtcattgtgatataaactgcctgtttttcttcatattctgtatttaaaagtgatgctatttgggctaaatgttttgtttgaaggactgtcctacacattgcagggcatttagaattttgggccctggggcactaagacaacattatcccaagacgacccatacttttccgcatcctgcagttgagagcctctcttctgtattatgctctagtttatagaaatgcagcactgtgtaaaaatcttccactctgtttccacattcttcctgatatactgtacattcatttttagtaacttagacacttgtaaaatgctagagtttgtacacttactggcttattaaaaatcagatttatccct

SEQ ID NO: 202139 - DNA, 1000 bp, Homo Sapiens
gtaagaacatgcaatatttggtttcctattcctgcatcaattcactttaggataatggcctccagctgcatccatgttgctgcagaatacatgatttcattttttatggctgcgtagtattccatggtgtagatatacttcatttaaaaaatctaatccaccattgattggcacctaggttgattccatgtcctttgctcagagccccgttttggtgagttcttagaactctttccaaccggaaactgcccagtgcaccactctcagatggacgggacccagtctgtacctgatcaccccggctctaatggtatggtctccaaggctccttctgatcttcccaggaggccctttcaggctgacacaccttccagggtgtgcactctcgccatgttctcacccagatggctctcttggctgtgtaattaggcagctcaatccctttcctttagactgtttcaggggagaaccaggtaccccaaatcttatgctctccaaactccaggggacagacacatgtcaaaccctgagtcttttaaagtataccctcacttagcttgcagacccaaggcactccagcccctttcaagaagcttgcactttctgatattttctccatcactcttgcctcctgtggtagaggagctttgggctactccttaacaaatcattcatggatcggcagcaaatctgcaacatatggaaatatttgccaatttttgtcctcagctttgggtctcagccaaaatggagatttaggaaagtctcatttagcatcctctagcctgcttttggctgttttgttttgtttttgtgtttgttttttggagacagggtcttgctctgttgccagactggagtgcggtggtgtgaccatggctcgctgcagcctcaaactcctgggctcatgcgatcctcctgcctcagccttctgagtagctgggcctgtagtctcagagggaactgtcttcaataaagttggcactgtccacatacactc

SEQ ID NO: 202140 - DNA, 1000 bp, Homo Sapiens
gtgcacaccaccatgcctggctaatttttgaaaattttttgtagagacaggatcttgctatgttgactaggctggtgtcaaactcctggcctcaagcaatcctcccgcctccgcttcccaaagtgctgtgattgattacacacgctgcacctggccaaggctacctttttaatgcagaaaactaagaagcctcttcaggtttctgaataaagaacgagaaggcaatgatgatgaaaactggaaacaagcaggtggccattaccgcaattaaggctaaaatctaggttaagaaaggggagagagaactgcaaatgaaaagggcaaagatgcagtgaggatgagaagttacaaaagctaaaaagaaggaagtaatactaagaggtgttacagagtccagctcaaaggacagaaaaaaggaggaacttcagataacaatttttaaaatatttattaacagccaattatgagtcaggtactttacaaggtgttcaatggacattatctattttacttatttttattttatctttttggtttactttttttcttttttttttcattttacattatctattttaatcctcacaatatccctgtaaggtaggtatattaccttcagtttccagatcaagaaactgaagtgcacagaagtttgaagtaacttactcaaaccacttcactaataaccagggtaggcaggactcaaatacagacagtttgcctccaaaatacatggtcctaatcacctccctatgttgtgtccatgcagtcacgagtttggcatgaggagagctggaggaagagcccaggagacagtgaagaggaagcaagaggctgtatatgtagccagctgggtttgggggcacctcatgagtatcccatagcacaaacgggcaaactctgttactggcacattaactaaaagacaaaactccacataaacctgagtccttccaaccaacccggagacttacccaaatctaatctaaataacaacaac

SEQ ID NO: 202141 - DNA, 1000 bp, Homo Sapiens
tgaaatattcttcttctttgaggttataatgtacttggaaaagttaatacttatagaaaataatgatctttattaccaactttattaaaacaggcttggaacatttttctccatagaagaatagtaataagacattctacatttcctggacatggccagtttaaaatattttgccccattacccttgtagatacacatgtatttgtcagtttatgtgcctcagttttgtcttaggcactgagggacagaaagagaaataaggaataccttggtattttcctttgcaagcaatcacagcagaatgctagaaaacataaaatatactcttataaattgtatgtgtgttgaaaccaaagtgtgaagaaattgtcaggtatttggaggaggaaaataatttgtaaaataacctttttaagaatttggattttgtacttatttaaggtgctaaatatgtgttaaaatatcccctcttgaatcagctccaggcttaaaagggcagagtggtttggattcttgtccagggtctggaaagagctcatcttgccgagagggaaataaatgtgagctttgaggcggtctaactacccagcttttagtatttatgttccccaaaatgtaaaaactgtaagttattcttgaaaatgtagtccagacatttctttgatcctggattttactgcagtttcatcatgggtttgttgaatgtgcagtccatttattgccctgtcttgcttaaatattcttgttgagaacagctggaggctttgactgggttcctagttctgttttctgggaaggcaacgtggattctgttttgtagacattaatgagctttaaatgggaattggggatgatgtatgttcgttgggcatgctgagaagcggcctcctgtggttctgggcccaaggtgtgacatacatttcccactaattgcttctctcaagaagcaagagattggctgttcctcttgaggaaaaaccttaataaaccttcccatttt

SEQ ID NO: 202142 - DNA, 1000 bp, Homo Sapiens
gtacttaaaagtgtttgtaaaatgctaagtaaaacctaatgctatgctttgaatgtagtgggttccaaatatttgtttaatgacaaagaataaatgatattgactaatgaaaataatggagccactggaatgtcacctcctgcatctgccagtaaacctgttaacacaggggtggcgggggggggaagtaaatatgtgaagccaccaaatctcatgatcaggagaaaaactttggaactcccatgagactccaaagttatgtcacaggtgaataagtcatgaacttttcatgctgatatcatttctaaggttgctgccttgtcagaagaagcaaaccacaagataaaccatgcagaaaatctttttttaaaaaagtttcctgaaggatggatggttcatttgttctgcttgtcactttacttactaatgagtcatttttttccttaaccagtaatttgttttaaatttggtcataagatggtatgttgactagtccaatgttacaaaataattggaaaaaagatgacagaccaccaactgaataagggaaatctggttcttgaacttccaatgtatgaattggtgatggtaagcttagtctttatgatgtaagattggatttattggaacttctttatgtccagaagttgcagcacctttctttgtctctggaatgcccaagatctctactgcatcctgtagacatggagggtttccccccttattctgggtctgattatttttaaagaaacaccctttccttacccatcatggagacactactaaccttgtatatacttttattagagtgctgataacaccatattacagcagcatacttacatatctgttttcttaactgtgagctccttgagagcagggactgtgtgtttttgcttttatttcaccagtactcagaactatccacagtatagaaaagcactcaataaatggaataaatgaaaatgaatagataaataaatgatttcacttgtataag

SEQ ID NO: 202143 - DNA, 1000 bp, Homo Sapiens
aaaggattcttcatgtaagaaagttacaaaagactttagggaagtacaagcgtttaggaaatgatgtactggcagagaaatttctctgctgcttatttagagaggttgggggtaagagaacggagaaatgaggagggaaaatagctctgcttaaaagaacagattagtagatgaaagataaagagcaagaataaacaaatggctggaaggtttgatattgaggttggtatagaaatgcaattggcaacatgatcccattaatggattaagcaaatccaagtgcacagcaggcaccaggctgaatgctttaagtgcattttctcatgtagtcctcacaagtaccctgtgaggtttggattattactaaacttactttatagatgaggagactaagacttaaaagaatttccgtagctgagcaaaggccacatgactcaaaaatggcagagctagactcagagttaggtctaactctaaaagctgtggccttcaccactctgcatcctgcctgagacatatgctcaccaattgttaagttaatgaacaggcaaatcaataaaaatttttttcaagatctgggggaaaatcatctagccttgaacactgtggtgataagtagagagaacttcaaaaaattttggatatagaaaagagaggctgggagaatgagttcatgtcctttgcaggacatagatgaagctggaagccatcattctcagcaaactaacacaggaacagaaaaccaaacactgcatgttctcacttataaatgggagttgaacaataggaacacatggacacagggaggggaatatcacaccggggcctgttgagggctggggggcaaggggagggagatcattaggacaaatacctaatgcatgcggggcttaaaacctagatgacgagttgataggtacagcaaatcaccatggcacacatatacctatgtaacctacatgcaagttctgcacgtgtcccagaacttaaaagtaaaatt

SEQ ID NO: 202144 - DNA, 1000 bp, Homo Sapiens
catttagtagaaatacttacaataaaaaaatctcttaaaatctatgagccattcaatgtatacacaacgcaagaagtggcaataaggctatgattacagctccaggtcctgactgacctcgccaagttccatacacaatatattttttaatgccatgtgattgcagtgtgtgtgcgtgtgtaaggtgggagtgatattcacacatatgtagttctgaacatctacgcaaacggcatgcacattgttgagaagttatctgttctcttattgcatacatcttactcactgttgaatccctagcagttttggggttgggttagggtcaagcataggaaatcatcatatttctttccttctccactcttgaggatctggaatcaggtcacagactgtgctgggtccacacgcttacatatgtgaaccttcaagtaactaccattccctcaataggcccacatagacaccacggacaagcaaataaggaccctctgtctaccataaatagaacttgatgctttcactttccaggagaagctgattctgtcggctttctctttgcccctccaacttcttagttgggcctattctatgctgctacttcaagttactcaaatgtgttttgtctggtgttatttttttctccagtgttttggaccaagactagatttcctgagactttaaatacgcaagacaaatgcaaacaaaatctgccaacatacccaggctgcttttcaggagtgaatcactgaagtgcatttggatttcctataacactactttcttttgggaatgtacagccctcccccagctccccatcccccatcataatgtaaaccattctaagagaaaatatggatgttttggctgggggtggtggcacatgcctgtagtcccagctacttgggaagctgaagcaggaggaccacttgagcccaggagtttgaggctgcagtaagacatgatggcaccactgcagtccagtctgggtgacagatgacag

SEQ ID NO: 202145 - DNA, 1000 bp, Homo Sapiens
ctctcacaacagtcttttgatgccctttgtgctgtggagctcgaaagcgaggagtacctgctttgcttcagccacatgggactgtacgtggacccgcaaggccggagggcacgcgcgcaggagctcatgtggcctgcggctcctgtcgcctgtagtatgtatatgttttctgttgcatatccctgttgctgcttttcccaccgacagtcagcatgtgttcgattttgctttggtttgtcttccagtcccttagttgagtagtcacagagcatcgggagaggtgggccccatgccagcccgcagcagagagcatggttcagatctcacgtctcagaccagcagtaggcgggctcagcaacctctctccctgagcacatggggccggttcttccagaggcctcagcagaggaccccgtcggcgggcataggcccctgggcagaagggctcggcgaaccgagaacggggcgtggcattcatctctcatttaaaaggccttcctcgtgataatacagaaacttacacagtagtaaagacaagcttgaggggttttggtggccagaaaataattcacctctggtgtcttaagttacagtccctctaaggacaagtattttctgaaagtggtaggggctgtttttcaaacagttgggtcactgaattcgcctagttggcatgactttctctatgaatggtggcactggggaacaggtaggaccagtggacacttcccgactggcccgctgtccgattgcttttaaaaccttaaaccgggtggagagcggtggctcacacctgtaatcccagcactgtgcgagactgaggcaggaggctcacttgagctcagaagttcaataccagcctcatctctactaaataacaaaatatggctcacacctgtaatcccagcactttgggagcccaaggcagggcggatcacgaggttaggagatcgagaccatcctggctaatagggtgaaaccccatctctactaaaaatac

SEQ ID NO: 202146 - DNA, 1000 bp, Homo Sapiens
caacatcggcttccccagtccagggctcccctgctcctttcccttccctgtactggggtagctcctgcctgctctccctgcgttgcctagggtaaagcctccagatttgccatactgagcccctcttcctagcatcaggcgatacatctgagttcaaatgtcttcccaggctcagggacctccattccttgagattgtcttggcatggcccagccctgcctcatgggatggacaatgcatggggtggtctttatttttccctttcaaataaaacactagtcaggtaccgttttatcccagtcgtactcttccaggtttggaagacccagagaggccaagatcccatccttagccatagcgagcggtggtggtggatagcatcacaagaaacgagcctgaaaatcaggtccagccggtccaagcacatggcctcccatctgggagagcccactgtcccactcccacatgtctgggcacctgccctgggctgaggccaggctgctccaggggcctcctgcgccctcacctgccacagagcaacccaggttaaatacagcccatgcacaaagccacaggccaaagcctatggaattgtttttaatcatcaaatttaaccattttcataactggttcctggaggtgtgcagtgcccccttgcctcttcaaacctacagcttctctttgccatttgtggatttcacatcactccacacagaaacattacagcctggcatccccagtctttgccttcttccagctgcctcgacacagcactgtggcctgtccctattgcccaggcacgccatttccaagggcaggaaggggcagtgtcctgaagcccatcttttctgtgactgtcttaggtgatgtgtagccccctccacctttccactcaacaacctcccacccctgtcctgctgcatggtccggagtctgggacctactttgttttttgttatttatgaccttgtttaaagaaaataaatatctcccaaccttt

SEQ ID NO: 202147 - DNA, 1000 bp, Homo Sapiens
acggccactgaaagctgctcgctaggttttgcttggtggagaaacataatctgcacctatccatattaattgggttgtatccccattaaaaaagaaaaaaagggaatgtggcctttttagtgtgttttttattgttgttgttttgtaattatcaaacccaggtaagatattggtatcctgcactggattttcaaatgaagttcagcagaagacagttaagattaaagtactatacaaaaatttcaaaagggtccatactacgctatctgtatgacgacacttaggctggagatctctttcagaaactcggactttaaaagcaacttggagcagttgatccacctccacattcaagtaatttatgaatatgcagaatagggatctgttcatctagaaatttttaccatttgtcttctgtgtagctgcaaggaacactaatgtttatacaactgtcagtccacccagtggtgcaactggttctgattcagtcttccgattcctttttatttttcactttttcctatttctgaatttttttttttatttgtgatcttgattttgatgaggggttggggagtggggagggagtcgaaccaagacttggagttaagaggattttcatcttttgcatccaacaggcagaatatgatctgtgtccaaaagtgaacttgagtcaggaatgaatcaatttcagcataaacaagcacaaaaatttagtctgctggctgactggaagcaaaaaagtcaagatggaatatgatgaattccaacacaatggggcaccaaggcctttaggcctctctttttattttgctttggttttgtttgtttttctttagagacatgctctttctcatgggacttgaagtggactcatctttgtgcagtgctggttttgccatactcatttcaagtattatagacatatgtaatggtgaaaatatatgaactgtggcctttttcattcttgttacttgtgatgcaattaagtgaagataag

SEQ ID NO: 202148 - DNA, 1000 bp, Homo Sapiens
ttccaaagtgattgtctgtcttcttcttgtcttgatcctaatgcagacattcacctctattgtttatttattttttttagacagagtctcgctctgtcaccaggctggagtgcagtggcacaatcttggcttactgtaccctccacctcctgggttcaagcgattctcctgcctcagcctctcgagtagctgggactacaggtgtgtgccaccatgcccagctaatttttgtatttttggtagagatggggttttaccatgtttgccaggatggtctcgatttcctgaccttgtgatctgcccaccttggcctcccaaagtgctggaattacaggcatgagccaccgtgcctggccacctctattaaatttttgtggacaaaaataaaattgtcattatttgtttgctctcatggagcactttcagtaatacaattttttttaaattccagttgccctctttgttgctctgtcctctgtaatacctgactttgctaaagacttgaggggtggtttcagaggagggtcaggtgatgggaaggcaggatgagaaaagccctggacttgcatgtttgagaaggcttccaaccacatcttcactcagactcttggaattcctgtccccaaaacaagcttctgttttttgctcacaatgctatatttctaaatttttcctgaattactgagaagcagtcattagctttgttaagtttggtttggggacattgttggtatcaaaaatcgaagtcttattcatttgatgtaggccatgaatcatcaataactggttgctggaaagcttgactaccatccactggggtgctattttgagaaggatttttgggtatctttatagtctgcaattagttgatgattgctttctagtttatcaactgcatttatatttgcttttctgttcatggaaaatcctttatttgctggggttttttgtttgtttgtttgtttttcccacttacagcaagtaaaagtggtctgaggtt

SEQ ID NO: 202149 - DNA, 1000 bp, Homo Sapiens
ggataatgtccaggagttggaatgttatccttgtttttaattaagatgcaattcacataaattaactttttaagtgaacaattaagtggtagtacatccacaatggtgtacaaccaccacttctatctagctccaaaacattctcatcactccaaaagtaaagtcccgttactctccattttctcctcccaccgcccttgtccctggcaaccaccaatctgcttcctgtttctttggatttacatccgggtatttcatgtgagactcatacactgtgtattacttctttcgtctagctttaacgtgttgttgaggttgatccattgtaacatgttatcactacttcattcctttttatagctaagtatactttttatagtaagtatgccattgtagatatataccacaagtttatcgattcatccagttgagttgtttctactgtttggctaatgttcatagtgctgttatgaatgttcgtgtacaagtatttgagtccgtgttttcaattatttggggtatatgcctgggagtggagttgctgggtcatgttgaaatcgcacatttaactttttgaggaactgtcaaactttccctcagcagctgtaccgttttaccttccaccattgatgtatgagggttccaatttctccacaccttcaccaacacttattttgccattttaaaaattatagccatcctcatgggtgtggtctctcattgtggttttgatttgcatttccctgattactaatgatgtggagcatcttttgttgtctttggccatctgcgtatcttctttgaagaaatgtctgttgaggtcctttgttcattgaaattttgttgttgggttctgagttccttatatattctgggtactaggcccttataatattttcgcctataagtttttgctttataatgtcctcattgttttcaaacttactttatgtaatatgtacacttctaaaaaaaagaaacatggaaaagggcaaactgt

SEQ ID NO: 202150 - DNA, 1000 bp, Homo Sapiens
gggctaatcaaatgtgtcacctcctgcccacattctatagtggcagcccctgagttctccatttctgggtcccagatagacatttccccccgcatttttttctctctctgtctcttgttgttgttgttatattccaaaaaggattttgattttattgcttcacacacagaagagttctggttaaggcttgccttgctcctggtgctcatatgatgccaccaggatgtgatttatctcaagcacttaactctgtgttcttcgtgttgcctccattctttgataggcattcttttcgtagtgccaagatgaatgcaacagcttcagctttatcttctttgaccttcaagttctatagtcccagtagatatctgactacaactcattagctctgactatttcaggtactcctctctgaaacaattactgtgaccaagagaatgcaatacttatactttcttcagacatgaattatcagtatccagataggcacataaactcagtcttagaatgtgttgctttgatgtcaggtttttctcttgccttgatagttccacatggctggggaagcctcacaatcacggtggaaggcaaggaggagcaagtcccatcttacgctgatggcagcaggcaaagagagaatgaggctgtctctctctctctctctctctcttttcttttctttctcttctttcttctttctttcaagatagaagactcccagctgggtgtggtggttcacgcctgtaatcccagcactttgggaggccgaggccggtggatcatgaggtcagaagttcgagaccagcctggccaatatggtgaaaccctgtctctactaaaaatataaaaaataagccgggtgcagtggtgcccgtctgttgtcccagttacttgggaggctgaggcaggagaatcgcttgaacctgggaggtggaggttgcagtgagccaagatcacaccactgcattccagcctgggtgacagagcgagactccacctc

SEQ ID NO: 202151 - DNA, 1000 bp, Homo Sapiens
gtaattatgttgccaattttataaaaatgttattatatgacatggattgtttagaaatatataatctttctttttgaagctgctgtatcttggacgagactatccaaaaggagcagactattttaaaaagcgtttgaagaacattttccttaaaaacaaagatgtgaagaatccagagaagatcaaagaacttattgcacagggcgaatttgtaatgaaagagctagaagctttgtacttccttaggaaatacagagctatgaaacaacgctattattcagataccaacaaaactaattgatcattactactttaatttagctatcagtgccagctgtttatgtataccagatgttgtaaaataattctaacttaaaatgggaagatatacatgttgtgtaaaaaatccctgagctgccctactgaactaaataggtttcaacttctgttcatacggagaaagtatcagcaactttatgctcaattttgatacaaacatagcaatttagctatactaccgatcataaattaatgagcacccaattttgaatgaaaatataatacacttaatcctctaacttaataggacttagccaattatttttagcttatttctccattttactgacgagaatgccatttaccgaacatttaataagcaaaataatttcttacacacttcttctcttaacttttgaaaggaatcccttattttttcacccaatttggtatattaacagcacatactcaaggttcactacaaaacaaacagttcctggtaatgatttaaatgtagttatagaaataaataatatgtatggagtcattgcttctgaccttgaaatagcctgctggtgactggcattaacatacataactaactattcaattatttccattattaatgttgctgctgctacctttgggcctaaaaccaagtcacctgttgtgtatcaattaccttctttgataaaaggaaataaataaataatgttatcct

SEQ ID NO: 202152 - DNA, 1000 bp, Homo Sapiens
tcccagggctgacactgcccatctggggaccacactttgagaatcaaatatctagaacaatggttcttacctggctgtgcattgggatcatttatagtgcttttggaaaatacattgtgtccaggtcccacccagttctcagtaggcttggaatggggtcctacactttttttttttttaactccacagtttgggaaagaagccttttcatatattgttggtgggaatacaaattgatacagccatttttgagcttgatttggcaatatcttccttggagaaatcaaaagccagttggcaagccagtctggaaaaggcagtttactgattcccacccgagggtcacaaagcaggtatagaaggatgggctttggctgaaatatatgatgggtacaggtatattctctataatccagtatttccactgctgaaaacgtatcctagtaacattatacatatcaagcctacatataaagttggtcaattccatattatttgtagtaggggaaaactgaaagcagtctacatgcccatcaatagattattcaaattatggaacagttttccaatgacaaaacaatagctaatcttagttaagcaattattatgttatgtaaggtagacattgttctaccttatttataagtattaagttagtttttataactatcatatttccattttacaaatgacataatttatattattgacatgggaagatgtccaaggatataataagcaaaaagcaagtagcaaaacattatgtatattatgcattaccattataatatactaaaaagtaatgcacttgattctgatgcacactccccagtaggtaacaacttatctagtgtaaaaatgaaagaacattctgggccgggcacggtggctcatgcctgtaatcccagcactttgggaggcccaggcgggcggatcacaaggtcaggagatcgagaccatcctggctaacatggtgaaaccccgtctctactaaaaatac

SEQ ID NO: 202153 - DNA, 1000 bp, Homo Sapiens
agttcttttatcctctagaaaattcttcattccatagagctttttcatattattagcttaattatgcataatgttttataattaaaaatttctctttattttgttctatcccctgtttcctgtaaactgctgtttgtggtttactcattattagatttgtcaaaggtttatctagcttactattgtttttccaaagaaccaacattaggattcatttatatccattatttcttttatttgtaatttgtttttctttgatatgtattgcatttattttttattgtttttcttctttgtctcagtttttatactgaatacttgatttatattctctttatattttctataatagcatacttattaacgcaaatgtacttctggatatagcgttggccacatcttaacatttgattattcatttttgtttatgttgtctaaaaattacattgtagtgtgtctaaatattacattgtagtgtttctaaagagtgctttgaaactcagtgatttgatttattttttgtttaaaaatagttttgttttcttgttttactgcactgtgaacacagaatgtggcctataacacatctgcttccaaaactttttaaaaagcttttagtgtggcctagaacatgtccattttttgtaattgtttcacgaacatttaagatgaagatatcttctctgtctgtagaactgaaaactttatgtgcctgttagttaactcagtatcgtcaattatattgttcagattcatgtgttatctaattttggcctattatattcattaaaaaccaataaggttatgtgaaactttgttagtacaattgtttttgctaataaatttttataatctttgctttatgtactcaacagctgtgtaattcgaggcatataagtgcagcattgttatgtccttgttaattaaataatatatgtaaaacaccatatgacaatggctggcagatagtaggcactcaataaatgttaattaaaacctg

SEQ ID NO: 202154 - DNA, 1000 bp, Homo Sapiens
aagttaagatgacagattggcagagtgcagggaggtgagagagtattggggaagttttccatacaggggaccatgtagtgttttgctgggaagatagacctgggtggaggtgagactggtgggtgccacagatgattctaactcctgctccttctcttgtccttccaacaaaccaaccacacatgtaacatagtcataagagctagcagggaggagaaaagagagatatcaacagaccaagggagacagagggtggagggccatgctgtggacagtgaggggaggaggtccttcctctccgccactgccctcaaggctgcttgaggctcccacgctgaggtgtccacctggctgagaggctgctgcttatctgttccccaacttctccacctgctggtgcagctctcccttgctgtgctaggagagaacccactgggagggtcttggcatctccaagtggggccctcctgctgagacactgggtggctgtggagggagctcagccctcattcctccccgagctcatatctacagagcagcaagtctccccactccaccagaggagagcacaggagagctaggcagctgcctccaccaagacttcacccaaccacggtccttcactcccaccaggacaggacaacccagcctcccgggtcccaggaggacttggcatggctgaggacacccaagaggaaccaccagcctatccctgaaaaagcaaagacactttggggaacagaagagcgtcttaaaagatatcaactttgactcagagatttcaagaagacgctctatccaaaaaccaaagaagaagtgtcaaagctgttgtaaatgtttaaaagaatagccaccttgattgcattttgagtgaattgtgaattccctctccctgggtcttcctcattcttctacatcctccccatttctgtactgaatttatagcagactgaatttggaagttgatttgaatgtttaaatatatgagacactctttgtt

SEQ ID NO: 202155 - DNA, 1000 bp, Homo Sapiens
ctgccaaaaccctcctctgagtgttcctcttataagggcacttagcactaggacctcccaaggtattgtaaataagccttatcagaactttttgtagtttcattctgaagccttaagacacacaccataaagctgatctgtaaacccttaccccttgctgttcagagagctactctttgtagtgttcttgcatgcatatataataaatgttttttctattgatctgttaatttgcaagcccccaaacactggaactaagttgggggcaggatagtttctcccaacagcactttgtaggcttctggatagaccaaagagtgtgtttgaatagataagggaattttgttcccttgattttggttgaaggtagaagaatccaatgtacacatacacaaaactatgtccttaaatttgtctcaaagaataaatattgggtagtcatcagaattgactgaaaacttactttagggagaaagccacaaataatttaggctggtatgatctgagctttcctgatttcccatgggcattttagtggtctaatggaatattagtctgatatgcattttagccatcttatgaaatgggccgcaggtggaagtaggatgcagggagtgttgaggtggcatctattatatcaaatgcttcactctgcccagtcctctggtgagttccttacatgcatctttctagttaatcctctcggtgttcatattttacagattaatcaactcaaagggtagatagcttgctaaagattatactattactgaaaaatagcaagatgcagaacagcatacctagtatgttactcttttttttttttttttgaggcagagtctggccctttcacccaggctggagtgcagtggctcagtctcggctcactgcaacctctggccctttcacccagcctcgtatgttactttttattttaaaaaaggggaaatgatatgtatatgtgtatgtatttgcaaataaaacaggaaaagccattcac

SEQ ID NO: 202156 - DNA, 1000 bp, Homo Sapiens
tggagtggcagtggtgtgaacacggctcactgcagcctccacctcctgggttcaagagattctcctgccccagcctcccgggtgggtggtattataggtgcacaccaccacacccggctggttttttgtatttttagtagagatggggtttcatgatgttggccaggctggtctcgagctcctgaccccaggtgatccgcccgcctcggcctcccaaggtgctggaattataggcgtgagccactgcgcacggcctggggaggttttatttcttgacaaaggtatttgatactcgtgcagtccctggagggtctcactggagagacaacatttaggctgagatctgattaacaggaggcagctgcagtgcagaggtcaaaagggagggtgttccaggcagagaaaacagcctgtgcaaaggccctgaggcagaaacaaactctacttgaggtcagcctggttagaaagcccaactcaaaatagaaagtattacatgataaggtctgaggcaggctggacccagatcttacaggaccttgttaataaggatcccatttggtcccccacagtcctgagaagcgggcagggctgtgggaaacagcagatatttagtggtaagcctgagatcagaacccaagtctgcacttcctagtcacgttctccctgtagtgctaagcccagagacctgagctgttaacctagaacagtgtgcttcctaagccttaatgtgcatacccatcgcctggagctcgccttaagatgtaggttctgcctgaagcccaagttcatttagtatgtcatggttaattcagagtaaaatcaagagttagtacttgatttatgcttgttatataaagaaagagacaacttcactgtatgatcattttgtcacttttcaaaagcatttaattcccattcaattgaaaatgtttcaagaacaaacctgtttggtcattttattgatattgcacatttgtatatgaataaatttttgcaaatt

SEQ ID NO: 202157 - DNA, 1000 bp, Homo Sapiens
ctcagaggccctctattggcagttccaagtctcaggatgtggtcataattatgaggatcagcaaaaatgttgccatcctcactccactgctgggactgacctggggttttggaatagccactctcatagaaggcacttccttgacgttccatataatttttgccttgctcaatgctttccagggttttttcatcctgctgtttggaaccattatggatcacaagataagagatgctttgaggatgaggatgtcttcactgaaggggaaatcgagggcagctgagaatgcatcactaggcccaaccaatggatctaaattaatgaatcgtcaaggatgaaatgctgccccatttctcatggatgtcctgagaccaagaggggagatccaggagaaagaggccatggaaagcaggctggagtgaggaggaatggtcatgcttccttggaagactttctcttcttgtcaggagtgactcccaagctcttggtcggccgaagaaaaactgaggataacatttgctgactgggctttaaggagcatgatttatggaccccttaacctacccgtgccctgcaagaggctggcttcttggtcaatcttgactagattaagagtcaatctgcaagccattttatggtctccctggccagctgggggctgtagggccctgctgggcttggtcgtctttcactcctgaggcctgctctgtggctccatagctcagtcctccatcactctgcgtggatcctgggtactttggacagtgagggttcgatccaattttaggggtagggttgggggtgggagtgggagtgtgggttggcaggaggaagaatgagtctactttggagacaattaagtcatggtacgtttcctaaagatagggaacggaagaaaagcaagagaactgtttaatatgctgattattttagtctattttagaccttgagtaaactaatttagcttctaggatccaagtttccttatttgtgaaacagg

SEQ ID NO: 202158 - DNA, 1000 bp, Homo Sapiens
atgtgtagacatgaacacataccattcctctaaggtgtgtgtacatacacggatgtgtgtgtacaggaggtacctgacatggtgaaaggccataggacagaaaacctgagttctaattccagctttgccagtcgtcccgtccgtgatatattccataggacagaaaacctgagttctaattccagctttgccagtcatcctgtccgtgatatattccataggacagaaaacctgagttctaattccagctttgccagtcgtcccgtccgtgatatattacctaactcctccagaactcagttttctaacctataaaatgaagacattgtgctagatgatctttgtggttccttcaagctctggatctctaattccatgattagtaatgtatgtatgtgtatataaatatgcttatctgtagaaatgggcccatttgaaaagtggagacaaggtctgcccaggtgcatttattgtgccagaaacagcgaattcctaaataagttcataaaatcttgttttacaattcaatggtagtgcttaatgttactgtctgaaatccactgtttaaccagatggaagactggggccattcaaaacattattagttcacaagtgtttgctgttaaaatgcttcaataaaactcatttgttaaagtcagaaattcaactcttctgtacttgggcaggtcccagcagccccttggcaggctagttttgtgcatgggcctttgcaagctatataaacgttaggtgttggcttgattatgataaatatgagcaggctccctggagaacagtccagaaaaaaagagttatagttctcacaaactggtgacatgaatccattaagctgtgtggcattttccagtgtaaagacattgtttgctggctacgatctctgactttttgtggcatatgaggtgtaaaatgttgtcaaaaaagaatctggtgtttaaaaaaaaatcaaactatggtggcattaaatgttcacttttattct

SEQ ID NO: 202159 - DNA, 1000 bp, Homo Sapiens
gaggttgctgttgtctgaaatcttagctaaggattggaggatgcacttctaagtgaggcctggctgtaggcaggaggcctcagtccttccccaggtgggccaacccacagggctgcttgagtgtcttcacaatatggcgctcggcttccccccagagcaagagattcaagggcccagggtaaaagccaacgtgttatttttatccctagcctcagaattcacacgccgttgcctccaccatgctctggtttgatacagcccagctctgattggaaggggctggggctgcccgtgctgactcttcaaaggcatcccatcctgcagatggtgttcacagggagagtttgtgggggccggcactccctcatctactggggctcattctggaagaaggtccagaagaattggagacccctgcccctcacccaaactttggaggtggcagggtgaacagcaggccaagttcaggtcccaagacaggccaaggccagtgcggtttcccttccactgcctcagtttacctgtattcagaagacagtctaggaagagttgagcagagttccctctaaaagagtagggagctgataacagtcccaagccctcctctttctctatgccaaaatcatttccgttatcctgagatgggggtgagtggatggatggtgtactgaggggcctctgccctgcccagagcccccaccatcgtagtgggggcaggggacttcctgcccacaaccccctccaaccctcacctggcgtgcccgggtcaccagcagcagcagcggcgttccatcgctcccaagatctgggtgaaggggagaacctgccatcttatccctacccccccggggccctcaagcttattttcttgttgaagaaacacaaaaccctcgagattcatgtactgtatgttggagaaaaaaaattacctaatgttcccccaaaaaagacagtatattttgtactttgtaaagtgttaattaaaatgaaaaaaaaaacg

SEQ ID NO: 202160 - DNA, 1000 bp, Homo Sapiens
actcattcagcattaacacataggcccttcttgatctgacatcgtgtttctctagttagactaaagaatccccactatgaagttgtttcatccgtaagtacctttgaacccagaagccccctttctcatatgtttctcattcctgtttgcccttcagagttcagctttagttgctaaaacattcagacatccctctgacttagatcccccactactgtttttctgtgagaagcagctatgcataattcctcttcaacacagtagttcttgaaattttgcaggcctctcctggaaaggaggaaatgacttctctgactttgtatgatgcttatttgtggatgaatgggcaagggaaaaaatgaaggaacaagtgaatgaacagtatgggagtatgagaaaaggtataaattgggtatagttgagaaaaggattcaaattgatctttggttcgagagacaatttcatctttctgatgaatttaaagtgtagtctttgaaccagctgggcttaattatgtaaagttttgagcctgagataagcacacaatcacaaaacctacccaaacaagttttttgtttcacttcatctcttataaaacaatgttctaaagtaagtgatagggatgctcatcattctgctacctattatcacaatgaaaacaatcataaatagtacacaggaaaggtgagaaatagcggatagttcttatttcatagtactgtatatggaaataaaccaaatttgctcatagagatactattttattacctcaaaaatatataaaaatgaaaacgttatgaaaatattttaaaatgggatttaaaaataattgagaacatcacagcaatttagaatactaaagagcatagctttaaaatgatagtgctgagaactccccacctctaccccaccacctgtaggcttctttgacaacttacaaatgttctctagtttgtatctagaatcacttatatctttcaaataaaccaactttgtgaac

SEQ ID NO: 202161 - DNA, 1000 bp, Homo Sapiens
taaatgcaacaacatggacgaatttcaaaataattatgcggagtgaaagaagccaacaagaaaaagaagagtatagcatatgattccatctttgtaagactctagaaaatgtagtttgtctacagtggctgcctggggatggttgagaggggactgctggtttcacaggtggatacctatatcaaaacttatcaaatggtgttctttaaatatgtgcattttatcatatttcagatatacctcaacaaagctgttagaaacaaggagttggaattagaaaaattacccaagtagtattcaaatacctaattatttgcttgaaagcactgaaggccaactatggaactcagtggctccaccagagagaagtctggctaggtgctcaggtggcgtgtcctgaccattcagtggctgagccctgtgaaaacaggcattctgtaggtcttcggatgaggaacttgcagaagcagccgggtgctgccatcctaagctggttttccatatgggcttctctgtgagtgttaagaaaagctgtggtttgcctgtcagagtgagcgcccccactcagggtaaccacagtttctccatagagcaataggacagcaggagtgggctgggacgactcctaccttagcagctgctggggtagaatgcagcctggtttcagaactgaatttctctttcttcttaaaggtgaaatcttgtgctgagtgggtgtctctctcaaaggccaggattgtagaatatgagaaagagatggagaagatgaagaacttaattccatttgatcagatgaccattgaggacttgaatgaagctttcccagaaaccaaattagacaagaaaaagtatccctattggcctcaccaaccaattgagaatttataaaattgagtccaggaggaagctctggcccttgtattacacattctggacattaaaaataataattatacaaaaaaaaaaaaaaaaaaaaaaaaaaaaaaaaaaaaaaaaaaag

SEQ ID NO: 202162 - DNA, 1000 bp, Homo Sapiens
tgttgtttttcctccttgaaactgatggcttggaaggcaaaggatttgcttgtagacagtacactttctcctttatatcaggaataatacatctttcttctgaaagtgttggttttgtttactgttttgggagaattctatgaaagtagatgatgttctctatgctttcctaagccttgtcttgtttaatcctcacaataccctcacataatggggtaaaatttatatttcacagacaaagaaatagcagctcagagaatttgaacagactttccaaaggcattctaagaactgcaagagctaggattcacacccaagccttctgcctcctgagccctcgctcttcccaaggcattaggcaccctttcattatttccttaatcatttacccattagtctgatcttcttgccaaaccaaacacctcattgttcagttttatgattaaataaaatttcttgaatagtaattggatatttggctcctggtctttaaattttatgtactagtttttgtttatttttgctttagcaggtttttacaaatttgtatcagcaggacatacaaattcttttgtaattggagctttggtttttatttctttaccaattattcagtttctttgatacatatccaggactgtaaaatatctacttttaaaagtaacagtgaggcaggacttatttcccagtctcaattgataaagtgaaaaaactggcagctgggcgcggtggctcacgtctgtgatcccagcactttgggatgtggaggcaggcggatcacaaggtcaggagatcagtaccatcctggctaacacggtgagaccctggttctactaaaaatacaaaaaattagccgggagaggtggtacgtgcctatagtcccagctgcccaggaggttgaagcagaagaatcacttgaacccaggaggcggaggttgcagtgagctgggatcgcggcactgcactctagcctgggcgatagagcgagactcaatctcag

SEQ ID NO: 202163 - DNA, 1000 bp, Homo Sapiens
gtgcagccacgaggcactctttcaggtggagtatgatgtggccacccctggtgagttgggggcctgagtgtgtgggttggggcaggaggaggcctgggatggggggaggtggcagtggccatggatctttaccactgcaaaggctgcatgaccttatgaccttgggccagtcacagcttctctgggcagtaaatagtatgtgctaggcattgtttgatgtgctggggatccagcctagaacaacagaattgaggtgtctgttctcatggagctggcattctggtggagagaggacagtatccagaatagataagatatggtgtatgtcagttggcaataagtgctatggaaaaaagaaaagaggcaggggagagagatgggacaggctggggggtgctctctcactaggggagtaagggaatgagcgaggcatggaatgtccagggacagcattccaggagggcggaagagtaagtgcaaaggccctgaggcaggagcatggccagcatggttggtcacagtgaggaggctgccgtggttggcacaggtgagtgaaaggaggtaagggcagagcagggtgaggtggaagccgggaggccataggaagcggcagcagctgtccaagcgagagctaagggactgaaccaggctggtggctaaggaggggagaaggcacgggattcaggaaatatgatgacggtccagctggcctgatctgctgagatttagacatgggtgggcgagggcaggagctaagggtgcggccaaagttttaatttccagccactgggtgtgttaatggaggtgccatttcctgagatggggatgggttgtagtgaactttacagtttagtgctggtataccacaggctcttcataaactcaagcaaattcatttcacccagcaaagccctgggatcacagcccctcagacctgagctcctgcccctcctccactgctatcttatctgtcaaattgatataacatttggtagaagat

SEQ ID NO: 202164 - DNA, 1000 bp, Homo Sapiens
gagaaaaccagcaagtcagagggtcgcaggaccgtggaccgtccactggggacagcttagtgcctcctggtttaacttcagctgctctgcgggcccttatgaccggcatggctggctttgtctggggctgtgagcttctgactctcctcagtagagtggcagcacgtggcactgtgcaacccgagggcagctcagggtccctgtagcctgcatttgctgaagtgggagcttctgacacgtggtgaagatgttggcaggcttgagcggcacgtgacccccttccttccccaccacacactctggtgtgcagggcagacgccgtgcaggttcatctcgactcccgtgagtgtcctggtggcagaaggactgtcccaccctcacccaaagctcgttggtacaaaaagcacagccgtttctgtcagactctgtggctatctctcagcagatgcatccagtccatgctggagtcgacagaaggactctgctgggagaggtagaggccccctggcagcatctgtagcatcttcgttttatgtccctttctgaaggacgtgaccacgcagtctgtgatggggtttgatcctctgcctccttcggacacaatctactcctacgtcaggccagagaggctaagtcctatcagccatggaaacaccattgctctcttcttccggtcactgttgccaaactataccatggagggggagaggcccgaggaaggagtggctgggggtctgaaccgcaaccagggcctgaacaggctgatgctggctgtgcgcgacatgatggccaacttccacctcaacgacctggaggcgccgcacgaggacgacgctgagggggagggggagtgggactgagcgtccgcagaggtgaccgaaaagccgtatgatgatgttcccgatttctctgttggtcggagtcggccagttgcctgaagtagggaagctgagtgtgtcgctccctggtccactgtttctcctataaatgtaaatgggtc

SEQ ID NO: 202165 - DNA, 1000 bp, Homo Sapiens
caggcagcacccccgcgggggcggcctcctcgcaggcgcacccagcgctctcctgccgcctcccgccttctggaacaaggtcagagccctagcgtgagcgccccgcccagggccagggagaggaggacccagccgagcctcagctgccggaacagcgcacagggctccgggctctggatccccgcggggctcacggctgtttggaagcagcgctgtccctcccaggcagccctgcagcgcatgccccacgcctgctgctgcagatgtgggacctggaggcctccaacaacggaggccaccgacaggacaggaaggacagccccactgagcccgggttctggaaaccgcgcctttggaggtctccacctggccactagcttggccacaagatgcacgatgcaaggagagcctgctcagagcgcaccctcctggagggaggggcccggctgccagcgaagagagtggggtcaatagctaaggccaaaccccccagcgacaagccccctggcgacaggcacccagggccctccagcccaagtccgcctctaggtgttcttgttggtgtgctggcacagagcctccaatggggcagaacggccacccccgggaccagtcatacacagatcctggcaactaacaccactgccgtttccaccgaccaagtcttggggtggtctgtcatgcagcaagagaccatggacgtaactggattcctgcctcactcagacacggtggtgggagaatggtgaagcagtcaatgctgaggtctttgctggggctgatggcgctgggaggggccccctcagcctctgaagaaaaagcaaaccccacccggccctaacaccaattcaacccaacctcacctgggaggctgcttccttgtggatctctttccaccaaccggagttcctcagtgtccagcctggaggcagcgtcaggctgggaaagctgataccctgagtggggttaaaaaccaaagaaataaaaggcatcaacacag

SEQ ID NO: 202166 - DNA, 1000 bp, Homo Sapiens
tcctcaacaggagcgcagagaaagcagcctggggcgagtgcagtctttgccaggactcaagaggggaggatgaacatccccttctccctctcccctcctctgtcctgtgggtcccagggggcgagatgacaccacacaggtctgcctctcagggcccattcaagacctggtctttgacccattctccaagccaggactcccttcacttcctgctgcttcctcagagggcacctaagtcctctttgggagctgagcaaacaggaactgatagggacagaggacaccacttccaccagccaaggcctaggagctgctgacctggtcagccctcaccccagccaggcagagaggcaaaacctgggggtccccggcagctacgagattggaaaggttcatcagccctcccccatctgccccaggcattgtcagggaatcagtgggctcagaactggcaggcggtgcaagctctgcttccctgggccacactgagggctggggccagctccctggatgggggtggagtttaccagcagcctggggacagcatgtgtcctttttaggaaatgtccttggaggaagtgttcatgtgtggcgctggtcagcagctagtcccgcttccaggacactggtcagagttaccgatgaggcctgggggctcctgcttggaaacccctccagctcctcccatctgcccagacagagcgacagatggcaccaatgcatgctggctccctcattcctgcccaggggctgtggcttacggccagcaccctgtacctgggactcagcccttatcccccctctgctatctgtgctgggagaggggcttcggagggaaacagatatgaggacactggcaccatctgggcctggtggcagggccatgggaggttggaaggcacccacatccttaaagccatcagtagctatagtgggtgcccacctgcatgtgaaggggaggcagttctcaatttatttcaataaatccttatgatgtgcc

SEQ ID NO: 202167 - DNA, 1000 bp, Homo Sapiens
attgtttgaagttctcaactgagatttttactttttggatttttatgacttgctaatgttagaaagggcttgtatgcgtctatcaaagcaacagtggctgctgttagctaaaaatccttgtcagcttgtcccacgtttattctctatgtggaggtgaaagggtctgtgcttggcattcacttccattcttagacttaatttggaatcatccttttaaaaaaatcagagaccaggtcttgccaaatcaaactcctgggctcaagcaaccctcctgcctcaacctcccacggaatcgtcttgtcattaacttctttttttaatatgcattagttgggagtaagatctttttatcatttatcaaaaaggcataaatgttccaccaaccataaagtatagttggtactttttgaacttcaactgaaacagtgtatataaacgattgcttttgaacctgcaaatcacaagtttcaggtatcgaagccaaaacagttaactttcttcagcctctggcagattattaacaaaacagtattattcagattctatatcatattaataagaattgaaccttgaaagtaacatctgttattctattaatgtgattgtgtgtgaatgggtctgatgactgttggactgtttgtaggaacttaacatggaagatgctgacagaatcagattttgcaggtgttcaacctatagtggctaagaattatgttttctatttcatcctcagaatgccatacaacaattctggaatgctgattttttttaaagtaggaattaaagtcatacacaaaatgtggtaattcatatgtagatgaaatattaaacatttaaatgaccgagtaaaaaacatctatcaattacacaaatgaacaagaatgtgagttagaaaaatgtaataaaatatgaattttgaatattttattaagggatgatttaattcctggatttcaaaaacctttaaaaacatcaaacaataaacttttataaaaaagtg

SEQ ID NO: 202168 - DNA, 1000 bp, Homo Sapiens
tctccaggggcaacctgcggactaggccaaggtctgtaacaggataacgtaccagcgcctggcccaggcgttcctgccgccacctccccgcatatccggaccgccgggactgcacgcagctggcaagcgtccccctgttaactctgcaagggtggggcggcaccatttctcagaccaggtaaggcaagaaaacatgcaagagagaagagagggaagcctaggccaatcggaatgaaaatgtaaacgccacaaccacgttttcagctttacaaatactgaatcttgtagtgggtctagtgggttaggggttagcatgagcaccctaatggttgggagacagtttcaggggactcttgcatttgtgaagatgatcagtcacaggcaatgacttgaagccacgaggcttgaatattaaaatctgatgagcagatgttacacgtagaataattacataatagttctcaaattcctgttatatccaggaatatctggtatgagtgaaaacttggaggtgccttctctaaagccatcaggaattctgagttgtgtttgtaaaaataggaggcacaagagggcaccaaactgaacaaaatgttaggtggaaactgaaaaacgttggttagcatgaacaatttcagttttcagtcacactgaccagtatctgtaagttaggattgagatgggcttgttttatttatttacttttaaatttgtgctgctacatatcccaaacaaatgtggtctttatcatcactggcaagccattttacttattggttaagctggaattttattacaccaccccagcaagatagaggagaaaagcgaaaattaagtagtaaatggttattatgccttaagggaaggtgtgaactggcaagacaaaagagccaaatttagtagtaaagcatagtcatcagcacacagaaaataagtggtgaggaggagtttggccagaaaattggctaagaaaaatggcagtatgaccaagaatgaaaag

SEQ ID NO: 202169 - DNA, 1000 bp, Homo Sapiens
tcatcttgtcatttaagtttcagcaattgagtaccacactagaacacccacaaatgagattctgttacagagtatcttttttctactacagaacatactgtagacagttattcagtggttaacttgtggaaataatcagaagatgcttttcacttttatgactggatatattttaacatttatcatattaagagaaacttaggttacttacagctcataaacgttgctatgaacatcattcatttattcgcttatttatttttatggtgttcctagaaagaatttcctggactaaaggatttatgctttaaaaatattggtagttactgccaagaattgccatccagaaacagtgtagccattcataaactcaacaacaaggtatgagagtgcctgtttcctcatatcctttgtgacaccggattttatcaagcttaaagttttttcattctaggtgggtgaaaatggtattccgttattgataatgtgtggaaatcaagttctaataagtttggggggaggttaattctttatatgtgctgtatgaattaatgccaactgtatgcctttgagagtgaaatcagaataatgtctctccactaaagcaggacttagagcactagttttccaaatgttgtctacagatggaaacactagcatcacctgggtactcgttagaaagtgcagattctctggcggtaccttagacctcctgaattagaaactctgggggtagggttagacatttgtgttttaaacaagccctccaagtggtttcaatgcacattcaaagttgagaaccaatcactgatagagaaaaagcagcttgggtagaaacagttgattatttgcaaatttatattttaaaaagataggattcttaacagtaagctctttataattcaacaatgtgatctttactcctacccccgaaaaactaatatgattttagtgtgtggtagctggatcgaaaacataataaatactcagatatgcaaag

SEQ ID NO: 202170 - DNA, 1000 bp, Homo Sapiens
gtgccaccatgcctggctactttttgtatttttagtagagacggggtttcaccatgttggccaggctggtcttgaactcctgacttcatgacccacccgcctcggcctcccaaagtgctgggattacaggtgtgagccaccgtgcccagccatgagcggtcttgaaaatgaaaaatggtcttggccacagaaaccaggtatgagggagtggttggaatggtataaagtcatcactgttagggaaacagtaactttaaatgcattttaacagtgggtctttaaaaatgaatgtcatttggttaaagagttttgctgggcattgagataatctgacagcatctccacttcctgttttttttcttaatctccactttttttttttctatgatgagcgcccctaaaatgctggtaagcttctttccaacaaaattgcggtcaaagtaggatgctggggaatgctgattttagcaaaagcttgtagaaaagagtggcctggcacatgagcttaaaaaaaagaaaaaaagctggctcttgaattttggcacagtgcaacctgttccataccagacaaatgaacaggcttaatctggtaccaattctttttctctcttactcctcagaagtgaagggactgcagatcttgttgttttggggacactttcatggaactgtatgtaggtttttttgaatggtgagaaatctgaataattggtaaggggaagggaatccctcatttcagcttttcttgatgttgttactaataactatgaaaaaacttctgagagaacaatgtgaactgaagatgactcagcagttaagacaatgctaagttctgaaaccacaggtaaatgaagggctaattaatgtgtggtatacttggacaaaatgaagtactcatttgcactggattactgtgtaatgataacgaacactgttcaagaacgatttatatttccataagatttgtactaaattttataaaagtaaaacaactttttat

SEQ ID NO: 202171 - DNA, 1000 bp, Homo Sapiens
ggctctcaaagtgtgtccctgagaccagcagcatcaccttaggaatctgctagaaataaaaattcttgggccataccccagggttactgaatcagaaacttggttggggcctagcagtgttttcatgagccctccattgatcttgatgcagctgaagtgccgggcaccagtgaaagggaagggctgcggtagtgattccattgattcctgctttgatggaagttatggcctcacaggttagacgttgcaagttgagttggccctcttgcctaggtgtgcctccttgccttgggattctgacatgaacaggtgaagtctcttcatgattttttttgttgttgttgttaatggtatgcttgctattatggccaatatgtaaatgttactctgaatacatatttatataccatgttacttagtgacattattcaaacatttgtatgcgtatttgtgaaattgtttgcatcagtcatttaaaaaatatttcagcctaagttttctaagaggtatgttgaatacatttttaaaagccagcttaagggtcacagcagccttagtttaggagaagagctaatcacaggtgaccactcaagttctttcaatgaagacctgatgatgtatttagttcccattttccacggtgattgactcaatttaagtgtattgtggctatatgtaatttacaggctgctttgcgttgcaggtgggaaaatctcccaggctggtgtgaggctgaactggggtaaaagaccccctgacccctcctcattcttctaaggtcaccacctcttagagggtctcttattttctttcagagatcaaatgcacagttatgctgtacaactaaattctgcagtcttgggaatccttacgagtaccaactattagtcactttttaaagtccccaaagtggagtgaggatagggggagtggaagcagtgtttggttcttactttacccaaactgtgtataaagaataaagttagcagaatgatgccac

SEQ ID NO: 202172 - DNA, 1000 bp, Homo Sapiens
gattcatacagttccaacctttttctagtttcacttgctgccttctttgttttatgggcactttttgtgtgattacttccccaacacagtcaaaggccagtatgacagaaccaatggcacatgatgcctctattttgcccatttggggaaatgttagtaaaagaaatagcatcttttaatggctgtcattatcatatccatattaaaatccatttaaagttcttaaatttggcggaataatgtatacaggctgtaaacttctacaaaaaatgtttgctgtctttaatatggtgtcaagttacttggtcctttgaaaacaaaacaaaacttccatacacagcactgcccagtaaagcagtgttggaatattggaaacctagacatttgaggatccttcttgctcacaagcattggaacagaatcctccactttaggactcagagaagctatggagtcccacaggctaggtatagcacacaacttagagaacggtagttaaagcacgtcaaccacaattgaatttaatgatctaaaaaatatttcttaactctgagggttaaactgaagatacgttttcaaataaaagcttttaaatttcttaggaaacaaactgtgacatcgcttttaaaaatgacattcaaatgtttataatgtgtgtttttgagttggcttggactagtgcaagttcactgctggcaatggttatgccagtagttaagttaaaataagttgttaccttcagattgatgtcttgtataaccagacaatcatcttcaagcaaaaaaattggccaggaaatgtctttttaaaaaaaaaaagaaaaaaaaaagatgtgtcagccagaacagttaccattcagaccatactggaatgattttgaaatctttactatggtttaagttggggaaggcctcagtatggcattttcatattcactctatgtaaagattgaagcccaaagatgagttaaattcagtgctgtattgaaaccagtcagtgc

SEQ ID NO: 202173 - DNA, 1000 bp, Homo Sapiens
ctgctgaaagagctgctgcttttagaacaatcaagaagctgcctgctggattaggaagctgcctgctgaacagttgccagttccagagccacaccacctctgccatgctttatgccagcaaaaatagatacatctcttcctgcctctgtccccacgttacttggctctgagtaaaagtctcaaccatgaagtacaatcaagaagaaattgaaaaacagtcagagttagatgatgagcttcatcgtttgtcatgcaggatttttatcccctgaagaacctgctagagaagtccaccttcacccttaaccactggtgcctcaacttaatacttttaaaattcatttgtttctgttggaattgggatactaaggtccagaggtgtccttctaaagctggtagaggtttcacgagtcatcagggacccagaacccttctcttttgctgtccctttgtcctagtgcatggtttccacactgtggtgcaagatgtctcctcaagctctaggcattacatctgctatcctgctgtcagaaagaaggaaggggaaaagaagatcatttccttctctttaaggacatttcccagaagtcacacagaacatttccatttatattactttggccagaacttggtcatatggccacatttagttccagaatgattaggaaatgcagtcttttattgatccctgtgcccaggaaaatattggaggcctttttcaaggaaaaaggggaaaacagatattggttgacaaatagcagtctctgccatactgtccctggatacatgtctttgagtgaatgtcccttatttaccattctgattacttgttggatattttcaatatgtgttacaatatggttccaaaattgtatgtgatattccaacagcaagttggatgcaatgtgtcataaaaatgacctcagtgtcaaccagcatttgaataccgtgtctcaatgctgtgcaccaataaagaacacagaaagtcagagttttccat

SEQ ID NO: 202174 - DNA, 1000 bp, Homo Sapiens
caagattaatctggtgaatccttttgtcacagttctcgtgtgtgtgtgcgcgtctccgtgtgtgtgtgtgtgcatgtgtgtaaaactgaatggtcacatttaattgctttttggaccattgaatagttgggaagtaagaattttttaattggcatgagacggttcctcaactgttaaattaaccaactttgacctgtctttagaaaaaggcttatttgtatgattttgggctaactccccggggaccatattaaatgacaaaaatgctcctttgggtgacacaccctacaaagtatttgctgttacgaacataaacgcccacattcttaatatctaatatttttgaccagtgatgttttatgctgtcatctgaaccctagagaagcagtgtcagaggaaaccttggtgtcacatgtgtcttagcaaaagggttaccatgatcgagggtcatgtgaccaaaagatgctccagagaagcttgagaatttgtttcaagttgggaggagggttggagatacaaaaatcactctgctctacaggactcttcagctgtctatgcaagaaattccgttttctctttcagcacctggaaagacacagcagcccaccgaggcgataggtgattcactaagcacaagaggaatgttttctaagcaaggcgtcccttgcctctcaaacaaatgccctccaagtttgttagggtttctattcctgcaacttgtagtatcaaaaccacttcctggaattgtcaaagcactgccaaaataaatgtttttcccccttctaagaaaaaaaaaatgacagtgctcatatttgacacttgtgtattggactctcttttgaatgaataaaaaggaaaaggggtttggtgtaattcctgatggggtgcgtgttgtttttcatgccatggtttgtgaattttaattgtggtttcccatttcgttgttgtaactgggcagaaattaaaaaagaaaaatcaataaaaatacaaagaaatggtt

SEQ ID NO: 202175 - DNA, 1000 bp, Homo Sapiens
ggcaccacgctcagataatttttgtatttctggtagagacagggtttcaccatgttggccaggctggtctcaaactcctgacctcaggtgattcacccacctcagcctcccaaagtgctgggattgcaggagtgagccaccgtgccctgccggttgagcaatgttctaccttgaagggtctgaggatatcttcaaggttttggaagaggccgatgggactggcataatttaacgcagagtcttgagtgctaagctaagaaaccagtacctgctgcgtgacaccagcaaggcctagattgcccgattcccaggtcttctttttcagtatttgtgacctgtccccaggccttttcagatcaatccatctatgcaaatttatggggaaaaattgttttttaaattaaatttccaatacccaagccctaaaattgatggatgtgaccccaggtgttccccttacctcttggccccccaaaacagggacagacatagatggtgggctggaacacccctcacctcctgtattcccagaaagcctcgcgttgaggtgtgttggccagctccctagtttgtgcttactatacctggccacgcctccctacctaaggccgctggcttaaccctaggggcaggcagtgttagatcagacccagaccttctcatcccaccctcatcacatcggggagaggggactccaggggcgggaaggcaggcgtccctccatttggccagggtgggcggcgaggagggggtcactctgcaggaacactgagctctgaacacctctcgcctgctgcctgcctcacaccctctgcattcgctgtttcctctgttgggggagggggtttgtgaggggaatattagattacaccttgtcatttggaaagccccgtgtctccggcggccacagcgaggttgggggggtggtgagggaagtccatggattggccagaactgggggaaaaacaaaaagaaatgagagaaagagagagcgggtacc

SEQ ID NO: 202176 - DNA, 1000 bp, Homo Sapiens
ttcggcctcacagagatcatcatctttaccaccttcaaatcgtaaatcaagtactccaacaaaaagagagattatgctaacaccagtgactgtggcttatagtccaaagcgatcccctaaagaaaacttgtccccaggatttagtcatctgcttagcaaaaatgagagcagtccaattcgatttgatatacttttggatgatttagatactgttcctgtgtctacattacaacgtaccaatccaagaaagcaactccagtttcttcctctagatgactcggaagaaaaaacttattctgagaaagccaccgataaccatgttaatcatagctcttgccctgaaccggtgccaaatggagtgaagaaagtatctgtgagaacagcctgggagaagaataaatcagttagctatgaacagtgtaagccggtttcagtcactccacaggggaatgattttgaatatacagcaaaaattcggaccctagctgaaacagaacgattttttgatgaacttacaaaagaaaaggaccagattgaggcagcactaagcaggatgccttctcctggaggacgaatcactttacagacaagattaaatcaggaagccttggaagatcgtttggaaaggattaatcgagaactgggttcagttcgcatgacgctaaagaaattccatgttttgcgcacctctgcaaatctttgagatttgtagccattaaattttgagacatttttgtttgcactaatgtataattatgcagtcagaaaaggcaaactattttgtactgtttataagccttcaaacagtagttttacaatcatgctattcttacacttgctattttatacttcaaatagccacatattttcaagatatttttgttatgctcaggaatctcttgtatattttactatttaaaaagcattatttttaaatagtatctgtctccaatttatatcaagaataaggaaatataaacagaggaagcagcttgtttct

SEQ ID NO: 202177 - DNA, 1000 bp, Homo Sapiens
ctcttttggaaatctgatttgaagtctaagttttcagtaacagaagacacacaagcaatgtggactgccaagcttgaagcacttcgggctctgccttcactcgcatgctaccatgtcgagcccaaactccactttaattaaaagagctgtgctgtgaattccacaacttctgttaaataatttgtattccattatatatattttgcacatctcaggggaccataatgaacatatgaaaggggggggggtgccatcaaatagagaaaacaaatagaagaggtgaatggagactagctggataaaaataacaaattacttcttctctgatgttgtgaaggtcaggttcaggaagcatcaattcacagttaatccggagtaacaatgatctgaacaccagctgttcccaggtccctctttttcatagcccaaccagcatctaaaatgtaaatttaaattacattgcagtcaccatggggagaagaaacctgttcagtggaagcagaagcattgttccttttttaggttggcgcagctttgcaaaactctacccaggataaaccacttatcaccaccaagtgtacttgaaaataaagtttttaacttaaattacaagcatattgcttataatacaatagtgatcattttttgaaagtcttgccatttataacatgggcagtatttggagcttcatttaaaaaccaacaacaaccgataatgactttgcacgattcactttgggatctcaaagtgcttccaaagcattcagatttacaaacaattcacaagacaggtcatctttgtaatacccatacttacaacgaattaacaaaaggagtgacttaagattctccaggaacacagtggcagctattgatgatctgttttctatctgtttgatagagcatcatgagaaatcacaaaatacaatgctatttttctgatgtgtgctaataaagtcaaagaaaacaaatacatcttgacacttttgtccattttcatt

SEQ ID NO: 202178 - DNA, 1000 bp, Homo Sapiens
gctccctcagcagccactcatagcacagattcctcctccccaggccttccctactcaacggtcaggaagtattaaggaagacatggtggagctgctgctgctgcagaacgcacaggtgcaccagttggtcctgcagaactggatgctcaaggccctgcccccagccctgcaggacccgccacatgtgcccccgagggtcccacgagctgccaggccaaggctgcctgccgtgcaccaccaccaccaccaccaccatgctgtgtggccacctggggctgccactgtcctccagcccgcccccagcctgtggacgcctggcccaccctgagtgtgagtcacagagaccctggccggggcaccctccacccccaggcttcctcagggctgtgggctgtggcgggactatggaagggagcagggagagaccctgccaccacccggagtggctacgcgagtgtggactgcaggctcctcctggggaagctgggcaggctcgctttctggtcacggggccattccagggggcatcccttgctccgggtcccctgcagtgaggggcctgtgaaccccaccagggcaacagcccctcccagggacccctcctttcctgtagggcggcgccggcccacctgggagcctcagatccccctcttccatcacggaggtaaagttgaggccgtggacgccaccagcctgatgaaataaagatttcatccagaaagagtttaagaaaatctcagctcaggagccagaacagaaaagatcaatagctttagccacatggaagtgtgaacatcctgatggggaaaataccacaaagtctaatttaataactagggacacctgtgtgccacagctgtggcacagactcccactaaagaagtaggggtgcatggctcatgcctgtaatcccagcactttaagaggctgaggcaggaggatcacttgagctcaggaattcgagaccagcctgggtcacatagcaagaccccgtctctac

SEQ ID NO: 202179 - DNA, 1000 bp, Homo Sapiens
ctggccggccacagcagcagcgccacgagcacgccagaggagctgcgtggctacgacagcgggcccgagggcggtgccgcagcctccccgccccccgacgcagagctcgccgcttgccacccggctgcctggagtcgaggccccgctccgccgctggctttccgcggagccccaggtgcgcccctgccgtggcctcccgctaccggaccgggctctgctgacggtctgtgcaccatctacgagactgaagggcccgagtcggcgacccccgcccctggcgcactggatccggggcccagtcccggcacgagcggtgggaaggcggcggctggggccggggccggggcgtcctcgcggagcccgaagcaggcgcgcctgggcgagctgccactgggggcgctgcaggcgagcgtcgtgcagcacctgctgagccggacgctgctgctggcggctgccgagggtgccgcgggcggcagcggcgggggcccaggaggtgcggagggtggtggcgtcacagggggcgcccgggctgcactcagcgacgccgaactcggccgctgggccgaactactgtctcccctggacgagtcccgtgccagcatcacctcggtcaccagcttctctccgggcgacgtggcctccccgcagggtgactggaccgtggtggaggtggagaccttccactgagccagaccacagccccgcctgctacaccccacccctgccttaggatccgcccctccgggtacgccgtttgttttagaccccgcctccactgccctggagccccgctgggtggattagtcttagctccctagagcctgagcctttggcctcggaggctcgggacctacccatagctttgacctaggcccgcccctcgagctccgcccctttggcctaggacacgccccgtttccccgagtcccgccccgtgtgcagtgtattgcccaccccgcacagcctgagtttgcaataaaactgggacactgggacttgc

SEQ ID NO: 202180 - DNA, 1000 bp, Homo Sapiens
gacaaggtcttcacagaagagtgattttttcaacttagggaaggctgaccccagaccaatgctgccaaaatgtggtctgtgggctgttagcagttcgtgacgatgtaagtacaggaattgagattaagcatttagaacacctacagcactttgatagtcattttactttttaaattttgagctggcattttatatgcctggtttttttttgtttttgtttttttattttttttgagacagtctcgctctgtcgcccaggctggagtgcagtggcgcgatctctgctcactgcaagctccgcctcccgggttcacgccattctcctgcctcatcctcccaagtagctgggactgcaggcgcctgccgcctcgcccagctaattttttgtatttttaatagagacggggtttcaccatgttagccaggatggtctcaatctcctgatctcgtgatctgcccgccttggcctcccaaaatgctgggattacaggtgtgagccaccacgcccagccttattctctttttctaatagttgcactttatcatattttacaaatgtgtgagtctgctatggattagaaattaataagagattttgccacagatagtttgagaagcccagcactgccactcaacaaatgctggtgcattcagatggtgaaatattctgcagctattaaaggagttaaaactgcctccacttacctggaggcccatctgtgacacctttttaggttaaaaggaaaagaaaaacttgcttaggactgaatatgagcggttgcaatttgtaacaatgatgtatatatacatatacattttcatgtatttgtatgaacataaaagtattgaaggatattcatcaaactgctaaaagggttgcttcagagtaacggactcggagaaggcagattaattttctcttaatggaactctgtattgtatcacttgtaaaaataagcatgtgttatctttatgataaaaaagtaaaaacctaaaaaag

SEQ ID NO: 202181 - DNA, 1000 bp, Homo Sapiens
ttttcttgctagggtgagtttattgtccctgatgaatcccaggagtactagtccatgatgctcttattccctggtgctttaacatgcagtgcagccggagttggcctgaactttaggaaatgaggtcgtaagtcgaaagaacagggaattgagaaagcacacagaagcagccagggccaacattttcccctaaacaagccaatcaacaaaaagcaatgccaaacaagcccctttgaaactttcaaagtcctcatcctagtaccttcctagcactctaggagacatctttcagctgttgatttatgaacgctgagaggcacgtggaggaattaatggaggtaaatatctaacttaaaaaatcttcagtaggcatttttagacaatcctccttgaaagaaaagtgtggatgctctgtgcgtgtattgactgcacctgcaggggtatagctggagaacacccagtgagcatcttcaggagccaagtcacgcaggggcttagctctcagtccattgcgacagttgccatgatgccttctgaccattaaacactttgaactcttttctctcatcctctgttatttgctttggacccataacagactcattagttaaaaataagaagcaaaggtaatcctgatgttgaattacaagttaatgcagagcacagacatgaaaataattctatgggtttgctgcagcataacccttgccagatctccaagttccattcatctaatgaaaagccttagtttgaagaacattttggagaactcttacatcaagaggtctccagtacctcaaaaaccagtgttcaaaaggaaaatgcacacgcgtatttcagggaggtgggaataaaagccttcctttgcgcagcgtgttacatgtggaaatgtggaacgcacacgatcattcttactgttaaaacaccccacaaagattataaaaatatgtcagtttttttttggtgcaaaaactcacacgattaaaaatattatactatg

SEQ ID NO: 202182 - DNA, 1000 bp, Homo Sapiens
tacccggctcctcatcacagcggcagccctctcggttccacatctggttctcctgacgaagccgctggttttcggtccggagcctctggacctcggcagccagctcctccacctggcggcaggactgctggccggtgcacgcctgcagctgctgcagcctcctagtctcctcctccgcctgcgacagccgcttctccagctccaggtagtctcgcaccagctcctgcttgctgcggccctgcaggctctcggtgtggaagcgttcgtaagtctcagagaagtccttccgctggaactcaccgtgcgctcggccccgcccatcactgtccccggcctcactctccccactggaacctgggtgggagatcccatggggcacatccaagttgggctcctccgggtccctgtcattcatcaggaactgggtggtgttgtggggggccacgggctggcctttggcgaacatctcttcgcggacccgggaggccctctggctctgcctctcatcccgctgttgtttctcagcccagctcagctccaggtagggtcgccagtgccttttgcgcttcgatggccgccgacggtgtttcttccgggccagcacagcctccgctgagcagccccctgggctctgggtccggggactcctactgttccagcccaggccaccgacagccccagcaagatcttcatcctctgagtggctctccatccgcggtgtcaggggcagggaaccaccagagtcatgacgctcagggggtgtttgggggctccccggggcaccagaggtctaaagagagggaggaggaagaaggatggatcagacagcctgtccttggaggtggaacctttccctctctacctagcctgaagcctaccttcctacactcagctaacttggtcactcttagcccctcaaccttttggaaccatttgtttacaaagagacctgtctactgtctgtcccccaaccttccccaagtaaactcatggtgagagc

SEQ ID NO: 202183 - DNA, 1000 bp, Homo Sapiens
tcacccccggccccctgaagctcacaggaattttggggtctgaaaggcaaagctgaggcctgacccttcacatttctccccgccatcctcaccagcatctgccaagcgtggccacgggagcttttcactgtctgcagaggccagccccgcacactggcaggtccttgggcctccaatcccggggtctgtggggcctcatgcgacttcactgctcaggagtcgtgatccctcgagttaggtgattccctccacagaggttagtcctggagcggggacggagggccggcaggccaggccacatgaccctgcagagaggggaacagcacaacaggagcacgctgctgagccaactcccagaaaaggaaaaggacaaagtcctggcctgtagcatgtgccaggttctgtggcgtaaatgctcccaccctggctgatcgcaagctcccagctgatgtcaccgagcgtggggtcaggaagaggtgcccacagtcagctctcaggagccctgacaactggctccagtcaggcaggccacagaagacatgcaaaagtgaagaagggcgggtgcctgcaccagccacctggacaccaacactcaactaggatgtgaggccagatgcccccagctacacagccatggccccaggaggtgccctctgctgagggtcagcatctgagaccccttgggctgttgccgtgtctcacaaaggaaaggcaaggaagccgggcatggtggctcacgcctataattccagcatttcaggaggccaaggcgggcggatcacttgaggtcaggagttcgagaccagcctggccaacatggtgaaaccccatctctactgaaaaatacaaaaattagccaggcatggtggtgtgaacctgtggtcccagctacttgggaggctgaggcagaagaatcacttgaacccgaggcagaggttgcagttaagccaagattgcgccacagcactccagcctgggtgacagagcaagactttgtctc

SEQ ID NO: 202184 - DNA, 1000 bp, Homo Sapiens
tttaaaaggacccaatagggccaggcacagtggctcacgcttgtaatcccagcactttgggaggctgaggtcggtggattgcttgagcccaggaggagttcaagaccagcctgggcaacatagtgaaaccccaactctacaaaaaacaaatgttttatttttatttattttagatggagtttcactcttgttgcccaggctggagtgcagtggcgcgatctcggctcattgcaacttctgcctcccgggttcgagcgattctcctgcctcggcctcctgagtatctgggattacaggcatgcgccaccacacccagctgattttgtatttttagtagagatggcgtttctccgtgttggtcaggctggtctcaaactcccgacctcaggtgatctgcctgcctcggcctcccagagtgttgggattgcaggcgtgagccaccacgcctagccgggtttatagttttataacccttatgacaaatctcatagtattctgcagggataagcatgaaaccacttgttcaataagtgcaaacaaaaacgccaacaattcttaagacatttctaatcttattttaccaataattttaaagccagcttatgtattaaagatttataactacttttattaacacgtttaaaattctatgcagcttaaagcatttataatggataaaactgccaatactgagtgcctgacataatatttgaaaggtggcaggcattcaaccatggtcactgaatgagagatgtagggaagatgatggcagggaggtttttagatatcaacaccctgatagttctcattttaaccacctgtaagtgcacatacaagtcaacggcactgtgcctggctgatttttattcttttagttaaggctggttgatattaccttgtgtgtatataccacatgttgtttatccattgttgttgatggacatgtgggtggtttcaccttttggctattgtgaataaagctgctatgaacactgtgtac

SEQ ID NO: 202185 - DNA, 1000 bp, Homo Sapiens
atacttggccagaaatttttttgtatgtgtgtacctaactttacaggtagcttaacagtgagtcactttgaaattcattttattttcctctctgccatcctgggagggctttctgaaaaaatgtagttttctttggactggtgcattgttttggtccagactaggggtcagcaaattttgacctataggccaaaaacttgtttttgtcctttttttgttggaacacaaacatgttgttttcatgttgtctattctgctttccttctacactagcagagttggacagaaattatagagccccaaatatagaccctaaaatatttactctctggtcctgtatagaaatttgctgggccaggcacagtggctcacacctgtaatcctagcactttggttggctgaggctgttagattacttgagcccaggaggtggaggttgcagtgagtcaagatcacaccactgcacgttgagagatcatgctactgcagtccagcctgggtgacagaacgagaccctgtctcaaaaaaaagaaaaaagaaatttgtgaagttctactgctctagttatgcagggtggcaggatggcattggtaaattgacttgaagtgagaaaaaataatttctggttttattctaagtatttaaaactgtaaattcataaccatgattcatgattttgattacaagtcttatgaattcttagaacttcagaagtggccgggtgtggtggctcacacctgtaatcctggcactttgggaggccaaggtaggcggaccacctgaggtcagaagtttgagaccagcctggccatcgtggtgagaccccatctctactaagaatacaaaaactaattgggtatggtggtggcacatgcctgtaatcccagctacccaggaggctgaggcaggagaatcgccggaacccgggaggcggaggctgcagtgagctgagattgggccactgcactccagtctgggtgacagagcaagactccgtctc

SEQ ID NO: 202186 - DNA, 1000 bp, Homo Sapiens
aacgtgaccccactgcccttctccccaggtccctctggcctgcatgccaggagtcggtcaccgccctgtgcttcctccaagagacagtggagaggctgggtcagtcccccgcccaggacaccccggtcctggggccttgctgggacccgatggctctggggactcagggccgcctgctgctggacagggattccaaggacacacagaccaggatcagccaaaagggccgccgtctgcagcccccggggactccctcggccccaccccagagaaggccccggaaacagctgaacccctgccggggcaccgagagagtggaccctgggttcgagggggtgactctgaagtttcagataaagccggactccagcctgcagatcatccccacgtacagcctgccctgcagtagccgttctcaggaatcccctgcagatgctgttgggggccctgcagcccacccaggaggcaccgaggcccactcagcaggcagcgaggccctggagccccggcgctgtgcttcctgtcggacccagaggaccccgctctggagagacgctgaagatgggacccctctctgcaacgcctgtgggatcaggtacaagaaatacggcactcgctgctccagctgctggctggtgcccaggaaaaatgtccagcccaagaggctatgtggcagatgtggagtgtccctggaccccattcaggaaggttaaacccagcttcaccctgctgagctgctgcttctgcctccgtttcaccagtgggagaatgggcagaagcagctctcctaggaggattggggaaagagccggcctgcctcctctctgccatctccagattcaaggatcccgggggaagacccaggcctcaggtggcagagcctgctaggggtcaccagccccttctccagtcagccttggccgaggccccctcaggagacgctctcaggaaggatgagcattgttacagcagggacaataaagtacagagatatgccgag

SEQ ID NO: 202187 - DNA, 1000 bp, Homo Sapiens
accctcaatacccacggtcaccctggaagccgctacattctggctggtagagtcgtggaccctcttctccttggatcagatgcttgtttttgatgtcggcttgttgtggaccaatgtgagaagatgagcttcctgggaattcattcgtttgcttgtggcactaactctagtcacttagggaaaatatcgttgcacctgacttcatctcatgtggctgtgggtagacctgtgcagttagtcagctcccggcctggaaattaacacaaaggaaaaacctgaccacacaggccttccctagaggccacagctgcacagccttcagggaagctgtggtctgagggtggctggtagaactgccagagagtagggcattttccatggctccagatcaccttctgaaaatgcgactatagcccctgcctattcccggggtccacctggtctgcagaccccataataccaggaagagctgggtgttctggcaccagtgaaacaatacctggttttttattttaaaccagcccatcttccccgctgcagttggaaccgttctacgtggatttgggatcaaccagcaggcctttcctgagctgttactgtgtggagtgggcgctgaggctccagccattgatgcaaagaccccaatcctgacctgaaggcgctcacaatctctccccaacggcctggtgtgaaacgcagacgcaacgcagcaggcattctccccagtggctgcctgtagagcaaatggtgcagagatggtcactcctcaaaaagcaagccggctggagccagcccagctcccagttttgcaagaaaaaaaaaatcacagctccattttcaaagatttcaagggcagctcaagaccagcctggactagcaggcctcaaatgcattactggagacccctttacgctcttaacaagtaccgaccccaaagaggctttttgtataacaatgtctattgatatttactctactggaaattaaaagtgagaaattt

SEQ ID NO: 202188 - DNA, 1000 bp, Homo Sapiens
ttcagcctgagaaaatccagcagtttccatgatgatcattttctctctcgaatacgtgagaaagagctggacatgaaaacaaaaatgatggaagctaaatttcatgaagaaaagcttaaactgcaacagaaacatgatgctgatgttcagaagattttagaaagaaagaataatgaaatagaagaactgaaaactttatacaggagtaaacaacatgaaactgaagagactattagaaagcttgaaaagaaagttcagacactgatacgtgactgtcaagttatcagagagactaaagaagaccagattgcagagctgaaaaagatatgtgaacaaagtacggaatctctaaataatgactgggaaaaaaagcttcacaatgctgtagcagaaatggaacaggaaaagtttgatcttcaaaagcaacacactgaaaacattcaagaattgcttgaggatacaaatgtgcgtctgaataaaatggagagtgaatacatggcgcaaacacagtccacaaaccacatgatcaaagaactggaggcccgtgtccagcagctgactggagaagcagagaacagtaatttacagaggcagaaattaattcaagaaaaagcagaacttgaaagatgttaccagataacgtgtagtgaattacaagaagtaaaggcaaggcgtaacacactgcataaagagaaggaccatcttgtaaacgattatgagcaaaacatgaaactgttacaaaccaaatatgatgctgatataaaccttctaaaacaagaacatgctctttcagcttctaaggcatctagtatgattgaagaattagagcagaatgtctgtcaattaaaacagcagttacaggaatcagaacttcaaagaaagcaacaactaagggatcaagaaaataagtttcagatggagaaaagtcatttaaaacacatctatgaagaaaaggctcatgacttgcagagtgaacttgataaaggaaaagaagatactc

SEQ ID NO: 202189 - DNA, 1000 bp, Homo Sapiens
acgaggagactaaggctcagagaggtcatacaacttcaggaaagttgtatgacctctctgaggtaataaatggcagaactggaatttgaacctaagtctccttgtctgcaaatcctgtgttttgcagaaaactctcctcttgtatttcataaaatgttaaatcttggcccaaattcaaatcaccatctttatgggttattggagagaggtataagttggcaagactctgttccacgatgggaaaaaatgggtaggatttgaatgagtaagagtgggatacttgcacagtatcatatttgtgtggctggagtaatgtttttctgtttccctcttagcaaagtggagtgggagaatcttgaaattgaactcagtcctgaggtctgattttcctattattagtcactttcaagccaggtgatttgtgaccatttaaatgttatgctatttcaaagtcttctacatctttagaaaaggacatgagggagggttagttaagtggggcaatgagaatgtagagtgtaatgtgcaaaagcaggactagcagttgctttgaagatatctggggaaggccgggcacggtggttcacgcctgtaatcccagtactttgggaggccaaggtgggcggatcacgaggtcaggagatcgagatcatcctggctaacgtgaaaccccgtctatactaaaaatacaaaaaattaaccggacgcagtggtgggcgcctgtagtcccagctactcgggaggctgaggcaggagagtggcatgaacccgggaggcggagcttgcagtgagctgagatcgcaccactgcattccagcctggacaacagagcgaaactccgtctcaaaaaccaaccaaacgaaaaacaaaaattggctgggcatggtggcgcgtgcctgtaatcccagcactttgggagccaaggtgggtggatcatgaggtcagaagattgagaccaccctggccagcatggtgaaatcctgtctctactaaaaatacg

SEQ ID NO: 202190 - DNA, 1000 bp, Homo Sapiens
ttattttgggccgggagtggtggctcgcgcctgtggtcccagcattttgggaggccgaggcggggggatcatctgaggtcgggaagttcgagatcggcctggccaacatggtgaagcccctacctctgctgaaaatgcagaaattagctgggtgtggtggtgggtgtctgtgatcccagctacttgagaggctgaggcaagagaatcgcttgagactggaaggcgggggttgcagtgagccgagattgcaccattgcactccagcctgggtgacagagcaagactccgtctcaaaaacaaaaaaaattaaaataaaaattattgttttagctgcatgtcttcagctatttagaattcaaagactaatgaattgtttctaagtcaccctaacatcaaggtacttattttataaagaatttcctccttatttgtgttctaattgacccaggaatttttactttaataaaagtttaactttatttcctatggaaaatcactagggggagtgctccctcaggcagagcaggcgacactttggtgccactacaaattgatgtgtagtatatagaagaatacagtcttatatttaaagacttttagttctgtctttttgaagtttatctctctttctagtaaaatggtgcttactgtgaatggataatcttttttttcatttttcatttgttgatttcccattcgatgatgtagtgcttccaccgagaattgatgaaatgcttcaaaataataaaagtatttgttaaattccactttaataaaaataaggcatgtaacacagtcattttaacaggaagccacagggtttctgtggtgttaccaaagtcctagtaaaaattaattaaaattgctaaaagggcagaatgtggcactctcaacagtggggtaggcagtccttcagaacatagagacttccttctttccttccctgtcttcacattgcttgtcccttatccccacctgaaataaaatctattgggtcctg

SEQ ID NO: 202191 - DNA, 1000 bp, Homo Sapiens
tgtgatcagtgagaagggagggcctgatccaaggagcctcgggaaaggctgaactgaggacaaggaccctagacctctcacaggtttcccgcttcggcacacacgcgttcttctggctgtttccacagactcagagcctcttccccttggccccagcgggtacccatgataatagttgacatctattgatcatctcttatgccaggtaccatgccaagcgcttacccagaccatctcattcactcctcacaagaaccctttaaggtaggcagttactcccgccttttagatgaagaaactaacgctgcagtcacttgccctcatgatcaacgagtaaggagtgtggccaggcctcgagcccagtccgcctggctccagagcctgccccgcacaggctaccctcaccttctacagcccaccggccttaggaccctcagttatggcaccctgctttgtaggtgagggagctgaaacccagaagagatttaccctgggcccaaggcccacaaaagtagaccccctgactcctgattcagttccctccaccatgccatgcctgtgagctgaagcctgggccagccctgcttctgctctgaattcatgggaaacctacccagtccttacgttttcttctcctaactgagactcctgggttggaccgagttgtaattttatgaaaccctgagcagagagactgagatcagtgaagagggactgaacctcattttgccctcaggcatattgagccctaatgccatctaaaaatagattcccttacagtgtgcattcagtgaggagcttgacactcagggccctctcctgtgggccccacttggccagttaatggggaggtgagaagacttcactatcccctagaacacgcttacacttttaaagcttactacatactttgtctctgggtcaaaggttttttcaaagatgacagatacctcttgccattagcaatctgtactctgggcagctctccattttctctgat

SEQ ID NO: 202192 - DNA, 1000 bp, Homo Sapiens
tgggcatgatagtcactcgcttggcgtgaatggcgcataggttggtgtcctcaaacagccccaccaggtaggcctcgcaggcctcctgcagcgccatcaccgccgagctctgaaaacgcagatcagtcttgaagtcctgcgcgatctcacggactagacgctggaatggcagtttgcgaatcagcagctcggtcgacttctggtagcggcggatctcgcgcagagccaccgtgccgggccggtaacggtggggcttcttcacgccgccggtggctggagcgctctttcgagcagccttggtggccagctgcttgcgtggcgctttcccacccgtggacttgcgagcagtctgcttggtacgagccattgcgaacttctaaaccctgctaaatgacgaaaaaacgaaagtctagcctttcgtacccgtatatataaagacacccctgttctgattggacaaggcagcctttcccctgcagctcgattggtggagacgcccactccctgacagaacatctcctgcatgtagaccaaatattaaaactttcctccgtccatctttaactgctggtgttttcaaccctttcccctctgtgccatgtttctagcttttatttaaaacgtactttggttttccttggcaaaattgtgtctagctactaggatgacgtgtcttaatttttttttaaatgttggcgctgaaactggctttgatcaacgttttaaaaagacgcgcgctagttgtgattggccaagtgatttcttcttaccctcttaagtttagaaaggttaatttcatatcttgatttgtctatttaaacttggagatattttcaataatttgttccaaatgcaccatgactattaactcataagtaacaatatgaaacctgatgttaagctacatgaacacatttaatttcaccacaatatgacatcctcatatgaaagcactctcttatcttttacaagttcaactggtatttgtgtaatctgctgt

SEQ ID NO: 202193 - DNA, 1000 bp, Homo Sapiens
aggagatttttttttgcaacagatttttttgacattctaaaaatgacaaaaatgattacacatcataatcaagtgattaatatgcgttgtcgtttctccctgcgctgactgttccacagcagcgattcagtacagcagtgattcactgtgcatacttgaaacaattcagccacctctgatgttcaccatttgcagagtaaactttgtagtagggagaactttcaaagaaccatgacctggccccacactgagccctgacccagtgtacagaaagacctgagtttctgtacactgaggctctggcctcaacttccatttgagtgtagagctggatgggggtgtgctgagctccctggagaagagaaaaccatgccttcctgtgggcagccccagttcaggggatccaaactgaatggtgatagagacatggctcccaaagtactgttctcctcattctaccgccactggctcaggtcaagccccactcctggcctggatcattacaattgtcttctagttgctgtctttctgctcagtcccaaccctccaagccatcctgttattctgaaattcacatctggtcattcttcccagcctaaggcctgatccactgctccccatgtcctatgggaaagtccccattctctaggtggcactggaggcccttcaggatctgtctctaatgtcccttccacactcctttcccagctgtccccaccacactgctaacaacctggctgcattgacttttttggatcttcctcaacagtctttgtacttttcacgcctctgtgcctttgctcaagccgatctctttagctggaatgcccttcttcctcgggtgaaatattccttatattttcaggttgaacttaaaaacattttagcctgggtgcggtggctcacacccttagtcccagcactttgggaggccgaggcaggcggatcacttgagcaccattgcactccagcctgggcaacaggagtgaatctccgtctc

SEQ ID NO: 202194 - DNA, 1000 bp, Homo Sapiens
aaatttgaagttaatagaacacagttttgcattcattcagcaagtatttattgaatgtctactctgtcaagtgctagggatccacagaaagaatcagacatggtttctgtttcccaggagcacgtggtcagctagcacagggaataaacttaccagtatgtaaatattcacaaggtcatagaatggatgagtgagttgagagacattcaacgttctatggcacatcacatagaagaagcaactgggccgggcgcggtggctcatgcctgtaatcccagcactttgggaggccggggtgggtggatcacctgaggtcaggagtttgagaccagcctgaccaacatggtgaaaccctgtctctactaaaaatgcaaaaattagctgggtgtggtgatggatgcctgtaatcccggctactcgggaggctgagacaggagaatcacttgaacccaggaggtggaagctgcagtaagctgagattgcaccattgtactgcagcctgggcaacgagcaaaactctgtctcaaaaaaacaaaaaaagagcagcagcaactgactggttggatcaggaaagactctgagaaaggactcctgacctggctcttccagaatgaggatggattttccatatgaaggagccgggggcaggaccttctgggtagagcgtgaaaagaacacagtatgtgtggagagcgggaaattgtgttgaactgtctagaaaacagagccacaggaatgcgtgttgagggcttgggctgtacagtggagagtgccctccctggccagggagttggacattcatcccaccacaagaccccatgaagagttcctcaacagctctgtgtcctcatcaaacctgtgtttgcagaacagtggaggaagagagctgaaggaggggagaggccctgcacctgccaggccctggcctagactacaagggtgagcactgagccatgctctcggggaaccttcactggagttgagggcagtgagaatgttt

SEQ ID NO: 202195 - DNA, 1000 bp, Homo Sapiens
actacaggcgcctgcgaccacacccagctaatttttgtatttttagtagtagtgggatttcaccatgttggccaggatggtctccacctcctgacttcatgatccacccgcctcggcctcccaaagtgctgggattacaggcgtgagccaccgcacctggcctacctgggcttttttggacagatgtacatgattttagaaattgttatgaatgactgtcttgggatcctcaagaacacccccaggtttgacgatttgctgagaagactcaggtctcagcattctgtcatactcaacagctatgatttactgcagcaaaaaaatacaaagcaaatagtaaagggaaaaaagccaaaattcagagaaaaccaggcacaatcttctgagtcttgtttcagtgaagtcacaggatgtgccttatttaagttccatctggtacttatgacaacacatgctatatgtccactgggaagcttattagagactcagtgccagggtttttattgggcatgttttctagcacatcccacaattctggacttccagaaggttagcaggggttcagcttttcagctgaaaacgttatccccctttcagctgggggggaaaaaaggcaccgaaaaacagggcactgagctactcctgttttgggtgggtggagcagtagtaagcctcccaaaatctaaggtcccacactccagcaagggtgaaccttgcaaactcaaaaggatagcagtctccaacctgctgttttatacagtgacttaagtggtactaaaatgctatataagtcaaatttacgtaacattaagcaaataattttttttcagcaaaaaaataatggtcatgactttgtggtgaaggcttatgtaatgattgtaataaattcaggtggctcacgcctgtgataccagcacttttgggaggctgaggcgggtggatcacttgaggtcaggagtttgagaccagcctagccaacatggtgaaatcccatctctac

SEQ ID NO: 202196 - DNA, 1000 bp, Homo Sapiens
ggggtgcctcactttctcagcctgaagctctgaacccctcgggggagggagagcatgcaggtgagcaggtgcaggagctagagcaagcacttttggccaccggcaggatcaaaactccatgcagtcccacagcagtgcctagggtagtacccatgacccctggagccccagagggcatgcgttacaatgctcttttagctttgcagtccaaggacggcttaagtatttaacagctcaatagaccttctactttttcatgaaggcagagggtcaatgtgacacttttctgtatcctgagctcttgtccagcatccatgaaaaatcaggtcatatgaacaaattgaaggatagtaaacgcgggggattttattgccattgaaagtggctctcagcgggagggagagagctggaaaatggggatggagtgggaacgtattcttcccctgaagtactgccatcaagcagtcccgctaaagtcaagctgctgctctccgactcagactgcagtctccgacgtgcagctgcttctcctcttctctgctctgtgccagtggagcctgggatttttatgggtacaggatacggggtggggtaggccaggggtggttttggaaaaggcaatatttgagcaggaaaacaggaatgtaaagttctcactttgggcttgagagtgggtcttggccagggaccctgccctttttctgtgtacaatttctgtgcctcctgtccctctcagtctctacagaatgtctcagaaatctccatagtagaggatcatcattactctgcccctggcttctgttttattctgctatagtttaagcatctttatgaattttatttgacccagtttttgaattgtctgtcttacacttctgtaacctctctttcaatatcattttcttccagttccatttacaaaacagtccactattcttttaggattaataattttatctgcctgacctcatcttcatgttttctgattcttctggtgtat

SEQ ID NO: 202197 - DNA, 1000 bp, Homo Sapiens
gaagccaaggcgggtggatcacctgaggtcaggagttcgagaccagcctgacaagtatggtgaaacccaggctctattaaaaatacaaaaattcgctgggcatggtggcatgtgtctgtggtcccagctacttgggaggctgagacaggagaattgcttgaaccctggaggcggaggttgcatagagcctagatcatgccactgcactccagcctgggcagcagagcgagactctgtctcaaaaaaaggaaaagaaatacataaatacattttgtaatgccatagctaccataggcagtgatgcctccagtggatctgggcaaagtaaattgaaaaccttgtggagaggattcaccattccagatgtcatgaagaacactcatgaatcatgggagaaggtcagaatgttaacattaattaacagtggtttggaagaagttgatttcaaccctcatggatgactttgaaggttttaagacttcagtgaaggaaataactcagatgtggcagaaacagcaagaaaaataggatcagaaatggagcctgaaaatgtggctgaagagctgcaatctcctcatcaaacttgaacagatgtggagctgcttcttaggggtgcgcagagaaagtggtctcttgagatggaatctactcctggtgaaaaggctatgaacactgttggaatattggcaaagaatttagaatattacataaacttagttgacagtgcaacagcagggtttgaaaggattgattccaatttccaaagaagttctactctgggtataatgctatcagtgtcacatgctgcagggaagtcttttgtaacaaggggagtggtggcaaatttcttgttgtcttactttaagaaattgccccagccaggccaggcgtagtggctcatgcctgtaatcccagaacgtttggaggctgaggcgggtggatcataaggtcagagttcacaaccagcctggccaacatagtgaaaccccgtctctactag

SEQ ID NO: 202198 - DNA, 1000 bp, Homo Sapiens
cattagacataattcagaaaactcttgaattcagtaaacatctgttgaactttttccccgttccatttacagttctaggggcagaagaggcaaatatgttcctgaggagaggcagataaacaagacaagttaaaatgccctaagataaatgatataatgggaaaatgaattcaaatctaggggtacagcaatgaagccattcattttggagggaggagggtgtggtggggagtggcatcagaactgtggaccctgaagcatgtgttcagcagccaagccatgaggagaagggacatgcgagcagaggacaaagcttgagcacaggcagaagggcatgaaatgtgactggatccccaggcaggctggactggccagaaggcagaagcgcctggctggagggccacttggcaccagagggaggaggtgtttttgtgcagcgccaagaggctgggcttgattccataggaacaaggcgtacctttaagcagggagtgcttttgaggaagtgccaatggatgttggaaaggaatcattaaagtgaaaaagtaggcagtgagaactgttaggacatgaaaaataagagcctgaccaaggaagaaggcagatcaggaaatgtttcagacgtaggaaacaatggttaatgatcttgtattttttttttcattttttttctcttagatttcagaggctttgaaaaaatttggtatctcagcaaatgacacttcaattctaattgtttacattgaagagggagaaaaacaaataaatcaagaatacctaatatctcaagtagaaggtcatcaggtttctctgaaaaatcttcctgaaataatgaatattacagaagtcaaaaagatatataaactctcttcacaagaagaaagtattgggacattattggatgctatcatttgtagaatgtcaacaaaagatgttttatgaaatgtcagaaatattaacaaaaattctcagcattaaagaaaacattgattttcctttc

SEQ ID NO: 202199 - DNA, 1000 bp, Homo Sapiens
cattttgcaccttgagagacaggaaaaaaaatgggggtgagggagtggaagatgatgaaactatttctcttttatgtctacatccttactcctcaaaatactttaagctcactcagaccccatataccctgcccacaatactaacacatgtactttgcataagtaaattgttgattaaataagagcaaaactatattcttatgtgtagattaaccaaggctaatttcctggagtttaatacactttggattcaagtaaaaacaatcacttaatgcagcaacatctcagaccctcttcactctagaaccgttttatacaagagaactcaacatttactgttttatttctgatattgcctgccattactcaggatgcaagagatgctctgcattccttattaggaaaaattggcctgtaaggagaatggtatactgcgtattactactgcgagactgtaaaattgttaatggacagtgtaaagaattgtattcattttattagcaagaaaaatattgcatacaagaactactgccctgaaatatccatcactccaatgaactgttctgcctgatctaacataaagttatatttcattgctcatttttttttgcctcactaaaatgactaacttaagggaatgtgcatttctacaagactttaattggataaactcattagaagaaaatgtttcgattgcattcaggaacaaagaagcataacctttgttgactcttgtaatttattatatgcttcatttaaacccattttgtaaagaaatcaggtaacagtcatttaatctgatataattagaaatagctgagagagtaaaaaagcattttgaatgtcctatgtatggcatatcctgtacaccaattgaaggtcagagctttggtatttttgtataattctgtcttatctggtgcatcagctgtgtattttacgtcaaggtaaatgagcatcctgttttatatgttaaattttaaaaatgacgttttcaaag

SEQ ID NO: 202200 - DNA, 1000 bp, Homo Sapiens
ggtgcatggtccgtgtgtgtaattttgtccggagcagtaattctcggagtgggccccagacccgcagtgtaagcattgcctggtgctgtggtttggacgtgtgtcccctccacatctcatgttgaaatgtatccccagtgttggagtgaggcctacggacaggggtttgggtcaagggtcagatccctcaggaatggcttcctgccgaccccacctgccagtcatgagcgggcccttgctcaattagttcctgcgtgagccaggtgttaaaagagcgtggcccctccctccctttggcttcctctcccactgtgccctctgcacacatggctccccttcaccctccaccctaagtgggagcaggctgaggccccaccagaagcagattctgttgccaggcttcttgtacagcctgcagaactgtgagccaaagagaccacttttctttagaagttgcccggccccaggtgtcccttgatagccacacaaatgttcacctgtgaacttgctataaattcagattctcaggccccacccagacctgctgagtcagaaactccagcaggggcctggaagtctgccttttaccaggaacctgtgtgattcccatacagagtttgagaacctctggtctctggaactgcatgctttaaatgggtgcattttacgtatgtggattatatctttaaaaagatatccaaagacaaacaaaaagataattgactacctgaagcaaagacgggaaaagtgtattgtggggtttgtaacatgcagaagcaaatctgtggtaacaacagtaccaaggatgggaggcaggaagtacaggcgctgctgtcaggttactacatgtatgtgaagtggtagaatattgtgtaatggcagactgagaagctacagctgtaactttatcataagccctattgcaaccatgaatagctacactaagaggtataacaaggcaatagtgaagatgaaatgaaataataaaaaaatactcagc

SEQ ID NO: 202201 - DNA, 1000 bp, Homo Sapiens
ccagtggccagcccacgggtcttcctgccctagccccaatccagccccagggaggcagtggtgccagcctcctgcccgcacctgcttagagactttgagccacgtctttttgagccggaagattgcactgcggttcatggacgaggtgatctccagtacggcattgtagttgtggaggcagcggcatatgtcagctacggccacccacttctcgatggcgctcaccctggcgttgatgtcctcattgcggatgattctgaagcaatcaagttactgatctttaagccgatgcaataagacagggaaaaagaggagtaagtattgcaaagatgataaatgatcactatttgcagatatgattgcctgcttgaaaatacaagaaggaattggaaaactacgagaacaactaacagagcttgctagggttgctggctaaaggttcaatatacaaaaatgaaaagtttatatatacattagcaataatcaattagaaaatacaacaaaaatacaaccttccaaataacaatgggaatctgtaaatacctaggaacttaatgagaactatgtaggatggaaaaaacaggtcaccaaaggatataaaaggcttgaataacagagaaagagatcaaattcccaaatgggaatgtaaatatgtcatttttctgacaactaatacatgtgtttaatgtaatccaataaaacactcaggccgggcgcggtggctcacacctgtgatcccagcactttgggaggccgaggcaggcgaatcatttgaggtcaggagttcgagaccggcctgaccggcatggtgaaaccctgtctctacaaaaaatacacacacaaaaaaaattagctgggcgtggtggcgcatgcctgtaatctcagctacttgaaagactggggcaggagaatcacttggacccaggaggtggatgtttcagtgagccaagattgcgctgctgcactccagcctgggtgacagagcgagactccatctcag

SEQ ID NO: 202202 - DNA, 1000 bp, Homo Sapiens
gtttctctgcacagaaggtggaaatcgtgtttttatgaccagagcttccttcttcccatgacttccccttataagattgtgtcttctctgggaacaattagatattaattatgcggtaaatgctttttatagtgccaaagattctatatatgcctgaaagaaaataaaataaaacaaacaacactgttcttcaagaaaaatggagtctcaccggtgagcaattcttatgaaacaggagaatttggcttggcagaagccacggggccatcccaggtaccactgtgagctgctccatcctgcctccggcacctcctcttcacccggcacctccttgtgccatcccgaggccgtcatccctccaccctccccagctccacggagccctccagtgctccaggccactgactctccgagtgggtccctgaaccagcagcatcagcattactctctgcaaacttgtcagaaatgcaaattctcagaacaccccagaccttctgagtctcaggacagtgaccggatgtacaagagttggagaaccagtgcctgggccttttcttcccctcttctctccattacgaaagaaaaacaatgctacatcccttccagtggggagcccatgcgcactgtgacacgctgtgctgtgtgcattccaccgccacttctgctcagtgtcccgacacagcagacagtgagagcagcaggacagggcaaaggtacagccagtgctcacgctgctgtgatctacacacagcctcagccagacccagcgcatgggtctaactctcaggtatctattcagacatggtctcacagagggccaggcagccttggggcccaatcacaagccagttagaaaggccacggagtacaacaatcactggttaatgatgtcataacactttgagtgctgcctactaattatgacatcattaacaatctccagcactttgcaaagagatccccaagtttgctctttcacccacagtaaagacactcccac

SEQ ID NO: 202203 - DNA, 1000 bp, Homo Sapiens
catgtgccagatactgccccaggtttttccacgagctccagcagctggtcagttgtggccacctggggagggcccaagcgcgtctccagggcctgtcactgctcctaggatgatgactctcactcagggcacagcagtcagcactgggcgttctgcttgcaggtggccctgtgcacatttgccgtctacgtgaccattgacgagaacaacatcctggatgcccagacagccttcgtgtctttggccttgttcaacatcctccggtttcccctgaacattctccccatggtcatcagcagcatcgtgcaggtacagggggaagctggggcgacttccgagagggggccttggggttctaggccacgaaagcatggaagtgcccccgagcgcagcctctagatcacactcccggtcgggctccatgaggcccggacaaaggctgccatgctttcgtctggtcatgcctgaaagaaagaaaacacatttgacttcttgacagagaactcgcacttgagtatatgaatcaagtttaatgcagcagggctttcccatgctctggaagaatctttccgaaatactctgttctcttcagcctgttcctccgccattcctatcctttttttaaaaaatgtagctcttgtctgacttgattgattttacaacccactgataggtcttgaccacccacgctttgagaaaccccaaccttacagccgggcgcggcggctcatgcctgtattcccaccattttgggaggctgaggcgggtagatcacctgaggtcaggagttcgagaccagcctggccagcatagtgcaacctcatctctgctaaaaatgcgaaaattagccgggtgtggtggcgggtccctgtggtcccagctgctcggggggctgaggcgggagagttgcttgagcccgggaggaggaggttgcagtgagccaggatcgtgccattgcattccagtctgggtgacacagcaaaaactccgtctcaagatt

SEQ ID NO: 202204 - DNA, 1000 bp, Homo Sapiens
ccttacccccaacccagtgctctctgaaacatgtgctgtgtccactcagggttgaatggattaagggcggtgcaagatgtgctttgttaaacagatgcttgaaagcaacatgctcgttaagagtcatcaccactccctaatctcaagtacccagggacacaaacactgtggaaggccgcagggtcctctgcctaggaaaaccagagacctttgttcacttgtttatctgctgaccttccctccactattgtcctatgaccctgccaaatccccctctgcgagaaacacccaagaatgatcaataaaaaaaaattaaaaaaaacaaaaacaaaaacaaaaaaaactgggcatggtggtgcatgcctgtagtctcagctacccaggaggctgaggtgacagcattgcttaagcctgggaggtggaggctgcaacgttgtgagtggttgcaccactgcactccagcctgggtaacagagcaagaccctgtctaaaaacaaagcaaccacacacaacactggaggacaaaaggcaatgaaatggcatattcaaagtgctgaagaaactgtcaaccaataattctatacctggcaaaactacctttgaaattgaagagaaattaagatattctagataaataaaaactgagagactttgttgctagaagacctgccctataaggagtactaacgtgaatctgcacaaagaaataaaaagcactggctgggcgcagtggctcaggcctgtagtcccagcactttgggaggctgaggctggaggatcacttgaggtcaagaggttgagaccagcctggcaaacatggtgaaaccctgtctctactaaaaatacaaaaattagctgggtgtggtgttgcgtgcctgcagtcccagctactcaggaggctgaggcactagaatcgcttgaacctgggaggcagaggttgcggcgagtaaagattgtgccactgcactctagcctgggcaacagagtgagactctgtccc

SEQ ID NO: 202205 - DNA, 1000 bp, Homo Sapiens
gcctcggcctcccaaggtgctgggattacaggcgtgagccaccgcgcctggcggacttttcttaaaactgatgcaaaaataattcttatgtgtaagagattagatcattactggccttaatttctgaactcttggaaaaattaaacacctcacaataaatgaagcatcaaaacagtatttccctgtgttaccattgaacagtagcaagagcttactgctgcagttagaaaaaggattcatagaaacagtgaaaggtatagattgaccagctatctaaagtaattctatagcaaggattacagtgaagaaacatggagcaattagatgttttttctgttatatttactccagttgattgtttaagtctcataatcttatgtgccagatggaggagtattggctgaatagaccatcagtgggtacattttagttgattaaatagccaaaccatattggaggatggttctcttaggtctccagtgttttgtagagactaatttttaatcactgagtgatgaagccttgaagagatgcttacgaactttacagttagcataaagccaggggggtgtttcaaccattatggatgttaaactaaggattattaaagatcagaccaggcacagtggctcacgcctgtgatcccagcactttgggaggctgagacgagtgaatcatttgaggtcaggagttcaggatcagcctggccaacacggtgaaaccctgtctctactaaaaatacaaaaaaaatgagccgggcttggtggcgtgcgcctgtaatcccagctactcaggaggctgaggcaggagaatccctggaacccaggagatgaaggttgcagtgagttgaaatcatgccactgtactccagcctgagcaacagagcgagaccctgtctcaaaaaaaaaaaaagaaagaaagattgttaaagatctactttggtaaaatgtgaaggaattaaacattccagttaaaaggcagagagtgtcagactgaattt

SEQ ID NO: 202206 - DNA, 1000 bp, Homo Sapiens
caaggacactgctcaaaatggcccctccaactgggcacagctctgtaccaggaacagtgccaatgagcatgtgtatttgtgtgtttttatacccaagtgctgtaaaagaaggcggtctgcttaaagacttacagttccaaagaaggcaaatgtaagggcaaaattcatgatgctctgtcaccttgagcttcagcttcctgccttgttgatgaggaaaatgatccctactaagccaggtgttgtaaatagtaggcaatatcataaaacccttagcaagatgcactacatacaaggcaatgaagaaaaagtggctactttttcttcacttttgtttgttctctgatctgtgcaattatttgtaccaaatatacttgaagtatgaagttggtggctattgtcacaaaggtaacaaaacctgcttttaagagacttggagtttatcaaaggttacatgtagacagaatgaggcccagtagacttttcaccaggaaggcagactttgtcctgggccttggaagattgcaaagagaggaagaaagaaaaagtttctccttacactgggaaaagttcatgcaaaggcagagaggaagagcagagcccgagatgttcaagacagggctagtgtgtagcaagtaagtgatgtggacacacacagccagttttcctgctggtttaccaggtaaaatcaaaagaccctcatgccagccaggcgcagtggctcactcctgtaatcccagaactttgggaggccaaggcgggcagatcacgaggtcaggagatcgagaccatcctggccaacacggtgaaaccccgtctctactaaaaatacaaaaaattagccggacgtggtggcaggtgcctgtagtcccagctacttgggaggctgaggcaggagaatggcgtgaacctgggaggtgtagcttgcagtgagcagagatccagccactacactccagcctggccgacagagggactccgtctgaaaaaaaaaaaaaaagag

SEQ ID NO: 202207 - DNA, 1000 bp, Homo Sapiens
gagggctggggagggtccttccagctgaggaagcagcagccagggctggcccttacccacacgctcagacttcatggagtcccagacattgcagttgaagtcgtcgtagccagcgaatagtaggcggccactgagggagaaggccacggacgtgatgccgcagatgatgctctcgtgggagaagcagatcagctcctggtctgcccgcaggtcaaacaagcggcaggaagcgtcatccgagcccgtgcagatggcctctccattggggaagaactgagggcacgggtggcaagtgggtcagggatcagacctgggcagcccacagcctctcccgccctctgcctcccacctgacagctccagggcaagccgctgctctcagcctccctgcctgtccctcccttggtttggggtgagaagcagccctgccaacacataccacgtgccagtgacttccctatgcccctcgcccgctctgcactatacagcgctgcaggcaggcatcatttccacgtcgcaggcaagagcaccaaggcttgcctgcagtgacccggctagaagggcggacggaggttgtcccagactcccagactacacaagtgggctggatcagggtgtgtaagaacagggtccagtacaaatgcaaggcctggatctcacggcgagcaaatgtcagataagctcaaacggagggagagtctacagaaaactggtttgtactcttcaaaaacgtcaatgacataaaagacaaaggtgggaaaacagttccagtttaaaggtggtgacgaaaaagatatggcgaggaaaggtaatgcacgtttctggattggatcctggacagaaaaaaacatgagctattatggacatttttgaggctattggtgaaatttgaatatagactgtagactgtagtattgtgtcaatgttgagtttcctgatcttaagaatcatacagtgattatgctacagaagggctttgtttcgggaagtacttaaggggt

SEQ ID NO: 202208 - DNA, 1000 bp, Homo Sapiens
ttggcttcaacctcaagttccagcttcatcagcctttaccaagagagtcagtctttcctttgaagctttgaagccagatattgacctctctctagctgtgaaatttctagatggaatcttcttccaatttaaggctgttttgtctctattgaaaatctgttgtttagtgtaaccaccttcatcatttatctcactcagctggatcttctggcttttcttgctgagcttttctgtcagcatttgctgcttccctttgcagttttattgttttctcccttaaatcgtatgagccacctctgccgcttcctcacctctctcagtcttcatagaattgaagagagttagggccttgctctggattaggctttggtttaagggaatgtaatagctggtttgatcttaaatccagaccacaaaagctttctgtatgtcagcaataaggttgttttgttttcttatcattcatgtgttcactggagtgacatttttaatttcctacaataattgttttttttttttgtatttgcaatttggttaactggtgcaagaggctgagcttttggcctgtcttggctttcaacatccttcctcactaagcttaatcatttctagcttttgatttaaagtgtgagacatgcaaaacacacagaggccattgtagggttattaattgatctaatttcaatattgttgtgtcccaggcaataaaaaggactgaggagagggagagagatgggaacagctaagtggtggagcaatcagaacatacatatttattaagtatgctgtgatatgggcacagttcatggcaccccaaaacaattataatagtaacaccaaagatcacacatcaccgtagcagatagaataataatgaaaaagcttgaaatattgtgagaaatacctaaatgagacatagagctacaaagtgggcacatgctgttggaaaagtggtaccaatagacttcctcaacagaattgccacaaatccttagattgt

SEQ ID NO: 202209 - DNA, 1000 bp, Homo Sapiens
agtaattggctgggtctctggtgagtccatttccctgcgttgccccgaggtgtatgcaggctttacacagctaccttggcaactgacttccccaatgtttgctgtgtgtccaaggacgagcagggatctatgacactgggtgtttctagcaaatttccctctcaaattggcacattctctgtgagctttggagacttcacagtgtggctcacagtttgggaacaatttgcatcatcatctgactggtaagttctagttctgtggtaactcaagtgtttcaaatagcttaatacgcaatagggcacggaggttcgttctgcttctgttggaatcaaacacacatttccacaatgttcccgttatacaggatcatcccgaaacacatcccccagaacactatgttgtcactactctaccttttgatatacactttattattattcctatgtgcagataggttacttaagtttttctgttctagattagtttgtctattcaaatacatgtttctcacacacttctacagtgtttttctttttgttgttattcttaaagtgttctatgaaaacttccatgttgtatcaaggctgggtggtagctttgtaactagtttcccaccttagaatgactgtctgctttgtccaggactgcaagggggacttagaatatgggatttttcagtgctaaaactagaaaagtctgagacaaatcaggacaaagtggtcaccctgctaccatttctagccttgataaaggagcaggtagacccaaccaaggataatttttgttttctatgtagataccagtttagtggttggtaggaattcccccaaatcaacaccttgctaagctcatctctctctctctcttttaatataacagcttattgagataaaactcacataccatacaattaatgcacccatttaaattgcgaaattcagtagtttttagtatactttcagagttgtgcaaccttcatcacaatcaattttacaac

SEQ ID NO: 202210 - DNA, 1000 bp, Homo Sapiens
atgccaggcgccaggtggcccatgccccctaggaggagaacaggagagaacacagcgtccttctccctcggatccctgccgtgcaggacagcttttgctggggattgagagcaccagatggtcaccagcgatggtcacctgcagcggcaagggtgcactggtcacagttgctggttgcagggccctggtcttcttcctgccagctctgtcctctcggccatgtgcactcaacccaaaagaacccattctgcctctgtgtctggccccagaatatgatgtctacacctcctgcctggtgtccctatacaacagattcttgactgtgggcactaaggcggctgctcatcaactctccgtcagccaaagaggggcttcaattcagtggattttaacccaaccatgccactcactttgctttttcagtcacagttgactgccatttctcacagaggtcacccatggtttgtagtgacactgggccccgcacccactgaagaccacatctgaggcactgagcaccatcctggctggcaaatctgcttcccctgtctgtggggggtgagggagacatcagcctcgtgttttgtgtctgtaatatcaccgccgtttactgagtgcctcctacgagccaggcactgggccgtgtgctttacacgaaatgttctatgtaacacttgcagcagatctgggtagcccatagcctaccaaagggcaaatcgagcttcagagaaagtgagtcttgcctgaaagccagcacctggcagaggtgggctgaggtttggatctggttctgaagcacgttgttcttccccgtggctgtggctttgttcacattagaccacctgacaagtctgcccacctttcccgtctttactggataaaggtcagatcctaagtgtattggaaagttcaaggcaacaggatctgaccacattgattttctaaatgacttccaataagactaacattgaagagtatcaggagcttttccttcctttcc

SEQ ID NO: 202211 - DNA, 1000 bp, Homo Sapiens
gacacgtgcttgtgcatttacccgccctgttggtttctgtagctgtctagttcctgctgttcctgtctcacctgcccctttccttatgtgtagtttcttcctgtgacagggagaaacctggctctcagattgacaggacattcgcttaggccatgtcagtgctgtaggtgaactgttcaacctgtgccccagggaggcgcagtcactatggaggcaccttacttccttaattgtgtactgttgtttttgtgtttgacctgtagcatctaagtactggtttcaaaagttgcctagatgagttcttttctttctttccacctcctgcaaattatgtgatttgcataatttgtacatagttaggttcatttgttagtttgtattccttttggcttcccccatatcctcgttgactttttctttcttttgtaacttacatatgttatgaaatttatatgaggatatataattttcataaatgtttatggtttacatgtattagttgttattattaagatcaccctgggattgactggccaagcatttggtggaagatagcaataaataatacatcataaaagactttaatgtaaaaataaagccatgaaagtaccaagaaataaatcttctcattttaattacatcagcttgtctgtgatcatgtagcctaaggtaggccagagttaatttttgtgttatctatacacgttattgaagcgaattataaaatgttttagcatgttaattacttgtaaattaatatctacatataaaaatgtgagcatatattctatttagtatattaatccttcataaacaagtaatgcaagttagtattaatgatatcttaagacttaacattccttttttagtttgtgttgaataaatgaacatctaagagttcatgatgatgcttaaggaaagaagcctcatgtttacctttggaagttgtaaggcactgactcataaaaattggcaaataaaaggaaagaatcgggcattt

SEQ ID NO: 202212 - DNA, 1000 bp, Homo Sapiens
agcgattctcctgcctcagcctcccaagtagctgggattacaggcatgtaccaccacacccactaatgtttgtattttcggtagagatggggtttcaccacgttggccaggctattttcaaactcctgacctcaagtgatctgcctgcctcgtcctcccaaagtgctgggattgaaggcgtgagtcaccgtgcccggcctgcttcgttcatgtaactaaatatttgtgaggccctcaggttgtgttcaggaggaagagacacaggaacacagatggagggcaagagggacagatggctctagctgggctgcctgggtgagatgctggggcctggccaggacagtgtcagttcccagaggtcctgggacaggggagaagggaggtcagggtcacagagagagaggcaggaagtagcaaaggcagagtctgcctgtgcaccaagcccgacccccctgctctgcccctgggccgtctctacctcaccccctcagctcccccggtctgagagaggggaggccgagcaggctgcagacccagccacatggggcaggggaaggagaggctggcattggtggagccacccactgcactgccagtcatacaaagaagtctatcacacagaattatgtgcagtattttttttttttgagacagagttttgatcttgtctctcaggctgggttgcaatggcacaatctcggctcactgcaacctccacctcctggcttcaagcgattctctggcctcagcctcccgagtagctgggactacaggcggccgccaccatgcccgggtaagttttgtatttttagtagagaggtttcaccatgttggccaggctggtctcgaactcctgacctcaggtgatctgcccgtctcggcctcccaatgtgttgggattacaggcgtgaaccaccgcgcctggcctatagtactttttaatgaacgaaatgactatgttactggtttatgtatttgctatatttttattgttttaaac

SEQ ID NO: 202213 - DNA, 1000 bp, Homo Sapiens
aatcttttatgcatcagtattagatggatcaattaatcactgagataattttagttttctttcccttgactgccagtaagcttaactttgttatatttatttattagttataatcattagctagttttctgatggaatttttaccttccctgttacatggctcttacagtgctctcgtctttctccttgtggcatcattgtacatatgtattactgaaagctgtttcttttccttttgaagtaaatggaatataattaatataaaattctgtttaaatccagagcaagtatctggcatctgctaggccttgttgctttgctcatagcagacattaccaacctaagccttcctgctaagcctagacttagcagactacattattacacaaatcagtcagcattggcatctatttgtcatctattgttagtaattccctaagacagctgaactaagacctatagaatgagcagaaattttgttaggaaataaccagtagcttagccctactgtaatagaaagtaccttgagaaaatgacagtgagtggaggcctaacagtcatgtgttcaggaggttactgtgataatccaactgagcaataaggagacctgaattaaggttttggcactagggatggaaaggagggggtggatgtaagagctatttggaaggtaaaatcaacaactattgataattgatagtgagagagaaagagagagaggtgtctaggaactgagcttaaccaagggcattcatttgttattgtgctgtaacttgcatttgctaacgtacattcatccgtagtagacaggacctcaaaaatctaggcggatgactttttactttgacagcggaattacccttctaaaaataaggaaacccagctaggcacggtggctcacatgtgtggtcctagcactttgggaggctgaggcgggtagattgcttgagctcaggagttcgagaccagcctgggcaacatggcgaaatcccatctctac

SEQ ID NO: 202214 - DNA, 1000 bp, Homo Sapiens
cgaaatgtcctgaagatattggcattccccagaataccaatacatggtggggtggggagaagtaccctttagagtctggtggaaattacagggttttgggaacaagggcaaaggaaaagattggccatttttatttgtcattattttggaaagtaaagtactgtgtttgattctaatttataattgctgaagaaactggacagattgaagggatttctgagatcttcagaactgggcccttatcttaatcttcagaaaggagagggcttaatgtaagccttaaaagcatacaagcacttactgaccaaagcctaaaagaaatcaaagtataggttaaatcgggttcagctctctcaccatgatccatgtttatttcctaggaaaaaggagctatattaggtagaactgctctaacatttttcccaaaattaaaaaaaattctattaatccactttcatgtttacttataggaaattccttctgtctgttatacaatgcttttgctaagtggtatatttactatgtctgtaacaagaaaattacatattaaatgattcactgcattttttatttgaaatttttaaggtatctgcatgtaaaatcttcagctggtggatggtgacttttgaagaacaaaaggctttggcaacagaaaacaattgttctgggtgatttctagaatggtttttgttgagtctctgaacatcctaaatattggtttgttattcttttccagaaagaaaatgaatttgactggttcacctgtgtactgagtattgataaactttgaatttttttaattgccttcaattgggagagaaagctttatatttgtaagaaatatatttgataaagtttcttaaagcaacaccaaaaaaacaaaagaaaagctaagtgaatttttgcacattctacacacagtgcctgtaaatctcatttgtattttcagtttgcccttaattttttttgttagtgtttagaaaacaatgttttaaacatt

SEQ ID NO: 202215 - DNA, 1000 bp, Homo Sapiens
atacatcttctatgaagggcagtttatcagtcactaaattacaaatacataaaccctttgtctcaccaaacctgctgggaatgaatcctacatatatatttatatgtgtgcaggctacatggttttcattatgctattgattttaaaagtaaaaatttggtaagaacctccatgtccaccatggggaactggctaagtcatttatggtggaatggtgatcataaaaattcattaaaaatgaagactctatatacagcttgaatattccttatcgaaatgcttgggaccagaagtgtttcagatctttgcatattttctgtttctcatttcagttcacattttctaagcatgatattcctactgatttccttgtagatattttgaaacagataagaaactcctccgtggaaattactgttaactagggaaaagacatgtttttttctgttcataaaagtaatgcgagttctttgtagcaaaacttggaaaatgcataaaagtaaaaaaaaaatgaaaacttgtgtaaaattcctcatactttagccatccatagatggtccttaacattaggattttactaattttccttgcagttttttcttaaaatatacacgtgtgtctacacatacatagtgtacactaaattttacatacacacagaggaatatatatgtgtatagttatcttgtgtttagaaatttggaatcccttctagttgtcttgtaacatgtgcttactctattttgaggattttctctatgaatttcatgtagctttttaaattaactttcaggaggattgtaacaatgtgctctccacccagtattttaccagccttgagttttctcaaagggggcattggaggggttcttatacatttacagtgggaatgtgaattgatacaacttctgtggagggcagtttatcagccactatctaaattacacatacataaaccctttgtctaagcaaacttgctgggaataaatcctacacatat

SEQ ID NO: 202216 - DNA, 1000 bp, Homo Sapiens
tatccacctctcaattggtgctccaaatggtccccatgaggtgtgtcaccagtaccccaaatgcttgacctccattgcactctggaaatagggagtggctgtaggatctctctctagtcagcccctactgctgaggctttctttttcctgctctgtaaccagaaagcggccctattttcttcccaacgggtgcccccagagcttcataagtcacctcttcctacgtggggtctcttccttggcatgaccctggcacatgactggagttcagtgctcctgctaatgtatactcccccagaggtgtttctttttaagctgcaggcactttccagttctatcccagagactcagtgacctcccttagtgcctgtctcctctgtgcatgcgcattcttctctcccaccaagaacacagatgtacttgaccttctgtgaacatgtctcatgctgctctgtcactgggagctcgactttttttctctgctgtgaatgccctttctgccctttctctgaagacctatcagcctcgcaagttcattgttttcatccccagatggcgagtctgtcattcaggcaggaagtacatacaaccacaggctaagcatcgtgcccagagacaaagagatagggcccagtccatgccatcaagcgcacagtgtctagtgacaccacacatttcaacaaataattacagcccagtaggacaggtgccataagacagagctttgcaatgacaccaggggactgtggccacctgtcccaggagtgccaggacagcttcccagatgagatgctgagagatgggttttttaaaataaaacttcaccaagtggatttggggaaaatttttattcaaggcagaagataccctatataaagacccagtacagtgctgtggctcacgcctgtaatcccagcactttgggaggccgaggcaggcgcatcacaaggtcaggagatcgagaccgtcctggccaacatggtgaaaccccgtctctact

SEQ ID NO: 202217 - DNA, 1000 bp, Homo Sapiens
ctgttactgcagatgtcgtgtggaatacagtcagcatctactggttatgcatcttccacattcatcgcattggaaaccaggttatcacaaaaggaaagatgggtgtgcttccaagcaccgtgttacttatgttttcctctaaattcaggattaggcaaaatgttgggagaaaaaaagtctgaagacattaagtggcttataggataaatcacatagatttaaaaggagtggtttccctagaagacataagttttcttaccctgaaggaatctgtaaatatgagatatggtgcacataccagcaccatttaggatatccagtaagtgttaaaggcgaaattccacagagaaaaaataacaacaaaaagcatatccatttgttcatcaaacatctgtttacctgctaggggtcaacattgttctagacaccatgaatacaacagtaaacaagagtggcaaaccccatgcctttgtagagctcataatctagtacagaatactgatataaattatagattgagtatccctaaaccaggaatctgaatctgaatctgaaatgctccaaagtccaaaactctttgagcacctacacgacaccaaaggaaagacccaccggagcacttcaaatttttggatcaggaatgttcaaccatgtaatacaaatactccaaaaattttaaaaatatccaaaatctgaaacacttctggtcccaagcattctggaataaagaatactcaacctatacacggcaagctagaaggtggtaagtgccttggaggtaaataaagcagggatgaggttgcaggctggactggaaggaggtgtctgaacataacacctgaagggatgacacagccatgtagacgtctaagagaagtgctttccaggtagtgggaagagcacatgcaaaggctctgaggcaagacgcctggtgatccttttgcagaattcacgagcatgatgattgcatgtgtaacatgtgtctgacatgaacttaggg

SEQ ID NO: 202218 - DNA, 1000 bp, Homo Sapiens
tagtcgagagggaaacagcccagaacaccagctaaggcccccaagcgtgtgctaagtgggaaaggatgtggagttgcacagacaaccaggaggttggcttagaagcagccaccctttaaagagtgcgtaatagctcactggtcaagtgattccgcgccgacaatgtagcggggctcaagcacaccgccgaagctgtgtcattcacgcatgtgccaggtcttcggatccaggcgtgtggatgggtaggggagcgtcgtgtggcgagtgaagcggcggggtgacccagtcgtggacgccacacgagtgagaatgcaggcatgagtagcgaaagacgggtgagaaacccgtccgccgaatgaccaagggttccagggccaggctaatccgccctgggtaagtcgggacctaaggcgaggccgacaggcgtagtcgatggacaacgggttgatattcccgtaccggcgaagaaccgcccatatcgaacccggtgatgctaaccacctgaaacctgagttcccttcggggggcttgggcggagcgtgggatccgatccggtagtaggtaagcgatggtgtgacgcaggaaggtagccaccgcgtggcgatggtagtccacgtccaagggtgtagggcgaggtgtaggcaaatccgcacctctcacttcaatgtggagtctgagacctgatggtgaccgcatcagcgggaagcagggtgatcctatgctgccaagaaaagcatctagcgaggttcgagccgcccgtaccccaaaccgactcaggtggtcaggtagagaataccaaggcgatcgagtgaatcgtggttaaggaactcggcaaaatgcccccgtaacttcgggagaaggggggcctgaggggtgaagccgcttgccggctagctcttgagggccgcagagaccagggagaagcgactgtttactaaaaacacaggtccgtgctaagtcgcaagacgatgtatacggactgacgcctgcccggtgctgg

SEQ ID NO: 202219 - DNA, 1000 bp, Homo Sapiens
gctggaaccccttggccacgaaagtcaaggtgttgaacatggcagagattcagacgcgcctggcctacgtgtgttgcgtgcggcagctggaggtggtgaagagcagtgactactgcgagtacctgcgcccccccatcgacagctacagcaccctggacttcggcaagttcaacgagatctgcgaagtgggctaccagcacgggcgcacggtgtttgacatctggggccgcagcggcgtgctggagaagatgctgcgcgaccagcaggggccgagcaagaagcccgcgagtgcggtcctcacctgtcccaacgcctccttcacggaccttgccgaaattgtgtctcgcattgagcccgccaagcccgccatggtggatgacgaatctgactaccagacggagtacgaggaggagctgctggacgtccccagggatgcatacgcagacttccagagcacctcagcccagcagggctcagacttggaggacgagtcctcactgcggcatcgacaccccagtctggctttcccaaaactgtctgagggctcctctgaccaggacgggtagaggcctctgctaaagagcccggatgcagcgtcttccgtgggactgtccccaaggctgaggctcctgccaagtcctaggggcctctgtacctgccctgctggaagccctgacttccccggggccccaggctgtgttagggttctctgggcctcttctttgtaccagcagccctgcatacagggccctgtgagcccccctgcagtcctgtgaggcccctgaagctctgtgaggcccctgaagctctgtgaaccccctgcagccctgtgaggccccccgaagccctgtgaggccccccgaagccctgtgaaccacctgctgccctgtgaggcccccaaagccctgtgaactgcctgctgtcctgtgaactgcctgctgccctgtgaggtgtgggagccctgatgctgccgtgtgatgtttcaataaaggtggatctc

SEQ ID NO: 202220 - DNA, 1000 bp, Homo Sapiens
tgagaaaccctttgaatgtaagcgatgtggtaaagcctttagatcttctagttcctttcgactacatgaaaggactcacactggacagaaaccctgtcattgcaaggaatgtgggaaagcctattcttgccgtgccagctttcagagacacatgttaacacatgctgaagatggaccaccttataaatgcatgtgggaaagcctttaatgctctgggttcatgtcagatacattaaaatactcactgaagagaagccctatgaatgtaagtaacgtgggaaagcatgaaattctgtcagtgccttttttaatacatgaaagaattctagagagaagccatatacatgtaagtaacatgggaaagctttcaatcattttagttcctttcaaatacatgaaagaactcatcatggagaaaaccaaacaaatgctttttggaaaggaacccatatttgagagaaaccctgggtaaagggtgtaggaaaggttttgtcatcacacaaccctgtcacacatgaatgtgtagtggagagaaccttggtaaatgtaaagagtgtgggagagcctttagtcattttagttccacttgaagccatgaaagaacacacaaaagagaaagctcttgaatataagcaatgtccacacgtttttagccagcccacatgctttcaacaacatgtaagaatgtaccctggatcaaaacactataaatgtgaaaactacaaggaaggttttccattatacttttaaagtcatttgagggctctggctctgtggctttgtgggttaaagtacttgtctggcaaacaggagatgctggatttcaatcccagcagggcctcactagttgaggtattgaatttgaacagatgttttggctctggctgggtgtggtggctcacacctgtaatcccagcactttgggaggctgaggcaggaggatcacttgaggtcaggagtttgagaccagtgtgcaaaacatagcaagacctcatctcag

SEQ ID NO: 202221 - DNA, 1000 bp, Homo Sapiens
tctacccgttggtgtatctttttaaccttggttcacatgatttctatgaaagaattgaaactaatgcacatgaatgtgttgtgtgttagaagaaatctacattcctaaagccactacgctctactgaagatgatgattctttcaggtgtttttgcacatctttactagtctctactatataggatgccagtttgcttgagataaaaataattcacacgacattgtaccctaaagagtatagggtatatactttcaatgttgctctacatttttgccactccacagcctgtgtactattaagaacatattagtgaagttgactagaagcctgctctctaaagaggtagggagggatcaggaatcataaaaatattttctcaagaagctacagggtggggtaggccagaaaccaaaagaaataggaaaccaggttaaaagttagcagagaattgcatgaagaaagatttgagagatgtcagaagacaaataatcatcatattcatgcctttttcattgtcttcgaaaggtccttggaactgcggatttcttttgagctttgagtcctacttttaagatcttaatggaagcacctgtggcctactgtgtcacagggtactcctgtaggtcatagatgaagtcacaatgaagtttagacaaagtaaatactgtgagagttggacctgattcatgattcagataaatagtttggaatttatacaatatcagtttgctctgcaagtttttcaggcagcatattactgaatttagctgttctagaaggacagcttttcatgacactttagtacctcagatttaagtactaagtattgcctcttttaccagaggctccaaatactgacactactttgtttcgattttaaatggagattgacatactgtttaggtaagaagagtatccaaatataacttgctatttttaagcctttcataccagagctatttttcaaaactcttacaataaacctactttcatattgtt

SEQ ID NO: 202222 - DNA, 1000 bp, Homo Sapiens
aggccctggctcttacctcccggggtcccgcgggtgacggcggcagcggccattctacccaacaccgacccccccccagcgccggctgacagcggcgtctaacgtcactgcgcacggggcggggcctcccaattaaggggatgagggtcaggaagggaacctggggtcagcacacgtggagttctgggtggggcgctgggcagagggactcggcttctagggctctgagccaggccgagggacagactgctgggaagtccccaaaagggcagcagcactgaggggcaggattccagggtcctggaggcggaagctcggccgactgactcccagttcgagagaacggggcgggggcagcccaccagtgctggaacccgaggggccgggcgaggaacgctggactgggagcaggacccttctcgcctcggacaagactccttgtctggggacccagcccgacttcattgtagctgggtcctcgagaaagcgaaaggagccctccttccccattggcctctccatcgctgcatcccaagaagaaagacaactcgggctccacttgcttgctttttaataacagagcagagagaatacaaggccaggagcggggcctggaggaaaacaggacttggggtgctcctgtgagagcggtgggttgagatgggagcccacgggggctgttaatgcctagttcagaggatgggaaaggcagttggagagacgaaggaaggggaaacgccttcatgtcagcaatgagggtgactctagtgacggaactagtcttgggtccctggggcaccactagcctctcggcatcggtggtttctccttactcttcagacgctgccaactccatcccccagggattgtgaagggggttccttctggctgtgacagtgctgaacgaggccagagagtgcagctgcctggaggcacaagcctcctcctgatccagggggctccagggagaccaaagcagctgtcaagatgagagaaattg

SEQ ID NO: 202223 - DNA, 1000 bp, Homo Sapiens
caatcagtgctctgtgtctagctaaaggattgtaaacacaccaaccagcactctgtgaaatggaccaatcagctctctgtaaaatggaccaatcagcaggatgtgggcggggccaaataagggaatataagctggccaactgagccagcagcggcaaccctgttgggtccccttcaatgccgtggacggtttgttcttttgctcttcacaataaatcttactgctgctcactctttgggtcctcactacctttatgaggtgtaacactcaccacaagggtctatagcttcattcctgaagtcagcaagaccacgaacccatcagaaggaagaaactctggacacgtatgaacatctgaaggaacaaactccagacataccatctttaagaactgtaacaccatgagggtctgcggcttcattcttgaagtcagcaagaccaagaacccaccagaaggaaccaattccggacacactgtcttctgagacaaacattcagatcaggcatttgttcttctgggaagctgtctttggtatccttcccttactacagatgccccaaataactacagaagttatcctcttctgttctatcactgtcttgttcactgttctgtaatatagtgtgttcgtcacaatgattgtaatttttaaattatatgtgtgtataccctaatacagttgttatttggctttccattccatcaccttatatagaacattttaaaaatagatgtatgttaaatattgaaaaagatgaaggaaatagctccactataaaattccagcaaggtaaaaatcactgctcatctaagaaagttcagtgcaatgctattcataaaaatgtgccattagtagtctttgtaattataaatatatagtaatgtggaattttatgtgaactgtaaaacttttgtcctatctacatttttcatatctgtgaaaatatacctatgtgtttgtcatgtctctcagataataaattaagcttattaagtcac

SEQ ID NO: 202224 - DNA, 1000 bp, Homo Sapiens
gcacccagcatagtccctagtatactagttggtgctgaataaatagtagctattattagaaaaggaagggtgaaattgacatgggagttagtaaaatgtatatggaaatgatttttaaagggaaaggtaatgactttctggcaggaaaagcagcaatgacaagattacttaagtcttgtgaaataacacttctcttccttgacctgctgcttcccttttttaccacacacacacgcacacataccacagccctttgagactgaaagcagctctattgagaatagtagtgtcaactgtattatgtagaaattctaaagtttttgggattatttcatagccctgaccttgctacttctctccactttatgtggcaggtttaatctcaggtctccctcatacacttctcagcctcagcacctaaccctcacacaacactccagtattgatgcagtcaatcttgtataacattttttgaatgtccaatgtgcaaagcacgatgttggaaattatacagaggtgaataagacaaaaactcttgctctcaaagatgtcagtctttttctttgcaaggataacacatgtagagtaaaatgcataaaggggactaattttaaatgtacagcttaattaatttttatgtatgttaacacccatgtcaccaccatgtttaggacatttccagcacccctgaaatttccttcatgccccttcccagtctgtacctacacctctaaatctattttcaatcttaatggccttttaaataactgggcttctcacaaccatagtgaacagaaacagctgggttgtcaacgtctaacctaatacttcaggaaaactcatgatggtttccatgttaagagagacatggagcagggcactggcatggtggatggatcacgcctgtaatcccagcactttgggaggccgaggtagggggattgcttgagcccaggagttcaagactagcctgggtaatataaggaaaacctgtctctac

SEQ ID NO: 202225 - DNA, 1000 bp, Homo Sapiens
ctgcatatatgattgaattttagagccagaaagcatgtagagcagttgtgattagtagaaaatacactgacaagaagatatttgcatttatttcccaaagctgccagtaactagattttgtgacttaagtcatttaacctctccttgattagagcttcctgagccatgcacactggcactgcaaatcacagacaggcctagatacagatcccctcaccccttgctacatccaaaggtggcctgggtggctggagcctctgggccagaaccacctttgtccattttcctcagtgtgcctacagcatcgctttccatgcgtgccataacttgggaatagttgggatgtgttgcttaactcctttgcaccattagttatctgtgagaccatctattccacactcttcattttttaaaaagagacaataattatttttaacttactgaagtttaaaattacctagcatttctgattaaaaaaaatttagaaggaaaattttaatgcatttatttcagatggcgttttaaatagatacaaccctttggaaacacaatatggtactacatagcaagggctgtaaaaatgaccatatcctttgccccataaattctacttctatacttttaaccttaaaaataattcagaaaaaagataaacgcatgaagacatttatgtctgcattctttataataacaaaaattggggaaaaaaactccatgtcaagaaagtgggataagaaaaatagtgaagtattatactgccattaaaataattatttggaagactgtagaaacgtggacatgtttgatatggtaagtaaaatgagcacaatacaaaatagtatgcatactatgattgtgactttgtaaaatctttatgcatgtggaaggtaatctgcaaaacaaattcattgtgttagtgtagcgggatatggaatgactttatttatttaaatcttttctttaatattactttgtattttcaataaaaataaatcactgt

SEQ ID NO: 202226 - DNA, 1000 bp, Homo Sapiens
ttgtttgtttttttccgagtttctcggttccgccagcaaggcaggggtgggaggtgggcacccctgataccaaggctgacaggtagtgagttgatgtggaacttctgtttcctcctgttcagttcaggttctctctttctgatacttacccctcctcaaatagggaaacggagagaggggaaataggaagatgagccttaatagggtttacttaattggggtcataaagattctaaaaagtatgcattcctgcagtcctgttctaggcactgtaagagctgaccagaaagagagcttctacccttataaccttcatccaactcagtcatgcctgggaaggatgttggtgctaattttagacacagagactaagatggacaaaggacaagtatcataaagcatttttggagccaggaacagatttaagttccttgcctcactgctgctcttactccaaaccacacaattgtacccaagtgaattgctgttagaattggtgcctttggaggagacaattgctcgtaattggtagctacaagccacttcactgagaaagcgtggggtcttagatgctttaagaaataatagaaagactgagcctgagtgagtcaggctcttctgagtcatacagcttttaggtcagtgtaaaatgccgactttctgaggtcttacttttttcccctctctggaagacctaaggcaaagatcgctctcaaagagatatcaaagaatagagacctttccctcagaacctacctctgcccagtgttaaccaaaatgtggtttcaaatcacctgttcaaagcccacagggtatttgttaaacatgcagattcttagtgctccctccacccacacagacactgcacaagaggccctgctttggaccactagttcctaaacatggcagaaaatctggatcacctgggagactttttaggttaaaaaccggaaacaatatgtaagcataaacatgtcaacaaaattagaggatgtccctc

SEQ ID NO: 202227 - DNA, 1000 bp, Homo Sapiens
ttgcaaattcccatttttaaaaatgaacaaccattcagtaatttagtcttcagtggtcaaaataacatactctttacagaaactttgtttgtttctcttcttccaaccagcccctgaactttgactcacccacagcttcagcaaacctacaacccttatttatacataaccctcctaagaacaggctgagttcaaggtgaaacattatcttatctgggatctcattttgctaccctccatcgtgtgcttcctttccaaccttctttgtaaacttgttttctcctccctatgaaataaggcccttttccacctaaccttagagatactcaaagatctaatcatttgtactttttctttgttgcaatacttcttaggtaacttcttagaccaagtctagaaacaatctgaggacaataacaattccattctaaaaagaatctcccaacatttcttctgtctcaacctcaactgcatctgcctgtgaacttccagcttaccaaggctctatatcttctggcagtgacaaaggctccttccatggttggtgtgagtaggcttggacacctgcagggtagacacccaggaataatcaactgggccttcagtggtcctcttttgcagggtcaaggtgggccttagcttttagtcaatggtctaagacttctacttaccagttagtcattcagttagttttcaattcaaaaaatacttcatgtttgaagaatccagcaaaaattattcaaatctaaggtataaaagagaggaaattacagccgggcatggtgactcatgcctgtaatccctgcattttgggaggcttaggtgatccacctgcttcggcttcccaaattgctgggattacaggcataagccaatatactcagcctgagaattcatatttgtaacaaagtacaaatccatagggcacatgagaactacaatgtctatctacagtaaatacagtttgatgaataaaatggaaggcaattgacctaaggtg

SEQ ID NO: 202228 - DNA, 1000 bp, Homo Sapiens
cagaacataagaatttggggtatgcaagtcaactccctcactttcttttaaaaatcctgggaaatccattataccttctgtgcctgattttcttcctttgcaagtgggttgcttggcgtccagctcagccactaatgcaagtcaccacaacaggtacgtcttcaaataccatctcagcaggctgggagccaaatgaagaaaatgaagatgaaagagacagacacctcagtttttctggatcaggcattgatgatgatgaagattttatctccagcaccagtaagaataatcaattacagtacagccatttatgcaaggcttattgattaatctgagtgataccaaattgtatctctcttgagaagtagttaatgtgaaaaatgggtgaacctatgatcataccttagttatatcttgatgagattatggaagaagaaatagaatgttttgagaagtggggaaaatatctcacaaaatttctcttgtctcatgttcttcctgttttatttatctatgggatctactgctacagattgtctttgaatgatcaggctttatcagagaatgacattaaaacagtacaaaaaatgtacattgtgtacttactgtgctaggtgctggaaacacgaagatgaaaagagccagagcctttgcttttcagaagctcatggtctgttggagcaatagacttgaagaatgtgatgaggagggtattaattaaaagttgtaggccaggcgtggtggctcacacctgtaatcccagcaccctgggaggccgaggcgggcagatcacgaggtcaggagatcgagaccatcctggctaacacagtgaaaccccatctctactaaaaaatacaaaaaattaaccaggcgtagtggcgggtgcctgtagtcctagctattcgggaggctgaggcaggagaatggtgtgaacccaggaggggatcgcgccactgcactccagcactctaacctgggtgacagagccagactccatctc

SEQ ID NO: 202229 - DNA, 1000 bp, Homo Sapiens
attaggggcaggaaaaccatcagctttagtgaatcgtatccagcacccccagggtatattatcatggcacatactaagaagatgcagatggactttttgtccatcggtgagtctgagggtattcattatgtatttggaattgtgcttggcaactggaaagtagaaggaaggccatcttgggcagtgggggaagggcagcagccaccaaagcacacagggaaatgaatgcttttggctgaagacaggagaatcttgtctggtcatcccatccattgcaatgtttgtttgtttgtttgtgacggggtctctctctgtcacccaggctggagtgtagtgttgcgatcatggctcactgcagcctctactgcccaggctcaggcgatcctcccacctcagactcctgagtagctgggactacagtcacacaccaccatgcctggctaatttttttgtatttttttgtagagatgggttgccccggctggtctcaaactcctgggctcgggcgatcctcccgcctcggcctcccagggtgctgaaattataggcatgagccactgtgcccacccctgactgctattacttccagcaactcagcctcatcttttctcccatactctctgagggcctggaccacctcttatcctttgggagaaagtagcagggcatcacctggagccggttagaaatgcagaatcctggccaggcgtggtggctcacgcctgtagtcccagcactttgggaggccaaggcgggtggatcgcctgaggtcagaagtttgagactagtccgaccaacatggcgaaaccctgtctctactaaaaatacaaaaatgagccaggtgtgctgtgcatgcctctaaatcccagctactcgtgagactgaggcgggagaattgcttgaacccagtatgggagggttgcagtgatccaggatcatgcatcgcactccagcctgggcaacaagagtgaaactctgtctcaaaaaaaacaaaaaaagg

SEQ ID NO: 202230 - DNA, 1000 bp, Homo Sapiens
taatttctatattgttgttttgtgtattttggtattataaaattatacttcttagattccgttaagaatactttctggggtgtgagccacctgagttattagttagcaaaatgaacctggggaagtgggaagagctggtattctcaattggcaagggattgattcttcaatgggttcagcatttcacttccctctgaaattaagtggcaaagtaatagcatcccttaaaaaacaggacattggtgagaggtagaatagcaggaggaattttgaaacatggagggatggctactggaaaagaacagatgaagtgcagagtctctccagacaatggtagaaaccacaggactacattaagattgggcccaaatactagtttagaaaaaggtaaataaaactagctttacttaagagtacagccagcttaattactggctagtggacatatttcagacaaatctaactggagagaaaaacagaccaggagagaaagcgaagttacaaggaaatggaactagagaaacctcacaaagggataaaggaggtaattaaaggttaaagccagatagcctcgagctcaaaggagaaatattggaggccagataggaaagtgccttcctactcagggggttatggatccagggtggctaaagaatagaagtagagttccacccagggccagagggaacaatctgggattcagacacagcagtggtgccaacgtgaatctacctcgtgctagagtctgagtagcctagtctatcacccaacacagataagactggacaggggctcccaggaaccaacatctaagaagggagtttggagaggggctaaaagaaagcaggttaagccccaaatgtaactgaatgatgaccagggataactatttactagtgcttttatgatttattgtaactctgtaactttcccagtatttgttaattttttaacttctgtttctcctgtacttacgagcagtaaaagttgttcaaaacat

SEQ ID NO: 202231 - DNA, 1000 bp, Homo Sapiens
catccctgttgccatctctgacctcatctgccacagatatttctcaggctacactcaaaactgggaagctctcaggtcatttaagcctggaaattgtgccacctcacaactgttgcaagggctgttccctttgcccataacttcatttctctctacaccatctatgcacttacttgaatcctcacctgaataattcttaccattctttcagatcccaacattaataccatcgcctccaggcagcattttttcatctcccaagattgggtgcattagaccctttgtcatcacacccagtactccccacgtttattgagcgctcacgatgcgtcaggccctagtggaagcctttatgcacattatcttctttctcatttaattatcaagtagagcccacaaggtaggtactaccttttttttaacttttgagacagggtctcactgtatctcccagactggaatacagtggcgcaaacacagctcactgcagtctcatcctgggctcaagcaatcctcccatctcagcctcctgagtagctgggaccacaggcagatgcctgttgcccaggctggtctccaactcctgggctcaagccgttctaccttagcctcctaaagtgcagggattacaggtgtgcaactgtgcccggcctgggtagttactaatattatcccattttacagatgaagaaacaaggacatataggggttacttgcccaaacccagacaataagctagatctgaaagtcatcagcctgacctcagagttgtacttttaaccattatcagggtctcaggccagtacccactgatgaaacacataagtaacttagtgggtcattaccaacatttcattaaagaaatagaaaatggcagagaacatcaaacttagtaaggctcttgtttcgtgaaacttgtcagattctctaatatgataaatactaaatcttacaaacattgaaaatacaaaattaaacaaaatattaccaaggttaacac

SEQ ID NO: 202232 - DNA, 1000 bp, Homo Sapiens
ttggggaggggagctttttgatggtgggtaaataatggctctacaaagattacctgactccactgacacaagaatatgtattctcagctgatataactgtgtgttcacatcccatccatagaactcactgaaggagattcatcaagtcagccttttggactgggttggggtttggggagtggatttggggatagagagaaaggtgtacttagtacacattttctaatgggcgttacgtgaactgtttgaacctgctgagtggcgctttgtagagctccatgttcacgttcagtgtcaacaccattcaacagctttgcacatcttcgtacaacataatctggctttggtgccccttgagccacctgtagaataatttatagcagggtcccacaatctactgcaatgatcgtgaacagttatcagtggatatagtgctccaagagtcaaattgtatccgttaagggttttctaacttttgctatcccccccgcgaccaaaaaaagggggggtttataatttaaagaaaaggaaaagaggcgtgggttggtagttgtgtccttaacattcaggaatgacatagcctctggagtctacaaactgaagaaactttcatctgatcagccttggaaatccaaagttaaagagcctatgtgtctcttgaggcgggggttagaggattcaaatttgggatgatgctcattgattcctgaccatagcagtgagaggccattttttgtgcaggaaatgtgcttaggactcagtcttgttttcgattatccaccacagaaaccctgagacacagagcagcttagaagtctctacccaggcgtaaatagagctccctactccggaccacctgccacccacctcccaagttgagaacacaagctccagctgggctggagagtcaggcttggtgcagggtgactttggcgaagttttgtcagatccataaagcaaactggaatttgagctttcacttaccctagtatacgttctt

SEQ ID NO: 202233 - DNA, 1000 bp, Homo Sapiens
ggccactcctctctcttcatggtctctctcagcttgaagacaatttacagtctttgactaagcatccacactggaagaacaagatttggtttctgaacattgggtcttagtccttaaaataacttgcaacctgttacctcttcacttactcccatcgccaccacaagaatcctgtgtgtttttgttttgtgcatccagtctaaaacgggtctgcttttattcataggcttttgttttcagtggtttttgttgttgcatttttccctagataaaatgttttttctataagacactgcttaaaagagtccaatgcagtatgaatttgtatttgtgtttaacttttgtgcttaacagatctgccatggctgaactctcagttgcttaagcaaaattctggggcttattctaggttcctttatttgtcattgtcactcccattccagttatcagcaaattccatcagctgtctccgagacatcttaaatctgtctacctccctccatgtccactgctaccactctgtccaagctattatcatctttcacctgaactcctgcactaatgtctgctgtccttgcatccactcctgccctcctacaatcactgacggcagccgcagggatctttataaaacgaaaatcagataatgtcacttccctgcttaaagccctttgagtggcttcccattgcacttagaaaaaaaaaaaaaaaaaaaactggccaggtgcgatggctcatgcctgtaatcccagcactttgggaggccgaggcgggcggatcccctgaggttggtagttcgagacctgcttggccaacatggagaaaccctgtctctactaaaaacacaaaattagtcagttgtgatggcgcatgcctgtaatcccagctacttgggaggctgagtcaggagaaacgctcgaacccaggaggcagaggttgtggtgagttgacatcacgccattgcactccagcctgggcaacaagagtgaaactccgtctg

SEQ ID NO: 202234 - DNA, 1000 bp, Homo Sapiens
cccactaccttacgtggtataagaactaggactgaattgtagatctcatccacatctagtctttttttctctacacactgcttcctgtcaatcaggtgatctgaagccggtgacctagattagacaagcggggtgggacctggggttggcttcagttaactaggaggacagacgcctcattcataccaacaggacagaaggctgaggatgggagcccacattcaagtgggtgggtcagcttggtggatggaggatgtggagttctttcatgaatgtggcttctgttttccagtgaagtgtgtaaaacaaggttttcagctgagcgtaagcacggggaacatttgaggagaagggacaaggcgtggatgctttctctggggagtgcccagatccagggatgcaggcgggtggctaggcagcaccaagtgtctgcgccaggttcctggtcatgggtgtgaggtcagcagtgagcggtgtgtgttttccctgggcagcgtttacggtgtggccgcgggcaccgtgccagcgacagttggtagggaagggagttgaagtacagtggcgccatggtggcctgctgagtctgagctgaccgagagggaaaggagcagcaagaagtggttaagggacagaggagatgtaataatagggtcaacaaatcaggccccttgtggggctgagaattgttgcttcaggatagctagagaaagagctgggaaggtggtgtggtgggacgctggcagttggtgtgttctggtttcgtgggatagtggaagtcactggagtgatgggggagggggattcttggtgattaggagaacagggtacttcctgtggggcttctgagaacaggggcagtttttcatgaccacaggactgcatttcaaggacagggtctgggagtcacggtggctcaggcctgttgtcctggtgcataaggaggcgaggctaggctttcgaggccagcctgggcaacatagaaacctccaatctgtataac

SEQ ID NO: 202235 - DNA, 1000 bp, Homo Sapiens
ctgttctatgggaatttttgctctcattatctgggaagtgttcttaaaaataagaattaatagcaaagatgcagcaaagctctgaggatgcatttgcctgatatttttttctttgctcttgtgtttttgtatgtagttataaatactgtagatttttttttgtgattttttgccaaagttgttgttctatttatacattttaatgtcttaagacattttttcaatatcacaaaaagattttactgcgtattttgcaaagaaaaaaagctcactacctttagcttgcacatacttgcaaagttaattaaaaggctttttgttttaaaggggattttgtaaaatatccatataaataatgtatttatctttcgaatttgtacattgcttttcccttcttcctcttccttccacccccaatttattttattgtgtatgtttgctacgtgaaaagtgcgtatttgtttggtcacctacacttgtattagctgtttcaatgtgatttttaaacatttcatttatagttatttttagtattgttataaaccatgcttcagtttttttaatttccacccaaaagtcattgtctatttttgtattatttgtaagttaagaagttttttccaatatatggcaaaaaaaaaaaaaatagtagcatattattcttgtagtatttagttcagtagatttaaaaaaaaatgtatcctttgctttggaagcttacaaaacaaccctaatgctgttttactctattaatatgcatggaatctctccctttggagtgacgcattttgtgcattaaattctagggagaaacttcatagaaatcaatgaacatactttctttcttaagtctgcttgtatatttcctctgtctttcacataaatataaaccagcagattggatgccttaacaatgcaaatcatattcatttcacttgtacattgtaactgtgcaccagaactgtcagtcatcactaacattctaagaaaaaagaaaaag

SEQ ID NO: 202236 - DNA, 1000 bp, Homo Sapiens
gggcatctgcccctttaaaagcaaagaaatgagacccaaaacagtccttccaagagtttggctcttgcttaataaaagaaggtgaactttgcacaagtttttcctttgcttttctgttaatattttatgtggatatcttgcagggcaaaaagagtggcttattttcttttcctttcctgccaacaaatacgacattcatatttagcatgttaaaaagagctcagaaaatgaacattgcagcattttcatgctgtgtaagtcagagcgcagctatgactgaactgggtcgtggcaccgctttgctgggtgttgcccagataaaaatattccttgaagctgggagagcaccacgctgtagcttgagaaattgttccagctcttgaaaggggaaaaaatcaaatgaaaccatttgcattctaacagtctttggcaccagggaaaactgtcaactgtgtcacgtgtaaatagaaatctgctccccgcttttggtgcgttttttcataatttcccttgccactctaattatcaaagatatttttatttttaaacaaaaattgtctcccacgcaggcctcatctttctgcggtgaagtggaaacgatgaattagaatattctaatcacttctccaacaaccactatggaggttataaacacaagattatcctagcaaagaaaagtgaattgtttgggcacagaacaggccaggaaaaaattcagtaggccgggcccggtgctcacacatgtaatcctacactttgggaggctgaggagggttgatcacctgaggtcaggagttcaagaccagcctggccaacatggtgaaaccccgtctctactaaaaatacaaaaattagctgggcatggtgatggatgcctgtaatcccagctactcaggaggctgaggcaggaggatcgcttgaacccagaaggtgaaggttgcagtgagctgagatcgcgccattgcactccagcctgggcaacagagtgagactctgtctc

SEQ ID NO: 202237 - DNA, 1000 bp, Homo Sapiens
gctgtgaatatgatggcgtcagaggtgactgcaaaaaaggacagggcagctgggcgaggaagagataccagtgatgtcctaactgagctccctgggtctggtagtgaggagctcagtcttagaatatgagccgtgtcaggggctacagcatcatcactcttgtcctgtcgcagactcaggctccctgttctcaggttcttatgtagacagtgagggctcagggaggctcccaccaccgccaccaccagcaccaccactccatcaaaacggctgaaggaccttcctttagggttcgggggatctcctccttccacaagggatggatgtgaagacaactcattctttgatgttcagatggttgtggccctctgatgagatgtgtgcacaccttgccaaatgcatatgtctgttgagcctggacattaagtatttcttgatgttctcctgtgtaacaggtgatgtcctaggtgctgcagtgaacagaagagacaaaatatccttgttcccttgaagctaatgtcgtaggggcccaaaacaaagcaaacaaacaaaaaaaaaggaatgcaagtcaagtacactttgtatggacagtggtaattcctaagaaggaaaacaaagatgggcttaaggggtgcagagggcctggactatgtgtgtctgtgggatagtctgttactacctctgggactctcatctcgtgagtgtgcttgggtgtgtccaaccgtttttcctagtgacaaagtctgggtaattctgtggggacatatattggtgtatctgggaggtcccatgtgtctcagtggtggtccctgttttcaggaaagagtgtctgtgaatgtccatgtgtctcactgcacagctgtgatttttctgtgtctctgtgttttccagtctttgtgtgatgaaatataaaggcctagcaggctcagagttattaatgaattgtacttaagcgttgagaggcatatatttattgcactattaaattcttccaaaatat

SEQ ID NO: 202238 - DNA, 1000 bp, Homo Sapiens
tgggcggggcgctgctactgagctgtgtgtgctgctggaggctgaatttggtgagctctctttacccacaaagctcatgctgtagaatcctggggacaggcctggaggttattagtgtgaaggcgtttttattgtacgttccacaccccaagttgccagagagcaaaacataattcaacaatctggccaaatggtcaacagtgaaggttatacatgtcattgaagggcatggagaaattaaacattcttctctccccaacctctctctccaaagacgacttgtttgccttatgttgtaatcaataaggaacgccggcctaggaatcaggctgacctgggatccagctccgctcctgtgatgtcctatttaaatgtgtttaatcctcccttacaaaataaaaataattgcggctaccacttttgacatctgctgcattaaagatacttcaggtatggtattacctcgtttaattattacaataattcataaaataggtattggtgttcgttttgcattagaatgcaggcttggagaggtgaagttacttgtctaaggcaagcaaataataagtataagaagagccgggcaccgtggctcatgcctgtaatcccagcactttgggaggccgaggcgggcagatcacctgaggtcaggagttccagaccagcctgaccaacatgaagaaaccccgtctctactaaaaatacaaaattagccgggcgtggtggtgcatgcctgtaatcctagctacttcggaggctgaggcaggagaatcgctggaacccaggaggcagagattgcagtgagcccagatcgcaccactgcactccagtctgagcgacagagggagactctgtttctaaataaataaataaataaataaatgtaaaaacagagaaaagtacaatttccatggcttttgtcattcacacccatttttaatatttttgtcatatttgagtcatctttttgtagtgatagaaataaaacattacaaat

SEQ ID NO: 202239 - DNA, 1000 bp, Homo Sapiens
gcataactcacctaccccagtagtgtgatctccctttggtcctgtgtaggaagtgggagtttctcccctcctcctgtgccagctgctccggtttcttttctcctgagtaaatgtacattcatcttgctcgaaagtacactctccaggtggaggtggaagtttctctgcaagaaaatagcagatgttgcaatcactgagactctttcaatgactctgtgttgctagcagcccactctgcatgtatgaatgttgtctggccatatgccatgcgatggagaggcagcccccattggtggcccacctacacggagccactgcttccagctagaggctgcattccactgcgggtcctgccacagacatagagaacaatcagatatacagatctaaaatactgggctactttgagaaaaaaactttctctgacttgtgaatttttatgaatttctttttataaagctctggaaattataggtatattgcctttatgaaaatatggaaaataataaaatttcataatgcaggcactttcttcagaaatcctggatgagtgaagggtatcctcataacaactccacagttgctttgtaggtaggggagaatgtgagagtgctaaatggactcctggaggcatagctgtgtggaacaaatgacttcacttctctgtgccttagagttcttatctctaatgtgggaatattgatggtagtcacttcatgggtctgtgaggattaaatgagatggtatatgtaaagtgatcatttttaatgtgaagttctcaataattaaatttgagaacttattttgccacccagaggtttattttccttttcccaaatccaatgtttatgtctttgaatgctatcttcaataacattcataattattagaatggtgcttcttcccaatttattggggacttttcctttgactaaacttggttgtacctccctatatccagattcttagccaaatttttctaataaatagcttgtttcat

SEQ ID NO: 202240 - DNA, 1000 bp, Homo Sapiens
cctgaagagctgcttctggaatcattcccttttctaggacccatttattttgagaagcaatgtggcaggttttgtcttttcatcagggtgtagagagcctgaaacccccacacaggagccacttcttgatgggggcaaagctgcgctatctagaaagctctcagtcccagaacctgccttctggagaggcgccatgtgtgtgaatgaacctgctgtttggaaggcaccgctgtgtcgtcgcactcagactccatgaagccaccgctgtgtcgtcgcactcagactccatgaagcgctgtttcgcgtgcaccgcttctcccgaagggaaacacgcctggccactgacttccttcatctccacgaagggaaacgcctggccactgacttccttcgtctctgcgaagggaaacacctggccactgacctcctgtcgtcacctgaagggaaacacgcctggccgctgaccttctgtcatctccgtgaagggaaacacgcctggccactgacctctgtcgtctctgtgaagggaaacacgcctggccactgacctctgtcgtctccactctgggtgtccgttagaacagacagcacagccctacgaagggagtgtgagctgctttagggactggggcccagctcctctccgtacagtgatggacagacagtgtcatagactggagaggaaattcgattttctccttagtttaagaaaaaaaaggccgggtgtggtggcttacgcctgtaatctcagcacttttggaggccgaggtgggtggattgcctgaggtcaggatttcaagaccagcctggctaacatagtgaaaccccgtctctactaaaagtacaaacaattagccgggcatggttttgggcacctgtatttccagctactcgggaggctgaggcaggagaatctcttgaactcaggaggcagaggttgcagtgacccgagatcgcaccattgcactccagcctgggcaacagagcgagactccgtctg

SEQ ID NO: 202241 - DNA, 1000 bp, Homo Sapiens
ctctgtaaaaacggaccaatcagcactctgtaaaatggaccaatcagtaggatgcgggcagggccaaataagggaataaaagctggccacctgagtcagcagtggcaacccactcgggtccccttccatgctgtggaagctttgttctttcactcttcacaataaatcttgctgctgctcactctttgggtccacaccacctttatgagctgcaacactcactgcgaaggtcttcagcttcactcctgaagtcagcgagaccacgaacccatggggaggaacaatcgacttcagacatgccacctttaagagctgtaacactcactgcgaaggtctgtggcttcactcctgaagtcagcaagaccacgaacccactggaaggaagaaatttcggacacatctgaacatctgaatgaacaaactctggacacgccatctttaagaactgtaacactcactgtgagggttcatgggttcattcttgaagtcagcaagaccaagaacccaccagaaggaaccaattccggacacagactcactgcaacctccacctcctggattcaagtgattctcctgcctcagcctccggagtagctgtgcctacaggcacaagccaccacacacggctaattttttgtatttttagtagagatggggtttcaccatgttgctcaggctggtctccaactcctgagctcaagtgatccacctgtctcggcctcccaaagtgttgggatacatgtgtgagccactgtgcccggcctcctctggattagttcttacaggaatagattagttcttgctcgagcaagttgttataaaagtgaggttgcctctagtgttttgcatcctcacatatgtctgcttacctcttgacctctctctgtgttatgacccagcacaaaagcccttaccagaagccaagcagatgctgatgccacaccccttggacttctcagtctacagagccatgaaacgaataaacctctctttataaatt

SEQ ID NO: 202242 - DNA, 1000 bp, Homo Sapiens
gtatatcgtaaagcatttcttgatggtataatacaggccagtgtggtcttgtactaccccttagtgaagccttaaacgatggtcagtattttgggagttttaatttgactggatttgtagtcttctattcagtgtttttaaaaatattgtataattgactctttaattgaactgtatagattaagaaagcctttaaaaactaacgggtaaagtatctatttggcttttaatttgaaataatttcagtgactgttataaatagtgatatctttaaaaggtactttactggaatttgatggttttgtttttgcatttgcagttttctactctaaactgtagttcatttctgtggcttttcttatgtttagctttacagatgggaacctctactgcttagcctttctatacatctggtgcagcatattggctaatccactgtacataataactgttagcagtcccattcattcttcagtcctagaggtatcagcataatcaaagaatgatgcaaattaagttaattgtggtgttcctttatttttacagttgaaggcacagttaaatgaaacactcacaaaacttagaactgaacaaaatgaaagacagaaggtagctggtgatttgcataaggctcaacagtcactggagcttatccagtcaaaaatagtaaaagctgctggagacactactgttattgaaaatagtgatgtttccccagaaacggagtcttctgagaaggagacaatgtctgtaagtctaaatcagactgtaacacagttacagcagttgcttcaggcggtaaaccaacagctcacaaaggagaaagagcactaccaggtgttagagtgaagtaattgggaaactgttcatttgaggataaaaaaggcattgtattatattttgccaaattaaagccttatttatgttttcaccctttctactttgtcagaaacactgaacagagttttgtcttttctaatccttgttagactactgattt

SEQ ID NO: 202243 - DNA, 1000 bp, Homo Sapiens
ggaatggagggagaatagggagtaattgtttattattaaggtagtttcaatttgagatgatggaaaagtcctggagatggatggtgtgatggttgcacaacagtgtgaatgtatttaatgccactgaattgtatgcttacaaatggttaaaaggataaatattgtggcatgtatattttactacatatagacacacagattgttggatgagctgaatgagcagaagacagggttccactactggacgttgatgtgggcacatccctgtgatccagaggtcagcaagttgctactgcttccacagcctaagccctgtagtatcctcagttcccacagagctggtgactgagtgcaggctgctgtatccaggcaggtgcctctatggaatggcagagctgataaccagacactggaaatgccgagtctggctgcacacactcatgagctggaagagggaggcttccatctcactttcagtttccaaatctcatatcctgtttctgggtggaaccagattttcacttagaaccctgactgctagggagtttgataaaagtagttttcagttttatagcccctgtggactataaaggagtagaaatggatgggaagtgccaattgaccatacaccatagtgttccacagcattgatgcactgtaaattatataaccagcccccagtcagtgaggggatatgttggctacttacagcattttgctgttacaatctgggagtggccaggtacagtggctcatgcctataatcccagcattttgggagaccaaagagaagaggattgcttgagcccaggagttcaagaccagcctgggcagcatagtgagaccttgtctttacaaaaaatttaaaaataattggctggcaggatggtacgtgcctgtagtcccagctgcttgggagggtgaggcgggaggatcgcttgagccgggaggtcgggactgcaagaagccaagattgtgccactgagcaaaaccctgtctc

SEQ ID NO: 202244 - DNA, 1000 bp, Homo Sapiens
acatttctctgactctacataataaaatgttaaagcacacagctttcattatatgtattttttggccatagaactggaaaactagatgacatttcctagtcagggagtttctctatatactgctgtcatataactgcaggcatgaaattatttcagactcccctcctaattcttcatctttatagtaatgtgcatttacctgaagctgatatttcaaaatttagtgattctcaacatattatttttcctattgtgtgtcccttctgttttttctgtagttcataagcagtaattctttagaatttcactgacaattttgtgtaattgtggttgttcattaacttgcctgttagattttcacaggttactaaagtgttttatttatttttgtaatgatttacagatgatggtttttcagtatatattatgcaatagaaccaccatgcacaaattgttaatgctgcaaaatgcacattctacatgggtgtaagtagttttataacaagtactcacatttgcaatttgtaaatattcaaaattttattaaattcttccgaattttttctttcagtgttttgtttgcaattatgaattgtcatttttaaatattttttattagataagcttgagctgtgccttaccttttgtgtgtaataattatgtactaaataatgcattactatttgtttatcttcaaatatgagactaccatatagctatgccaatttacgtgttccttggagtggtggtggaaaaatacctcttctttcagagtttatgtggatttacatagtatgagtgttttagctatagggtgttttaaactgtgcttaaaataatttgttacatgttttgttactgtgttactttattgaggacagctagtccctttgtgttgttaaacgtttaaagacagttgagaagcttcataactctgttcattgtaaatcttagctttcttgtaatatgtattttaataaaatatttaccttgcaactct

SEQ ID NO: 202245 - DNA, 1000 bp, Homo Sapiens
attcagaacctgtgcaaagcagtttggggacttctcaaagaactagaaacagaattgccatttgaccaatcaagccgattactggatatctgccccccaaaaagaataaataattttgccaaagagacaccagcacacacatgttcattgcagcactattcacaatagcaaaaacagaatttaaccagttacccatgaatcttttattggataagaaaaatgatgtacttatacaacctccaatactatgcagcaacagaagagaatgaagtaacgtcttttgcagcaacatgaatgcagctctgcttcaggccattctaagcaaattattgcatcagaaaaacaaatgccacatgttctcactcatacatggatgctaaaaattgggcgcacatggaaacaaagatgaaaacaataaacactgagaattctaaaaagaaggaggaaggatgggagacaagcattgaaaatctgcttaggtatgatgtacactacttgggcaatggaattattaagtatccaaacctcaacatcatgtagcctacctgtcttacaaatctgcacatgtaccttaaatataaaataaaaataatagaatgttttttggtataatgacatgttctatttttccagtgctgggttaatagttgaaattaggggtgaaagacaaatttttcaccccttaaggcatggtggtgaatgtttctataccaggtctcctcacattttataagctaacctgaaatttcttagtctatagcccaaaaagtgttttattttcaagtgtgcaagtaaaacaaattacacctttattatttatgtattaactgtacactagactatagacttaatttgttactgtactcttttgggggaaaatgtaattggattaatcattttttttttcagaatgaactatttgtgaaagggtgagactaaaaattatgctaaattactgaattagaaatataaaacattttttctaaaaaaaaaagcaaag

SEQ ID NO: 202246 - DNA, 1000 bp, Homo Sapiens
cctgctggaaactgtctttctctggcaggattaactatgaggagagcatgatggtgcgtttgagcgtcagtaagcgagagaaaggacggcgaaaacgagcaaatgtcatgagctcacaacttcattcccttacacacttcagtgacatcagtgctttgacagggggaactgttcatcttgatgaggtgaggttgagatatggttgtagtaggatgtgactttcatgctttcagcaaaatgtatgtggggcttattaccatgaggaacttgggaagggatgctggctctcagaaccacagtgccattccatcacttctccatctgtctccaggatcagaatcctattaagaagcggaagaagatacctcagaaaggtcggaagaaaaaaggtcagtgaactgctgggacttaggtgatcaggtgcaaggtggggagtacaaattgagtctctttggatttgccattctgggtctcaccaagccctgtagtatctcttccatactgggcaataatctccttaggtgggcttttattttttgctttcctgagctggaaatcagcatcattcacaaaatgaatctctggattctgcctctaaggtcccacagctcctgttcaggcttccctaaatagaactggtaaagtgtcacttgaaggaaccattatcccatttcaattttattcctacttctcgtcttttgtcctgggaagatattcagggtactgcctaggagaccccacccctgtgagcccttccctctagatgtcctgttttcctgtccctttagcttttccaactgtcctttgcctcattcttggtttcccttcctttcaggttttcggaggcggcggtgattatgggtgtacatatttgtatattttttgtcatcctgagatacttctaatttcattgtatataggtggttttccctggaattcattaattgtttgctttggacatgtggagagagccttactaataaaattgattttgcttatg

SEQ ID NO: 202247 - DNA, 1000 bp, Homo Sapiens
gacgttggctggatattgtgtgctatgaatctgatttgtccaaatctggacctcagccaagccacctgtggtggaaccttgcaagtcaaggtcatgaacaaatttcttgtaactattggaaataaactaatgaggtagaactgtcatatccaaatggaagaggtggttggtactgttacttccttttgctgtcagagggttgttgacaatggcaaggggggatgttagtgagatccaggtggtggtggcttcttggtccactcagcttgcacacatgcaagaggagggtctgtggcccctcagccgtgctggtggcctccttcctcaagctttaacttgtgccctccctggcaacagggagtcatgggttaatgtcacctgtcatgcctctttcttcagggaaaatattaaaaggctcaaatccaagctgtgacttcccttagacagtgtaagcctgtagggtgcagccccaagtttatgtccaaaggctgcctcagaaccctggagggagcagcgcccagctggcagctcactctccccttgcagttcactggccttttcgcagccaggctaagataggcagtgcaaggagcttcccactggccagagcagctgccttgtagaatgtggggctggcttttagaagtttcacacgcttgcagctaagagtgcagagctctctgttttacttcgtgaaacattagcagctctgaggggcttggcttttggtaagggacttatagtctgacttgccacaagcaccttgagctcctgggttggttggtggttggttggttgggttgttttaaatttgatttttcttttcctgaagtttgttagaagtcagacctatgcaaggaaaaccatggcccacttcagcagccatccagtgggggtgcttaatcggtggtggtaggattcatggaaacgtttttttgaaatgaaagagaagatgatgtacttacattgtaaaatggtttacaataatgtttggcatctt

SEQ ID NO: 202248 - DNA, 1000 bp, Homo Sapiens
ctctatcttccttcctttcatcctgccatctttcctagcctaaatacaaactacagtgtttattctctaatccagatttggtaggttgaagctatttcttacacagagctatatttcatgtaactgattctaaccaggttttacctgtagcaaacatgtattgttgcagagtgacctcacagagcttacagcttccatacgggccttctgtgatggtgggtttttcccccctgcagaaacatggcttagttataatccccgatggcactcccaatggtgatgtcagtcatgaaccagtggctggagccatcactgttgtgtctcaggaagctgctcaggtcttggagtcagcaggagaagggccattagatgtaaggctacgaaaacttgctggagagaaggaagaactactgtcacagattagaaaactgaagcttcagttagaggaggaacgacagaaatgctccaggaatgatggcacagtgggtgacctggcaggactgcagaatggctcagacttgcagttcatcgaaatgcagagagatgccaatagacaaattagcgaatacaaatttaagctttcaaaagcagaacaggatataactaccttggagcaaagtattagccggcttgagggacaggttctgagatataaaactgctgctgagaatgctgagaaagttgaagatgaattgaaagcagaaaaacggaagctacaacgagagttacgaacagcactggacaagattgaggagatggagatgaccaacagccacctggccaagcggctggagaagatgaaggccaataggacagcacttctggcccagcagtaggaaaaccacccttcaacctgggtgatgctccttggggccctacctagagggactgacttttgtccattgacacaaaccccttttagtactgttttgagttttgtcattaaaacagccacctttgtattttataatttatgacagaatgaagtcattttgaatct

SEQ ID NO: 202249 - DNA, 1000 bp, Homo Sapiens
aagtggggacctaattaaagcactctgcacagcaaaagacactatcaacagagtaaacagacaacatacagaattggagaaaatatttgcaaactagacatccaacaaagatctgacatccagaatcaataaggaacttaacaagcaaaaaacaaccccattaaaaaatgggtgaaggacatgaacagacacttctcaaaagaagacatacaagcaatcaacaaacgtgaaaaaatgctcatcactaatcatcagagaaatgcaaatcaaaaccacaataagataccatctcacaccagttagaatggctattgtaaagaagtctaataacatgccagtaaggtttcagagaaaagagaacatttatacactgttgtgggaatgtaaattagttcagtcactgtggaaagcagtttggagatttctcaaataacttaaaacagatctaccattcaacccagcatatgggtttatttcccaaaaggaaataaatccttctaccaaaaacacatatggtcatcacagtgctattcacagtagcaaagacagatcaacgtggctgcccatcaacagtggactggataaagaaaatgtggtacatataaatcatggagtattaggcagccataaaaagaacaaaatcatgtcctttgcagccagccacatggatgcagctggaagccataatctaagcaaattaagaacagaaaaccaagtactgcatgttctaacaaatgggagctaaatattgagtacctcaggatgcaaaggtgggaacaacagacactgcagactggaacactgtgggtgaggagggcagaaggataggttgaaaaactacctattgggtactatgctcactacctgggtgatgggatctgtacctcaaacctcagcatcacacaatatacccttgtaacaaacttgcacatttacccactgtttctaaatgaaaagttgaaatattttttattaaaaacacaaaagcaatatgtttctc

SEQ ID NO: 202250 - DNA, 1000 bp, Homo Sapiens
gtattctgggccagccagcacaacccccagcccacagtccaagctgtggacagatacaggagcaagtccagccaagatcagccaaattcagatcagcagaactgtctagctggttcataacttcatgaactataataaataatggttgtttctgttttaagcttctaaatgttgccatggttggttatacagcaataactaactgatagaccttcccagagcaatgtctttattggtactcccaccaccaatgtataagaacacttatctcagttactccctgacccatcctgaggaataactgcaaacttctgattttttagatcttcaagggtccagggtgggtgtgtagagactgcttattgttccccaacatctggtctctccttcttccatagtactagaacccttacattttagctgcatttcccagtctcccttgctgctaggtgtggccatgtgactaggttccaaccaatgaggtataagtagcaacatcatattgccacttccaggagatggactactgcattcagattctggttttgccacttctctgttgaggaactttggaaaggtgacttagtttctctggtgcatcagtttcctcatctgtagagtggggataacgatagtatctgccttatagtgttgtcaagaagtgaagtaacacaatgatgcatttagaacatgcttatggctgaatgtggtggctaacagccagatgtggtggctaacgcttgcaatccgagcgctttgggaggccaaggtgggcagatcgcttgaggtcaggagcttgagaccggcctgggcagcatggtgaagccctgtttctactaaaaatacaaaagttagctgggtgtgctggtgcacacctgtggtccctgctgctcagggggctgaggcatgagaatcacttgaacccagaggataaaggttgcagtgggccaatattgtgccactgcaatccagcctaagcagcagagtgagactctgtctc

SEQ ID NO: 202251 - DNA, 1000 bp, Homo Sapiens
acatcttttcatcagaaaggagggtaatattcataaccaaaagagatgtaaaggaagtatattactgcttgaagtgtgaaaagaggaaaggagtgttatgtgaaccttttcagtagggaaattcagaaaatggaatgattcatccataggcataattcttttaggagattctgtgctcaaagggaagggaatggtttctgatccttctgaagagaaaaggaatagcatttttcttaaacctaacccagtttcagcattggagaatacagaactttttcttctagctgatggcattaatatttcttgagagagagaactcacccatggcacttttctgagcccagcagaaatcagcggagcttgggcttcgcttagcaggtttgcaattgacttcaacatgcaggcttttcacatgtgcaataatgctggaaacagaagcaccaaactgattgtgcaattactccttttgtagaagaggccaaaatcctcctcctccttcctttctcctatattcactcctccaggatcataaagcctccctcttgtttatctgtgtctgtctgtctgattggttagatttggctccccttccaagctaatggtgtcaggtggagaacagagcaaccttccctcggaaggagacaattcgaggtgctggtacatttcccttgttttctatgttcttctttctagtgggtctcatgtagagatagagatatttttttgttttagagattccaaagtatatatttttagtgtaagaaatgtaccctctccacactccatgatgtaaatagaaccaggaataaatgtgtcattgtgataatcccatagcaatttatggtaagaacaagacccctttccctcaccaccgagtctcgtggtctgtgtctgtgaaccagggcaggtaattgtgacactgcatctcatagaactctgcctgcccagatttttgtgtgctcacctcaatgggtgaaaaataaagtctgtgtaaactgtt

SEQ ID NO: 202252 - DNA, 1000 bp, Homo Sapiens
ttgacttacaagctgtgtgaaactggggaagtttaacagctctaggcttcagtttcctcctctgtcttggaggttttatcagttcacatgtgaaagtgttttgcatattctgacatcctatatacctgtcagttttagtctcattctgtttaggctcccttctttttaggaagtcatttggatgacaccttcatgaccccgtcttcattcttccctagactttagagccagactgcctggacctctgtcatcatttattgattgtgggtttgttgttgttgttgttttgagatggagtctctctctgtcgcccaggctggcatgcaatagcgtgatctgggctcactgcaatctctgcctcccaggttcaagtgattcccctgcctcaacctccctagtagctggattacaggcacccgccaccacatccggctaatttttgtatttttgatagagacggggtttcaccattttggcagactggtctggaactcctgacctcaggtgatccacctgccttggcctcccaaagtgctgggattacaggtgtgagccaccatgtccggccagatagtttgaccttaggcatatttcctagcctctcttctccgtacttttctcatctgtaaggtgggaagaatgattatacccacctggttttcgttgttttttgttgagaggattaagttacttcactttgagttactgtttgaatcctgccctagtacatggtagtcatcatatgagtgtgagccatgactgttatttcataatttctaactcatttttatgagccacctcagtctcatttacaaactctaatttcactgtagtgattgcttattagaaaatagtcaggcgtggtggtgggcgcctgtactcccagctgcttgggaggctgaggcaggaaaatcacttgaacctgggaggcggaagttgcagtgagcggagatggcgccactgcactccaacctgagtgacaagagcaacacactgtctc

SEQ ID NO: 202253 - DNA, 1000 bp, Homo Sapiens
cctaccactccaactatgctggagccaccctgacattttctgttcctacaacatccaagcttattcctggctcaaagccttagccttttctattcccttttctgcacgcagaaggactccatatggctgactcctctcaattcaaatctcagagcaaacctcacctccttaagcatgccgtacgtaaggatagcattttctcatctccataggttcatttctatatgtgaaattacgttttatatttatttgcttccttgccatctcttccctactactacaatgaaagtgtgaaaagggagctgtaaaacaataccaaacatatagtaatgaatggctcattaagtatttatttgtttaatcactgatgcaagtactaaaagtcccacatttaacaaccaatctgaccagaattgcagcagcaacctaaaaactggaaggaattatcagagggaatatgaccaactgtaaatatcagatctaagagtcattaccgtagctgcagtgtggtctacaaagaagtaacagaagacaacttttgataacaactggtctaatgacctttaacaaatcacttagcctcactacaactcatcttcccatctgttaatgcaaggggcagacatgacatgaggaaggcagaggcaacaggatacgaatgttttgataatactgaggaaaaaaacctctcccctccccgttaagattgagggaaccaatgtaaacaagtaaaaaattgtacaagttcacatattttaaaaggcaactttaaaacttcaattaacatggcattattcaaacttactgatcaatgaattccacaccaacaccaaacgcttctgccatatagccaagggttaatgacctatatgattccagcagctgactgtatgcatgaattctcatttctcttacatagtatcgataatgaggggcaaaaagccagtcctttttcatttcctgttccacaaccgctgcaatgaataaaatgacaaattat

SEQ ID NO: 202254 - DNA, 1000 bp, Homo Sapiens
ctttcctaccccccgagattaggagttgctgtttgggtgcatactgcagtaccgtggcaccatgatcgtggcacgtgaaacctgaagaagaaaaacatcagagaatttctcaaaacaatttcttgtcttggtaattatgatgtctacatccacatttaaatacagaccttactgatgcatttttcattctaaggtacatttattgttttgtaagtcattgaatttctgtaatcacatgattaaagaaaaatgttaagcaatgtcagaacaaactttttatccataatctcaatatgaaatgaacacagagagaaaaagaaagtttaaaccttaagccctaagtgatactgcctcataaaaagtatacagaagagcagagaccaaccttctcaaagttggtgagtattaacccagccaagtgctgtaccgtacaaaaagttcttttcaggtaagtaattgaaacaacgacactatgagaaaatgtgtgaatgttttcagttacaagttaagaagttcattatccttcccaggagtatttgcattttaatatgattaaagattcaaattaacatgcagaaaatctgtaagcaatgttaaccactgtttgcagaattctgcaataaaattgagaattaactacatatttcaaaatgcatatcagtgtattaaaagactgagaatctttctgtctttctgacaatctacttcatttaaccaaacttacttgagcatggagcactttttgggtggtactatgtggaagacagagttaggacactaatttggcaagtattgtcttaaaaggaataatatttaaatggcactgtttacatttctagtcattataataaggttaacctttgttttattttatggttagggccaggtgtggtggctcatgcttgtaatcccagtacttagggaggtagaggtgggaggatagcttgaccctaggagcttgagacctgcctgagcaatacagcatgaccttgatctccac

SEQ ID NO: 202255 - DNA, 1000 bp, Homo Sapiens
aaattcaccatcgattaatttatatcttctgttgtgatttttttcaactatataacaagtgccaactaattgtccatgggacaatctacttttccactcaatttatcgttttgagtagggaaaggttcatttattttcattacctggcattaagttaaagaattcattattttgcatacatttgagtcattctgtgacctataaagtgtttttgtaactatctaattctaatggttgcaaagcaaagcacatgactgtaaaaccaagcaaggtgttttagtaactttttccctgaatacttggtagtttccattgatactattccaaaacaaattctgctgttttaggttgtatatttactttgcttttgttctaagaaaaagccaaggactaaatcaacttgtttttgtgtttcagtaatcagtttaaaatctaagatttttttttaaattagactatttaatgaagtgccatgtaattgtagcttgctagtgtttaatgtttaatagactggttctgtaggtgttttaaccatttaacactctctgccatccctggagaaagtggttctactcttactgaacacattctctctgacaaaatcaccagctgctttatttttctatttattacagttaaacagttgatgaggtctgaatcttgaccaaaactgctcagctgagatgtttttcacaatagacactgtacaaagtgtgcgtgcaaaaggacacggttggtagtattttttcattaatgtgaacattgactaaaaaaaagcagtcctgccttttaaatcttgtggcagctcagaagggaggtgcttaagaaccttaactactatgtcagataacaaaatatttttttccattttggagattggttactgctcacacatgatgtatagggctaaatatatgcttgtttccttgcacctgtgtacttcccctctctccctccctttccttcccctgtaggcaataaatggccattttgcaactgc

SEQ ID NO: 202256 - DNA, 1000 bp, Homo Sapiens
ctcaagatgtaatatttgttttattattaatacttttggttgttttgattacttatttcctactctcctgacagataattgatcaaccaatataaccttccccaggttaggaacagttctgccttcagcagtgctgtgggaatgaagggatctttggggctgacagcctatgatgtggagggatctgcactcagctaaataaatacatgctatagataccttgggccaaaataaagtctctcttgataaggtttttctgtgatttcccagagtccttaaccttctctgtctgcaagattatcaggctcccatagccactaactttgagctttgggatgaaaatgacaggattgcccagtgtgccgggttaagcaaattagaggctgcctggcagaacagaaaaactatcacatgaatatttagaatggaagctttcctgaaacactccagatactgcaaagctatctttattcctctctaaaggctataattttatcaacacaaagtcagccttttctttttccacattagtaatgtttctgaagttggatgtgcttagatttcttaaatcagaatgagtgctaggaaatctataacaagaaacctcttttgcttctcccagatttcctttcactaatacgggatagggaggctccttgggtaatgctaacctatgcaaagaagttaccaaatggtggtagttgctagaattaaagacacgttcttggttcacactttgatgtagtgacctgaatttactcttttcctgtgagtattctactctgccctattgcactctcctttgtcatgtggatgtgtgtttatcataggtctttaacgcgtccttcccaagaagacaaagcatacagttgtacatgaagatatcttatgcagtaaaaacgtgaaatttgaacattgctgcacaagtattgtataaaaaaaagtctgtaaagaactttcttatgtaaacatacaggggaataaagacttttatctgttc

SEQ ID NO: 202257 - DNA, 1000 bp, Homo Sapiens
cagactgggtctcctaggaggtggtggtgttggtgacaagttctacttggactgggactcaacccaccattgcctacctctcttccctgcctggagaccttccttaggattgaagaaacctcttttgtttgtgaaaaagataggtatcgagatcttaatggagagaacagaataaaatgcaaggagccaacccctgggtattctcaaagcatttcaacggtcagtataacaaggtttgattgatttaaaatataacattctgagccctgtgttactgagcaaaaatgagctgatttggtgagtatgttttatatatggtcattagacagggaccataactgacaaaactctcaaacgcctggagtgtttatggcccaccagattattgctcagtcaatataaatttatttacctttattttaatttgcatagtgctttctgattggtcagacaaggagtggtgtgtactgcaggattctaacaatgcctctgcccttggaggcagcaattcctgtggttattggtgctaaaataagataaaatattatgttaatttgttctgatatgatgtgaataaatgtgttgtttaatcttaacaagaatgctacatcttatcagatctattgtactgtctgttccttctcataattaattaattacaggaaaggcgattcaaaccagatcttgaaactattgtgatgttctgagaggtaaatttaacagggaagtgggaggggggatgaaaagggaaattgccaggttcctgtgactttgaaaggactgaggaagcagagagcatttggggacttcactgaaactgactgcatcttgcaattttctttttcgaattggcagaaatattgtatttccatcgattgaagaaaaacaagtgtctggtaattaattaaatgacttgttcatggaaaaaataaataatctgtcagttgtggaatgtaaactgattaaacaattaaataaagaagattatgttgtgtgtttt

SEQ ID NO: 202258 - DNA, 1000 bp, Homo Sapiens
cggcagatcgagctggcctgtgactcccaggaagacgtggacagctggaaggcctcgttcctccgagctggcgtctaccccgagaaggaccaggtgaggagccgtcctgcgcagccaggcccagagcccccacctgggagaggaagcagggctggctttccccaggacaggtcattttcaggccatgttagccaggagtctctgaaatcatgtagcagatgcccacttgagcaagcaaaggagaaattgggggtactttgtcatcagggcccagaaagttccctcacggaagccagtgaccggggcacacaggggatggggtcccacttgctttgttctcttctcttttccccttccatcctgaggtagagtgaacatggccacccttggccccaatattaaaatgccttgccgggcacggtgggtggttcgcccctgtaatcccagcactttgggaggctgaggtgggcagatcatttgagctcaggggttcgaaaccagcctggccaacatggtgaaaccccgtctctactaaaactacaaaaattagccaggcatggtggtacgtgcctgtaatcccagttactcaggaggcttaggcaggagatcgcttaaacccgggaggtagaggttgcagtgagctgagatcacgccattgcactccagcctgggcgacagagcaagactccatctcaaaaataaaataaaatgtcccaaggttgggtgtggtggcttacacctgcaatcccaacactttgggaggcaatgtgggcagatcctttgggcccaggagttcgaaaacagcctgggcaatgttgcaaaacccttctctccaaaaaatacaaacatacccaggcatggtggcgcacccctgtaatcccatctactccagggcgctgaggtgggaggatcacttgagctctccctgggaggttgaggctgcggtgaactgtgtttgtgccactgcactgcagcctgggtgacatagcaagactgtgtc

SEQ ID NO: 202259 - DNA, 1000 bp, Homo Sapiens
tggataagcggccttttctgaaaggatatttaaaaatatatactatttaggctgggcccagtggctcatgcctgtaatcccagcactttgggaggtgaaggtgggtggatcacctgaggtcaggagttcaagaccagcctggccaacatggtgaaaccccgtctctactaaaaatacagaaattagctgggccctgtggcaagagcctgttatcccagctactggggaggctgaggcaggaaaatcgcttgaacccaggaggtggaggttgtagtgagccgagatcacaccactgcactccagcctgggtgacaagaacgaaactccatctcaaaaaataaaataaaatatatactatcttgctcctcagaaccagtggggaagaagagggaaggcaaagaaagaaactgagcatagtaaacacagcatttttttgtaggctcttatttaaaatgtgtgtgtgtgtgtgtatgtgtgtgtttctgagtaagtattgactgggaaaaagagagaagtcaatcaaaagtatactgtgcaattgagagaggctggcccaagatttaaaacttcctgtgggtaatctaactgtgagtagataggaatcggccatatgacgaaatgagatcaataggaaatgtgctttttgaggaaattttattttagtaccaaatgttgccagtgacaatcttcagttaagaagtaagttattctgacctaaaattcttatctctgccactttggtttaaaaacaaaaacccttatatacatggaatagttatattttaattaagcatttattttagttgttttcatccattcaagcaaaatgaataagcagcatttttcattgcacttaaaaatgtaaaatacctgcatgccactaatctgtaacattttaccagttcagatgcctgtaatgtgtgactttatgtgtgtctgtgttgttttgaagagaataaaggaaataatactttgcaaaaaaaaaaaaaaaaaaagaaag

SEQ ID NO: 202260 - DNA, 1000 bp, Homo Sapiens
tgcttctcctcccagtacaaagccctcccagcaagccggactggtatgctccctgattcgcgtgtccaccagctccactccagcgtgtactttctaccttcctgttaatgcagagtgccgatcctgtcctttgaacaatccaacttgggaggtaccttggattaactagagcccaactctccctttctagatgatgggaagacatacagagtaaagaacctgctctgaattccattacacaatgagatgatcttcagcttctccaaccaacctgaagcccgtgtcctctggcgtctggtactcagatgtcacgaagcacgccattggactaagatggtggtttcgcatagtgccaagcacctaacaggcatcactatatacttgctgatgtgtgaattctgttttactccagtgattcagctctgccaggccattgtttcacttacctgcctcctgaaactctgcaagacttggtagaaaatgaatcatcaatttgacttgttgtttcttcaaaactttgactgtgaccttgaaactgtggttctgaaaacaagtgaatctttgaaaaagtaaacagaaacacataaaattattttcctaaacacattaactaatttagcctttgaaatgatgacctaaacatgacctgctgacttttgttacagtaaactggtacgaattttagaaatcctttaattttccatgtctacattcatgatcaattagaaacatgttagctgcaccattcgtgactatttatttaattcagagacatcaaagtaaaatgcaacaacaaaggtaactttctatagaacaccctgttgtgaagctgtgaggtattttaaagctttattgtggtcagaaatcattgttcatcagttctgacattaacgacaaacagtattttggaaagacatagtgtagtttccttccttctcaatggaagacacttgctgacttatcggaatcctgtgaatgccaataaaggaggctatagtgg

SEQ ID NO: 202261 - DNA, 1000 bp, Homo Sapiens
actaggaactggggaaagatgttcccgcatcactggttttttctgctcctcagatgcgtgacgttggatgagtccattaatccctctatccattatcatcttttctaaaccaaaggattttactagatcatctctgaaatttcttccaggtctacagtggtatgattatataaattactagacccatagtaaatcatctaagagctcatatgaccttatttagaaaggaaattacaaatcttttacacttggatctggaattgcttttgtaaatgtgaagctactatgagttgaattacacttttgtttcagagattgactttatgaagatccttaggaagttttaaagttgaataagattcttcttcttacctttaatcatcacttttacatctcatttgtggagaatcaaaagtcactggaatcaaaagtcactgacccacaaagtgtcttcctcttgcaagatgggcaaatggctccacaacaacataaaacccagcatcacactgacggttacagatctgtttctgccgggttgagtctcctggccaccagaatcccagagctctcacccaggctgagatgcaaaagccacaagcacagtggggagagaggaaaataagagaaggagcccatgactttgagatgtgaaataaaggagaaccaacaatactctgtgcctactcatgagcacctcggtgtactccagaactttcatttcaaaaagttaaataggaacctttgtccagagattggctcagatgttctcattagatcttagcttgaagcctcttctgccagttcctccctgtttttatagtaagtctcataaggcatggtcctggacccacagccctgtatcatatggaaaaatgatgcaggccgggcatggtggctcatgcctgtaatcccagcactttgggaagccggggcgggtggatcatttgaggtcaggagttcaggaccagcctggccaacatgatgaaaccccatctctact

SEQ ID NO: 202262 - DNA, 1000 bp, Homo Sapiens
ttgagatactgatctaagacctactctagatggaacatctgggatcttgtgtctgaactcgtgctgagccacagacccacagaggacgggctgtcacaggcccccttttgttctagagatcacatccacccatttgtggtatttgaaaactctcagaaaagctggcataaagtttgctttgagatgtctgtgagcacatccttcctctaccatccctggttagaatggcgttctcactcacctatccacgctgcagatgagggtgaagaagtaaaaccatttaaaacatgcatcgcagcaaaccaacatggcacatgcatacctgtgtagcaaacctgcacgctgtgcacatgtagcctagatcttaaagtataaaaaaacaaaacaacaaaaaaacatgtgtaaccaacacacaaaaccctacacaaccaaacggcactggtctctttcagagccttccctcaccaagccctaccctgtccccagagatgaggccatgacatgacagtactttagagagttttagcaacgctttgttttttgagcccatgtgctcatatgagcttgttcaaaccccagagtaggggcctgaatgactggacctttacacatcagcgctggcccagaaggttacagattggcactgggagtctcccaggaaggaactgctgagcactttttagttaatgaaggtccgaagtctcagctggtgaattgtcaaaatggatgatgtactcaaatgtaaatgttttgtgttaaagaattatcatctacttcttgtttcttgtgaatttcttttgccctttttcattcctgtcttcttagagggtctttttgactgctgcaagtggggtcagttgctcctctcctcagatttgtgaaaggccctgttactgtatttaacattttattgtaatagtctgtttttttctatctctttttccattgtttggtgcagctgtgggtactctataaatgtttgattaaaaaaatgccaaat

SEQ ID NO: 202263 - DNA, 1000 bp, Homo Sapiens
cgacttggtttcagtgaatctattttgtttttaactacagtgatttattagctcagtatctagaaattacgtatattttgtgctactgtcatcgatgtgtaaactctgtttttatttgtatttatgcacttggttcccatttggagcctctggtcttttctgggataagtggtgtctgccgagacatctcccggttgtcagtggtcaggagcagctgagctctagtctgccagctgctctgctctttctgggaaggaggtggcgcccgcccctcagggtgtctccagggctcagcttccggggtggtagagctggggagccccaggggtggggggacagctgggagatggaggtggcacctgctcccctagatcagtactggctctgaggacaggtgagcagtgggaagaccaaagaatggctggcagcgctgccagggttggaaatgggggcaagatcctggggctgtgtgccctggggcctccctcacctgtcttggtggccatggcctcagggatggctcctaggtggctgaggcacagcagtggctggaaggtgccccgtggaggctgaggtggaggcgcgcccagcagctcccccctgtggccatggcgggcacggggcgtaggagctggctggcggccggctctgcatgttcttgttgcctgtcgtctgtaactctagtgttcgacattcgccgtgatacagtggtgtcacgacgtgtgtaactgtggtcagcagaccttgttccgcgtggacgcctcaagtggattaatttctggaagcctcaatctgtatgtttgagtatttacatgagaatgttatttgaatggaattttcttaacccagaaggtagtatttataatcatttacttgtagcgaactgtttaaagttaacacttgtttaaatttttttacactatagcatttatgcaatggtttacagaattcatggagttatttttatcagtatgggaattaattaaaaccttgaatcttt

SEQ ID NO: 202264 - DNA, 1000 bp, Homo Sapiens
gagatggagcccaattaggtgcctgcacccgcccggtggacgtcagggactcggggggcaggcccctcccacctcctgacaccctggccagcgcgggggactttctctgcaccatgtagcatactggactcccagccctgcctgtcccgggggcgggccggggcagccactccagccccagcccagcctggggtgcactgacggagatgcggactcctgggtccctggccaagaagccaggagagggacggctgatggactcagcatcggaaggtggcggtgaccgagggggtggggactgagccgcccgcctctgccgcccaccaccatctcaggaaaggctgttgtgctggtgcccgttccagctgcaggggtgacactggggggggggggggggctctcctctcggtgctccttcactctgggcctggcctcaggcccctggtgcttccccccctcctcctgggagggggcccgtgaagagcaaatgagccaaacgtgaccactagcctcctggagccagagagtggggctcgtttgccggttgctccagcccggcgcccagccatcttccctgagccagccggcgggtggtgggcatgcctgcctcaccttcatcagggggtggccaggaggggcccagactgtgaatcctgtgctctgcccgtgaccgccccccgccccatcaatcccattgcataggtttagagagagcacgtgtgaccactggcattcatttggggggtgggagattttggctgaagccgccccagccttagtccccagggccaagcgctggggggaagacggggagtcagggagggggggaaatctcggaagagggaggagtctgggagtggggagggatggcccagcctgtaagatactgtatatgcgctgctgtagataccggaatgaattttctgtacatgtttggttaattttttttgtacatgatttttgtatgtttccttttcaataaaatcagattggaacagtg

SEQ ID NO: 202265 - DNA, 1000 bp, Homo Sapiens
tgtggactgaaggccttgagggaagcagtggctggaggagggtgctggacccatgacacgttgcttcctctggcttttccctgctgggccgctttctcagaggcatttccccacccctaacacccagtgggcccccccaggttctgtgccactcagagggaccctggcaggggccagaaccacttaagggtggtgctggagggccttgtgccccagtcccatcccaggacgccctgagggatggacgcagccatgcaccccccatctggggcctctccctgctccctctcccacctggcagctgggagttctggcttctaggcctgccctgtcaccaggcctctgagtggccaggcccttccacctccccatctgtaaaacgaggcagctgcccggacagccttggggtccttagtggccctgcaggtcctctggcagctctgctgaccccaccctctcccggactgcccttctgtcccagaggggtcaccctgacccggcccaccttgccactgggctttggactccagccctgacagggcccagccacactggctctgcccctcgaaggggctatgagcaaggtaggagggagctggtctcctttcttcgggccccacccaggccctgagcaccccccacccctgtgagggccccaggccttaagtccctggcggggtcatgggtttgcgacttgagcagagcggaggaacagggcactggaaggccgacgagctcagcatgcgactcggtgacggaccaggctcggcagggccggtgtactttttgtggttgtcattggtgtgttgttgcacattccaggacgtcagtattttaacaggttctaagtgcctttctatcgtagcttatgttttcctcctcttggctccattgctgttagcatagagttttaaaaaaagagataagctaatgactataacaatatattcctccatgggagaggaagtttataaagaaacaataaaagtgagttgcaaag

SEQ ID NO: 202266 - DNA, 1000 bp, Homo Sapiens
cccataaatatgatgattttgtggttagctgaggttttgttttgttttttatttttttgagacaggatctcattctgtcacccaggctggagtgcaatagcatggtcacagcttactgcagcctcgacctcccaagcccaacccatcctcctgcctcagcctcacaagcagctgggactacaggggcgcaccaccatgcctggctaattttgaaatctttgtagagacggggtctctctatgttgcccaggttgttctcgaactcctgggctcaggtgactctctcgcttcagcctcccaaagtgccagggttgcaggcatgagccaccatggctagccttgtttttatattcataatattaatacaaacacacttgtgcctatagaggaattcattttgcatcagccaacttctccatgatgtgcaggaggcatcatgcctacaaaccatgatattctgaaggaccatgaaaatgtttcaatttttttaatcaagagcaataaatgaacttacaggtctaaaaatgttttatgatatcattttaatataatcatcttcatagcaatgtgactataaaatgaaatttttattaactgttttatggagagaaaggcctactaaggcaaaaatagggcccctgaaagtcaccacgcagctcggccttgtattccttctttcctggggcatcctatcatagaatttaagtattgacaataggaacccaaagtctgagacaagatgatcctttgaatccccaagtaactagccacttacttaaagaactcatgtggattgtatcaatgttgtaccagagatattatgcttgaaaacaacagtccaggaaggtcaggcttggctctacaaaagtagaaggggcaaagtatggtgaggcatgcctgtagttccagctacttgggaggctgaggcaggaggatcgcttgaggccaggagttcgagaccagcctgggcaacatactgaaacatcatctctgaaaaaat

SEQ ID NO: 202267 - DNA, 1000 bp, Homo Sapiens
tatctaatgctaataaattattgtggtactgccagtattaaatatatggcagatggtattaactactgatcaatagtaagcatacagaactggggattatggattttataaactatgagacagtcaccccagtttggactgggactaatccccagtactgatttgtcatccactgagtagactttatgaatattttgggtaatttgaaatgatctcattattgaaagatgatttcatatgtagagaagataatatttctttcttgaaaaacaagtcaggcttaccatgatgtgtgcaaccaatgtaggatctttggcttgtcaaatcagattctccattgctatagtgtacagtgcacacagctcatattgcttccttcctgggtgctgataaaaataagagcatggaaattggtttcttgaatataagctttaatttttaaggcttaaaagtattcatagaggtagactgtatgataaataaaaacaaatttaattcacaaagttatctgtacactgcagttttaaaatataccaactaaattattgggtttctggaagtgaatggagaaaacagcaagggaagaaatcgtttttaagataagtaaataattcccatggattgataaatattttccttttaaaatgttatggactgatattttttattcacctttaaatttcttatcaagaagtttatctttgtttttcagatttaaaaatgaaatacaggtattcgtcactttcctgaaaccatgctaaccaaaatcagtagccaaaccaattcagatagatgtgtctcatctaattaaacccattggtttttatgggagggctgcattaagagcacccaaccaccacatgtaagttgataattaccagcatggcaggtgattttatctgctgaccaagcgcatagttttgttttgttttcagaatgttctagggaacatttgagattttatgtgaaataaaattttaagtgccaaagccaaaaaaat

SEQ ID NO: 202268 - DNA, 1000 bp, Homo Sapiens
acctctcatcacccagggggatggcctccagtcagctggggtatgtatgcagctgtgtggcagcaaatatgtccatgcctgcaagccactcagccctcagtcacacggtgatgggcactaatatccaagaggagcagaagtcaaggccatgggtccttttctccccttgccagagatgcagccccacagtccctggtgatcttggctgggagaaaaatcagagtttgacatctcatcccactgccttctgctttctgaccttactgaggtcagggtcatcaaggcctgggggactgggacagggttaaggggtgtcctttctccatccgtcttccaaccccgtggagactcagcatgcctaggaaggtggaagggcttcctgcgggcacaccatctcccgcctccctgtgcctgtcctctgctgggtcctgggttctccagtgattatagcccttgctgcttcccccacagtggggaacacagagccctgcccagaggcttgaacctggcaccacaggggtctggaattacacagaagacgggtgacagccaaggtggatcatgaacggtgagaagtccagcaggtgacaaggggaagggtctaaagggtggagggcacagcgcaagcaaagtcttggcaacaaaagagctaatgcatcccagaaatggggcaggtggagtactggaagctacaccaagcttcagagtggtcctgtggcctcggtgtggtagctcaggcctataattccaacactttgggaggctgaggcaggaggataacttgaacccaggagttcaagatcagcctgggcaacatagtgagacctccatttttacaaaaaatacaaaaattaactgtgtgttgtggtgtgtgcctggagtcccagctcctcgggaggctgaggtggggggatcacttgagttctggaggtcaaggctgctgtgggccatgatcttgccactgcactccagcctgggtggcaaagcaagatcctgtctc

SEQ ID NO: 202269 - DNA, 1000 bp, Homo Sapiens
acaggggtcttatgagggggaaaaaataagatgtttaagggttgttttaagagagagatccttcttttaaagtgattttatcaaagccccttgggttagaaatgaaaaactctatagctatttttttcctattctcgttttgctatttttatttctgaaaagtgatttgtctgaaaagagccttatatctggttttaacttctcctcattgacccttttcacagtgaaatctctactttatccatgctctgaactttttatttatggagcccaaactaattttcccacaacaaatctcacatacttttactcctatcattaaacaaattaatgtcctccacaaagaaacatctggctcttcctacaagaagtcagaagctaatgaggtctcactctggccctggcaagatctcacagtgtgccttggttctccctgtgtaaactgaggtagtccggctattccccagcgcccaggtgttgtgagtcctaataaatggtgaaaagcattttgcaaatgttctgtactatataaatgcatagtgcctaatatggagagtcttcaagcaaaaatgtgctctagctcaattcagaatactaattcacccattgttttcaaaagaaatgttttactaacctgtttttttttcttttgtaaaattagtttctagtcatttgaactgtttttattttgtgtatagaagtgatcaatagtatatattcttgcttgtcagagaatacccaagttgtattgttaaatgttaaaacaatggggttacataacagtatagttggatagggaggaagattctagctcaaaagttgcaaaatacagaaatacaaagattagctttgaattggagattgtactataaatagtagatgttaatgtggtggtttctagatatatactttatttttaagttacaagaaattgtcttttatttttgcagttttgaactatatgattctttacatgttttaaataaagtttttatcaact

SEQ ID NO: 202270 - DNA, 1000 bp, Homo Sapiens
atgtatattgaaaattatacctcagacattgcttatttgcatatttgtgtgtatttagtctgaataatgaaattaagactttaaaaatgaacattgcattgtttcatagtggcgtaagtttcatgtgagccttgggttaatattaattttccacttcctttttttttttttttaaaggattctatgcttttatcctgacatctgcagtcatcggaacatctctcttccagggcgtagagtttcattacgtgtacagtcattttcttcagtttgcacttgcggccactgtttttttgtgtggtcttgagtgtgtatctctacatgcgctctttgaaagcgccccggaatgacctgtcgcctgccagctctggtgagcagtgatgaattgcatgttggatgaatgcgtcccagagccctccagcagccatttccagatttgaatagattgctttttttctaacttcatttttgggaaatgaagagaagtaagaaaaaatgaaaagatgaagaaaaacgttaaagagatatgaatttaaaggaagaaaatatttttgttttaccttcatactttcttactcatttctttttttgcagttgcttgatgacagtaagacgtttagtaaacttacaggcattttgacttatgacaaatattatttctttgtccaaaatagtaaacactctttaaaaaacaaaaaacaacagaggttactggccgggtgaggtggctcatgcctgtaatcccagcgcttcgggaggccaaggcgggtggatcacctgaggtcaggagtttgagaccagcctggccaatatggtgaaaccccatctctactaaaaatacaaaaatcagctgggcgtggtggtgcacacctataatcccatctactcgggaggctgaggcaggagaatcgcttgagcgtgggaggcggaggttgcagtgagccgagactgtgccactgcactgtagcctgggccacagagcgaggctccatctcaaaac

SEQ ID NO: 202271 - DNA, 1000 bp, Homo Sapiens
agcaattaaaatatgataaatgctatgagagagatgtaaaaagtgttataggtgatctgataatggactgattgattacctggcagttttaaggaagcctttaaaaataatatatttgaactgggttttaaagaatgatataaatgttgctaatacaccaaaaaaatgtcatctgcaaatatggtttgttcacaaaatggagagaaggggaggatgataggacatgaggctaggaaatgtaggttgcagctcaatgatgtgtatgtagggccttattttccattctgaaacatagttagtggatttatatcaaaggatttcaaatagaagaacatcatgatgagaataatcttaggatttatatactctactttagggggtggagagttctttttacctaggcttagggaatagaaagtggtgtagagaatataacttcaattacttctttcatcatttttcttcctttagtccacaagccctagccatgccgtggtagccaatgttcagcttgtcttgcatctaatgaagcaacacagtaaagctttgtgcaatgatcgagtcatcaacagtattcctttggcaaagcaagtatcttcacgaggtggtaaaagtaagaagttgtcagtaacacctccctcctccaacggtattaatgaggagttgtcagaagtcttacagactttacaggatgaatttgggcaaatgagctttgatcaccagcagcttgcaaaacttatccaggagtcgccaaccgttgaactgaaagacaagttggagtgtgaattggaggcattagtgggaaggatggaagcaaaagccaaccaaataactaaagttcgaaaataccaagcccagctggagaaacagaagttagagaagcagaagaaggaattaaaagctaccaaaaagactcttgatgaagaaagaaacagcagcagccgttctggaatcacagggaccacaaataagaaagattttatgaaactgagacctggag

SEQ ID NO: 202272 - DNA, 1000 bp, Homo Sapiens
gtatgattataccataatttattcatcctgttgttaaaggatatttgggtttccagtttttctttttttactaccaaagcactacattattaatattcttgtatatgtcctgatatgtaagtgcaaaagtttcttttacagcaatggctcttgaagagtggttcccagaccagcagcatcagcatcccttggaacttctttgaaatgcaaattctcaagccccctacccagacttactgaattcaaaactatgtgggaagagcccagcaatctgtgtttcgcaaaccctccaggtgattctgatgcacagtaaaatttgagaaccactgtttaagagtattgacatagaatgtaattgctggatcatagagtatatacatgttcaacttttttgagaagcactaaacatttccaaagtgcttatattagtttatgtctctactatcaatagatgagtcaccccaatgctccccatcctcttctgtgcttggtattatcttttaggtattgcaaatacaggagatttgagtattatttccttgtggccttaatttgcatttctgattattaatgagcttgagcatcttttcatatatttagaagccactaatattttctctcggtaaaatgcctattcgagtctttgcacactgctgtattggatgtcaaattgatttatatattccctgtactaatcgtttgtctacatacagctttatcctgttttttttttttattctattgggtcttttgctgaacagaagttcttaatttcaatgtcattgaatttatccatcttttatgataatgctttttgtgttttaagaggttcttagctctcctaaagtcataaggacattttccctctactgctttatgaagttattttgtccttttcttacagtatgactttattttatgttatgtacggatataatttttttcataatgagtaaatagcccagcaccttttattaaagaatcaatcctttccctactg

SEQ ID NO: 202273 - DNA, 1000 bp, Homo Sapiens
tagtgtgatatatgttacctactgttgatgaacatcattactagtcctctaccaggctccccaaactcactgaggggctccacatttatgctgggctccagtcttgaggcatccctggggaaactgcagtcccagccatcgacttccacctgttccccctctcctgtgaaagtaaataaggtgagagtcagtctggaagcaaggagattgagggtgggggtagagagatctcattcacagagctgcttggtgtatctaagtgtgatgaagaagagagaggaaactaacaagatggagagggtggaggctaggccgagtacctgctttctgggtgagctgggacacagtgggcaacacaggagggtccctggtctgaagaaaatagatcaccagcaaggtcagggcgtagttactgagaagggggccactccctgggtaaataagcaataattccggttagatcagaggtgcttctaatcccctcactggcagttttctcaaccccggtgcccattctgacctcccttctctccctgaatccctgcctttgtcctgagaccaactcagccccaagtctgtcctgatccattctcacctgacagcccccgaccctgagcccagcagcggagggtgtacacgaggggccggactcgaccatccagctcagagcagagactcaggaaacgggagttatgcagggccagcctgggacaaagcagggacaagggtgttagcgcttggggatgtcagaacctaccacccccagctttcattccagacttgcataactggagccagctggaataaggccagaacagtttccccaaatgttgctcactgatcttgtgagacagtgtgcgaaaggacaaaggagttcgggaaacacttcatcctgtacgcccatcctggacattcacagcacattattataagactgttcatgagccatggtcacaccactgcactccagcctgggtgacagagcaacatcccatgtcag

SEQ ID NO: 202274 - DNA, 1000 bp, Homo Sapiens
tcttccatttgtttatatctgttaatctttgtatgtgttcatgtatagcttttacatgattggaatcataatgcatattccattttgaagtctgcttttttttacacaaaaatatgttgtgaatattttcctatattatgaaatatcattagctgagcttttagaattgactgcatgttttggtaccatttagatatagtttaagatacttagaagttatgtggctttgccactatggatgaatcttatttactcaatattaattacttacaaataacctcacctaaacactactcagccataaaaaggaatgaattaatgacattcacagcaacctggagactattactctaaaggaagtaactgagggatggaaaaccaaacattgtatgttctcactcataagtgggagataagctatgaggatgcaaaggcataagaaggatacaatggactttggggacttaggggaaagggtgggaggggggtgaaggataaaagaatacaaattgggttcagtgtatactgctcaggtgatgggtgcaccagaatctcacaagtaaccacttaattacttacgcatgtaaccagataccacctgttccccaaacacctatggaaataattttgtttttttttttaaaaaaggaatgagatcatgtcctttgcagggacatggatgaagctggaagccattatcctcagcaaactaacagaggagcaggaaaccaaacaccacatgttctcacttgtaagcggaagctgaacaatgagaacacacggacacagggatgagatcaacacacactggggcctgatgcaggggccgtagcggggagagcatcaggataactagctaatgcatgtggggcttaatacctaggtgataggttgataggtgcagcaaaccaccatgggacacgtttacctatgtaacaaacccgcacatcctgcacttgtatccagaacttaaaatattttaaaaatctttagagaatac

SEQ ID NO: 202275 - DNA, 1000 bp, Homo Sapiens
tgtcataatcacatcaccactgaattaccagatgtggtcaggaactaggcaaagtaggtgggaccaatcctaggactggggccataccacaacctcagctcagccccttgtcggatacggtttctgaatttagtacaatgccagaagtatttttttctttcagctgtgaaccagcctgttttgtttgacaaggctttccagattcatgcagctcaatcacgtgcttgttgccagtttgagagtgaacctattatttcaaacttgttgccgtgaccaatttttacaaaactgaaagtagcactgtgaggtggattggacctagtgatgaggtgtctacacttgcatccttttcttccaagagaatattctgacactccaactctagaagtcatgtcattagtaaaatgaaaataataattgcttaatcactgtttagaattagttcatacttcttcagagcttgaagcctccacgactcaacatcagatccatggatagtattactatacctttacccaaagactggatttattttgtaaaaatatcagaatgggtctgggtccctttaaagcaactgacaaggtatttaacaacattttaaaacaatgaagaaaggatgattctgcagaggctgctgggttacagaggagggcagagcttttgtcagactctcttgatgttttgctcttcctggtaagtttttatctatcatggttcccagtggaatattctccatacacattctgtgggaggatattgacatggctctagactctgccttttattttctaattctccttggagaattagaacaggcattccagaacttgtaatatagaggggaagaaagaaaaaatggcagatgcctcattgatggatccacaagttttgtacaaaagcacacaccattctgattgtctctatattaacattgtactcaccaaacagctttctaaaggtgactggaacaagataaatatcaactggataattacctaag

SEQ ID NO: 202276 - DNA, 1000 bp, Homo Sapiens
aaagatatcatttgggtcagagctcccctcccttcagattatgttaactctgagtctgtccaaatgagttcacttccattttcaaattttaagcaatcatattttcaatttatatattgtatttcttaatattatgaccaagaattttatcggcattaatttttcagtgtagtttgttgtttaaaataatgtaatcatcaaaatgatgcatattgttacactactattaactaggcttcagtatatcagtgtttatttcattgtgttaaatgtatacttgtaaataaaatagctgcaaacctcagtcctttgtgctacttgatgtggctttcaaagaagagaagccttgtcctgagtttctcacttggcttcaggaaggccccaggttggattccagaaaccagtgaagatgtggccacaggaggaggtgtgctgaggtggctgctgcccgtggactccctgcgcagcggcctgcagatgttggggctgggttacagctgattgaagctgagtggccctggggggtctgtgaggggagttcctccccagtgatgaaattctctccttccaccctcaaatccctagaccttgactgaaatgctccgtggtcgggagcctggtcaaggaggaggagctgctgagaggcattgttcgcccttgctcatagcttagctcgatgtccgtgtcagacaggagatgattgagaacagccttgcctgtcactgtcctagaacaccctggagtttagtgttctgtgtcagagtcttgggagcctccttcagacccagatgacgggcctccctctgtccaaggagcagctgtaaaggagaagagggatttcatttgtttggtggctgttaccttgtctgtaagtcaaacttggagttgagcagtgctttttaaacgattcccttttgcagctaaaatttcacagggctatttctaatacgtaagcaaatgttaccattgactttattaataaaatatagttttgctttgc

SEQ ID NO: 202277 - DNA, 1000 bp, Homo Sapiens
taagagtaccatgatagaagtgccagggatcaagtcagggaggtaaggtaatatggtttcgttgtgtccccatccaaatctcatcttgaactgtagctcctgcaattcctacatgtcactggagggacccagtgggaggcaattgaatcatgggggtgagtcttttccatgctgttctcataatagtgaataagtttcaccagatctgatggttttataaagaagagttcccaagcacaagttctctcttgtcttccgccatgtaagacgtgccttctgccttctgccttctgccatgattgtgaggcctccccaggcacttaaactgtgagtccattaatcctctttttctttataaattacccagtcttgggtgtgtctttatcagcagtgtgaaaacggactaatacataagggctcagaagggccaactggatgggcaaagaagccattggtgactttagtgagagcgactttagtggaatggtgggggggcaaaagccagattgcagatgattaaggaaacagttggaagacaaggaaggcaacagacatagattagccatttgctgaaggttaactgggaaaagaaggatggaggaaggctataccgggggctgcagagtgcagatgtgcatgtgtaatatgggagggagctgagggtttatatgctgaggggtaaaaggtgggatggagtcaggattgaaaatgaggaagagaggccaggtgcagtagctcacgcctgtaatctcagcactttgggaggccgaggcgggcagatgacaaggtcaggagtttgagaccagcctgaccagcatggtgaaaccccatctctactaaaaatacaaaaattagccaggtgtggcggcacacgcctgtagtcctagctactcaggaggctgaggtgggagaatcacttggacctgggaggcggaggttgcagtgagccaggatcatgccattgcactccagtctgggtgacagagcgagactccgtctc

SEQ ID NO: 202278 - DNA, 1000 bp, Homo Sapiens
taatatggaaagagctgggatgggtggatatacaaagtattcagagagagtaagaaaggagacataagcgtcgtttgtcctggacttattgccgtttttccttaaacagtgttggggggagagagacaattttgaagtgacatttgaatggggctatcaagggtgggccatcaaaattgaacatggagggaggagccagatgctgcaggaggaaacagaatgggctgagaaaggtgcaaaaaaagcagtacaaaggcatgaacaggcctgcagagctctggggctgttcaggaaggagggatggagacaaggctgggaaacatttggacattacgatgcaggtaacttgaactactaaaaatatcttgatgctggggagggatttagtcacactcgattatacaataacttgatggtaatatgaagggttgattggaggagaaaggatgtggggcagtgagaacagctggggccctgagtggtggcctgagtaagggacaggagagagctgtgccaataccaacaggaggtggcaatgaagccaaacgatatttatcgtggtcaaacacttcgacatggtggctgattggatgtgtcagtggagggttttctgagaatgaccaccgtgtattacttgcaatattaattttgtagctataatattttcagattatttaaaccaaaattggaaaatattcagaaaactgaaaaagtgacaaaggcttaaaacccaaacatacacatcactgttttaattaccaatgaatttaaaaatatgttttctatccagcctgggcgacatggtgagacctcgtctctaccaaaaaaaaaaaaaaaaaaaaaattagctgggcatggtggtacatgcctgtagtcctatagtcccagctacccaggagactgaggtgggaagatctcttcagcccaggagtttgaggctgcagtgagccatgatcacactactgcactccagcctggcagcagagctagactctatctc

SEQ ID NO: 202279 - DNA, 1000 bp, Homo Sapiens
accctcagtgtcctaggataaaaatagaaaagcaaagtgaagaaagacagagaatgtttttgctggagaaagtgaccaatgaagtaacatctttgaaaaggttattcttgaaggataagcccttagcaagcaaagatcatgcttagggtgtgggattgggtggcaatcccatcagaaatacagttatttgaacatgttagttgaaggaaaggaaatctttagcgtatattgaagcttcctgccaatcattgctacctcttttctttcccaaaatctgctatattaatacagatcatatatagcaagtttccactcttgaaatttacctgttctatgtgttttatcttctttaaagtgtcaagtaactacttcattaaatactcatccttttttttttttttttttcggaattctgggccttattgctctatgttttaattggaacattcttgatgcaaggcccaaatattgacccattagttcacctccactgaagacattacaatgtgtgaagtttactggaaaagaacgtttttgtactttatttgctcttatgaatgtaaatgtgtatgttttcctttttcttgatatagaaattgtttttgtttaaataactaattattcctttgattagacactcaagaatatagcacttcactgttagtatagtttaataaatgtattcactttcccatatataacatgactatttacaacattattactgtatttccttggacttatgtgataactttctactctaaaagtttattttgctatggaaattatcatggatactatgcaaaattattatttttctagttgatattattcttttcttagaagcacagatagacaagacttttaagatgtaattctgtcctagaaaaatagcttattttgccacctttagttttgagatagcacttcttaatgaactaaacttttgtcttaattttccactacaaattatctatcatattaaaagtatttaaaattc

SEQ ID NO: 202280 - DNA, 1000 bp, Homo Sapiens
tctctcccttgggtctgcctgcgtgcatgcttctccagttgcgtctgcgaagctacctactttcttgggagggtcgaccttgatcatgaaacaataccatgagggggcctctgtcacctttgaaaagaacactttttgagcagcctcaaaaagctcatacataccagcgccttcttaaattggctctaatgtaaagattgttaatgtcatttatcaaaaccataggtgattatttggagggatttaaaaaacttaattactctcaggcctcatcccaagcttgacacatgctctgtaggttgaacacataatcacaaatattctagcaaatgctgccttggttgcagcctgcactgtagacccaagggttttgctgtggctcttcttatctcccttggctcataaagccccagatgatgccagagcttcaattagagccatcatcatcccaggcagggatatctttgagaaatgactcagttcagccccaggcccctgtgactctgcttaaagcacacatttctgctgactcttgtacctggggcagcaggataatcaccaacacactcttaacgagaaacaacacaccaagcacagtggagctgtcctaggcaacactcgcggtctcaggctgcggtgggcgtctgtcctgcatgtggcccagaccaccctgacccccgggcctgcctgcctggccctgcatgctgcacgctcactgtatttgtgcagatcctggccagtacaaagtcgttgctcttgtcttatcttctcttacagagtctccctccctttatagaatgtcaaccaaagagtgccctcctcccctctcagcctcctctttagctagcctccccatctcatcacaacgcatgtctgtgacctttggtaatcatttacagtgccacacggaaccctgtattttgcacacagcaaaacaaacaatgtttagctttatttatggtatttgatgctgtaaatggaaataaatattgttctttat

SEQ ID NO: 202281 - DNA, 1000 bp, Homo Sapiens
tccatgctggtcctggagtccctggagaaggcggaagtggaggtggctgacgagctgctggaaaatctggctaaagtgttcagcctgatggaccccaactctcctgagcgcgtgacctttgtgtccagagccctgaagtggtccagtgggggctccgggaagctgggccacccccggctgcaccagctgctggccctcaccctgtggaaagaacaaaactattgtgagtcgaggtatcattttctgcactcagcggacggggagggctgtgccaacatgctggtggagtattccacgtcccgcggcttccgcagcgaggtggacatgttcgtggcccaggccgtgctacagtttctctgtttaaaaaacaaaagtagcgcatcggtggtcttcacgacgtacacccagaagcacccgtccatcgaggacgggcctccgtttgtggagccgctgcttaacttcatctggttcctgctgctggctgtggacggtgggaagctgacggtgttcactgtgctgtgtgagcagtaccagccatccctccggcgggaccccatgtacaacgagtacctcgaccgcataggacagctgttcttcggcgtcccgcccaagcagacgtcttcctacgggggcctgctcgggaaccttctgaccagcctcatgggctcctcagagcaggaggatggggaggagagccccagcgacggcagccccatcgagctggactgaactggccaggccacgtggagacaccacggtcgacgacggctggagggacgtttcggaggcgagtcctgggtggctcctcgccttgggggctcctggccctgaggctggcggtggccgcatgccggcgcgtgtctgtttctgtgcggcggctcagggtggcgcggctgctgctcactgtgctgctgggacccaagagtggggcgtcgcccctgctggccgccgcgtcccccgagattgacccacaataaagcacaggccttaccgcggcgtc

SEQ ID NO: 202282 - DNA, 1000 bp, Homo Sapiens
tgatccttgtgttgttttttttttaaatgtgtattgtctgttcagctattttgcaggagttgcattcttaaaaaacttaaccatatcaaaaattgtgtttaaaggaggattattcagattggcaagcttttactaggaggagtttaaatgctgacgtatttaggtaactaaatactgagcaactttattctaagtacaaaatagatagcctttcttttgttttcactttcactatcattagcatagtgtttaataccttttcttcatctataacacaagtataatgatatataaagccactcaaataaagcagatatgttgtgcttttttcttattcatttgatgcttattccccatcatcatcatcatcatcatcatcatcatcatcatcatcatctagttatggccatgagaagtctccgtaatataaaccatccacactatattcatttgacattttgaaaattcaggagaaatacctgcatattaacctaatacactattacatagcctttagaaattgtaattttgaggtctataagtataggagcatgcttttgataacagtaagtgggggacaaggaagccaaacatgacactatgtatgctataattataataatataaaacagaaatgtgggaatagcattgttaggagttcagcctttagaatcattaaggaagaacctggttagaatctttattagctgtataactttaagcaagttatttaacttctctaagtttcagtttccttattcgaaataaggatgataatggtacctatgattcctctagggattaaatgagataatttagcaatggtcttggcacacatgtaataactactcagtaaaaattagctgttaaatctagaatatgacaggtatggtggctcatgcctataagcccagcactttgggaagctgaagctggaggattacttgagaccaggagtttgagaccagcctggtcaacatagcaagaccccttccctaac

SEQ ID NO: 202283 - DNA, 1000 bp, Homo Sapiens
ttctccaaccctgtcatggttcatagccccaaagtgacagatcttccacactctggaatttttttcacacgtgtggaggactgggattgctagaatttgtttctttttattggttggtgacccaagaaatctttgaccttgtggaccagtggtttctcaaatgcagatatatttaataaagtcagggtctgttagcggatggtattggtccctctctgggtatttatctttattttattgtttttccccaaggcttgatcgtagacacataggttatgtgtccattatagacatatgcatctattttcaagaagtaaattttagttcacttactgactagaaaggaaaagaaagtgttttagagtagacacgtcagacacgacagatttttttccctttccgtgctataaatgagcagtgaaaaatgacttttgctattaaaagctgtagcaccagccaggcgcagtggttcgtgcctgtaatcccagcactttgtgaggcccaggcaggcagatcatgaggtcaggagatcaagaccattctggccaacacggtgaaaccccgtctctactaaaagtacaaaaattagctgggtgtggtggcacgtgcctgtaatcccagctactcgggaggctgaggcgggagaatcgcctgaaccaggaagtcggaggttgcagtgagcctagataacaccactgcactctagcctggcaacagagtgagactccatctcaaaaaacaaacaaacaaacaaacaaacaaaaaactgtagcacctgtaaaaaatagtaaattataagacattatcaaagtttataggcactagaatttgaccttcagtaaattcaacattggagggtaacagggttttctttcctttcttcaaaatgaaaaatgagagggaggaaaaagatttatttccttctggggctggagtaacaactggaaatggtattccccagcttaaagaaagaaagaaagaaagaaggaaagaaagaaag

SEQ ID NO: 202284 - DNA, 1000 bp, Homo Sapiens
ccagccctgctctgcagctgctcctgctttgtgctggctcatcaggctcaggcatccgaatggcagctccttggcttgccctgtctctggtttctacggatggtcacaggggtcttcggggttaccccgccctctttccttcttccctcatacccctcagtccttccttttcagaccctcctttccatccctgtcttcctgcccccaagctgtgggaccctaagctcctgctgtgaactgtcgactgtgctcttgaagtctaggtgatgatgtgtcattgcattggtagaaagcggcctgcttactgctgcttagctgcttcccgaagagggaacagactgctctctggtgtttaggtctccatgcccggcccagctctctcctcctctgcccacccaacaacctctgtggcccggatggatgttatcaggaaggagggtgtccagagcggggaattgtgttatagggaaggtggagcatttgagagaaggggcatccgaggccaccagactcggaggtaagcttgccatggattcacatgggggccagtcgggcagccccatccatcagctgtccatcagctcatagctgtgtctccgccacaggttcccattaaggatgtcgaggcggggaatggtgaggaagagtcgggcatgggtgctggagaagaaggagcggcacaggcgccagggcagggaagtcagacctgacacccagtacaccggccgcaagcgcaagccccgcttctaagtcaccacgcggttctggaaaggcacttgcctctgcacttttctatattgttcagctgacaaagtagtattttagaaaagttctaaagttataaaaatgttttctgcagtaaaaaaaaagttctctgggccgggcgtggtggctcacacctgtaatcccagcaccttgggaggctgaggtgggaggatcatttgaggccaggagtttgagacctgcctgggcaacataatgaaacttcctttccagggag

SEQ ID NO: 202285 - DNA, 1000 bp, Homo Sapiens
gaatccgtgtgcctgtttttttatgcccactccctttaggggtgacacagagcacactcttttcctagtcatgaaaatgcagcaatgcatgtgtggtattcctgcccagggaaatccattagagactcagcatccaggattttcattggtgctagccatataagcactctttaccaaacatgtacccaaattccagactcccagaaggaaggcagatgttcagcattaaccatattgtttgtacaaacagtctaggcatactgagccttctcccttccccacttaccaattaacttggagcgtctaaaagccaaggtcccagatgctagccaagagcaagccttgcaagcaggcatttctaaggacagtagtctaagagctgctatgctaactcttttctgcactgaggcttattggctgtattgcttgaaagaactaaatacttatactttttacataggtatttacctgcaaaataagatgtgtgcagaattgcttattgtagcaatttgtaatagtaaaatactggaaataacctaactatccttcatttaaaataaggttttactacattcatactgtagagtgccaggtagctgttaacaaaaaattttaaaggggaaactaatttattgatacggaaataatcaggatatattgtcaagtgaaaaacctaaggtgaagagcaaggtgggttaaaaaaggagagggaagccgggcgccgtggctcatgcctgtaatctcagcactttgggaggctgaggcggctggatcacctgaggtcaggagtttgagaccagctggccaacacagtgaaaccccgtctctactcaaattacaaaaattagtcgggcgtggtgacgcagccatgtagtcccagctgctcaggaggttgaggcaggagaatcgcttgaacctgggaggtggagattgcagtgagccgagattacaccactgtactccagcctgggctacacagtaagactcccatctcaaaatt

SEQ ID NO: 202286 - DNA, 1000 bp, Homo Sapiens
cagtttgtcagtgaggtcttctctgaccatttagaccagaatatgccatcttaaaatatgagtatggaagacaagaatatgccaccccaaaatatgcttcttgggcataaggattattttgagctgattattttgagaaactgcagacacaggagttctaatctgaaaacagatccctgtgcaggggaaatctatacctatcacggaagtctctgcttgtaagagtgtctccctctcagtatcagggcaagaaggatgcgtggaagtcactggagacttttgtcaatgaagcaggtgctgacttaattctccaaaacaaaccttacccttgtctaccctgagtttcctgttgacttccccacagcactccaaccagcaatgaaggagatctgaggtctcggcatcctcattcacacctgattgagcagccattatatatcaggcactataggagttcctggaggatactggtctgaagttagcatgatcttgactcaagaaacttatagtcctgataagaacttccaccagaattccagataaggcagcacaggccttgctgtttgcccatgcccatgcggtcagctctcttgggtaccgtggcatgcagatgcagacgctcacccaagacaccctgtagtgctgattactggctgaagacactgaatatctgatatagtttggatgtttgacccctccaaatctcatgttgaaactagattcccagtgttggaggtggggcccggtgggaggtgtttggattgtgggattggatcccttatggccatcttggtgccatccttgtggtaatgagcaagttctttatctactagttcctgagcgatctggttgctaaaaagagtctagcagcatcatccgctccctctcctcctctcttaccatgtgatatgcacacaccggctacccttcacctactgctccagcaccacgcttcatgtacagcctgtagaactctgagccaaataaacctcttttcttt

SEQ ID NO: 202287 - DNA, 1000 bp, Homo Sapiens
aaaattacatgtaaggaaaacaaaatctcaatttcttggatagtgtcgacattctttttgttactgatacgtttaattgttttgtttgtaaggttccagaatatcttaaccatgtaagtaaacgcttagaggaagagggagacagagtaatcacttacttggaccacagcacacagtaagtaccgtttgctcgctgagcgttcgtatcttcaccgtggctggaaggttctcctggctggttattgaaataaagggtgtctttgtcaattcattcagtactaagagtgtttttgcacctagcatattttactttgttatttgtcattatttggcattcacaaattacagtttttacccagtgccttgtcatgagttacgtctaaagagagtaaatcttgctgagatacttggcatctttgagttttgagacggtctatttatgttaatggagtatcactgaatattaggttattttgattgtgcattctctgttacacattttatatcgctttaattttatttatggtgctgtcacacaattttctcttttcaccttatgtttttttcctgcaaacctgaggttgatgagtagctagggaaacaaaaagggagagattatgtgagcgtgtgtgtcaggcacagtgtgtccatatgatgggaggcaaggacagaggcagaggggacagcaagggagagaaatgaaaatgatacagtgtgcagctgggcgcggtggctcacgcctgtaatcccagcactttgggaggctgaggtgggcagatcacaaagtcaggagatcgagaccatcctgaccaacatggtgaaaccccgtctctactaacaatacaaaaaaattagccgggcgtggtggcgggaacctatagtcccagctacttgggaggctgaggcaggagaatggcatgagcccgggaggcagagcttgcagtgagccgagatcacgccactgcactccagcctgggcgacagagcgagactccgtctc

SEQ ID NO: 202288 - DNA, 1000 bp, Homo Sapiens
ttgcacccccactgtcctccaccatctctactctggatcaagggtcaaaaaacttttttttgagatggagtcttgcaggctggagtgcagtggcatgatctcggctcactgcagcctccgcctcccggcttcaagcagttcccctgcctcagcctcccgagtagctgcgactacaggtgcacaccaccacgcccggctaattttttgtagtttggtagagacagggtttcaccatgttgttcaggatggtctcgatctcctgacctcgtgatccgcccgccttggcctcccaaagtgctgggatttagaggcgtgagccaccgcctctggccacaaaaacaaacaaacaaacaaacaaacaaacaaacaaaaaacgcttttacttaaaaggccatataggaaatactttaggcttcagggccatccagtctctatgtcaactactcaattctgccttcgaatctgaaagcagccacagataatacaaacacaaattggtctgggctgtgttccaataaaactttatttacaaaaacaaatggccagccccaagggcctggtttgcaactcttgctctggagcagagcagaaggtatactctgaactgcaacaaagtttctgctgcaaaagcagcacctctgctgtccgtcccctcctctctgtccactggctctggacgtccatgtgaacaggcttgccaagaaggacaaagtgggcaggtaaagctggggggggcggccacaatcaagatcccaacacccctatctttaagaggcagtgccaagcgaatcccatttcaggggacccactctacctcgctgcctacgatgaattcccatcttacagcctctcgattactatgcagttaccaagctggctaccaccttactaagattcttgccattttctcattctagtcaaaaaagtaagtcatcggtttagtggagggggcagctaaagcccaagtttgtatttgagaaagatgtacaacaggttcttt

SEQ ID NO: 202289 - DNA, 1000 bp, Homo Sapiens
cggatgtccctggtggggaccaggctccctgcgtggccccagcacctgtcggccccagagctgcctcccctgaagggctggcctcaccctcctgctgaccctctggaggggctcggccttccccttgcagggccccctcagagctgcttcagggacagccaccactgatcatgctgagaggccccatcctcacggctgatgcggttgctttcttcttagggtcaaattctgcattcctctccttccacccctgcttcttggaggctgtggcaccccctgctctttctgagctgccctcagtctgtactgaccttcctcatgccctcgcccccaactgcatcacttcttatgcagggatctcaaccgcaccctcgggcacttcatatccgcttccatagctgcaagtacaacgggcccccctctgtactccagatctcacctgcccaccactgggcatcccgggcagctgcctgccctctcctcagacaccttgctgggggctctctcccctgctcaccgtgcggcagggaccccagggctctggtccctgcttgccactctccttgctgcatttccctccctcctctgcctgaggagtttttgctcagagcgtgttcattaaactggtgactaggctctgttggggagttccatgaggatgaccacctggccttccaggtgagaggcaagggccagagaggtcccctctggggcagggtcgcgcctgcctcactcctgccaacatgtctcagggcttctgtgtcagaatcacaggcagattcccagagcggcactcacccagtaaacccggtgggaagggcccaaggcacctgggcccatcagccttgctgccaccgggaagatcttgccaggacagtggcggaggatttgccggaccacactcggagtggcgggttagaccctcatggcctcctgcccatggtttactaaaacaaagctcagagccctactttggcaaataaagctgctgtaatgtctc

SEQ ID NO: 202290 - DNA, 1000 bp, Homo Sapiens
gagaaacaatttgaattttagaaggaaattgccttaccatttgcaaattaaggtaattaaaatacagtgaatttcaaaatgcctttttaatgacaatgtgtgaacttaatttgttttaataaaccaaaattgttgttattgtgttaaggctattttacattgaatgtgtatcttgccactgatgttaacttatcccatcttacccaaggttgtaggtaacaatatactattgggtgacagtggactaacatctctagtgatccctttgtcagtggtctttaacttaaaataatttagagaatatggtttctacaacttacatttttgttttcttgtaactacagattattatgatggttgtaatgaagattatgagtataattggagctatatgtttctgaattctgaacaactatttataaaattttatcctacttttttctgttgaacatatgacttctctggtctgctaaacacatacagacctttagttttggtttacatggatttaaatatatagatatatcactgtaaaataaacttcaggtgtaacagatttatagagaaagtaatcatatttgtttatggttgtgtacctactttgagaagaaaagaaaaatattagaatgaacagataattttacaagtgttgatcacttaccagcaaaccagaaacttcagagattttgaaagcaaatctattttctctgctgtgtattaaattcatttatctaaaatgttattgctcctggcttagaatcatcttgtgcaaattctctttttttgttgtttgtctgtttgcctgttgctcaccatagacataattttcttttcataaaacattctttgtataatcacctcagagattatgaaagtgactttgataaaatttaatggtgttcacaaaataattttcacgtgagtaatttcacagtgcgtgtattgtatgttatttagtgtattttatattttgtttcaattagagaatgctattgaatcc

SEQ ID NO: 202291 - DNA, 1000 bp, Homo Sapiens
gtccagatgccagccaggcatttgagaaccatctgatggtaacaggatggaggctgactcaacttcactccaccacctgccttcctgccttcagggagattttgtacatagcttatcctttaagttcttctgcttgttactgctcacagcactgtgattctactttaggcaccttctgtacattcatattcattactttttttctcctctttcctgtttatggttagaaaggtgcttcaccaatctattttagaaccaaagaagagatcaaattataataacatgagcatagtattatgctataggatactagtaagaaactcagttcctcctctttgttcccataatattttgtgaatatgtctatgatagtatttaatacattgcattatgacttgttgtttgtgtcattctccacttattaattagacttctttgaggatagagattgagtttttaaatttgtttcttcatttgttcttttacttagctcaatgcctggcaaaaaaacaaatcattgttaaatcagtttttaggtgaaatagggataagtgggaggctaacttatccagtctttgaaaatgcctagcgatccccttcagaatcctcacacatcgtcatcaatcttcttaccctgtaagtaaatatacttttctcacacattaaagatatttgtaaaataaatttattcagtttttttttctattgcagtgatatgtgtgtgtatatatgtatatagttgtatttaaactaaacaggagaaaaggagcaagcctgtgaagtattatttccgcatttaccagcaagacaattatctcagaagattaaaatgtgagagatacaactagtgttcagaccctgctctttctgatgccacagtcaatgttctttctttggtagaaaccaaactgtatttttcttattgttcaagtaatgtaattaactatggaaaaataagaaattacagattaacaaaataaagcaaaagtaagtaaaattc

SEQ ID NO: 202292 - DNA, 1000 bp, Homo Sapiens
caaactattttctagaatagccacaccattttgcatttccaccagcaatgtatgggactctcagttactcctcattctcgtcaacacttgccattgtcagtttcttttttaaaaattttagctatttgaacaggatgtggtggtatctaattgtgggctttttaaataccacattttttaattaaaaaaatttaaattggctggatgcaatggctcacatctgtaatcccagcactttagaagtctgaggcaggtggatcaattgcactcaggaaatttgagaccaccctgggcaacatggcaaaactctgtctctccaaaattaaaaaaactagctggatgtggtggtgtgtgtctgtggtcccagctactcagaaggctgagatgggaggattgtttgagcctgggaggttgaggctgcagtgtgctgtgatggtgctagtacactccagcctgggtgaaagagcaagaccctgcctcaacaaactaaattaaaattttatttttgaattgacaaataataattatacgttttcatggagtacatagtaatgctttgatatgtataatgtgtagtgatcagatcagggtaattagcatatcatcatctcgaacatcatttctttgtattgggaacgtacaatattctccttctagctatttgaaactatatattattgttaactatagtcatcctacagtggtattgaacactagaacttattcctcttatctagttgtaattttgtatcctttaacaaatctctccctctccttcccttcccccactcattgtggttttaatttacatttctcaagtgactaatgatgttgagcatcttttcaagtgattatttgccatgtatatatctttgattaagatcttttgctcatctttttactgggttgttggttttctcaatgttgagttttaagaattctccatattttctggatacatgtccattatcaaatatatgatttgcaaatattttctctc

SEQ ID NO: 202293 - DNA, 1000 bp, Homo Sapiens
tgctcatattataccaatattttaagtattttatgtttcatcttattagttattcattttattttatctaatgctctgccagaattcattccaaaaggtaaaaattactaaactataagactcttaaataaggcgtgtatattagcaacttagtttctgacatatagaacattaacattccactgtatcttaaatgtcttttgcctttttattaaaaaatgattaaatggttactgaagttttcctctgcctgacatataaatgtcttcatattctaacatgatattagggaactaaatatatgagtatagacttaatatttcttttgtcaactaaactgactaaattttgtcaaagcagattggagacataaaaactagagtggctttaatgtgcgagcctgaatgcaaaacgcagctcaccgcctctacctggagatcaggaaccccgggccacacagggccatacgctgggtctctgtgggatccaaagcccctgtgggttgtgttgggggacagcagctcctgggctttccccgctaactgccaccgttgcttgtgttacagcgcgttccttcacctcgggcagaataactttgcagaagcccacaggttcttcacagagatcttaaggatggatccaagaaacgcagtggccaacaacaacgctgccgtgtgtctgctctacctgggcaagctcaaggactccctgcggcagctggaggccatggtccagcaggaccccaggcactacctgcacgagagcgtgctcttcaacctgaccaccatgtacgagctggagtcctcacggagcatgcagaagaaacaggccctgctggaggctgtcgccggcaaggagggggacagcttcaacacacagtgcctcaagctggcctagctgcctccaacacactacgtcagaaggacccgggtctttgaaactgtgtcttgaagctaatgtattaatgtgacatggaggaactcaataaaactcctgcttc

SEQ ID NO: 202294 - DNA, 1000 bp, Homo Sapiens
ttttactctgctgaaagtgctgtttgatgcaaaaaagtgtttaattttcatgaggtccaatatatctattttttcttttgttgcctgtgccttgggtgttatattcaagaaatcattgacaaatccaatgatatgctcttctacactcttaaaaattatagacaaccccaaataacttttatttagtggttttaacaatatttaccatgtctgaaatatgataaacattaaaattagtattttggaaaaatgccatattagaaactgatgatttaaaagtaacaacaatgaatccattacatgtgaacatactgtttttttgtttgtttgtttgtttgttttgagacggagtttcactcttttgcccaggctggagtgcagtggtgcgattgcggctcactgtagtcttcgcctcccaggctcaagtgattctcatgcctcggcctcctgagtagctgggattacaggtgctcaccaccacacccggctaatttttgtagagatggggtttcaccgtattggccaggctggtcttgaactccagacttcaagtgatccacccaccttggcctcccaaagtgctgggattacgggcatgagccactgcaccaggccaacatactttttataaaaacagctgtcttctctaaaacaacaaaaaaatgtagataatagtagtatcattttatagttttgcaactctctttaatgtttggcttaatagaagatagttggattctcgtatctgtttttgtattcagtctgttgtgtatgttgttttgattgaagtagatgaaggaaatccagctacatacagatttggagttggaaaaaatagtattttaataacctttttagatcatggtggatactcttctttgttatgtcatcaaaattagacaaatggcagtttctgaaaaattagttgtaatgtgtgtaaaaaattagttgaatccatatcagtgaactcatacttttctatattaaacttcattgctct

SEQ ID NO: 202295 - DNA, 1000 bp, Homo Sapiens
aaaccatctccttctgttcatggctgcattaaaaaataaaccaacaaaaggccacatacccatttactaaaggtcttggctgtttattggcatgccatctattgggaacctaatggaatctggacacatttttgttaaaatagagtaattcttttaataaattgaaataattgtttaatgtttactggtaagataccactacaaattagccacaggttttaaataaatgttggtttttcctgtctcctaatttgcccttttgaatatagattggttattacggaaatgaagacatattttatcccagggtgataatgtgaattaggaatatgaaggattcctcagtatttctcatatttcttttcaatacttcttaaggttgtaaagtgcaaagtagggaggccgtcgtggtggctattgtgcttaagagagacagatgctgtgagtgtgtatatttccagcatgctataagagtcttcatagtcctcattctgagttctctgccagctggctgttcagcccatccttcatgacctccagtcatgtggaactcattacttttctgtcagtccattttcctgcagttcctttgaatgttatcacattgtgctgagatcctgccttcttaaaatgtttaccatttcaaccccatttcatacctctagagctatttaaaatttaaaattaaatattctttcacaagaatgtagaactttcgggccgggcgcggtggctcacgcctgtaatcccagcactttgggaggctgaggtgggcagatcacctggggtcaggggttcaagaccagcctgaccaacgtggagaaaccctgtctctactaaaaatacaaaattagctgggcgtggtggcacatgcctgtaatcccagctactcagaaggctgacgcaggaaaatcacttgaaccagggaggcagaggttccggtgagctgagatcgcaccattgcactccagcttgggcaagtagagcgaaactctgtctc

SEQ ID NO: 202296 - DNA, 1000 bp, Homo Sapiens
ggttaacaaccagctggtctgaatttcttcttcccattagagcagtctgtggtcatatcatttgacttctgttgttgttgttttttctggtctttctctcatcagatttgaccaactctacctgacttggtcaaatccaagtgagaattccaaattatgggtaacaaagcctctctaatttggctaaaattccttgcagctgcaaaagaggaaaaaactaaacgaaaaaaaccaacaaatcacgtgcttggtttctgtgtttgctttctgtcttaaaaaacaaacaaacaaaaacaacaaatgctctttcacttacttttcttcctccctatacctcctcctgcctttgccatctgcgggaccaaaaaaatctagagaaggcttccaatgactcgagcccctttaaaggatccggaacaaaggggccactcaccccttccagggtgctctgttttctttgtggagtttcaagagtgatgggcggattcttcttaggtctaaagctctgctgtcttcctgtacggcatgacctgacctctttggctttgggggaaccagagatgaccctgcactgtgagaggatttgaccttggcgtgtgtaatggcagacgagaactacaaagaaggggtggctgagcacagtttacagggaatggtcttggctgtttttttttttttctcttctaggaagctgtgatttaaggatcctaattctagttcagagatgcatcctaaagggtcttctctattgctttttctcccaaaatgaatctcagtttgggttgtctatgtatttgcatgaggaactgaactgttgttgtcataggtaaatgagagattgagctttctcagctccaaagagaaagggcgtttgctcctcccagccgagtactccatagggttcatggcgcctctacttgccagagtttatgtaaagtggaagtaatatggtctttctgcacatttacattaaaaaaaaaggagccctgaggttgacctg

SEQ ID NO: 202297 - DNA, 1000 bp, Homo Sapiens
agctggctgtcgaaatcacagctcttcattttcttgtacaattgtagtggatttcgtgagaacaccttggatgcctttctcttgcaatgtcctccatgtccatgtaaaatccagtccttccaggccctgcctggctctaaccctcatccccttcgagggccatctgctgtggacagttgtgctgtgtaaccttcagatttcccacacattacagcaaatgcaaatacacatagaaatcagtggttccttttgtggtttagagacacatggtgccatcttcatcttccgctccacagctcgcttctggcacccagcagtgggttgcagagctccccatgccagaaccttcctctttttttcttaaaaactcttcttaattgaatccaaagtatcttttaaatgttctacttgtgtaatcatgtcatctgtgaatattcagatttatcttctccttccaatccgtgtacatttaatctctttttctgtgccttatttcgggggctgggacccttcagtccagtgttgaagagaggcagccagtggaggtcttgtctcattcaaggactcagagcaaatgtgttccacatttaatttcactatgaaatataatatttgatgttcagttttgtagatgctatttatcagatcaaggaaagcccagtctatacctaatttgttaagggttttgctttttatcataagtgtcgacttttatcaaattcttttttgtatctattaagatgatagatgattgattttcatatgttaaattaaccatgggttaaacaaacttacctttatcatgatatattattctttttgtatttcacaggaattagtttggtaatatgttgggtcaatgtttaaaaaagaaaatgatgtgtaatttttttcttttattgtagtatttctgtttaatttttggtatgaggattattcaggtctcataagagttaggagtatattctcttttaaaaaatatttgctaatttacactccc

SEQ ID NO: 202298 - DNA, 1000 bp, Homo Sapiens
ggggaaccaggtgcctacagttaaaggaacgtttcagttcctttcattcattcctgggtttttcttttattttctaagaaggttgaagaaggatgagtgatagagaagaaagcaacaccattgattttttttttttttaagaaatgatatatatatgtatatgtttgtgtgtgtgtgtgtgtgtgtgtgtgtgtattctgtgcattattttgtcatgatctcaattctcttctttccaccaaagtttgtcgtaatattttctcctgaaggtgcattctggctcctttaaattagtcagtgttatattgtaggagactgtcatggaaaaaaggactcagtttactttcgtcattttcacaggggaaccttttaaaacaatcttttcagcagcagatacctttaaccctaataatctcaggccttgatgaaaatactatattttgtagattatggttaaagggggaaaattactagttccgtaagataaatatgagctccatttgacttctgatgtctggtttagcattacataatatgttgatcttacactctgcttttgtccaaataaaatgcaatagtatcaatatcaatttcagaaaaatggactgaatatgcttttttggtgatgaaatctcatgtacgatatttatagtgatgtgcttttattttctcatgagatactaaatattaattgtgttgtacatttgttcttagcatatattaaagttttgaaccaaatgtgttaaagcttacgctttgccatgtaaatttcccagaagttgttgagctcaaatgtatcctacatccagctgtagaaatttgtcagaaattgtttaaattttgtatataattgtactgtttaattctagccattgcgctgaacagtatttgagttaccatataatatggctctacacaaggaaatgtgtggcttttgttttgtattttttcagtatagaagttcctgtgtcttatttaaataaagttattagtaaaactg

SEQ ID NO: 202299 - DNA, 1000 bp, Homo Sapiens
ggacgctccccaggacccttcttgccctgggcctccttctcagcctgggcccacatcttcacctgctgggcgcgccgcttctgggcatgcttcagccgctcctgtgtgctcatcctgcccaccatgggcatctctgccagcagctccaggtgctcggccatggcggcggctgcttgcccacagggctgctcggggcaccagagtggggagcttgggggccaggctgggcctgaggggtggggcagctagctggactggcaccctcgggggcatccccttcccagagcttcgtgcccttggctgggtcaggaggccccacacaataaccaggcccaggcagccctggggggcatgggccggggcagggagggcagtgtgggagggcaccccaaacctgctccccaggccagcctctagctgtcgacaagcagcgcctcgcctccctctcggggtcagggtgcacaacctatgggaggcagccccgagacctggccggcctcagtgcagggtctgaaactaattacccagataacaaggttccagcttccgggcaccctgctgagggggaagggagggcagggccaaccagcagtgagagcccctgtgagcccctgagagtcctcttttcaccttctaggctcaggagcctgggtggggcctgggagcagccatgacccagcccccaacccctcccagctgtgtgccgaggtcagtgcatcagtactaacgaggaggtgcagccgctgaggctgggggagggcaggtagtcagagtcctggagtcctggccccagggcccaggggtgaggctctctaggcagccagggcaccaagggcacaggcgggccggccgcagtgtcttcaggagcacctcctcttccagcagctgctcacacctgagaagtggggaacaaggaagcatatcaaggccggcttgaggcagggtggcccgggggagcccctgccctgggcctcagcctgggtgacagagcgagactccg

SEQ ID NO: 202300 - DNA, 1000 bp, Homo Sapiens
atgtcacttattcatctccaaattctccaaccaaattgaaaatctcagaacataatgaaagatgtaggccctccttcggattgcattgttttttggagccatccctgcccctgctcccaggtagtctggctgctctgcaggcctgctgcaagctgtcaggcttacattgcccttcgtctgcactctggggatcctcatttctctcccaggttgtgttccttattacctggaccctcttgcttggtttacactcctgtttagatagagcacctcctcctgtaccttcacagaaaaagcacagagaatggaaaactcatatcttgcatgtctgaaaaaatccttattctgccttacatttgaataataattttataggatatagaattttagtttggaaaacattttccttccgaattttaaaggcattgctctgttgtcttctagtttcaaatgttgctttacataaatattctgatgcaattctaattactgattatttgcacatgacctacttttttctctctggaatattttagattcttgggtatctgataatctggaatttcatggtaagatgccttgttgtgaacctttttttattttttatttttattttttgagataagttcttgctctgtcacctaggctggagtgcagtgatgtaatcacagcttgctgcagtcttgacctcttgggctcaagtgatccttctgcctcagcctcccaagtagctgagaccgcaagcacgcaccaccacacacagctgattttttaaacttttggtccattccaagatggccgaataagaacagctctggtctgcagctcccagcgtgattgacgcagaagacgggtgatttccgcatttccaactgagcgagaaggcatccatctccaaaccaaggagagggccctcaccggacatcagatctactggtaccttaatcttggactttccagcctccagagctgtgagaaataaatgtttgttttttaaacc

SEQ ID NO: 202301 - DNA, 1000 bp, Homo Sapiens
gatggagggcaggtctctaaaagcagcatcctttgccaggcacctgagaattttaaagtgaggatgcatctgtggcatcatcttcctaaaccaaatgatgtgtaattgcatagttgttgaactgtgtggttggtctatttctagcagagtagctacctgagaggaaatgagaatttaaattgtttgctggactttaaaaaatttacatatgagggagacatctcatccagagatgcactgggcacagggaaagctttttttttcaagtagcagctgctattcattgaaatgttacgattttcctgccttagtatttcacacgtccttatactcctcataacattttttgcttgtgtagttttagccccatttcagaaatgaggaacccaggttcagaaggtttagaagcttgctcaagaccccccagctattaggtgccagagctgcaactggaatgcagctttgactccattgtgggtttctgttccattatcaagagtagcctgacagttggcaataacaatgactgaatgaatgaataaatgaattctccaaagaaaatagttcatgtttccctagtatgagggaatacttgagatagttgttttgagaagggggccacagaccaggagacaccaataagtctttctcatttctggtaaatcgctttataatgaccgttattataaagtgtaaaaacaacaacaacaaaaaataataggcgcagtggttcacgcctgtaatcctagcactttgggaggcagaggcgggcggatcatttgaggtcgggagttcgggaccggcctggccaacatgatgaaaccctgtctctactaaaaacacaaaaattggccgggcggtggtggcgcgtgcctgtgtagtcacagctactcgggaggctgaggcgggagagtcgcttgagcccgggaggtgaaggttgcagtgagccgagattgtgccactgcactccagcctgggagacagagccagactccatctc

SEQ ID NO: 202302 - DNA, 1000 bp, Homo Sapiens
ctgatttcacttacccagactggtatagagctctgtaatgaaaatgatccagaacttgcaaaaagctctgattctcctagttgagatagttttttggtgatttttggaatgtctgtttcagctgaattctcaaaatatttttcattttgagtagttaaggaatatggtgcctgaattgaagttcccatctccactgttcttacacataatcgagagtcagtttcctctacctgtggatttatgtctaaaaccctacaggtttcatttttattatcttcaatgagtccttgactttgtaacattgtaacaacccctctttttgatagttcttcaaagcccatactttcctttctgctttctagttggtgttttgttgagcactcactagagttagaaccacatggagtgttatgctgtacatttaactgatcaaatacattagcttcatcagatgaactgtagactgaacttaagtttcctatagaaagctggaaatgaacaatttttttcttgttttgtaatatttcagtatgttcttcagagggatagttctgatttttcatgccttgggaagaatctcttgcttcaatgctaaaaatacttggtagatcagcatgctggctctcctcctgtgaagaatattctggctgaagctgttcaaaacattgttcagatcctgcattaagaaattcaaaaatcagttaatcatcgttacatgttgtaaaagttggatactgacagtctctaatagtttatcatccaattgcaagtaacctacaattttaggcataaaagttgatgtgtataaacatgaatacaaagataaggatggtcacagtgatttctcaaactacagctcacaccaagtattttttctttttctattaatatttaataaggacaatatggctataaactgaggatgttttcctctataagaactgaatatgactttaataacagaaaagagaataaagcatccatgtgtatctcaattatc

SEQ ID NO: 202303 - DNA, 1000 bp, Homo Sapiens
cctcccacagtgatgggattacaggcgtgagccaccgtgcctggccctagtatattttttaatagcattgcattcaatctcaaaagtgtgtgagttttgatgaaaaattatatggtggtcatttattatctgaaatacacatcaaaataccactattgccattttgctctggtatcttcatcagtgggtgcaggattgtcatgaaggcggggggaggttgttctgcttccttctctgttgcatccccagagcccagaacagtgcccagcacccagtaagtgcttaatgaatatgaatgcatctgcacataaattcgtttcttggggcttggcacattgccacttgaacaaatggattctattaacaaggagtatggagcaatgattttggggtacacaactcatggcgcctgccaaaacatgcgctttagattttgatagatatcgtcaagttgttctccgcaggggttgagccagtttacactcccaccagcaatatgtgagagcatctgtttctctaaccttcacccacatggtgttatcaaaatttttatctgtgccaatctggtattttaaatttgcattttctttattatggaaagatagagcatactttcatatgtttaaaagccatttgaaatttctaagaactgtctgttcatatcctctgcccatttttttttttcagtgaattactggtctttttcttatcaatccataggaatacaaatagttgttccaagcttttcatgccttttgagtttgtttctggtgttgttactaagcagaatttaaaacatgtatttatatttagcttctttcgttttattgcatctatattttgcatcatgcttagaaaggctttcccagattgtaaaataattctcccatattttcttgtcttactttcaagttttcatttttttcacatgtaagtcttgatctatctgaaatttattttggtgtaagatttgagatatgaataaaatctaatattgttt

SEQ ID NO: 202304 - DNA, 1000 bp, Homo Sapiens
aatttctcctagttaccactaggggttacatggctactcagaatgaaagataaattgccaggcctgttgcaatcttttttttgagatgggagtcttgctctgtcgcccaggctggagtgcagaggtgcgatctcagctcactgcaacctccacctcccgggtcaagcaattctcctgcctcagcttcccgagtagctggaattacaggtgcccaccaccatgcctggctaatttttgtatttttagtagagacggggtttcaccatgttggccaggctggtcttgaacacctgacctcaaatgatccgcccacctcggcctcccaaagtgttgggattacaggcgtgagccacctcaccaggccccgttgcaatcttactccacttcgttttcacagcagtcccgggacatgcccattattaggcctatttgatagatgatactgaggctcagagtcgggggtcacaagccaaagccacaccgctagaagggctcaggacccagcccagctcccgtcctcttggtggcatcaagcttgtgtgatatgaggtcttatgtctgctcatgacagccttaaaagcaataaacagatacaacttccagcaacttcccactcagctgcaaggctgcggggggtcctgcctcgagccataaggtgagcagctagccagtgccgggccagtgtggagaaggctgaattgcctgtgaagctggggttgcaggcaggaatattcatggagcccctgaccatgtactcacactgctcttcctcagttcagggttcttggatttgctcaagtccacccaaatatccctttacgattctcagggtcccactccttccagatccaatgccctaaactttacataagagttccggcaaggctgtgacttcaacttgtgttgtaactgcaacctgcagaatcaaatttagggttatgttttcagttgtatcagtcttacggctacaagatattaaagagattcttttctggttatc

SEQ ID NO: 202305 - DNA, 1000 bp, Homo Sapiens
agcctcttccaccttgtgtacgtagatgccattgccatagccatcgttggattttcagtgaccatctccatggccaagaccttagcaaataaacatggctaccaggttgacggcaatcaggagctcattgccctgggactgtgcaattccattggctcactcttccagaccttttcaatttcatgctccttgtctcgaagccttgttcaggagggaaccggtgggaagacacagcttgcaggttgtttggcctcattaatgattctgctggtcatattagcaactggattcctctttgaatcattgccccaggctgtgctgtcggccattgtgattgtcaacctgaagggaatgtttatgcagttctcagatctcccctttttctggagaaccagcaaaatagagctgaccatctggcttaccatttttgtgtcctccttgttcctgggattggactatggtttgatcactgctgtgatcattgctctgctgactgtgatttacagaacacagaggtgagtgcccagattggaatgggtgtgaatgtcccggcagagatgacaatgttgactttaggtgtagaccaaagtttaagttggtagaagtggagccctttgatgatttctagttagcgtgagagggagctataacactcatgtagcctgttgactagatgaacaaaatgccaatttaaaaattccatataattttgccaaatgctcttctatgtcacaatttatgctcccatcaatggttatgttaaaagagcctaatttccatcattgtttctgccattcctggtctagtgctatgctggtttatttatcctcttgtgatttgttttggcaccaagtactgacatgagcttcaatgacatgaagcaaactctgacaccaagttatcgtatgcattccttccactgtcatttcctccaccctgaaccactttcccttgttatctcttctccctagtgggaagctgagcccactagggaaagtat

SEQ ID NO: 202306 - DNA, 1000 bp, Homo Sapiens
tgtggactgaaggccttgagggaagcagtggctggaggagggtgctggacccatgacacgttgcttcctctggcttttccctgctgggccgctttctcagaggcacttccccacccctaacacccagtgggcccccccaggttctgtgccactcagagggaccctggcaggggccagaaccacttaagggtggtgctggagggccttgtgccccagtcccatcccaggacgccctgagggatggacgcagccatgcaccccccatctggggcctctccctgctccctctcccacctggcagctgggagttctggcttctaggcctgccctgtcaccaggcctctgagtggccaggcccttccacctccccatctgtaaaacgaggcagctgcccggacagccttggggtccttagtggccctgcaggtcctctggcagctctgctgaccccaccctctcccggactgcccttctgtcccagaggggtcaccctgacccggcccaccttgccactgggctttggactccagccctgacagggcccagccacactggctctgcccctcgaaggggctatgagcaaggtaggagggagctggtctcctttcttcgggccccacccaggccctgagcaccccccacccctgtgagggccccaggccttaagtccctggcggggtcatgggtttgcgacttgagcagagcggaggaacagggcactggaaggccgacgagctcagcatgcgactcggtgacggaccaggctcggcagggccggtgtactttttgtggttgtcattggtgtgttgttgcacattccaggacgtcagtattttaacaggttctaagtgcctttctatcgtagcttatgttttcctcctcttggctccattgctgttagcatagagttttaaaaaaagagataagctaatgactataacaatatattcctccatgggagaggaagtttataaagaaacaataaaagtgagttgcaaag

SEQ ID NO: 202307 - DNA, 1000 bp, Homo Sapiens
tcctttggttttatttttcgaatttgttattgtcagaatacatattccatgtctcctctgttcctgtttatgcagtttcgctcatctcttcccctttagccaattgattatctcttagtcagcactttgctgcatacacactgtaacaagaactaagggataggcattatagagaattacaaattaggaaaagagattattctcctgattttaaaaatatattaaatgcatgtacataacatatagaagaaacatataaggaatgtgaccatagagtgctggtatttccaggactgctgcaccaacacaagttaaaccttctagacgcataaattgtatttctacttcagatctcttccttcaaacaaaatttatatgtactactgctatctaagcatccctatctgaatgagtcaaggcacctcaaattcactgcatgaaattacctttagtgttttcctactcaaagccacataaaaatgtgttaaatcgttattcccttccttggtgaatgatgtcaccatattcagtcaccaaattaaaagcatgctatttactttggctctgtcatctctcctttaccaccattaactctgtcagctctgtgtgacagtgtgtgatcttaactcctgcccactctcaactcttgctattccccatgacttacactccagccttgccagcatgactccaaactgaccatgttctttcaagctttatccattctgttcgcttcagtctgaaatacccttacctgatctccctatagttatagttccatttcagaaatcagctaaatataggaagtttttcctaaccaattcccacctcctttgctactgctgtagtacctgatgaatgtctgtgccctaattgtaattgctggtttacctgactgtttccctttctaggctgtaagtatctgaagacaattattcatgtttatatatgtagtgcttggccccatcatatgtaattaataaagatctgttggatgact

SEQ ID NO: 202308 - DNA, 1000 bp, Homo Sapiens
cccttcatgctgcttcccgtcagtggctgtgcacagtaggtgtactaatgcaggcccatgtcctcaagaagtgggaccccattaacagatgactttggctcaagacttcccattggcctggccaaaacttacttagaaatgtgctgcgttctgaaatttttctccctaatctcttcttctctctgttcttcataggagtctcaagtatctctcagccttcttctgctgccccaaccatttgtttctcacagctcacacaatatatctcttgtaagcccaacttatactggcatctaattcacagagggtctgaactaacagggttacatgctatgatgtccaagtagttaaggagaaaagtgtacgtgtttgtgtgtgtgtgtgtgtgtgtgtgtgtgtgtgtgtgtcagagagagagagagagagatgagagagagaaaagaataaaaggaaggaagtaaatatctcaaaatattaataattgatacatttaggagaatactatgtgtactcattgcattattctgttttagatttgaaagtttttaagtaaaatgtggctgctaaaaaataaaaatctaaaaattacaaaaaaagatacatgaagctcaacatgtgtattgatgagacatctatttccaatttcaatgtctattctcctcagcaacaaatccctgattttatttggggcacattgcatccagcctagaattttatttcaattaaaacatcatctgactcttacattcaagcaatggaaatacaagtaaacatgttatatgggactgtgggaagtcttcctaaaaggtaggaggtctttccttttcaccctctcctatagggcttcctgaactatgtatgtgattgctagagctcaagcagccatctttgaacatgaggcagtgcatcagaaagagcagagcagcaagaaagaaggcatctcagttcctaacgaatgaagtcaccacatcagccatagaagcctgcctctaggactctg

SEQ ID NO: 202309 - DNA, 1000 bp, Homo Sapiens
gcagggcctgagactggacctgggtgagcgtggggggtggagggtggcgaggtgcggagactgcagaccagtgcttcactgtgtggagtggggcaggcaggggctggaccccagggacttgccttccccacccactctgctgccagcaggcccagggatccctgacctgcaccaggtggcaccaagggtcctgagtcctggagatgtccccagaagctgctgtgcctcacagcgctgtgagccagaccctccttgggcagacaggctgactggcagcaccagctttgggggcagagtcctaggatgaggcttgggcagtgctggtagggtttcaaggtgctattagtggggcaggggcagggcggctgctcacagagcaccccagttcctcaccagctactctggccatatatcccacaccagaaggaacaagtgtggctgtgtccatctctgctcccccaaaggcccgctctaggccttatcctccctctaggtcctgccacaacctgtccctggctggctccagcgtcctcgtccctcctgggcctgtgcaccggtgggtggggcgcccatagcactgccggtaaaggagcctgcatgttcaggcccctcgggggattggggggactggggaggcgcagcctagacccaattgcttgcccccatgaggctagcactaataggaaacccttttttgttgtcatttaatgtctttattcctgcctttaatatggggaggaaggttccataagctacatgtttcctagttaagctctttcctattgtgtttatacagttttgtttgttatactctttgcaccttaaacccccaccactccccgacactattgccttcccagcatggctggagtgggaagaggcttgggccccgggggaatggttagggggactgaacccctctgaccttatgaggcccatggcactggggcagggagctggggacattttaatcatcaataaacgaagcactttattctgt

SEQ ID NO: 202310 - DNA, 1000 bp, Homo Sapiens
ataccaaaatgtttccaaaatttttttaaaagctgagatttccagctttataaccaaagcttgatatatgtcacattgtcacagaagagagaaaagatcattgaggacagttgccttgggagagttcaagtctttgtcgttacacactgctgttttgattattggtcttagttttgatcctgttgcagcaaaatcctgcagcatctttctctccaataatgttgcaactcaccaaaactattcttgaagaggtccaagaacatgtattatccagactaaaaaaaatgattttttgttgttatggtttacgtgatgaaaaggagaaaaaacagaatcatacctgggtggagagagggagacaaatagccataaacttcatcctggagaacaagttaccatgcaaggagttgacatcagttgttaagtgaggcccattcttgtttttacatcggtcctttgtggtttttctgggccagcagagattctgcaccccaacattgttggcagtgagcattacgatgttgcccgtggggtgcaaaagatcctgcaggactacaaatccctccaggatatcattgccatcctgggtatggatgaactttctgaggaagacaagttgaccgtgtcccgtgcacggaaaatacagcgtttcttgtctcagccattccaggttgctgaggtcttcacaggtcatatggggaagctggtacccctgaaggagaccatcaaaggattccagcagattttggcaggtgaatatgaccatctcccagaacaggccttctatatggtgggacccattgaagaagctgtggcaaaagctgataagctggctgaagagcattcatcgtgaggggtctttgtcctctgtactgtctctctccttgcccctaacccaaaaagcttcatttttctgtgtaggctgcacaagagccttgattgaagatatattctttctgaacagtatttaaggtttccaataaaatgtacacccctcaac

SEQ ID NO: 202311 - DNA, 1000 bp, Homo Sapiens
atgactggaggcaaagcagttatgcctcccactctggacacaggagaacagtgggagaggggtttctgtttgttctatcagatgctctcttttcccactgtagaaactgattccagagaaattctccaagtgcggtgctatgtgggcttgcgggagaggtgttatgatcaaacagaaccatcctctttaccctctgttcatggtttttcttggctctgtggtccagtgagttgtcacagcttcactcccaatttctgggatattcagggcaataatcttgccactgggtatttgctagttgaaattatgtggtagggagagaagccagtaagcttcacttctccgtttggctgatgtcactctcgaattctgtactttcatacggattgtaatagggagggtctaaaaggaagcttcagttttggatttttagagcttcttctaagtacaattgttgaatcaagaggtaaaaatggtatgttataactggaaatacgctgagattaaaaaggagataaattagccccattgggacagtgctattgggaatgtgaattgataccactttcctggagtctagtttagtatttattttatatgtaatgcctgaaaagatgtgtgtctcctttgactcaatacttataggaatttacacaaaggttataatcaaagattatagaactgttatactggaaaaacacgaaatattctaattatgaattaattggggattggttaaataaactatggtttgatatgctctaaaaataatgttacagaaaaaagtgtactgatatggcaaaatgtatgacttatagttaaaaaagcaggttagatgttgatagatacagtatgatagaaaaagatcaggaaggtatatgctgacatttaaatctggatatttatgagtgttttttttatttcaatctttgtacatgcatgtattttctagaaattgtattactatctttgtaataaagtaaattatttttaagggact

SEQ ID NO: 202312 - DNA, 1000 bp, Homo Sapiens
aatgctatgtaaatagttgttatactgtattgtttggggaataaagacaagaaaaaaaagtctgcatgtttcaaatacagatgctatattaaactttttggatccaagcttggttgaatccacagacataagagcccatggatatggagggccaactgtataatgtaaaaaaattccttctcatgcgctagtttccagttttcatcctttgtagataaccaggggcaacagtttgatataggtcttttcacctctctttgtgtgcatatacaagtaattatttgcagatttgtctgcatattcagaatttaaaaattacacttttttttagcagctttagatgtacagaaatttgagccgatagcacagaaagttcccatattcccttcccttccctcgtttctcctattgcaaacatcttgcattaatttggcacatttattgcatttgatgagcccatatcaatatgttgttatttattggtctatagtttacatagggcttattctttgtgttgcagtttttttttttttttgttttgtttttttaagatctcactctgtatctcaggctggagtgcactggtgccgtcatggctctgcagcctcgacctcccgggctcaagcgatcctcccaccttagcctcccagagtgttggggttacagacatgagccactgcacttggccgagagttattttttacaaaaatgggatcaagcccagtggtggcttgcgcctgtagttccagctacttgggaggttgaggtgggaggattgcttgaggctaggagtttgagaccagtctgggcaacacagcatgactctgaccagtctgggcaacacagcatgactctgtctctaaaaaaaaaaaaaaagtgggctgagggtggtggctaacgccggtaatccttgcactttgggaggccagggcaggtggatcacctgaggtcaggagttcgggaccagcctggccaacatgaatgaaaccccctctctacc

SEQ ID NO: 202313 - DNA, 1000 bp, Homo Sapiens
gtgagaagcccagttgctctcacagtcagaaggcgttccacatggagcctgcccagaagccctgcttcaccactgacatggtgacatgggccctcctctgcatctctgcagagactgtgcgtggggaggctccttcacagcctaggggcatccctcaccgctcgcccgtcagtgtggatgacctgtggctggagaagacacagagaaagaagttgcagaagcaggcccacgtcgaaaggaggctgcacataggggcagtgcacaaagatggagtcaagtgctggagaaagacgatcattacctctccagagtctttgaatctccctagaagaagccatccactctcccagagtgctccaacgggactgaaccacatgggctggccagagcacacaccaggcactggtgagttacgcgcctctctcttttgctatgtactctggatcctggcatgaaggacaagaagctagtgctgttggcagctgtatccacttgcctggtagaagtagcttgaaggtgagagagataaacaattgtcctcttccttcagttagggaggagtgcctactacccaaagaaagggaattattggctgggcacagtggctcatgcctgtaatcccagcactttgagaggctgaagcaggcggatcacttgaggtcaggagctcaagaccagcctgggcaacatggtgaaaccccatctctactaaaaatacaggccggttgcggtggctcatgctataatcccagcactttgggaggccaaggtgggcggatcatatgaggtcgggagttcgagaccagcctgaccagcatggagaaaccccatctctactaaaaatacaaaattagctgggcatggtggcacatgcctgtaatcttagctactcgggaggctgaggcaggagaattgcttgaacctgggagtcagaggttgcggtgagccaagatcacgccattgcactccagcctgggcaataagagcaaaactccgtctc

SEQ ID NO: 202314 - DNA, 1000 bp, Homo Sapiens
attctcacttgattgcctgtgatggggcccagacctgtggtttttaaagctggcaggccattgctctgtgcctccagagctgaaggctcttgacatagctgttctcgtttgtggctggctcaccagagaggccgtggtaggacagaccccactgggcctggtcccagggttgagagcatgcggggctaccctgagactcctgagcctcctcagcctgccctgccctgtcctgtccagacacagagaacacttgggctctgctgggcttgtggcccatgcccgctacactcacccaggaccatgcgatccgcaaccctgggtactgcttggtgacctccagcaaagactgcactgaatgaggccggccagcacgcacaacgcggcccgacctctgagctacccaaagggagagcagcaagttgcctgtgcgtggctggttcctgtgcgcccataggagcatgaaacgcccccaaagggcccactggccagatggtcactggggcaggcgggcagctgccattcactggactcctaattgtgttgattggatttttacctgggacatgtatttccttttcaaacacaatgtcaaagtcaggaaagcggctggatgcagtaggaggcccaggcgggtggatcacttgaagtcaggagttggagaccagcctggccaacacgatgaaacctgtctctactaaaaatacaaaaattagctgggcgtggtggtgtgtgcttgtagtcccagctacttgggaggctgaggcgggagaatcacctgaacccggtaggtggaggttgcagtgagccgagatcgtgccattgaactccagcctgggcaacaagagcaaaactccaggctgggtgcggtggctcacgcctgtaatcccagcactttgggaggctgaggtgggagaatcactgtagcccagtaggcggagcttgcagtgagctgagatcatgtgactgcactgcagcatgggtgataaagtgagagtccatt

SEQ ID NO: 202315 - DNA, 1000 bp, Homo Sapiens
cccagaacaagagcgccctggactgccctcatcagcacctagacgtaccgcacgggaaggaggagcagatctgctgacctcagggcctgacagtgtgggacaggctcttctttcccaaaattagggagctcttgacagaaagcagttctgatgcttacatctggaatctgaggcatcctctgactccactcaaagagggtgagggccttcttaagatacaaatggtggaggattgctgccagagaagtctggtcagagccacagggtctgcctccagccaaacgggagcttttggtgagaaggtgttggacaggggattggcgcccccctttggtttggcctccatcctcatctctcttgggccaagccagctgcctaggtcccccaagcatgggggaccccttcccacatataagttgagaaggtgcctgccatagccaggagcgcatctcaatggaaacatcactggggtcacttgggaagaggacttcggggtagaggctgggaggagcccctggacatgcctgtcctgaaagcggctgcctccattatccattcccaagatgcctgatcagaaaccaaccatgaatgaacccctggctccttcaccacccccacgattggtatgatgctgccggcacagctgggatacacacggctcccccaggcctgagctgcttcactagggaatcctgcggcaggactgcagagcagatggcagatgcacatgttggaggagagagccttgggagccactgccactccagtcctgccaccaccctgtcttcctctgcaagtgctcagggaaatggccttcccgccggaggccagctatctgcctgacaggctgtgactcttctctcaaccttggccttctcccctcttctgagctagttggttgaattttttttaatgcttaagatttgtttttctcttttcacagcaacattttcttgaatttttttctgcacagcttttccaaaataaaaaccttccaaac

SEQ ID NO: 202316 - DNA, 1000 bp, Homo Sapiens
tgtctactaggcagtagggcacatggatgtgaggcctatgaagcagatttgggctgtagctgtagatctgggtgggggttctcagccctggggcttcaccctatcctcctccaaagccctaccctctgcctgaggccaggtccccagtccctagccccttcccccgccaggtgtacagtgccgatggagagttcctcttcaagtttggctcccatggcgagggcaatgggcagttcaatgcccccacaggagtagctgtggactccaatggaaacatcattgtggctgactggggcaacagccgcatccaggtgagtaaggcctgggaatgacatgagggggcggtttcctggtgtgtcccatatgcccgttcccccaaaacagactctcatctgcctgatcttgcctctccctcctttctgcactccttccccaggtattcgacagctctggctccttcctgtcctatatcaacacatctgcagaaccactgtatggtccacagggcctggcactgacctcggatggccatgtggtggtggctgatgctggcaaccactgctttaaagcctatcgctacctccagtagctgtacagaggccctgcctggcttgtggagggacagacattggggtgattggacaagagggtctggctgggaggtgggccagacctggcagcactgaatgtgggctgtgggcatgggtgcacccggtgccctccctctcctacccccacccccacggttgcactttatttattcggttcttgctttggtgactgggtgagcctggactgtggtcccaaggatgtgtgcagagcttcaccctacccttcttacacacctccccacccctgtcagtctgctccccatcccccagcctggggccagaacagcctaccccaggacaggagtccctctagttgtctccctaccaccctatacacactgacagagacagcaataccccaccccccatattaaataaatgtcttcacc

SEQ ID NO: 202317 - DNA, 1000 bp, Homo Sapiens
aaccaaagttcatacattattgagacaggccgactctgctaaggcagcctgtttggcctttaagttttattgcttattttttgagtatgtatttatttttttgattattattattttttttttgagctttaagccttcaagtttcctttttattcttgacccctagacatttcctttgcttgtggactcgggtatttgtttttaggtaatattttttttccctatgacacagccctcaggagatcctgagaacatgtgccctcatttttaggtaattttaattaggaagggttttaggttgtctgatctgccttgttgctagaaacagaaattctcctattgattgatttttcaaaccacttcttagtggcctctacaactactccagtcaggtcaagaatggctctcacattgccaagtcagtgggtatttttagtcttcatcttagatgacctttatgcacatttgtctttgtctaggaacttctgttggaaacatcttctattttaatgttattttaaatttttttgcttttgtaacattatgcttagcatgtgtgtccaactctttgacaatttctttttagttttctggtggcttccctttatccaaatttagtattgaaattcctcgagccgctgcttttctcactccataattctggccagaatttggtacttaaaatattttgtctaaaatattacaatagctacttaagtcatctccctgactccactctgttgtctttcagggcgtcgtccacactgtagccaaagtgatcttataaaaacataattctaatcatggcactcttctgcttaaaaatgttttaatggctttccgttaggttaaaatttaaaagtcctttgtagcctgtgagactctacatgagttgactccctagcttcatctttgagcatcttatttctttacttattataccatcagttagagttgattgttatataatccacagaagtgaattctgtccgatttaagc

SEQ ID NO: 202318 - DNA, 1000 bp, Homo Sapiens
gcatgagccaccgcacccggctagaatgaaatattttctttttaaaggtaatatttgaactgggtttgaaagcattcataggaattcaggtcaatgtaggaaaaaaggtgcctccaagaggaggagaatagcataatgtaggtatgaaagagtaaggtatgtttggaaaacagcaactaactaggaaaagtgctgggttcgtggaggaggaagcaggaaagaagtctgggaaattatacaggagacctgttattccattcaaaggagttgagactctttttagaatgggggagcttggggagctttcctggcaagggagtgacttgatcagaatggtttttgtttttaatggtgtttgtggttcagctgaaggttctttgaggatttcaggagaaagatgatgacagctggatgatcgtagtggtgatgaaaagaaaggggaaaaatttattcaatatataagattaagaattgccaggtcctgatgaaagactgaacatcaaaggagttgacagtgacctttccctgatcaggcaaagtagcaggttggaggaaagaatgttgagtttgggagcctgatgaacttaagtggtagaaataatcggtaaaggagagaagggcttgttggggatccaatctgtgatcatcaatgagtaggcaaaggtgaagtatatgtggagggcaaggggaccttgaggaacaccaacagcgaatgggttggggaagacagtgaagtatttgaaaaagaccaaggctttgggaggccaaggcaggcagataacctgaggtcaggagttcgagactagcctggccagcatggtgaagccccatctctacgaaacatacaaaaggtagccaggcgtggtggcgggcacctgtagtcccagctgctctggaggctggggcatgagaattgcttgaacctgagaggcagaggttgcagtgggctgagatcgcgccactgcactccagcctgggcgacagagcgagactccatctc

SEQ ID NO: 202319 - DNA, 1000 bp, Homo Sapiens
ccaaggccaagacccactgaccctgagaaccaccacacacctcacgcctgtgcctctgggttggcaaaatgtggaggagccatgccagggcacggagcccccagcacaccctccagctgcccctgcgccccgccacacacggtgtcagtggtcagagcctcgtggagacggcagcgacgcagggacaactggacaaaagatcgagcctgacgtggggctgcgtgaggtcaggggtgtgggcggcaccgacgaggcttgctggctttcaggagaccggggacgacaggctggggtggggcttccggtgagagaggggtgagggcacggccaagggcactgagaaaacagctggcatctgaggaaggaggcctctgaggtttcgggataaggaggggcgcattcttcggatggagactgcctacccctcgactctgggtgcaggctgcccagggtggggcaagcggccagccagcctccaacctgcccttgaaacaggagctgccgaccggggccggccgtgctggggctgccacccacaccatggcacagaagccacctgcacgctccgatgcactgtggccagtgctcctgcaggtggcagagctgtccctggagggtcagcctggcaccacctccacctctcaggcagggccatgggggcggtgcccagagaacctccatgaatgtgcaaagagagagaggagacacagagaacagaaagaggatctggaactcaaggacgccaccgtgtgggagccggccaggcctccatgattcacggtccagctaccaaaacagccacgccaaggcggcctcccttcttcctgtcaggaccgccgcccaaactaccaagaaggaaacccatttctgatcctgcaaggttccataagagaattggggccgggcgcggtggctcaggcctggaatcccagcactttgggaggcaggagggttactcgagcccagaagttccagaccaatttgggctacatacatggcc

SEQ ID NO: 202320 - DNA, 1000 bp, Homo Sapiens
tccatggccctttgtgtacaaagcatattttgaattaaatacctcaaggtccacctagacctctatggataaaatcataagtttatgatttttagctcctgtgagtgtttgggggcaaactacacagagaagacatgggtggttcagcccattccactaaaatatgttgccagattctggcctaactcagtattaccttttttcctaaaaatcatttttcacattttgagtaatagggcttatgctttgatgtgaaaaaatgtcaggaaatgagtgtagacaataccctataaaacactagctaagttttatagtgctccatgcctttgtgtaccttccactgattatcttgcctatctttggtgtgtaaactattttcatatcttctaaggctcttaacccactcttttctgaagccgcacagtcctttaatatgtcttgtttccttcctaaaagtttaaagtagagagcaaaaatgcaaatacccaaaggatactgttagtatgtaacttttgtgtgctgctttatttctagagtttgcattttttaattgttcattcacagaaaatcctaatattgccctatatggttggtttttttcctaagtggttaatatttaaacccgctagctgtagcatgataatgtctttgactgagcttatgtagtagaaaggatgtgtctgttttctgggacttttagtcttcacttatttttctataacaatctaattgttaaaaggaaaagatggcttattgacacatatttcattaaactttcactggaagaacagtgggtcatcctactgtggattaagaatactactgacaagcaaaaagcattaagctctgtaactgtctccaacaccaccttcaccccgcctttagtgtaccttagtgtactttagtgtacctattttggcagtacggtgttttccagattctacttgtgccctgcacattgtgaggactcattaaatatttattaaattaatgaatgact

SEQ ID NO: 202321 - DNA, 1000 bp, Homo Sapiens
ttctttttgttttgagacggagtcttgccctatcgccaggctggagtgcggtggcacaatctcgcctctggggttcaagcaattctcctgcctcagccccccgagtagctgggactacaagcgtgcgccaccatgcccggctaactctttgcatctcagtagagacagggtttcaccacgtaggccaggatggtcttgatctcctgacctcctgatctgcctgcctcggcctcccaaagtgtcaagattaaaggcatgagccactgtgcctggcctcctttttctcttttgagactgggccttgctctgtggcccaggctggagtgcagtggtgcggtcatagctcactgcagcctcaaaccctagggtgaagccaccctcctgcttcagactcccaaattgctgggattacacacgtgagccgccccgtccggctggggcactgtgatttttaataactctcatgccacccagttgtctacaatccagggacaaagaggtttgggtccccgtcttacaaaaaaaagaaaccaaagatccaagaggctattgaataagtgacgtgttgtctgactgcttacttcctgctgagagctgcctcaattacattacatgcctgtaaccattcattctcaccaccccctgtgaagtgggtggagttaccagccccatttgacaaatgaggaaacggaggctaggagaaggcagctcacttgcccagtcaaaaatgctaggctgggcatggtggctcatgcctgaaatcttgacactttgggaggccgaggcaggcagatcaggaggtcaggagatcaagaccatcctggcctacgtggtgaaaccctgtctctactgagatgcaaagagttagccgggcatggtggcgcacgcttgtagtcccagctactcggggggctgaggcaggagaattgcttgaaccccagaggcgagattgtgccaccgcactccagcctggcgatagggcaagactccgtctcaaaac

SEQ ID NO: 202322 - DNA, 1000 bp, Homo Sapiens
tgttatcataagtaagtggtgaacctccagaaaagtaagatggagtacctatggagtctctaaggatgaaatggtattttccactggaggaggtgaaatttgaggtggaatttttaacttgacaaccttaaaggttcattaacatttagatgggtaaaatgtgttaaattttgtggaatggctttctgagctaaaataaattcaagtaagttttttttttggtgtttttaagtaataggaaatctgacttcccatcacttagtagtatgcatttattgtctgagtgtaattaagtgacttggaataattggtaataattttgttatgaagaaatctcattcaacattgctaccttccttaaaaaaaaaatcctctaatttaaaagctggatcttttttcgaagctttgcttttttccattgaagaagtctttttcacaactccagatcttgggataccactgtgatattttaaaactctggaatgtacctttaattggattcatggtaaagtgccatcagatagaaggcagacccatcacgatcattatgtaaagaattcagttgctaacgtaggaaagggttctcattaccaggtgggtcccacgtattgaacttgaggacaacacagaaactgagccagagccactcaggaccctgtgtggtttctgtgccctccctgttagaccacttgtgtcccaggacttgaatctaactgcctcctgctccctggtgctggttcagactcactgtccatctcccagtgcccttggcttctgcctgtaccacctgcctgtgggctggagatttgactcaaagcaagttagtccaggtgaaatcttggctgaagtgtcatgcttgtcaaaacttactctgtgttggaaatgttttctgtcgggtttggctggcagttactgagtatatgtataaatgtaaaaatttatcatttttatcaaggcatactcttaagattcatgcatttcatgtatattgtaccccaat

SEQ ID NO: 202323 - DNA, 1000 bp, Homo Sapiens
aactttgtaagagtggtctacgcacacaggatcttgtcctccctaggcgtggatagagagatgccataatctgccagcatttggggagatcatggtaaatacttgaggcgttgatacatagtgcagtgagccaatttccttttcagttgtcactcagcaccataacatcacgaagaacatcattaatgcaaacctctcactaagccttcagaccaaagtggctttctgatggactctgcctgtctgtctacaagtggagtcagattcaaagtagaaatgtatccatccttgggaaagaaaataggaagtcttcccccactgtaggagtatataaaaatgtctcctggttgcttaattcccaacactcaatttccttcttctaaacacatttataaggagcaagagatggtgcacttattatgaattaatattaagcaatcactaaaagaaaggaatattctcttcctttcaatcagaaaccctgatatgtaagttgtgcaattaatgctaaagcatataaagtctttaagctgataagtatctgtaatcaaataatgaaaaaaggaaagcagttaaatgaacacactattcagggtcaaatatgttcagcaaaaagccgtagcgggtctttgatcatggttagattcacagtgatatcaaacagttggttctcatgtaacagctaaatgtttcagtttttttttttttattaaatttggcatttcacactgagatctgtattcctagtgaataaaagacagctactatattaggagggattccattttcacaattgcaaaacagatatttcaggaacatgggccacaaaatgtactcctttcacagtgttctcctcttctgaactgtgcagttatctattaaattttctaatagatatttgtgtaaggtgtatgtatgcttgtgcaattatttaaaaaacggttttggaaaacagtgtatttattaaagaaaattacttatggggcatgtacaaaactgt

SEQ ID NO: 202324 - DNA, 1000 bp, Homo Sapiens
gattttgtcaaatctataaaagccagagacagcgaatttaccacaaatcaaggtgggcaatggcagaaggttatggggcttgcttaataaacaagccagagcttgttcaagacatggtgaaacaagtaagaaatcaagtggaaacccctggattttcagtttctattaaaataaggatccatgatgaccttaaaagaactgtagatctttgtcaaaaggctgaagcaacaggagtttcatggattacagtccatggaagaactgctgaagaaagacatcagccagtgcactatgattccattaaaataattaaggaaaatatgtctatacctgtaattgctaatggagacatcagaagcttaaaggaagcagaaaatgtgtggcggattactgggacagatggtaagaaataagtacttgggttcttttaattgggggggaagaaatgagagtggggaagtaatgttaatttgattttcatttgttttgtttaacattaagccatattttcccattgtactgttttaagctaagcgatttattaaaatgatgttaagttttctacctagaaaaacatggattatcttaactgggataaattaattcagttacttttctgacaccatcatatctagtgaccagtgaagaattttccagatagcctactagtaaaataaagcacctagaaataagagtaagtgaactcgagaatgataagagctaaaggaatcccagaactgctatgcagtttcattattcccttaaattattggcatgccaagccctataattgctagatgggagaatatagataaactgaactttaagcagcccaatttatgacaatccagatttaccctaaagaaaaactaaagactaatggtttaatgtagaaatctttaaaaaataaagatttctgtacgtacatttaaactttcctggtttacaaaaggtaccaaaattaattcttttgtaatcggattaaacatattaatgcaat

SEQ ID NO: 202325 - DNA, 1000 bp, Homo Sapiens
ttaattgctcaaagggcccagtgttcacaaagccacctctgccctaacccttgccagagctctccaactatgacccacgagaggggtgatggtgggattctaacatcaacagagcaaccagaaagacattgggcctcccacactcaggctgcaggcccactttcttggtccttatcagctttaatatttattaatgacgacataggagcccgagtcagctgtaaaggccattaacttgcaatctggacaggaagttgacgctcaccactttgggtaagagctgctctgactgtagggccccctatttgttgtcctaacccagaagcagctctgggctgccaggatggtggatggaataccagagagttcacactagggaggaagcaatgcctgccccctggagtctcctagggggcagcagttagaataagggaagaggatttgctggtcactgtttgctgacatgggtttccatggtgagttcaggcctgaggacagcagtgtctgcaaaaccacatggcccttgagaaatgtccttgcacattgggcttcaaactcctcttctagggaatccatcttggcctgaaagcagaggtacaacaccagccccaaaggcaattctgttttcagattggttgctctggaaaggaaggctggggtgagggggcattttacttgcacagaggctgaccctgcctcccctcttcactgaccccatctccaaggtagacctcagccatgtcagtccctgttctgggaggtgctgggctgggccacagccagggttatgtaggtaattaacctgtccaaccctgagcctcgcctccccacaccagcaacacagtggtctctctgtggtgaccattcacagcataacattctgcttagcctcaaactgaaagcattgcaactgatgtcaaaaccagatgagatcttacagggagagagattgggtgcaatttgcctctttctttgaataaaaagctctttgctcaccctc

SEQ ID NO: 202326 - DNA, 1000 bp, Homo Sapiens
gagacgcccctttaaataaatagttcctgtgctgagtatccccaccctactctggaggggtggttttgtttctctaaaaattgccagattcattcaggtggcagattaaaaataagtaaatgattttctttttgagtaagtagtagggagatctttgggaaaaataacctagaaaacagtatatgtatttttgccattcttcttgcagatatatagattatattgatatattttaactttgtcagtgttttcaacatacacagaaaagtacaagataataggtcttagcactcatgtgctcgtcacctaaacttaataaaattttacatttttcatatttccttaggatatatattttaaggaaaaatatatagtagactattttacatatatatttttatagtttcaaaatatttggcacaatgcttagactacatttttgagagttagtcattttttatagtatatacattattggtgttgtcaggaggacttctttcagatcaatatttaactgtgggtattttgaaatgtaatagtttacagttctgaaatagcatgaagttcttaaaaggaaatcttatttaaaaactttaatgttagatagtttgtcagtaatctcttctttgaattattgcaatagcctttgtttttttgttttaaaaaaattttgagatatttaaaaacaaacaggaaagtacggcaaggaacatgaaccaacatacttgctccattaattccttttgctttaccatcttgcttcaggtttttttaaaatgaaatattatacaattgaacccctgatattattttcctttctttttacctagaagtaacagttatcctgaatttgttgagacctctattatgtctatccgtaaaaaatatatatcattatatgataaatattaaaactgtatattgcatagtattagactgtatattgtatattatcatgtaatattaaaactttagtatattaaaaccttatataaaaagt

SEQ ID NO: 202327 - DNA, 1000 bp, Homo Sapiens
cgagggaggagctgtggccaggtgttgggaagtgccaggaagaggagggtggccatgcctggccatttcctgatacctgtgctagtgacggccgcggtgtgtccactggaaagaaacactggcgtgcacggctgtgactctggtttcagcagttctgagacaagagccttccaagtcgggggctggggagcagagtgcgggagctcctgagtcctgggggcctccgcgcctcacagcatgggcacatgtgggacagaaggcctaatggggtgcctgagggtggcctggttgctgtccccccagggtgggaccatgagcgagtaggggtggcacacgggctcagctctctgtggccggggtggctcctcttgcgggactcaacgtcagccccaaggcgatgttcagggggtccctcagccttttgaggtggtgccgtttagggccgccatgcctgtctatccaggggacggactccgcctgctgttcccgcgctgagctacaggactcccgagtgtgagccgcggttcctctgttgcagcgcagccgtgtgtgctgtggagccgaggccgtcctgcaggaagccgcgtgactcccgcctcctccctgtgctctctggctctggactgtgactgcgcctggattctgccattgcgacacatttttgtgcctttcagcccctggtgtctgcagtgggggatttaaggcacccgcttccacttctttcttgtttggagttttctgttggaaccgccggcgttggctccgaagacttagcgacgccactggcggcaccttctcctgcgcccagtgatgtttccacggtgcctgtacacagccgagcagcatttccgttgaaggacttgcatccccattgcgggcagtgctggacgtgtcccggagacccaccgggagggcgccgccatgccttgtacccccaccgtgcaggttgtggccggttttctccgcaggttgaacatggaaataaaagcaaacttgtatg

SEQ ID NO: 202328 - DNA, 1000 bp, Homo Sapiens
ttataaactataaacacacactgagtgcctagcaacaggccctcccggtaactgaggttgcaggaagatccctgctggctctgtaggagacaggtaatgagatgcattaggagcagggagaacactgtcacagaagccccttgtgcaagagggcagatggggttgcggcaatcaactccctgcaggggtggggaatcagagaagattcatccaggcagcaaacttgtggctggagcctcaggcaggacaaggagctgcctaacaagaggtggaaggggttacgtacgttgcgaaagactccaaccctcctggtgagtcagatctgtcatctcgggctccagtatctcacactggttctccagcctaggtgtgcatcagagccacctgctgagctaatgaagcccactcaggactaggctcctggaagcgggatggggcttaggccttggcatttttgccattttccccagatgattttgataccaaacagtttgagaatcactgtttcataccaggctaatcagaagaacaggcagcaaagtagcagctggccctgggcatttcagcttggaacagttaggaaagtgatggggtgaaagtgacccggccccgcatccagcaatcactcccgttattcgaaggcactcttcccctctaggtctcactcaaggtctgaccaaaattacagccatacccagggagcttgtttctgatctaaactcacaaatgagaagcacagccgatccctggcaggcaggcaggcaggcagctaccagtgagggaagaggcaaacaaagtggcagacacgggaactctcggcaccgtgtgtggtcatctggggcctgacagcatcactgcacagtcttctacagtagctgaggccagctaataacaggctttggttatcagaaaccaaaacccaacaaaccaaaatccgaatcaagacgcttacccagtgggtttctgctcaggaaattaaactgtggaagcatatacaacc

SEQ ID NO: 202329 - DNA, 1000 bp, Homo Sapiens
ggttggttttagagacagggtttccctctgtcacccaggctggaatgcagtagtgtgatcacatcacactgcagcttctaactcgtgggttcaagccatcctcctgcctcagcctcctgagtagctgggactccaggtgcacgccaccatggccggctaattgtttattttttatagagacagggtttcactatgttggccaggatgttcaacaacttctgccttcaagcgatcttccctcctgggcctccccaagtgctgagtttacaagcatcagccaccacacccagcctatgacattttcttcattatggctggtactgcctcatgaaaagggggttcctcatgctggatctgaacaacccagcacaggcaagtctggggagcaaggcaggagcctgcatgtggactcaaaggaccggcacccgaaacaaagcagtggctggcacaggtggacaaaccaggcaagaaaagcaactgtccttcggagcagagtccacgtgatgggaagaaacagacacagtctcactctgttgcccaggctgaagtcaacggcatgatctcagctcactgcaacctccacctcctgggttcaagcaattctcgtgcctcagcctcccaagtagcttggattacagtaaaagctgccaaggtcctcttcaacgtgatggcgtaaatccagctctttctgcaagaaggctcaccagccttcccaccagctcttctccccaccccagccctgcagccctgcagcctgaccctaggtaatgagtggtggggagtgacccaggcatgcacgacctgcccagaggaaagggagttcaaagaaggacccgagaccctcacaggaacctagcagattggcacaagtgccagatgtatccaggacagacactttccccaggactccaggggtaaaggagtgccccacctctccactccttgcctttcttaactgaattcagattgtcgtgaacattcaagaaaagcattgtggctg

SEQ ID NO: 202330 - DNA, 1000 bp, Homo Sapiens
gagggggctccctcttacccctccccagcctgggctactgggcctggtactgaggacctcgctgccaccccaccccactctgccatgctacggggggtgggggggcggtcagtgcatgctgttcctagtctgaaacttgtgtcctgtgggtgcctggtggggaacccttgcgggaaggcctggtgggtttgtccctgcttcccagccagcctgtgtccccgggtatgggctggggtctggcatgggcctctgcagctggccacagactgaggggctccaaacagcactgggaacagcctcagggtatctggttgggggctgcagacaggggtggggtcttctgcttggccttgacaggttgcaggcaggttgtcagccggatctgcaatctcatgggggcttggggtcttcccggctcacgaggttatggcagaattcagctcctggtggctggggactgggtcccacctccctgctggctgttggcccttcccagcatggcggttgcttccccttcagggccagcaggactggcctgaatttctccctttctggcgttgaaacaccctctggagggcttcgtgatcgggccatgcccgcctaggatgctctcccttctgatgagctcaagtcaccggttagggtccttaatcacatcgacaacacccaccccacctggtctggagtgggactgactggctccagacagaccatgttctacacagaggtgacagatgcccagcgtagcggtccaggtgggggcctggtggaggagggtgagctcattgaggtggtgcacctgcccctggaaggcgcccaggcctttgcagacgacccggacatccccaagaccctcggcgtcatctttggtgtctcatggttcctcagccaggtggcccccaacctggatctccagtgagactccagggttctagacagaggccagtcttggccactcaccccacaccccgcggaccccaataaaggcttgcatagctcc

SEQ ID NO: 202331 - DNA, 1000 bp, Homo Sapiens
aataaccatttcagttggctgtaattttgccttttggctatacacattgagcataattatttagggtcttcatctttttcctttcattgtccattctttcattttgtttttttactactgctacaaccaccaccactgccaccatcatcttcttgcaaatggctaagcagtgtctgcattattctaccttcacccagtaaactgagtagaatagatcttctgagccctgttcagaagcagctaaaaccgggacttgcccaggatctgtcagctcttaaatagtaagactggaaatcataccagatctccagtactctttctactgcccaatgaaactcccttcttccccttcactccctcttgccagcttagcctacctaggaagtaaagaaggcataatacaaatgaaaatcatggcctttattattcatctggttatgctagtacttggtgtggtgactcctttgcaggattattttaaagaatggtggcagctatgttttactcactttagaagtcaaagactcacggtaaatcttagcagaggcaaataaaaacatgataccaaaacctaacatctaaatctgtactgtccagtatgatagctgttagctacatgtggctatttgaatttaaatgcaagttgattaaaatgaaataaaatgtaaaaggtagttattagtcacaatcatatttcaagtgctgaatagccacatacgccctgagatactgaatttttaatttaattataatttattcacatttaaatgtaaacaggcacatgtacctagtagccactttaatggactgtgtagatacagaacatgtctatcactgaagacagttctattgggtggtgctgatctaagggctatatcaataacactgtggtctcctggcaagttgtaccctctctgtacaggggaggacaacacaaatacttcatgagctttgtcttccagtgaccttctcagctcataaacagcatggctttgctttt

SEQ ID NO: 202332 - DNA, 1000 bp, Homo Sapiens
accttcctttggtagaaaaaatatgttccttgatgtaggaaagtctaggttttagagattagaggatgagatcaagagttaaattcctaaagaagcactgaatatatgaagagagcaaacaaatcaagtaccaacctagaggctttatttttgaattgattcatggtgtgtgtgtgtgtgtgtgtgtgtgtgtgtgtaacacagaaacagcttcagaaaataagggatagaaagtaatgaagaaagtacttaccccatattgccataaaaatagcaaagaagactgtccctccattatcgaacaaatatgtcacctgagtagaaaacaaacagaaatattagtcatgcaaattgattataataagccagtgaatactgtttgcactcaggtactatgattttttctcaaatagaatcatattattttatagtacagaaatattatatatgaattcctttcatgggtcttgcaacaatttcacatgatttttctcatggggagaggtgaagaaacaacattagccctcttctctcctctcttgattccctttataccccaccatcatttctgattataaataattctaccattctatggaagtatttgtgggtcacagattgtcaaactacttaatgaaagttgtatgaaattagtttttcaggtgaggcattcctagttgcaattcctgttagcaaaacttctaggagtggggaagttggaaaatgcaggattcttccagtgagccagcatttcccatagctaaccctattctcttagtctttcaaaatgtagaatgggtccaataatggctataagatgtaataaatcccatcttaatttgttttaaaagtttcataaatcactgaacacttatgaaacaaagtgttttttaatcagatatcaactgaaacttcataaaggatgcatagttttataatgttattgaatcaaattttaaggcttgtattgtttgattttaataaagtataaattcaattt

SEQ ID NO: 202333 - DNA, 1000 bp, Homo Sapiens
aggccgcacagggagctccggtccactgggggcccttcgatcagtggcctcccgcttcgtcctggccgctgtgctgaagagaagccaagtgttgttggtgtttttctctcccaagtgttttcccatttcagttatcagaaggtcatggccgtggggaaagtggtgaagatacccctcgtggcttggggtgcacctgcttgtgcagtcagcatgtagctgcctttccatttcattctctactgggctaaaaattgcagctacaagtgttaccatcttgaagcagtccacttccattcaatttttttttttaattttagaataacagtgtccccataccaaaggaagcctgctagctcatttcatgtataaatttcccatcttcaaacagtttaggtgtatttgttactctggtcacattctgcataaaagaaatcctcttaagcctatggttaagaaaagccttgaagtttatattcagttaaaatatatgtcggtggagatagccagtgcttctaattttgacttagtttcatacagtaaagcctaaatgtgaaacgcacacgctggaagatattgttcctatcaatattttgctttttataacaagggtttgttcatattgatgccatttttgcaggatttcttcgtgatttctgtccatatgaaaatgctgacattaaacattaacacatggagaccgtgccctgtggccctgccgtggctgccagcatggtctgtgtttccttgtggattcacctgtggccctgctgtggccaccagcatggtctgtgtcctcgtggattcactgcagctgtcggatgcgagtttctgtcataatcatttgtttcctgatacaattgttcttattcttttccaaaactgtaaaataatctcctccctcaaatgcaaaggttgtttttgttctgtttctgttttctttgaaataaaattataacgttaaaagataaaaaaaaaaaaaaaaaaaaaaaaaaaaaaaaag

SEQ ID NO: 202334 - DNA, 1000 bp, Homo Sapiens
catgttttctttatccagtctgccattgatgggcatttaggctgattccatgtcttttctattgtgaataatgctgtgatgaacatacatgtgcatgtgtctttatggtagaatgatttatattcctttgggtacttacccagtaatgaagttgctggcttgaataataattctaacttctttcagaaatcgccaaactgctttctgcagaagctaaactaatttacattcccatgagcactgtataagcattcccttttcttcatatccttgccagcatctgttattttttgactttttaagaatagctattctgctggtgtgaagtggtatcttttggttttgatttggattcttctaatgattagtgatgttgagcattttttcatgtgtttgtgcttgtttatgtatgtcttttttttttaagtgtcttcataccctttgcctactttttaatggggatatttgttttttgcttgttaatttgtttaaattaatgtaaggatgtattaatggcaatggcaagtaatataggattaattatatcttagatatttaacatcaaattttataaatgaaaacaggtaagaaataagagaaggtagaactatttgtgtgtgtgtttattcactagcagtattgaaaacagaaaactctcaagacagaaattcatgtttgttactagagagctcttagaaattattactcctggctgggagtggtggcctatacctgtgatcccagcactttgggaggtccaggtgggcagattgcttgagcccaggagtttgaggccagcctgggaaataggatgaaaccctgtctctaccaaagatttaaaaaattagcctggtgtggtggtgcgagcctgtagtctcagctactctgaaggcataggtgggaggattgcttggtcctgggagctggaggttgcagtgagccatggttgtgccactgcactccagcgtggatgacacagagagaccctgtctcctcctcc

SEQ ID NO: 202335 - DNA, 1000 bp, Homo Sapiens
aaaaatagaccagcagcagctgcccccgctgtgtgaccacacagggtgtcatgattcatcataaggtttgtctcaagtaatttccagttaatgaaaacaagtgtcaaaaatttctgaatgattccttttcaaaccactcatatctatgtgtgtgtgggcgcacattcatgattttgcctcaagtagcatcattcacactcacttgcattgccattgctttctttgagagtgagaagttggtacttcagctggtgtattagtctgttttgcattgccaaaaagaagaacctgagtaatttataaagaaaagaggtttatttggctcctgattctgcaggctatgcaagcatggcaccagcatctgctcagtttctgttgaggcttcaggaagtttttcctcatggcagaggtgaagaaggagcagatgtgtcacacagagagggagcaagagagaggggaggaggtaccaggctcttttaaagaaccagctctcgcatgaactcatagagcaaggactcactcgttaccatggggagggcaccaagccattcattaaggatccacctccatgacccaaacacctcctatcaggccccacctccatcacatttcaacatgaggcttggaagggacaaacatccacactgtaatagctggcatcctgggaatggggcctcacccacagcctgtcctattggtgttgccttcatgggtgcaaggactgaggcagccaattcttgtgtggcaggtatgaattaacatatttctagcctcagtgagcatttgaattttcaacccactgtcttgtttaagggaaactagcttaaaatctgttaggcaacgctaactagagatgatggctttactgactgctgcaggaatggagagaaaaaaaggccaatccaggaaacattttgatgtgagattagaaataaggggagacagagcagcataagtcaaagataattgtaaggtttgtagcccccagtgcctaagtgag

SEQ ID NO: 202336 - DNA, 1000 bp, Homo Sapiens
ttgagacgcttacttctcagtcgatgagtctgatgcgcctgccagtggggaagcggtcacacggggggttcccgtgagcaggcctttgctgacaggagtttctgtttgacttttcaggagaccccaaccaaagagctggggccctgtggaggagaggcgtgcggcccggacctgagcggcccagccccagcctcaggctctccctacctgagcaggtgcatcaactccgaaagctccaccgacgaagaaggtatttcacgtcattgtctagttttaaaggaaactgaaaaattgagtaatgtaaaggttttttgagggtaacttcccatgttgctttaatgacgccccctgacatgggcacagaactgccatctgccagccgggccgggctgtgtcttccgacctgcagggcgcacctgcccagaggctccccctctccctcatcacgcagtgataaaaagggtggggttttattttttatttctaggtggtggctttgagtgggatgatgacttctccccagatccttttatgtcaaagacaacaagtaacctgctcagctccaagccttctctccaaacatccaagtacttttctccgccgccaccggcccggagcacggagcagagctggccgcactcggcgccttactcccggttctccatctctcccgccaacattgccagcttttccctcacacacctgaccgactcggacatcgagcagggcggtgagaggcgctgcgtgctggggattgggagtgcagggtcgggggtggggcgctgcagctgggagatggtggttttgcaggcctgataatctcatgtcttcttcacatttgctgagtagattacaaacttgtttttataaaactcccatcatcagctgggtgcagtgactcctgcctgtaatcccagctactcaggaggctgaggtgggaggatcagttgagcctgggagtgtgagaccagcctgggcaacatagtgagaccccatctct

SEQ ID NO: 202337 - DNA, 1000 bp, Homo Sapiens
gcagtcagtacctgggtggggtcccacctgcggccatggcaggtgcaacagacgtggtggaggggacactcctgcccaggccatctgcgggaggctcagccccggggggtgcctcccagagctgctggggggcagcatttcaggctggatacacctgggcctgacccgggggcgggcatggcctgggcagcagctgtaagtgcgtccccgtggtgggggccagccaggtccctgtggctctggggttgcgcccctcagctcaggccacacttgccgtctccctcccaggacaggtcccagaagaggaggccagtcacaatggacagcgccggggcctccccaaggccgtgtgtatgaacggcacagaggcggcgcagctgagcaccaaatccagggcggagggccgggcccccaaccctgcccgcaaggcctgctccgccagcagcaagatccgccggctgtcggcctgcaagcagcagtgaggctggccgcctgcagcccgtgtccaggagccccgccaggtgcccgcgccaggccctcagtcttcctgccggttccgcccgccctcccggagaggtggccgccatgcttctgtgccgaccacgccccaggacctccggagcgccctgcagggccgggcagggggacagcagggaccgggcgcagccctcccccctcggccgcccggcagtgcacgcggcttgttgacttcgcagccccgggcggagccttcccgggcgggcgtgggaggagggaggcggcctccatgcactttatgtggagactactggccccgcccgtggcctcgtgctccgcagggcgcccagcgccgtccggcggccccgccgcagaccagctggcgggtgtggagaccaggctcctgaccccgccatgcatgcagcgccacctggaagccgcgcggccgctttggttttttgtttggttggttccattttctttttttctttttttttttaagaaaaaataaaaggtggatttg

SEQ ID NO: 202338 - DNA, 1000 bp, Homo Sapiens
gcacacatgctctaagacacatcagactctagctgagaccagccagacatttcttttgttgttggattagaagtaaaactgaacaagaaaccaggacacggaaggaagaactggaagctatgcctaaagtcagaccaggctaaggattttaaaaccaagctccacaagctcttagtgaattaccctgtggaaactatgtagctgacgtgaagtgtggaggggggtggtagaaaggggggttaaatgtaagactttgttttggcaacaaaaaatgatagtaatttgatttctacaactttaactgtgccatgtgccctttcttaccccactttctgcagattgtttcatatgaacgtaccctccacgtgacctctttaatgcacttggcaaactccgttaatgctgttgaagaatgtatgttctgtgctgtggtaagaggtgatcgtaatgcccaaatcatccaatacactatcataaagtgaagtgaaagacatgtactagatgtttgctttgtgaatgtgaatgaaagtcttattttgggggtgtagtttcttatgttttaataaaaacagtagtcattattttaaaaagcacattctcctaggtgcatatttatatacatatacaaataccatttccttcccccttgtgcccttctgggtagtcattttaaaaactcaagcctggggtcatcaaaaggggtagatttatactcccacctaactgtctggagtatagagttcagatagtctcttaggaagttttataaatgagattcacccagtacaattctgaaagctcttaaacaggagtctttaaaataatgtaaacacttaagtaatcaataagggttctctggtggcccacttttacatgcaaatacagaccaactgttaacatgcattattttagtcaactggtaaagtttatttcataagtataagtaattttaagccttttactaaactgtaaatttcaatccattaaaaactactaccgg

SEQ ID NO: 202339 - DNA, 1000 bp, Homo Sapiens
ggaaggtacagaatacttccatcaacatagaaaattctatcagtctagctctaggggcagatagtccttccactgacttgggcaagtcactctacaaatggcatctacctcacatggttatggtgagaattcagcgtatgtatgtacatgcaggcacacaatatgcacacagacacataacatagtacaccctttcctgaaaagcctgacacatggagctcaaacatgagtgccacccacccctgggcagcaccaagatggctctagtctgggtgcctttgtctcacccccatgcctttgctcggagtgtgctcctcatttttctgccactttgaccctgtctctgatttggtcctgtctgacatcactgctatatgctttgctcctctcaatttcctctgccctcatgccagcaggagtcatgccagagatcatatctgagaaagcaagacaattttgtgtgtgtgtctgtgcccatagaggagtgctggttgtgttgatatagttgtagattggttgtgtttacacagttgtatatattgacacccttgagtgttatgacttcttttgggggtggtcgccttttaaatcataacttttaatgggattccattttagtctttgtgaagacataaggttgttggcaggcatctgtccctgggagcatccaagcagaaaagactaagactcccttgtagacagatcactggccgccactgaagtgtgtctgcatggcaccacagggctggaagacccttgaaggcaggaattcaaggaaatgtatgatgaattttggcattgccatcaaaagcagaacaggcatggaaaacttgggtgagtgggcgagacaacctcctcaccacagcagagttccatccatgcctggataatgatggagggatttgtgtccactgcagtggggaaccatgaaggacacatcaagggtgtggttggcctgtggtgctctttggaggaatgaataaaaatgaatagaaatcct

SEQ ID NO: 202340 - DNA, 1000 bp, Homo Sapiens
actccttcaatgatgctgtacatctgtacctttactccatcctatagcaaatatttgtataactgcacagaagaaattggacaatattccttgaaaaattcttagaaagttcaactttccaagttagtatcaccccaaggaaaattatatgagtaggaatacctaatttctagccatactctagttccagttagcttctctaagtagctggaactgcaggcgtgtgccaccacacctggctaattttttgtatttttggtagagaaggggttttgccgtgttgcccaggctgctaagatttttatatatagtatatagaaagagttggttttcttggccaggcatggtggctcgcacctgtaatcccagcactttgaaaggctaaggcaggtgaatcacctgagctcaggagttcaagaccagcctggccaacatggcgaaactccgtctctactaaaaatacaaaaattagccgggcatggtggcacgcacctgtaaccccagctacttgggaggccaaggcaggagaaccacttgaacccaggaggtggaggttgcagtgggccaagattggccactgcactccagcctgggtgacagagcaagactctgtctcaaaaaagaaagagttggttctgttaaacaatatttatttctcataataaccctatgaaagcagatacagacttctggctttttaggattggtatttcacttgttgaacacctacccttgtgtcagatgtatagcaggttaacaaagtcaatacagtgatacacttgacataatctttgttctgagtttttttcccaattatagtaaaattggaggtcttaactgttctacattagataaatatatgcatttgttttaaagagctaagcaatgagaatcttacaactagagctgaagttcaagaaataaatgtccaatgattaaattttttccactgctgttcacatcatgatttgttgtgattaatgtatgtggatgaggacat

SEQ ID NO: 202341 - DNA, 1000 bp, Homo Sapiens
gacttgagaccagcgatggtcagtaacaggctttgaagtggcaggattgcgttaggtgtgctgctgtgatctggtgctgctttgaccttgaaagcaggataacgcatgcacttacttacccccgcattacttgggtaccttaaggactagtggttcacaacttactttaggagcttttatttattctgtaacacgtgagatctggtaagacagtggggggtaaggaaaacagacaagaccatgactcttctttccctcttccccaaaacgtgcctcttcgaataatcttcagtgtgccctccagcagagccgaaatcaggcaggcatagactccctcctctctcatcaaaccgcagaaatagagttccttcatcataaccgcaaagcttcctcctcccctttgcaccctgcctcagctgcattttcttgtcgcttctacaggggagtgcttgctgttctgggaagagtggggagaagcggtgggaatccttgagccaattgaaactgaggtcatcttcaggaaaaccatgtcttcctgaagttgaaagattcaggcacaccatacagtcctttcctcatgaataatcttgttctttactcatgggaaattgggagaggttaacccctcccaagtttatgtttgcaaattcatgtttatgggtccaggtgaaaaacttttctgaacacagcatgctacttctcttattacctctctctatttaaagaatggctaggctgagcatggtggctcacacctgtaatcccagcactttgggaggctgacatggcaggattgcctgagcccagcagttcatgactaagcaacatatggagattctgtctatataaaaaagtaaaaaattaactgggtgtggaagtgcatacgtctagtcccaagctacttgggaggctgaggcaggaggagttggaggctgcagtgagacgtgattgtgccgctgtatccagcctgggtgacagaaaaagaagagacccttccttt

SEQ ID NO: 202342 - DNA, 1000 bp, Homo Sapiens
tccctcatgcacagccacagcgagctgtctaaaacacaaagctgaccgcgccatttcctactcagcatccttccatgaccctccattgctcctaggatagggtttggaccagtctgaatccagaggatcaggatccagcaggaaccagaggataatttgaggagggtttaaaaaggaaccattttttgaggtgtgtacactgtttccaccctgaggcctggaaggatgaatggaagcagcagttcctgaaccaggaagactcatgtgtgggggccattgctggtcaaggggcacgaacaggtctggtgaccctgcaagggaggagccaggagcaagcattcccacttcaccttcctccattcagtctgctgccaagttccccactgcctgagcccaactagaagctggagggaaggagggcctgtggctgcagtccaggcatgtaggcctcctgggaaagggagaatggcaaagacaggcagagtggatctggaggggtcaacggaagacggaacatgtccacttccaggcccgagcttctcagcctgccgtttgccactctccagcatctggcccagcctgtccatcctcatctctcttcctcccttactccgtgctcccatcactcggaaccatttgcatttctttgtctcagctatattgtctcacctctgagtttttgcccatgatgttggatgccatggaatgccatatcctccccattatctcccccttgtctggataattcctactcatcctacaatactgattttatctgtgcaaagaagtcttccccagtgcctctggttgacaggggtttcctctggcttctccagactttctgttcctccaccacagcccttagcaccctggggaggaggtgttgctgtccaggtaaatgctgcgccaatgcccctgcctctagtgcactccctccagcctacccacaaacaggacctgcatcctgtctcacaaataaaactgaactcttgaaatggtg

SEQ ID NO: 202343 - DNA, 1000 bp, Homo Sapiens
gatctcggaagaatggctgaaactagagctctctttgcaatgcattgttatttgcttgatggttgtcaattagaattttcattgggaaaacactgtaaatctttagaacaaagcttgctttattgcaggactgtatgggctgcccttcgggaggaaaaaaaatctgccaaagcaaacatttggtggacctctgtgttttatgaaagccacggaattagtaatttcccccagttacagagttttatgaaggaaagccaccccaaataggcatcgtgaggagtatgaggcatgtggacttgatgccagagtgaagcaatctccctcattcacgtggtgcttttgcttctcacagtgtctgtgtgtacttacttcagaggttgctctgcttcacatccggctttccattttccttcgtgtcctgagaccctgataggtgatagtgtctgaaggggtgtcccaggagggagatgtgcaggccacctctggtgcctccttcctagaccaggcttctgtcccttcccacctcctacccccaccaagattctgttgatgggaggaagggggatatgttgcctggttttaccttctagcgagattatgaacctctgtgtgttctcgtctgagccttaggctatctagacagaaaaccaaagtggagaatcatgaacatcacccagagtaagacagccactcagcgactatactagaggagagcggttgaatgtgacagggccgggctcacatactggccgtgggacctcgggcaaggtacacagcctctctgagcctcattttcctcacctgtgtaatgggctattacttaccttctctgtttgataagtcagttttaaggtgtcatatgcgaatgagctctttgtaaacaataggaagtactcaacccttttattatgaaataaatcactggatgtgtacactgttcctaaatagaatcatacctaatttcttttgctttctaaaattaataaatcagctgttattt

SEQ ID NO: 202344 - DNA, 1000 bp, Homo Sapiens
ccttatgctctacaccccagtgacttgaggctgctggtgggccctcttcctccaccctgggttagtcctttttaaggcctttgcccctaacatggccactgattcttctcccttctacctggaaggttactgttgtacatgcacacagatgtagcctcttccaggaagcctccagagaattgtcctccagcctgttttgcctccctagcacctctgcttcagcccttaacacactttatgcttggtttctgtctccaccatgaaactaaacttcttggagtccaggatccacctgtgcagccgcccagcatctggcacagtggagacccgagagagcctcagtatggcattggcctgtgcaacccagtgggacagagtttcttccagaagggcttctgggtggtggcggaacagtagctgagtctgaaagagcaggagggctgtgagtgggaagggaggctgtggcttgggaaagggcagtgagtccaggcggaggctgctctggcctgagaagagctggctgccaaccacgggctagagtctaacctctctgggagaaggagcagtggttattgagcccctactgttcagaatacaggaagaccccagcatacattgtgtcgtttcctcttcacacagtagagggggtggtaggatcattttacatgcctgaaaactgaaacttagcagtttaggtcatttacaaagagctgagttaggccgaatatggtggcccacgcctgtaatcccagcactttcggaggccggggcgggtggatcacctgaggtcgggagtttgagaccagcctgtccaacatggcaaaacgccacctctattaaaaatacaaggattggccgggcgtggtggtgcatgcctgtaatccagctgcacgggaggctgaggcaggagaatcgcttggagccgggaggcggaggttgcagtgagccgagatcacggcactgcactctagcctgggtaacgagagcgaaactccgcctc

SEQ ID NO: 202345 - DNA, 1000 bp, Homo Sapiens
agttagtctgagtagataactacccacccccactcccccaagctgataattattaccctggtttatcctctgtctcatttcccctctcaagctgttagagaatgaatactgaatactgtggtgcactgctccatggatataaatgtaacagcagtaatatttacaaccaatgtctaattggctgtagcttgctttcagtgttcagtctaaaccataggactatatatttgtcttagcataatgccgaacatgcaagtctgcttaaactatagtcttaagatttgtgtgttttgggtttcctctacttcctctatttcctgtcttttttgggttataggtcagatgggttctactttttattcccatttcagactgtggagagcttctaaaaataccagtgtccatccctgcccctaggatctagttaatttttaaaagctctctgtgtttcaaatttgcatgtgtttctgtatgtttgcagtatctccgtgtgttttcaaatcttctgatggagcacttcgtgtactttaacccttggtctttccattgcctgtcccatttttaaattccctttttagtcttaatagctgcttgagttaggacctctggaagcaaaagtgggataggatgctgacggggaattgtaggcttgatggaagaggatgtttctatattaaatgtcatggcagatccagttctaggcatacctttaaaatgtatacacaggctgggcgtggtagctcactcctgtaatcccagcagtttgggaggcccaggcaggcggatcacttgaggtagggagttcgagaacagcctggccaacatggtgaaaccctgtctctactaaaaatacaaagattagctggacatgatggtgggtgcctgtagtcccagctgcttgggaggctgaggccggacaatctcctgaagctgggaggcggaggttgcagttagatgaactgacacaccactgcactccagcctgggagacagggtgacc

SEQ ID NO: 202346 - DNA, 1000 bp, Homo Sapiens
tttggaaataaggtcttggcagatataatcaaggtaggatgaagtcagtggggtgggccctaatcaaatatggctggtgtccttataagaggaaaagagacacagacacacaggaactgctgttaccaccatgtggcaaccaaggcagagaatggagcaatgcatctaaaagccaaggagcatcaaggatcaccaacagcaccagaagtgaagggaaagagatggaacagattcttccctagagccttcagggagagcacggccctgccaacaccatgatgtcagacttccagtttccagactgtgaaagagcaaatttctgttgtggtaaagcacccaagtttgtggcactttgttatggcagccctgaagaaactaacacaggacctgaaggaagagatttatcagaactgtggtcaacattcccaatggaaatccaaggaagatcgggtgaggcaagaggaagcggctcgctacagggaaaagcaatggactagaagtcaggaaacctggctcttgtcagagctaacaaggttgtgtggccttgaactggacacaattgctctgggttttcattttgtcacctgtagaatataagaggatttaactatataatctctacaccaagtctagctttatagatgggaagaccaaggaccacacagaccaacattttaatactttcaaattcactgttctggcattgcttggacctcagggacagaaagcaggacacaggaaacagaactgcagtcttccatttgcctcaagccatgcttactgcagcaatgtggccacatttattttggttgagtaaggcccaaaggagtttgctatggaagcaacagcagcatatgctgatattctataattattttctttcaaatataactttttctgcacttccaagattgtcaaaaatgtctacagctgattcaaaagcatgatttttgtttaaataagataatagttaccaccaaaaataaagaatatcacttgt

SEQ ID NO: 202347 - DNA, 1000 bp, Homo Sapiens
ttaatttaaaagcaagtatttaggagatggttactgggtgtcaagtattaacaaaaaatgaaggatttttattatgcaaaatactttttgagtggcatgaggttttaccatatgttcagttttataatttcaatttacaagaagatgcttccagaaaaaagaatgctgttttttttctgcacatctttacacatttctagtactgagttctgtatcaaagaaagaaataattttaaaagtatttgtgttaagtggtttttggtaaaaatcggctgagaaatactgaataaaagctacaactatccaaaatgtgaatattaacaaagcaattgacttgttctttaaccatcctatgagaaaggaacaaacaatttggtcaattactatcctgtcaatgcaaatgaaatggcaaaagcaaaacaataaaaacactttcagaagtaaaaactaattttgtattttcagaaacagatttttttcaaagtgaaaatttatttcttgtatcagtaatgtgacttactgcccaatggcaacaaatgctgtgaatgagtttgtccaaatgtaatttaaaatatatatcttgtaatgctaaaaataggttctacaaagtaattttattatgaaaaatcttaaagttgcctcaactcgtaaagcataacaggtatgtctgtttcactatatctgcattgtaaggtctattctgaattcatttgggaagaatggtgaaataaatccctaaaggcctctttcctatgcattaaaatagaaaatcctatgggattacattcatgtttgctttctaaattatgccaaaagctcaattttattaagtataatctgcctagccatgcataaaataaactactttggtttagatgtgagtatatgtattatttatgttgatttttaatgaaaatatgtttacatgtaccaatatgttctgcctaatattggttaatgtcataaaagataatatagtaatattactttcctaaatgtt

SEQ ID NO: 202348 - DNA, 1000 bp, Homo Sapiens
gctcggccctccctggggaccgcgcccctccctcccagcggaccgcgctcctccctccctggggacctcgctcctccctccctccctgcggactgtgctgctccctccctgcggactgtgcttctccctcccttggagcagcctggacttgccagagctctgccaggtggggcctggccgccctttcccaggccctgcagtggccttgtcctttctcacctgtttccactcctgctgtccccgttgggccctgggcttcgtcctcttgctcaagccctttgttctgaacctgcgtggcagccgggactgggggatccccagcaaagagctctggcttggggctcagaaagagggtcatcgggtcctcgtgggatgcccgggctctgggccacctcccctccctccgcccagcctccctgcctccatctccgtccagggcagccccgggccctgctccccactgctaagtgtgtctgctgagcgctggcccccattgagtcctgagggctggggccgggggccgggttagtgaggtcagcgtcttgtccgagaggtccctgtgacagcccgggatgagccacgggtggagggcagtggggccttgcccaggggaggaccccactcttcctgcagggacctcccctgcgccggctcccagtccctggcactgcgcccacccagggctgtcagcctccaccttcagaggccggcccgggaaacccttccaaagccgagccggctgcgctgtgcacgcggtcacgcgggctccggctgcgggaagcgagactgaggcaaggtccctgcaggctgcccacctacggccgaggccctgctctacggcatcctgcagctgcagaggaagatcaagcgggagcggaggctgcagatctggtaccgcaggtagcgccgccgccgccgccgccggagcctgtcgccgtcctgtccccagcctgcttgtgtcccgtgaggttgtcaataaacctgccctcgggctgccgcc

SEQ ID NO: 202349 - DNA, 1000 bp, Homo Sapiens
aattggaatttatgtgatttctaacatattcaaaccttcttaatagtgaaacagtagcagaagtattagggaagcagtccctgttctgtgctcaaggcagtgaatattgtctagctctttcagaatgcgtagcacttagctgctagacgttaatgctggaaactataattgcggttagattctagtttcataagtggtgtttctgaatattcaggaaccttctgaactctgttaacaaaattgggataaaggatgaactcaagtgtgaagagagattgtgaggagcataatatccggtttagaattcagcctgagggaggagcataacatctgggtgtagaattcagcctgaggggctcactggtttggttttcttccatatgaaatgggacagctattttcacaggtcaaaagactgttcactattaatgctgaaacactcaacactgtgatgatgaaaacttcagttttctgtgtcagtaggtgcctttcagactttggggaattgggttggttatatttttaagatgtctcagagttgaaacacctgttaaaaaacacacacaggctctcatgtggtttaggggttgtaattgtacattctcttgagaacacacggcactccctctagtccagctgggaggtgagggtgccccagaaagcacaggcttctgagtgtgaacaccggccgcgcaggtcctagggcgctgctgagaggaagagaccagggaatcagccttggagaaagcacgtctcttccgacagcaaaacactgggcaggttcattttaagtaccatttatctagacttgcagttgcactcaaagtatttctacaaagttgctagtttttttagatcaaaagattacagttacctcattttatcaaaataagtattaaataaaaagtaagcacaagtaccaataactgcctcaaaaatacttgttatatattttattgtaactggttttataaaatttcctagtaatatcgtctcaatg

SEQ ID NO: 202350 - DNA, 513 bp, Homo Sapiens
aacttccgcttccggttcctagcgttaactgcgaccggggttcagcgctcgggtgaggagctggtggcgtcggcaggttcgaggcgattcgaggtgagggggtcaagcggagaggctcggagtcggagaaagctgtcgcgacccagccacccagggtctggggtcggtgggagctccagctaggatgatcgaggttgtttgcagcgaccgtctggggaagaaggtccgcgttaaatgcaacacggatgataccatcggggaccttaagaagctgattgcagcccaaactggtacccgttggaacaagattgtcctgaagaagtggtacacgatttttaaggaccacgtgtctctgggggactatgaaatccacgatgggatgaacctggagctttattatcaatagatgagaatcctcatcttcctgccccgctttcctctcccatcctcatcccccacactgagatagatgcttgtttgtaaaaactcaccttaataaagacttagatgttg

SEQ ID NO: 202351 - DNA, 1000 bp, Homo Sapiens
aacacaaggatacctgtgttagcaagccagttgcatccactaacacataaaagtcttacaacagcatgcaataagtttgaccagacctcttatatatgatctttttattagcaatattgaggccagtctatcaacaaacatgtttctagatttatcaggttagtgtttttatatatatatatgtatctaaaacacatttccatgatgcctaaatgccttcatatattgttgttaaaattaaatgcataacaaaataaatatgcatttcaaatgattatattttattgattttgcaaagctataagaatgaaaatacgactcaaggaaaacatagcagagaggaaagtaacatcagcaatatggtggtataagagtctccagcatatatcctttcaaagaaaaatgaatttaaaaaccatccagtcataaaaataacttcacaacagataaggactccagatgagagattgcggtgcctaggtggagcacagaaatgataaaagatacattgaagaggttataaaggacagtttcacactacccatgtcagcctcctgcaagctcctggagtgcactgtggagagagataccttcaaggtagaggaaggagagtaaagtcaacatttggttttgccatggacatactccattaactctagtgccagactggctcctgcaaaccgcagctccaggcccgccctagtgccaggccatcctcactggaacaaagcaccagccaagcccttgtgaacccagaaaccaggtttgcctgccaactgacccaggattcaggtcagcccacctgaggactgaaacagcatgtctacccacagacccaacgagctgctcacacaaaattaagccagctgactggtaaagggctttccttaccaaaatcagtctgtaaagattagaagaggtgcttacttcttaaaatacacagacaccaatgaaagatatccaaaacaatctagagaaaggaatcaaagcaaaccactac

SEQ ID NO: 202352 - DNA, 1000 bp, Homo Sapiens
cagacaacccacagaatgggagaaaatttttgcaaactacatatctgacagaggtctaatatccagcatctagaagaacttaaaacacatttacgaggaaaagaatccattaaaatgtgggcaaaggacatgaagagacatgtttcaaaagaagacgtacttgcgggcaagaatcagatgaaataaagctcaacatcactgatcattagagagatgtaaatcaaagccacaatgacaccagtcagcatgggtgttattaagaagtcagaaaatcacagatgctggcgaggttgtggagaaaaaggaatgcttatacgcagttggtgggagtgtaaattagttcaactgttgtggaagactgtgtggaaattcctcaaagatctaaagatagaaataccattcaacccataaatctcattagtgggtatataaccaaaggaatataaatcactctattataaagacacatgcacatgtatgttcattgcagcactcttcacggtagcagagacatggaatcagtctaaatgcctgtcaataatagactggataaagaaaatgtggtacatatataccatggaatactatgcagccattaaaaagaacaagattatgtcctttgcggggacatggatgaaggtggaagccattatcctcagcaaactaatgcaggaagagaaaagtcaaatactgcatgctctcacttataagtgggagctgaatgatctgaacacatagaggggaacaacacacactggggcctaattgagggtggagggtggtaggagggagaggaccaggaaaaatgactaataggtaccaggcttaatacctgggtgatgaaatgatctgtacaatagactcccatgacacacatttacttatgtaacaatcctgcacatgtacccctgaacttaaaagttgaaaaaaaaaattcagtcttgcctttggtttttagcatttttactatgatatgcctagatgtggccttttttttaag

SEQ ID NO: 202353 - DNA, 1000 bp, Homo Sapiens
atctccttcaggtatagaatcccagaccacctggtccttttgttctctcattcctctgatttctgtacatttaaggattcactgctttagaaaacttttttttttttcttgtttctggagccacctctctcagtaaagccaggcttggcaacttattagggacagcattctggtttccctggtgacagggtttaagctgattctaggctgttgcctctaacccatcaggaatgccataagtatagaccctgtcttgggagagatctggagagatacttgagaattttggacactgtaatattgaatttggttctaattgtgatctagagaccctcagactctttcaggtgatgcacgaagtcaaaattctgttcatagtaacgttaacacagtgttgctttttcactctcattccctcaccagtatacagtggcattttccagaggctaaatgatgtgtggtaacatcacattcttctggctaatgaaatgtgtaattctgtattcttgtgttttctataatttttaaggtagtactttaaggtaaaaatatggaagttttcattgatggactcagtttgttcttagtacttctgtgctcttactaggtttcttcagttataactgctatcatctttttgtacacttcattactgtctaataaatccttattttgaaatcccagcattttcctggaacctttgagaaaatataagaagtaagtactacttgtaaaacttgcttgtaaaaacttttgggaaaactcctaattttaaaaattttattgacaacttattttagcactttattctaaaatagaaaaaaatttatattatttctcttatatgtaagggtggattgttggcttaaaaaagggagattagaagacttgctttttcaacccatagctgcaacttgtatgttaaaaatactgaagtggacataccaacaagtataaaggaggactttaaagaatctgggcagaactgtaaataagaact

SEQ ID NO: 202354 - DNA, 1000 bp, Homo Sapiens
gtcggagaaagcagttggggtagctggtattgagaggattggaagtgcaagacaggaggccagaagtcaggaggcttttgctatgatggtggcatgcacaagggactggagacattaagaaggaataattgacagttacagggaggccgacagcatcaggggtccctgccccccatttccacctataactcaatggccgactgctccatttgtggtgggaagtccttaggcatgggcatagtgggccctggatgcccaaagatctgcagcttagctgggggagggggagtaagtgccctccagcactgagggctgagcactgagggatgaaactgagtttcatcagttctcaaggtcagccaggttgatggttaacagttaaaaacagtattggggccgggcacggtggctcacgcctgtaatcgcagcattttgggaggccgaggtgggcagatcacctgaggttgggagttcgagaccagcctgactaacgtggagaaaccccttctctacaaaaaatacaaaattagccgggcgtggtggcgcatgcctgtaatcccagctactcaggaggctaaggcaggagaatcacttgaacccgggaggcagagggtatggtgagccgggatggtgccattgcactccagcctgagcaacaagagcaaaacttcatctcaaaaaaacaaacaaaaaacaaaacaaacaaaaaagtattggagacaggtgcggtggctcatgcctgtaatcccagcactttgggaggccgaggtgggtggatcacttgaggtcaggagttagagaccagcctgactaacatggtgaaaccctgtctctactaaatacaaaaaatttagccgggcatggtggcgcatgcctgtaatcccagctacttgggaggctaaggcaggagaattgcttgaacctgggaggcggaggttgcagtgggccgggatcacaccattgcactccagcctgggcaataagagtgaaactccatctc

SEQ ID NO: 202355 - DNA, 1000 bp, Homo Sapiens
gtaaaataaatacatttgaaaaaggcaccctctcaaccttctgcgagtcagaatttttgctgccacccctcattttgaatctctattctgcattttttattcttttttttaggaaggaggaagaaaaatttctcctgaagaattcattggaaattaaaattaacttgcgtattttgtattctttggaatgtgatgaagactgatttgaaagggcagtgctggatttggtcaggcataggaaaggaagacatgcagtcgtcctgcctagctcatccccgccacgatggagaagtggggttgctttcgttgtactttttttcatttgtttcttgccaagcccagtggcttctgttataacatgtggcagcttctcccttggagactgattcagtccaagttaccataatatttaggaccagctacagagacgtttcttcccctaaacccatgccaaatctaaatcaaactatcttcttctccttagccgttcaaatagctccagctcttatataaaaatacgagaaatacacaggcctcttttcgttttattcctgttcaaacagataaacaaacaaggcacatcatgcctaggttgctttgagcttgatcacttcctcctaaagcagtcttacgctgtgttgattttaagaattgcaacttaggtgttctagaacatattctgagagcatagtcatagtctgtgatctcagaatatgtttgcttccttctagaacatctgagttctagaaattgcgtacaataaactgctgtcagtgctgctggaggaaggaagagtaactctgacatcactggccttcaacaggtgtggcgctgagcttctgggcctcagaagccctgacttctagaggctgggggccagcggggcagggaggtgatctcatcatggatggccacagatcatccacctgccaaacagttaaccctgaacaagtcatgtcaatttattttgcttttaaaaaagaaagtctgcaaaatagag

SEQ ID NO: 202356 - DNA, 1000 bp, Homo Sapiens
tttgtattctagaaagatccctggctgctggatggagtgcttgagagtagaagaagctagcaagggaagatggtggctgaaccagcttgggagctgtgggatgggaagaagtggacagcaggggctgttccggggcatacctgctaagggtgcggagggttgtggctctgacagctgtggagccggtgggaccagggcacacagccccaggcatgaggggcaggcagagagggctctgtggccatgtaggggcatttctggctggcggggaggtctgtggctaccactgggacaaaagagaagccagcccggaggtcagcccactgctgctcatccccggcccacaggcagaagcttcatgaggcagatctggagttgcagaggaagcgggagtacattgaggagctggagccacccactgacagcagcacagcccggcggatcgaggagctgcagcataacttgcagaagaaggacgcggacttgcgggccatggaggagcgataccgccgctacgtggacaaggcccgcatggtgaggacgctgggtgttcccacaagttgcctgccctggcttcttactttttgtgcctcctattgagtcaaacctcctgcttgcacatctgtgcccccaactcatacctgtcataccccaccataagacagacttctgcatgattccccactgctactgattgtcacattaaaatactgcacagctggctgggtgccgtggctcatggctgtaatcccagcactttgggaggtcaaggcaggcggaacatgaggtcaggagtttgagaccagcctggccaacatggtgaaaccccatctctactaaaaatacaaaaattagctgggcatggtggtgggtgcctgtaatcccagctactcaggaggctgaggcaggaaaatcatttgaacccgggaggcggaggttgcagttagctgagattgtgccactgtgctccagcctaggcgacagggcaagagtccatctc

SEQ ID NO: 202357 - DNA, 1000 bp, Homo Sapiens
atgtatgtgttccaagatacaataatttaaagaaagtctttggttaaaaatacacactgtggtgtaagacctgagttagaatccagctctttgtcaccttaaccctgggcaagttacttctctaagcttcagtatggggaatagtgtcattgtggagtttgtatgtaatggaaacctcaaattaacaatgacttaaataaaattttattttcaggcataaaaatccagggatcagtaatccagggctggagtggcagttccgtaaatgcttcaggaaatgcaggctgcttcaaggtctctgctctgccatccctggattgtggccctcatggtccaagatggttgttggaatgtcagtcattatgtagccaacaggaagtgggcattcctccctcctctaaggactcctctaaggacctctgtaggaggttgagaaatgtcttttttctaagtggcttttaaacttcaggggttctgttaacaacagaagaagagaatgggcattggggcacaatcagcagtctctgtcacagggttgttttaagaattaaccagtacatataaagcccagcacacagagcctgacatggaaacaaaggctgctattttaatcactagtagtaaatgtcaaacttctgactgaacaaatgtgcttatcttttctcaccaaaatgccaatgaaataacagtatacggattaaaatttaaaaagcaggccaggcgccgcggctcacggctgtaatcccagcactttgggaggctgaggcgggcagattgcctgagctcaggagtttgaaaccagcttgggcaacacagtgaaaccctgtctctactaaaatatcaaaaacattagccgggcatggcagcatgtgcctgtagtcccagctactcgggaggctgaggcaggagaattgcttgaacctgggagacggaggctgtagtgagccgagattgtgctactgcactccagcctaggctacggagcgagactccatctcct

SEQ ID NO: 202358 - DNA, 1000 bp, Homo Sapiens
aagtaggttactagttactctcttgtgactggtagtaaaagtcctacattagtgttttaaatatttaaagatgttaaaacctgtaactatcagcagcattcatatccttttccaaattcaaacagtaagcccatcaaaatataactcctagtaaagattttactattgtcatgatgtatttttacttgtacatttcactaattcatagcaatgtggacctgcaagctgttgtgattttcgaacttgtgtactgaaagacggagcaaaatgttataaaggactgtgctgcaaagactgtcaaattttacaatcaggcgttgaatgtaggccgaaagcacatcctgaatgtgacatcgctgaaaattgtaatggaagctcaccagaatgtggtcctgacataactttaatcaatggactttcatgcaaaaataataagtttatttgttatgacggagactgccatgatctcgatgcacgttgtgagagtgtatttggaaaaggtttgtgtaaatcgtgaatgtgtagaatcaaggataattaaggcttcagcacatgtttgttcacaacagtgttctggacatggagtgtgtgattccagaaacaagtgccattgttcgccaggctataagcctccaaactgccaaatacgttccaaaggattttccatatttcctgaggaagatatgggttcaatcatggaaagagcatctgggaagactgaaaacacctggcttctaggtttcctcattgctcttcctattctcattgtaacaaccgcaatagttttggcaaggaaacagttgaaaaagtggttcgccaaggaagaggaattcccaagtagcgaatccaaatcacaggacagtacccaaacacaaagcagtagtaactagtgattccttcagaaggcaacggataacatcgagagtctcgctaagaaatgaaaattctgtctttccttccgtggtcacagctgaaagaaacaataaattgagtgtggatc

SEQ ID NO: 202359 - DNA, 1000 bp, Homo Sapiens
cgagctcctgataataggtgatccactcgcctcggcctcccaaagtgccgggattacaggcatgagccacctcttcaggcccaagacaaaaatatagttagagtagatggggaatagtagtgtcatcatttgataaacagtagtgcatgctaaggtaaatgaataaacacaatttatcttatatgcctggagcctattcccaggtaactggccttttttttttttaataaaaagctttattaaaaataatttttgaataataaatacatttgtaggaaattactaccttgaattttgttttaaatagtagacacccctttatcttctcctagatttacttgttaaccattttgtcacatttgctttctccctgtatccatattcttcagaattttttcctagttttaaactctagcttgtgtgattttaatactgcttctcctgttccctctttttttgaattacctgatatttcttatgtttgttgtgtatgtctcttgaaaatggcagatttctgtattttaatgctttacctaattggatagtttttaagataatagcacttatattgatttgattttcccttctttaccgatttattttacatttttattttctctgtttcttactgttgcttattatcaacttgtgattcattcccttaccccgcctcccagttaatgtggaaattttgttataatgtcttgtttcattaatatagttaatacaggttgagcatccctaatctgaaaatccaaaacttgaaatgcttcaaaatctgaaacttttgagtactgacatgacccacaaagtggaaaattccactcctggtctcatgtgataagttacagtcaaaacttttgtttcatgcacaaaattattaaaaagattgtataaaattatcttagattatgtgtataaagtttatatgaaacataaatgaatttcatgtttagacttgggtcccatccccaagataggataatattccagaatctgg

SEQ ID NO: 202360 - DNA, 1000 bp, Homo Sapiens
actattgcaaatatgaattcactttacagatgaggaaactgaggcctggagaggttaagtaaatgatctaaggcgaatccaggtcagaatgtgtgctcttgagggctatgagggatgtggaggattagtataggagcactgtctggttgtaaatggcagggcagaaacctgacctttgaaccactctgtgttctacctgcttccgtggcagaccttgtcccaaatatttcaggattgatcaagcaagtaacaatactaggttattgactcacggttctgtgaaggaaagaaaattgaatatttctgagaaaaattgtaccaaaatagagagtgcccttaaactgtatcagcttgtgagacgtgttttaggcaagaagtttccagtttttttcctgggaaatgctgtacagcagtgggccctgggaggaacggcatatacattaaactccttccagagaactatttgttctcttttagggacaagatgtgttcttaaaagttgggcagacttcacatctaattcttctactgtcgttacaatttcctacactaatcctaaattccgtggagtttttattacattggttggtggcattagcctgtcaacagctggatgagatagaagttagaaaatggactttttgaggtcaggaagctaagcaaccagaagaaccaatttgtcaacttaaatcatctggggaatggaaaaaattattccacaatgtgggaaataaaagaccgcctggagctactggtttttgtttttattttctttttgttattcctctttgcacttcccttttccgagcagcattatgtgtgggttatagaaagcttacatgttgactttgttatgtggtcatttgatgtggtcgcgctaacgtttattgtaaatactgtgagtatttttcacccttctggcttaattacctgtggccacatcaacctgaatgtatttgagaggtaaaggggcccaagacttcagtaagagcctttactt

SEQ ID NO: 202361 - DNA, 1000 bp, Homo Sapiens
tatcactgtagacagtagctaatcttattaatgaaaaacaatagacaaacatctgtgcataatttttcagacacaattctgtaaatatttggaaaccttttaagtatttaaacttttaaatttttgaaataaagtattctaaactaatataaataaggacaatgaaaaaacatgaaaggacttagcataatgttattttatcttttctacaactttgtttaaattacctttccaaagatatttgtgtttatgtaattttccacggaataacattaatactctaggtttataaaccggtttcacattatttcatttgatcatcacaagagctttgtgaagtaagccgagaagttgttactggtatttaataatagcaatagaggagttaaagactttcccacagcttgcaggtcaagacaagaaattcaggtctcctaattctcagtggagctctatttctgttaacccaaattgctgctctgttttaggtctcaatttcatctgtaaaatgatactaatagtacttatcccattggatttttgttgagatttaaataaatagccaaaagccaatacataataaacactcaataaagattaaccataaggagagtcatgatctggttccaggaatacattgttagatgactgaaaaattgtattacttcaatgaaaatactataaataataacattttcatatattagttggttctcatgcatacataatctaattttatttgatcctcacaactgtttaagttttattaaatatacattatccctgtttgtataaatagaatcatacaatacctgcctgctttcattcaacaaaattatcatgagatttttccatgttgtgtacatcaatagttcatctattttattgctcagtaatattccattgtgtggatgtatcactatttgtttacacattcaccactgatatataagttgcttccagtgtgaggctgttttaaataaagctgctatgaatattc

SEQ ID NO: 202362 - DNA, 1000 bp, Homo Sapiens
ccagacaaaaacatacgaaagagttgtctctgaaaaaccagacaaaaacatacgaaagagttgtctctgggctctttaatttttgaacaattttgctggaaagaaatttttctcatgttacttaatgacctatttggcagacttgtcttcagatatagcagaactataaaacacaaagtaaaatttaattgtatccttaggaaaatctcattttagactaaataaagatttatcatggaatattggtatgaatattcagacttccaattattttcacaaatataataaaaataatatgacccttatggtttatcattatatataaccttttctaaattttcctccattgtatagatctaagagtacaatgcaggaagataaacacagaattcagtgtaaatagagaaattgatataaagctgtcaattttcgtaaaattttacaaaacaatttacaatgttcttttgttccagaattttttaattatttattcttgttatgttgcaaagtacttcattatcttttgttggtattacttggaattcctaactatagttttctcttttggataaagcattttaaaatctttatttaaagcacgtttaaatctgcacccagttactctttagagaaactggtttagactcactcttaagtgaacagactcaattttatttgaaacaaaacttaaaaggtaaaattttggccgggcgcggtggctcacgcctgtaatcccagcactttgggaggccgaggcaggtggatcatgaggtcaggagatcgagaccatcctggctaacaaggtgaaaccccgtctctactaaaaatacaaaaaaaaaaaaaattagccgggcgcagtggcgggcgcctgtagtcccagctactcgggaggctgaggcaggagaacggcgtgaacccgggaagcggagcttgcagtgagccgagattgcgccactgcagtccgcagtccggcctgggcgacagagcgagactccgtctc

SEQ ID NO: 202363 - DNA, 1000 bp, Homo Sapiens
acccccaccccaggatcgccatctttaggggaggcctgggagggggtgttaggtgttttagggccaccgagctcaaacacaaggacccctccccagcccacccagcccagccccaactgacctccatgcctagggaaaaactccccccaccactgccccctcccccgacccaggccaaagccagggcaggtctccgggtctcacctgctcctagcctcacccccctgcccccgaaaaccagactctcctcccaaactagcctcaggagcttggcgaacccgctcgctcctaaagagaaagacccaggaccctcccccatcacccccaagagaggttcgccatcctctggcctcgagcccttggtccctccgtccgtctgtcctcggggcccgctcccccggtggcccttggggatcaaagcgtgggccgctctccgggagggcgggcgggggagggggtggtcgggttgtgccattggggtgtccggaagcttctcagccagggtgggggtcgtggagtgggggagggaggccaaactagcctccagaggggtcagggcgcgacgagaaccaactctttacctaactttgcatggtgcttagtcaaggactcctgcgacctggctcccgaggtcagctggcggcgctgacacacatgcatggcagactatccctggctctatctccctgtccctcgccccctccaccccccacttcctctttaaaaaaaaaaaaaaaaaaaaaagatacaagaaaaacctttaaaaaaattccatgtttcctaatttgcacgaaattttctaccacaagatgtgccttgccttccgagaataagtattacctttaaacaatatcagcgcacacacatagctgcatgttctgctcgtgtagtttaaaaaaaaaaagacaaaacagtgacatgaaataaaaaataaaaattgaaaagggatgtatttctatttgtaaaaaaaataaaataaaaaataagaaagtgagaatct

SEQ ID NO: 202364 - DNA, 1000 bp, Homo Sapiens
aactggaaacagagactccaaatccaaggtcttcaagaaagtttaggtgaggggataagagtggctacattttcaaagtcagtgaaagtagagcattcgagagcactcctcttggttacggaagatattctgaagctcaatgcctccagtaaaagcaagcttggaagctgggctgagacaggccacccagatgatgaatttgaaagtgaaactcccaactttaagtatgcccagctggatgtctcttattctgggctggtaaatgacaactggaagcgagggaagaatgagaggagcctgcattacatcaagcgctgcatagaagacctgccagcagcctgtatgctcggcccagagggagtcccggtctcatgggtaaccatggacccttcttgtgaagtaggaatggcctacagcatggaaaaataccgaaggacaggcaacatggcacgagtgatggtgcgatacatgaaatatctgcgtcagaagaatattccattttacatctctgtgttggaagaaaatgaagactcccgcagatttgtggggcagtttggtttctttgaggcctcctgtgagtggcaccaatggacttgctacccacagaatctagttccattttagacaatgaagctgcttagtaatctctgccaagccatctcttaatattaaagcagacaccacagaatagatttcttcacttacaaatgcatattgggcacttataatacagcaggaactcttctcacctggagccttgatgttaaaagacacagccatgctcttgaggagcttacaatcctggctggaggcaggggagggtatattctttaaatatgcttaagtgttatagggaaagacggggttaccagtaaacatgtaactagaaagccaggctcagttcttacctctgggaatcagaactctttatgcaacttggttaatagaatctactatctggaagataaatgaaggattttaataaaattttcaatagaat

SEQ ID NO: 202365 - DNA, 1000 bp, Homo Sapiens
attttctacatggacataaatcactctcacgtgctctcagcagaaggcattagataagcatatacaagaattgggtacttttatacaaatatgggataagaaatacttgcctgacacttttccatggctgagtctgaccattacagtaagaacaagaattgaagaggcattttgcacacagaaacattctcactttaaaaaatggtattggttaccttgaaggcatagataatgggcctgtcataaaattatcaattataactggcaccgagggactgccctttttaagctaaactaagccttatctgcttaaggatgttgaactgaatcactccctttactcatcctgtgcatatgtgtacaaatggtcatgtggatcatgtgatgatcatccatcttatttgattgtattaatgcatcatgctaaacatgtagtacaggttaacaataccagatttatgtcctgttcaacaactcagtactctaaatgttgttatgcttttaataagaccttcccagataataatcttggagctcttttcccagctgtctaccatgcatttgcaacaggaggaagatgtaatgaatatgcagtattaagttgatttatgaacagtgctttgatatgccaaagggaaaactgtcccacttaaattagattaagtagggtggctaaaaataaataaaaacactggaaattctttctctcactttctcttgatgcaatgaagggaatatgacactacagtatacagagttgttgttatatgatgcacaaaatattttgatgatttgaataaatgttaacttttaatctgcgccttaataatgactggttatctgtaaatatagaacagatacagattgtatttttctgtgggtttttgtccttttagtgatttttttccaaaaacgagagatggaattaacattgaaaatgggaaatttttctaactgaatcaattgttacatgaaaaataaatttatataacccctttgt

SEQ ID NO: 202366 - DNA, 1000 bp, Homo Sapiens
tttgttgcatttgtttgtttgttttgttttgttttgttttgctttccatgtgggaaaagttaacattggaactgtttctagtaaaagatttttttcaggctgggcgcggtggctcatgcctgtaatcccaacactttgggagaccgagggagctggatcacctgaggtcaggagttcgagaccagcctggccaacatggaaaaactccatctccactaaaaatacaaaagtagcctggtgtggtggcacatgcctgtaatcccagctacttgggaagctgaggcaggagaatcacttgaacctgggaggtggaggttgcagtgagccaagatcacgccattgcactccagcctgggcaacaagagtgaaactccgtctcaaaaaaaaaaaaaaaagatgtttttcatttttttcatgttatctatccaagcactgttccatggtcagcaagtcatatttcataatgtggattttccaaaataattattgaatacagctattctatggctacttttagtgtttttgtggtatgtggtgtgggagtgtttatggaattaccagtatcttaaattttcaaaggaaccttggaagtctatcactctaaatgaaagtctgtcactctacatgaattatgtgctcaaatttgaccaactcagtttaagacacaaaacagtaatttgaagaaggaaaaatgaagagagtttctagtttaatgggttaaatttttgttgttgcaatagtaagtttagtcttcttataatatttctaaatgaaaaatcataggtatttgttaccatgtgtgaagattactttgttaaaagcaaaagtggtcgtgtgatatgctaaatgttaattactgattttatatgtttaaatcacgccaaacaaattatgtctgtgccatccagggtctgttgttaatctttttctgagtacttggattgggataaagggcttgtactatgcactttttattaatgaataaatagaaaacgttagt

SEQ ID NO: 202367 - DNA, 1000 bp, Homo Sapiens
gttatacagtggaagaaaaacaatgcattttggggacagctaggactcatgcagatgaggtattggcttgcaacccgaaccataatatatatcagacaggaggtatagcagttccagatcaagatctagagtggaactatcaaagggggtgtgaggacttggaagaagagatcatatggtcacttgtttgttgaaagagatgaagaaatgtatgaaaaaacctgttaacaatgaaaaggttaagcaactttctcagggcaaagatgacaatccagctttgttttaatagtgtttagttgaggcaatcagaaaatatactaacactgatcttgcctcaatgaaaagatagacccttctgggagtacattttataacccagtctgcccctgatatccatagaaaactactaaaagcagctatgggtccccaaacttctctggaacagctttggatatggcatttttagtttttaataacagggacaaagcggaggtagcggaaagaggaagaaggacctcccacaagttgcagctcttggttgcaaccttaagctaacctcccacatggggttgccctcctgggtcttgggttgaacaagggaagctgaaaggtgggaagcctaaacctgggtgtccgagtcactgtgccttgggcataaatcaggttgcacactgtaagaaaactgaccactggaagagggtttgtccagtgttctgaagagagccatcagcacgtgaactaatgatgggtaaaacagccaggcaagcacccaagagtgacggggactgagaccttccaccacggtttccatcagacaactagccatatatctggaaaagcctcagtattttttgccatggcagttaagaatatgaagtttcaccaggtgcggtggctcacacctgtaatcctagcactttggaaggccgaggtgggtggatgacttgaggtcaggagttcaagactagtctggccaacatggtgaaaccccatctctact

SEQ ID NO: 202368 - DNA, 1000 bp, Homo Sapiens
ttcaatgtccagtgtatcctcattatcctttggtgtggtgcacgagctcggaaccaccgaacgcgggtacaagctataatacagtgagctgggacacacctgcatggccgagcgagcacaggtggggcattgctggcccgaggaccaagaagaaaaatcctacatcaattcctcttggcactgcagtatagttttctcaccaggacgctgaccctgtaaggaacttcagaaatcatgtgactggacccttttactttccagatgggaaaagtgaggcctagagaagagaaattgcttgcctaatgatacacaacaatgcgtggtctacttttagtgcacctttttgcgtaaaagggaaatggttgcatcaaaccagtagttgttggtactccagagaaaagccaaagttatggttgttataacaacaccctttaagtcagagaaccaattccttatggatttaaataggtttggttattaagcaaagccagggatcccagtagtaggtatgctgaatagtgcaattatctctggggatcagctttctttagtgtttgctgaacggttcactttactcttgtgctgggttcctccatgtctctgtcttgtgcttccccatttaggggctgctttgtatgaaatcataaggcaagaggcagtgagaagacagaagagagaggcgccacttagctgttcatgctacttaacctcttgggctccagtttccttctttgtacagtgagggttctccttgcccagtctctgcacaggctgttccagcggagcggaagatgctcaggccataggaggggtttggggtcatcttcctgtctctagtattactttaaaaccagcaggctgggccaggtgtggtggctcactccagtagtcacagcacttcaggaggccgaggagggaagagttcgaattccttgagctcaggagtttgagaccagcctgagcaacatagtgagactacctcccccaccgccatctctac

SEQ ID NO: 202369 - DNA, 1000 bp, Homo Sapiens
cgttttttgtttgttttgttttgttttgtttttgagacagggtctctgtcacccaggctgaaatacaatggcccaatgacagcttactctagcctcgacctcccaggctcaggtgattctaccaccccagcctccagagtggctggagccacagccacgcacctaacacctggttcatttttgtatttttttatagagacggggttttaccgtgttgcccaggctggtctcacactcctgggcttgaccagttcaccctccttggccttccaaagtgctgggattataggcatgaaccaccgtgcccagcttttgaaaaacctgtacaataaaaagtttggactaatgttctttgagcccttaaaaaaatgctattcaattaaaaaaaaaacaaacctatagtgtcttataactccaaatcccatactgtcacccaactggtctgccctggtgaccaccatttcctgacaaacattcaaatcactcctgaggaattgaagaaattcacatttatgacccagtgacactggccttgtctcagttcctatagtgtgtcatactctgttctgcacagaagttttgctcatcctattcctttgtttgcagaggtcccttccccatcccctatctctcaggcagactcctcatctcagtttatttacgacttcctcagggaaagccttccacacttccctgacggatgactttcccctgttgtgtgtgctcatagcaccatttacctacttcgtatacttgtgtggttattttatgtttatttgtgtgattctttgattggtgtctgtgctgtcccaagattaaaaacttcatgagagaagaaaccatgtctttttcttgtttttgtttgccattgtatccccactgagaacatggtgaataaatacgtgttaaatgaatgaatggcctttttttttttttagctggaaggacataaaattcttacatacatatagtttttaagaattatggctgcagatatttt

SEQ ID NO: 202370 - DNA, 1000 bp, Homo Sapiens
cactgaaactatgtactcattaaatgacagttctccattctcctccctctcgcccctggtaaccacaattctcctttctgtctccatgaatttgactattctaggtacttcttataagaggaatcatgcaatatttttccttttgtgtctggattatttcatttagcataatgtcttcagagttcatccaggttgtagcatgtgtcacaacttcattcttatttaaggctgaattgtatgtaccacattttgtttatctattcatctatctataggcacttgggttgcttggcaagttatttttaaaaagaatttaaagtactgtgtgagccaaacaaaacatttatcagctggctggatttagcacatgggctgctatttgatgtcaactgctctatatggaaaataaaattatacgtggatattattatgaactcattgctataggtcatagaaactttggaaatgcggaggataaagtaaccctggaaatcacaataaaatgacagacctctttctatttaaaggcttgactaattagaaagttatggagcattatcagagactttactgaacaccctgaactggtatttaatagtcaacatggctcaagccctagagcaaacttggcagcaatccttctcctttgggagccaacatacagcaccctgcacaaggttttgcccagagcaggcgctaaacaggtgtagaacgaatgaatacattttagacttgagtgtgcagtccctattatccagtacactgctatagaaatgaaatctattggcaaatcagccaacctgagcagagcatgagtataatcaagtgagagctccttgctcatacgcagtgactccccgactcactgtttcaccaagttgacactattatgtgccctgatttgatgatggttaaggttttacctgatcaaccataacaaggaatcacctatattgcctgcatggatataacaagggctttctagctcctgtgcacaacc

SEQ ID NO: 202371 - DNA, 1000 bp, Homo Sapiens
atggtcctcccacctcatcctccagagtagctgggactacagacacatgccactgtgcccagccatatttttaaacagttgtgtatctcatttattttgccttaaacattctctttcaagactatcatgaaacaacattgccctaacattctcatatgaaattttccatgttgctgatatcagtttgatgtttcattatttgaccacctccttagtgtcaaatattaaggttcttcccctcacctcagtgttaggaatacacctatgtgaattttccacgtttattatagttttggaataatttaggaggtcatatttttatgacttttgatacatgtgcaaggagctgctaccagtattagaatttcctttaacacattgagggatataaaatatacatacatatataatatacgtatacaaaatattcatacatatataatatatatacaaaatatacatacatataatatacgtatacaaaatatacatacatatatacatatacaaaatatacatacatataatatacgtatacaaaatatacatacataatatacgtatacaaaatatacatacataatatacgtatacaaaatatacatacataatatacgtatacaaaatatacatacataatatacgtatacaaaatatacatacataatatacgtatacaaaatatacatacataatatacgtatacaaaatatacatacataatatacgtatacaaaatatacatacataatatacgtatacaaaatatacatacataatatacgtatataaaatatacatacataatatatgtatataaaatatacatataaaatcttattgcttgctaattaataaaatgtttttctgtttgttaaacagttgtaactgtgaattaattatctgttgatgtcctttgtatatttacttatcagggccttatttttctccttcatgtgtatgccctcttgcataataaagatatgaatctccatctgtc

SEQ ID NO: 202372 - DNA, 1000 bp, Homo Sapiens
atcccataaatttaaatgataataaggaaatatgaatacatttatgcaaataaatgtgacaatttacataaaatgacacattccttgaaagacaaattatcaaaagtttctggaagaaatggaaaacctgaatagatctgtataaaggaaagaaattgaattagtcatgtataagttctcccatgaaaagtccaggcccacctgattcccactggtgaattctatccaacgttttaaggaagaaataataccaattcttcacaacctcttttagaaaatagtgagtaaagaacattgaccagcttgttttatgagctctgcattaccctgataacaaaggtagacaaggacattacgagaaaactacaggatttttccttcatgagaatagacgcaaaaaatactgttaacaaaatattagcaagttgaatccagcaatatatatgtacataaaaataaaggttaatacaccttaaccagtgacatttattccagttattcaaaattggcttaatatctgaacatcaatataatacaccatgttagtagaataaaagatgaaaacgttgatatcatctcagatgcagagaaagcattttggcaataataactctcagaatactggaaatgtaagtgaaattcctcaacttgacacagcacatctatgaaaaagcaatattcttaatggtgagatcattgagaaggaatgctttctacctaagatcaggaacaaggcaaagatctctgctgtcagtgcttatgttcaacattgtactggatggaggtcagtgaaataaagggcatacataagggaaaggaagaaataaatctttttttattcccagatgatactaagctattttagtgagtgaattctaattagtgaatttaatgaggttataggatacaaggtccatgcatgaaaatcagtggtatttctatatgtaaccaacctacaatcaaactgaaatttctaaaacagttccatttatgtgagcat

SEQ ID NO: 202373 - DNA, 1000 bp, Homo Sapiens
tagcatatttcttgtttcatatttgactacccaattaggcactaaactttttgggaaccattcttttgggtgtttatttaaaaaccctgggcagctctatagcatttcctaaacacagggcaaagtaaaaatatttccaaatcatagattttatagataatcatcttcagaacacaaatgttggtatttggccgtaggaaagttgttgttgttaacgttttaattttgtgtattacaccataaggttttctccagtttttccccctttaaaccattataatatgtacatgttgaaataaatttattaagaagtagcaagttgaactctctgtaaactcaatcattattacacagtagtaagctagacatcagaagaatagttggcttttctgtataatcttgaacagcttttgggggaaatgagttttcttttcaagttaattggtactttgaaaatgccacaaagaggttcagtagatgatagtttatactcatggaatttttgctgctgggagtttttgtaaaaccatcaacatttttttgtactagatctttggggaactttcagttgctaataaattttgtaatttgcattgacattactttaaaaaaattctctaacaaagtctttttttcccagaagtctcagaatcgtaataaattctgaattctattttgtttgatttttcttggatgcctggaccatggattaattacagtaagagtaacttcaaggtcgggcatggtggctcacacctgtaatctcaacacttggggagggagagatgggaggattgcttgagctcaggaattagagaacagcctgggcaacatggccaaacctcatctctataaaaaatggaaaaattagctgagcgtgttgttgtgtgccggtagttccagcttctcaagatcgcctgagcctgagaggtggtggtggcagtgagccaagatcacaccactgcactctaccctgggtgacagaacaagaccctgtctc

SEQ ID NO: 202374 - DNA, 1000 bp, Homo Sapiens
tttttttctagggatgaggtctggctgtgttgcctgggtttgtctcaaactcctggcctcaagctatccttctacctcggcctttccaagtgctgagatttcatgcatgagtcaccacacctgacctaaaactaagggtgcttttggaaaaaggaaaaaaaaaaaacaaaggaaattttggtggtaagcaatttaagaggaagccagtagctccattagagcaacaagcttaactctgtcgtatgtggacaactaagaagggtcctcctggggtcagaacaaactttaaacactgtcctcaaaagctactcctgcaaatgggcctgaatttattggactagaccatggagtaatttatgctccagagcattattgaaaacaaaatagcgaccagccagcaattagtgggtcctaacagctgggtgtaataccagcaagaggcagacagcctaacagatcagggaaagaaagtgcaaagagagccctgctagaaccattgttcgaatgcccaaggttctgctctctgaggagcaacattggaggcttcacactgcagataaaatactttactaaaatagtcaagccaagttattaaataaagaaaaaataactataaaaacaggctaggtgcagtggctcatgacggtaatcccagcactttgggaggccatgggaggcagatcacgagaggccagcagtttgagagcagcctggccaacatggcgaaaccctgtctctactaaaaatacaaaaattacccaggcatggtggtgtgcacctgtaattcctgctactgagaaggctgaggcgcaagaatcgcttgaacccaggaggcggaggttgcagtgagctgagtttgtgccactgtacttcagtgtgggtgacagagtgagactctgtctcaaaaaaacaaaacaaaacaaaaaacactgaaacaaaacaccagggttggggatggaagtagggggttggaatcagattataactcgaattcactggg

SEQ ID NO: 202375 - DNA, 1000 bp, Homo Sapiens
taaatccttatcttccgctatgaagtatcaataagcaatgcccaaaaaaatgaactattaagaagtaactgtaaagttatatcatttagagatagagtggagtatagcaaatgaatcagctaaaatatttgaaaatgggtaccctctggggagtggaagatacatgtatgtattgtgggtgggggatgcactgcaggagatctctttttttaatccttgtggtactacttagttctctaaactatttgcatctataactttgctaaaaataacatttaaatttaaaaattgatcactcttgtaataagttcaaattgaaacaaggagataacatagttgctaagttttatttttggacatatttataacattgtatatgtgttagtgagaataccatgtaacatcactctcaagcagtacttctaaaagtagaaattgctgtaatatttctcaaaaactatctggcaatacacattaagaggtataaaaatgtttattccttctgacttagtacttctgcttcagaaatctcttacagtgatctaccttctagaaagactggagataaatacatcaaaatgttcacagtagttgtctctgagtggtagaattatgggtaaaaaaaagatggcttgtttccatttttcttttgcacccctctgcattttttccaaataatctataatgaagacaggctccttttatatttggaaataatttccaaatataaacattttaattttataacattttaaatttttcaaaacactggtcctcataacaagaaaagttatttgttgcaaccacagtagaccaggttaatggtgccaagagtggaatgcggataaaggctgacaaggccatctggaactgtgagtcattcagagcatcacagaagagagattttctgcaagtactagctgtgttgactgtgactgctgttttcctggttgctcaggaatcacccagggaaggagagggcttccccacgggattaggg

SEQ ID NO: 202376 - DNA, 1000 bp, Homo Sapiens
atccatccattcccccaaacatgggcatgttgctatcagcagggagctgtgatggacccctcacagggtcctcttattcctcgtgcaagcctttccctgggaagttcctcccagcattgctggtcagggggaacacacactcacatcttcactaaatgctaccagtgctatggtgttatcagaaactttatttatttattttttgccaatatgatagctatcaagctaccccatctctactaaaaatacaaaattaggcctttagtagaaaccctgtctctagtaaaaatacaaaaattagctgggcatggtggcacacacctgtaataccagctacttggtggctgaggcaggagaattgcttgaacccaggaggcagaagctgcagtgagccaagatcgcaccactgcactctagcctgggcaacagagaacctgtcttaaaaacaaaaacaaaaaaaatggcacaggtctgattattaggaagctgaggttcttttttatacttagtattcactgaagtgtgaattacctttcatgtcctctaaacataccaacaaggaggctggagttaggacttatgttagagccagcctgcctggggcacagcctggccctgccatttattgactgtgtgactttgagaaagcttcctcatgtaactctatcttagcttccctgcctgtaataagtaaaaacagcaactacctcatagatttgtaaagattacataaaataatacatgcaatgcatggcaaacgacagtcaacgaatgttattattatattaactattgccatattataaatataaataaatataaatgatataaacaaactaataatagtaattattcatttattcttgacttgaatgagatccttgtgtactttagacatttatcctttgtgaatttgggatggtacaaatatcttaggcaagtctatcatctgtctaccaactaactatctcaaatatcttttcattaaatataaattctt

SEQ ID NO: 202377 - DNA, 1000 bp, Homo Sapiens
ctcctttgcaaaactttttgaaccaccattgcactgcatgttcgttagcagttcctgggccaaatgcgttgatgttgcaagttgtctccactgctttatgacccattttgaactcgaataagaaaattactcacatttgttttttgtctaacatcatttccatagtctaaaataaacataaacagcaagtaataagttattagccagaaaacataaagcgagaaatgctcattaaaatgatgtataacataaccacacttatttaagaacatattccaatatcaaacggcaaatttcaacagtgcaaaaaccacaattacgtttgcaccaaccttaatatttatttttatatctgtgaattaagaatgcataagtaaaaataatagcaacaaaacattaaaatattagtgatcatgtatttcatgtaactagtccatcaatataggacagttaaaagtggttttgcactagctttaagatctttggcaaatgctttgcctaaattttcccaaagttttaaaatgaaatactttttactgagatgtgattggtatagctgcatttctaaaataacaggaaaaatatagctttcagaactgtggtttgttttattcagcccttaataaactgagaatttacctaaatagattatggtgattttgttgaaccaatatttaataagcatctgtatccccagccctggcaatacaaagatgaataagcagagtttgctcataaatcagtcagaagttgctgtatgttttctagcatataattcattgtcttctcctcagtttttacctattagcattaaatctctgatttccaggaacaaagtttctgagttgccttcaaatgtattttaattttgaaactagaacaataatacatctagtcaagaagttataagatgatggttgaatataacaaaatattttggtgctagaactcagccttacactgttttgtatatatacaaataaattatgtccacaacctg

SEQ ID NO: 202378 - DNA, 1000 bp, Homo Sapiens
gctgcatgatacaagaatggccagcaggtgtcattgtcatctgtattgtggataacaaaatctccatccaaaagcacccgccttgccttccctttcttttttttttgagacaggttctcactctgtcgcccaggctggagtgcagtggcagatctcagctcactgcaacctcaaattgctgggctcaagtgatcccacctcagcctcttcagtagctgggactgcaggtgtgcgccaccatgcccagctaatttcccttttctagcctacttctcagtcatttttgagctaatggggactctaggtgaagtgaggatcaaatatgctataagacgtgtcctagattcacagagtataagactcaagcagagcagggggaagagagaacaaaagagctcagaaaaatccatggaagggccaggcgcagtggctcacgcctgtcatcccagcactttgggaggccggggtgggagaatcactttaggccaggagttcaagaccagcctgggcaacatggtgagaccttgtttctatttatttatttatttattttgagacagagttgctcgggcttaagtgcaatgtcatgattttggctcactgcaacctccacctcctgggttcaagcaattctcctgcctcagcctccgaactaactgggattacaggtgcacaccaccacgcccggctgattttgtatttttagtagagacagtgtttcaccttgttggtcaggctggtcttgaactcctgacctcaagtgatctgcccacctcagccccccaaagtgctgggattacaagcgtgagccaccatgccgggcctctctatttaaaaaacacaaaaattagccgggcacactggtgcatgcctgtggtctcagctactcaggaggcagaggtgggagaatcatctgagcctggggaggtcaaggctgtagtgagctgtggtcgtgccactgcattacaacctgagcagtagagtgagaccctgtctcagg

SEQ ID NO: 202379 - DNA, 1000 bp, Homo Sapiens
tgtatgtgtgagtgagtttctggacactgtactgataaatttgtatatccttatgccaatatcacattgtcttgtttactgtcacttaatcaggaagtgaattttattctttttcaagctagttttatctatccgagcttctttcatttttatataaatttacagagagttgtcaatttctttaaaaaataacctgtcctgatgtttctttgaatggcattgaatctctacattaattttgtgagaatgaacctattaatatggagtccttcaatctacatacatggcattatctctcatttatttcatagcccagaataatgcacaagaaagaacacatgagcggagactagttgatcaattacctctagcaaacatagggtctcctctctcttttaaagtctatttaaacaccaattctaagaaaatatgcgtttggtgttaagagagggtatctcatgtgaaagtgagtgagctatacttccttatattaagaggagcggttaaaacttcagaactgtatcgggtttcaaaaaaaattgttttccaaaaaaatgtgcagccctttgactagtaatatattttctgtactagtgaaagtgtgatctctcgtagtttaattcaattacctaataagctgatatgtgatcactagtattctcataaaacatcacataaaaagcaagcagtcgtggtcaggcttggtggctcacacctataatcccagcactttgggaggctgaggtggcaggattgcttgaggcctagggagttcaagaccatcctgggcaacatagtgagaccccatcttgaccaaaaacaaacaaacaaacaaacaaacaaacaaaaattagccaggcatggtaatgtgtgcctgtagccccagctactcagttgggtgaagcaggtggatcacttgagcccaggagtttgaggcttgcagtgagccatgattgtgccactgcaccccagcctgagtaacagagtgagaccccaactc

SEQ ID NO: 202380 - DNA, 1000 bp, Homo Sapiens
gctgtcagtggcatggcggtgccttaggttcccagagcctctcgccctgggctccgtcttgtgggtgtcctgatggttgtgggctgggttctgggcgggttgctggtatggatacaggaactactgagtgaataggtgtctcagagccctaagggtctccagaaagccggggtgtctgtgtttttaaaagaaaacctatttatgttgctgtgggtctccgccgtccctgtgttatagtacataagaacccttattctcctgtggttcagagagcaccccgacatgtgcctgcagctgcatccccgtaccacagtgtgggtgcaagacgctgggtttgtcctttgtctggtgaagcctggctagaaggggtgggggcggtagcccctgccctctgcagtgtccgcatccactggtccctgagcagcatagctggccacaccctcatgacatgacaagactgtcactcagtcactattgggtctatgaagggcgtcaagtcagaggaaggtttttatttttaatcaaataccacatttagctctatgtcataaatattcagaaaactatttttttaaacaaggcagaccaaaaatgtctgctagctagttggtttctatacaaatacatattcgaatgtcttgctggatgaagaggccgctcagccggagcctcctgtttcatgcgcttctcttctgaggggcagtagaggagaaagggctgttgggaggggttcagcccgctccttggccaggggatcccagccaccttctctgcaccaggccctgccttgagggacctggacccccaggtggcttctggccaggtgtgggtgggtgggaggggccctgtctgtgctccgagtctccgtgcgtgcaatgatttctctacctcatctgtgtggcccgtcccagagggactgtggagaatgtatttatttaacagctttgtgtcacagaaccagaaacaaatggaaacattaaataaatgtattttaaattat

SEQ ID NO: 202381 - DNA, 1000 bp, Homo Sapiens
ttctgccagtgcaaatactaccactggcactactgatactgttcctatcacaaccacatctttcccaagtactactagtgttacaactaatactactgttcctgatacaacttctcctttccctacaagtactactgctagcactaatgctactgttcctatcacaaccacatgttttgcaacaagtactattggtgttacaactaatgctactgttcccgatacaactgcccctttcccaacaaatactactactgctagcactaatgctactattcctatcacaaccacactttttgcaacaagtactattggtgttacaactggtactactgttcctgatacaactgctcctttccctacaagtactactagtactagcactagtgctactgttcctattacaaccacaccttcccctacaaatactgctgatgctaacactagtaatactgttcctaataccactatgccttctcctacaagtagtactactgtgagtactattgctaccgttcccatttcagtgactccttctctgacaagtactgctgatgccaccattagtactactgtacttattgccactacttcttctctaacaggtactactgatgttagcactagtactactattaataatataagtactcctgttcaaacaaatactactaatgctagcactagtactaatgttgctaatataactgctacctctcatacaagtactgatgatactgttcctaataatactgttccagttacagctattccttctcttgcaaatactggtgttgacactactagcaacagtttttccattatgaccacttctttctctgaaagtactaatgctatgaacactactgttattatggcaactacttctcctacaagtactgatgttgctagcacaaataatgatgcttctatgacaaattttcttttagctacaatgtctgctggtaatataactagtaatagtatttccataacaact

SEQ ID NO: 202382 - DNA, 1000 bp, Homo Sapiens
tgccccagcccccaacaccagcctcagtggctgcggaacaccctctccgtccaaacccaaacagaaacccacctggcggtgtgaagtttgtgattatgaaaccaatgtcgccaggaacctccgaattcatatgaccagcgaaaagcacatgcataatatgatgcttttgcagcagaacatgaagcagatccagcataatctgcacttgggcctcgccccggcggaagcagagctttatcagtactacctagcccagaacataggcctgaccggaatgaagctggaaaaccctgccgaccctcagctgatgatcaatccattccagctggatccagcgacagcagcggctttggcaccagggctcggagagctgtcaccttatatcagtgacccagcgctgaagctattccagtgtgctgtttgcaacaaattcacctctgacagcctggaggccctaagtgtgcatgtgagcagtgagcgctctctccctgaagaggaatggagggcagtaattggagatatctaccagtgcaagctctgcaactacaacactcagctcaaagccaacttccagctacactgcgagactgataaacatatgcagaaatatcaactggtggctcacattaaagaagggggcaaaagcaatgagtggaggttgaagtgtattgccattggcaaccctgttcacctaaaatgtaacgcctgtgactattacaccaacagtgtggataaattacgcttgcataccaccaatcacaggcacgaggcggccctgaagctctacaaggtaagcagtgacatccatttccgttggcacagagtagaaaagggaattaactctttcagagcttggagcacaagtctccaacttaaggaaaaaaaaagagaaaaaacatcaaagggcagggggcacagtttctgattaacattataaaaacatattgaaatatatggaattgaaggctttatttataaagttttaccctatgtctcactt

SEQ ID NO: 202383 - DNA, 1000 bp, Homo Sapiens
ggaggactgaaacttgggcaaccttcctcttcaggggtgctggagggctcctgggcacatccaggccggggaagaagcccccgggagccgtgtggtgttcacacgcatcacaggttcaggagaatgcaggagggggcctgagaagagctgcggatttggtcactcccgggaagcgttaggtagagtggagagcagagccagaccgcggggctccaggaagtggagatcctgtggttaaatagacgttgccgcacgtggagctcaatagacaattcttgttttgactttccaggagaggagtggatgattcggaaggtgaaggtggaggacgaagatcaggaggcagaagaggaggtcgaatggccccagcatctatcgttacttcccagcccctttcccgcgcctgacctggggcatctggctgccgcgtacaaactggagccaggggccccgggggcactgagtgggctcgcgctgtctgggtggggtccgatgccggagaagccctacggctgcggggagtgtgagcggcgcttccgggaccagctgacgttgcgactgcaccagcggctgcaccggggcgagggcccctgcgcctgccccagcctggtccgctccccccgaggtggcgccgcccccgctcttcttctgagcctagttctcacgaggaccctttcttgcccacagtttcgagaggcccgtgccatgagaccgcctggggtgagcaaggcgacctgggctgctgcccgaaggtttggccgccgcgggacacctgtttccttcccgcagtgtctgcgtccgcacagcatacccagctcggacctcctaggacagagactcagcgaacccttgctgggaaccgctgagctgaagttcttggaaggctcccacccaggtgccccgttggaaagcagatatttcccggacccagcgcggcctcaaccagggcaggaaagagtggttatttatgtacttaaagtttcattaaagttaaaatcgg

SEQ ID NO: 202384 - DNA, 1000 bp, Homo Sapiens
tgatgaacagcaacagacagtggagggcagtgatggacagtggaggacagtggaggatagcagagggcagtgatggacagtaatggacagcaaaggacagtgagggacagcagaggacagtgatggacagcggaggacagtgatgggcagcggaggacagtgatggacagtggaggacagtgatggagagcagaggacagtgatggacaatggaggacagtggaggacagtgatggacagtggaggacagtgatggacagcggaggacagtgatggcgagcggaggacagtgatggagagcggaggacagtgatggacagcggaggacagtgatggcgagcggaggacagtgatggacagcggaggacagtgatggacagcggaggacagtgatggagaacggaggacagtgatggacagcggaggacagtgatggacagaggaggacagtgatggagagcggaggacagtgatggacagcggaggacagtgatggacagtggaggacagtgatggagaacggaggacagcgatggacagcggaggacagcgatggacagcggatgacagtggaggacagcggatgacagtggaggacagtggaggacagcgatggacagtggaggacagtgatggacagcggaggacagtgatggacagtaatggacagtgatggacagcggaggacagtgatggacagcggaggacagcggaggacagcgatggacagtggaggacagtgatggacagaggaggacagtgaaagacagagaaggacagcaatggaaggacagccaccccagtcagcacaaacgcaggccgagtggggcccatgcattcctgggaggactggcaagctgggaaaggcctccagggcagggaaactcaggagagtgacagcttgttcaggccaggaccttgtgcatcttctccttttttctttcttagtaaacccagtgtattcatttttagcggctgccataacaaattcccataaact

SEQ ID NO: 202385 - DNA, 1000 bp, Homo Sapiens
ctgggcagcatgttttttgttttgttttttttcttccaactacattttagtggtttagggggaatgctagtttctccagaatctttttcactttaaggaaagttagggcaccctgacaagggggtgctgggaggctggtcctctcttgggttccattctgccagttttcttttcttttctcttttcttttttcttttcttttcttttcttttcttttcttttcttttcttttcttttcttttctttcctttcctttccttttctttccctccctccctccctccctcccttccttcctttcttcctttgttctttcgttctttcttcttttctttttgcgttttgctcctgtcgcccaggctggagtgcaatggctctcactgcaactccacctcctgggttcaagcaattctcctccctcagcctcctgagtagctgggattacagatgcctgccaccatgcctggctaatttttgtatttttagtagagatgtggttttgccatgttggccagaccggtctcgaactcctgacctcaggtgatcgacccacctcggccacccaaagtgctgggattacaggcatgagccaccgcacccagccccattctgccagttctgctgagctgtgtggactcctgccctggagcagagggctggcatatggctggagaaggctggccattgacccgtgctgctgaccgcctgccctccccagcatttgggccccggtgcggtgccctatccctgctcacagcggggaccagagtcacctggggccttccgccctggcgggaggaggaggaccccccactatgtgtcccctcacctttgccttttcctcctcatccccttccctggggtcttgagggggccccttaaggggattgacaatatcaaaagcttgctgataggagatcggctgtgaggttcctgttcctgtcgtaacacagcagttctgggattgttttaggagagaaactttgagaggttaaatgag

SEQ ID NO: 202386 - DNA, 1000 bp, Homo Sapiens
gaaattgaaaccgcacaacacaaaactggtccttcaccacagataaataatatgcctttatatcagatgcataggtataagtatttcgtaatgaacagaaatgagcatcctgtctgagtagacaaattagttaaatcaccttctctggatgagcacagctcttgggtgagggtatggggacacagtttagtaaacagctagccttgaggatttcaaccccaacttaccctatcagccatggcttctgtgcagtgcacaaaccacacagccacatgcagcctcacatggtagctgtgcccatggcctcctggactcagagacctgtgcttcagttcacacgtgggatttcttttatcaggaggctctttagcagggccaacttcaacagaagtctgatctccaatttgggatagaactcaagatacttgtctccaatatcacgaagcccaaacaaattcagatatgtttataaccactgtttcagtaattcccaaacaatgagacattccatgatagagatgatgcttctgaaatagtctgtgatgtttggaagctggtctgcacagaactcctagtggacttgcgaggcaggtgtcacctaattccacctgccttctctggtcagtagataaaatagcgaccaccaatgaattatgtccccagtgtctacatgcccttgtaatgtggcactatagctccggtcagcaagaggatggacctatttcccacccccttgaatcccatctggctttgtgacttgttttgaccaataaaatatgtaggccttaagatgttcatggctttcactgttcccttattggaatactaagacgccatgttgtgaaataacctagtatagcctactagaacatgaggggtgatatgaagaactaagacatctagctgatagctaacattaactgccagatgcatgagtgagcctatctagatctaccagcttgagctgagcagtcaaatgaatgtagccctatcagtgatc

SEQ ID NO: 202387 - DNA, 1000 bp, Homo Sapiens
ttctcaggccagtgtcaaactcctggccttaagtgattctcccacctcagcctgccaaagtgctcagattacaggtgtgtgcccagccacggcgcaaacttctgaggacctactgccaaccaggtaaggaaacaggcaatgtgagagagtatcacacatttattttgcaataaatcaactttgttttgggggtctcaatctctgtctatctatagttggtggcagaaagtcaaaagatggagaaaaggattgggaacagtagaaaaagcagccttccctctcatggttggacatggctccacacaccctggctgctctcccttcatggggtgctacgcacgacacctggtgggatctgggtgcatctgaggcggctactccccccatgacacgaaacctctgagaatggtatttgcaaggctgacaccaagtagttctcctagagatagtctgggtggataagaatctgggctgagttctcctattccatcaagaaaaataatgggactgcagtagttacaggtgtaaacatgaactgaaggagggcatgaaagaataattaaaaagtctcattaacaaaataaactaataagatatctaacttcactgacagacaaagcagcattcaatcaatgagatagatttttcatctaccaaattggtttttgaaaaccagcggatcacgaggtcaagagattgagacaatcctggccaacatggtgaaaccccttctgtactaaaaatacaaaaattagccgggcgtggtggcacaagcctgtagtcccagctgctcgggaggctgaggcaagagaatcgcttgaactcgggaggcggaggttgcagtgagccgagatcgagccactgcactccagcctgggcaacaagagtgaaactccatctcaaaaaaacaaaaagcaaaaaacccccagacttttagaagtgtcaagggtaccctgaaacggaaactcttgctcactgctggagaaggtattcagtgatc

SEQ ID NO: 202388 - DNA, 1000 bp, Homo Sapiens
aaaaaaataacactaaaaaagggaatagaaaaatatgtgaatgttggaaacaaaagtctacctggggtgatgctgtctgcatcactcgtcttcagagcccctactaccccagggcgccaggcaactgtgcaaggctacctcagagatgctgagccagggagagggggaaaaatagagcccagggaaaaaattaaaaaaaaaaaaaaaaaaggtgtgtgtggagggtttgcaacagagagggttctgcaaagacgtctgaagataaatctataaagatattttctttcaaaggcgttagaagcgtctggtacataaaatctatggctaagaaacagcaaaagcctacttgaattgtttttccttacccagcaagaggtacgtaatcagcagtctcctggtcagaatgcccactttattcggacgattaccaggaaatcgattccatgcatttccatgcttctaaacaaaaggaaatgggcacacctatcttgtttcaatggcctttttgatgacttccagagttttctctcagtaattctgttaagtggcactgcccagatttgcttcctcgttcaatagggaggattaagatattcaccagtgcaaaatgctctccatttctcatccattataatgcttgctaaccaaattgaccagaaacatttctttttctttttcttttttttttttttgaggcggagtcttgctctgttgcccaggatggtgcagtggcgtgatctcagctcactgcaagctccgcctcccgggttcacgccattctcctgcctcagcctcccgagtagctgggattacagccgcccgctaccacgcccggctaattttcttctttgtattttttagtacagacggggtttcaccatcttagccagcatggtctcgatctcctgacctcgtgatccgcccacctcggcctcccaaagtgctgggcttacaggcgtgagccaccgcgcctggccgaccagagccatttcttaaaaag

SEQ ID NO: 202389 - DNA, 1000 bp, Homo Sapiens
gtaatgggagatttctaaatctatttgtctcagtgaaataagagggagccatagataaaatttaagcaataaaattaacaaatgctatataaaaatatatatatacataagtactatatctgacacaaatttataaatgtgatattcatcacaaataatacattctctttattcaaacacacatatttaagtcataaagcaagaatcatcaaagccaaagattaatttcttatacccagtattctttgaatacaatgaaatgaagttagaaaacttaactaggtcaacccatattgaaaattaagaaaacctcttaagtaactaatggatcaaagaagaaatcataaaggaaattagatggtattattaatgtagaaaaatacaaaataaaaaaaaattctatatactaaaaattgatccttttacatgtgtggctataatggctcttcaaggaaaattggtgagctttatttttttttcatcagaaaggaacagaggctgaaaattagtgaactaagcatccaacataagatgtcagaaaaaagacaacagaaagaacctaaagaaaatggataaataaaataataaaaataattccagacatcaacaaagaaaaaaataaaataaatataataaatataatagtttgctctttaaaaagcaaagaaaatagatacacatctcacaagactgatcaagaaaaaaatactaaagacacaaataatattaggaataaaaaagtacacttaacaaatataaatctgaaattaaaatgttgttaaaggatgatatgactacaaatactaggaaagcaaatttagaaatagatatagacacatatatagatatatgtatatatccatagatatatatctcacaaccctctaggatttattccagatatacctgtctggagtaacatgaaatagtcatgttatgtaaacataaataatcaataatgtaatttaccatattgacagattaaaacaattacatgatc

SEQ ID NO: 202390 - DNA, 1000 bp, Homo Sapiens
taagctgaggttccttataaaaatattccagcaaagccagctaaaaaaaaagcctatatgatcaatcactattcttgctgtactttgtgcaaataatcaggctaagtttatgaaactaattttatttttacaaacaacttggtcttactgtgattatagttgtcagaaatagggggactggagagagaaaattatgtttcagaagaaaactatagtgcacctgttattagattctattcctgtccattatttttgagtttttatctggactgaattctgaattcttagtttgttctaataatctcaccataagtccccaaagtaacattttcaatttttctctcatccttctgatttgaaatcactagaaattaaaaactgccttttgttccctgaggcccacaagccaaagctggtcaatttggctttaaagaaaaatcaccacgacagcttctatttggacaaactttgtgacagggaaactataaaccagaaaaatctgtcaaattgccaccacctgatgttgctccaactatagatgcttgaatcccaaatctagtaatcttctccactgactgccctccagattctaagtaaactagcttatagactgctctagacattaacttttgtttttcttctgtttccataaaaatgtgtcttatttaaaaaacctctttgcctacactatatagagataaaacttttatgggatcctggaaaacaccacctcctgaattgagacacaactgtttaattagattgacctattcccagcaatgggagattggtttaagggaccctttgccatttagctacaaactcgatttttctctctacagccaccaactcagctttaaatgtatgaaatttctagggaagtttcagtcaggggaatgttggtgttcagaaaatgatacccaaaatatggcactttcacatgccaaactaaagaagcagcctcaaggtctctctctgacctttccctgtctccctgatc

SEQ ID NO: 202391 - DNA, 1000 bp, Homo Sapiens
gcgtgactaaaactagagcccaggtgtcctggctcccacactaccttgcagcccgcccacagggaggaaacgcaccacacaactccactggcagcaaagagaagctgataaaccggttatcactgatttatctccgataacctgggagatttaagccacttctgccaaatcagggtatgatttcttaaaactctgtgagcaaatgcctgctcctggggtgctggagtttggctggtggtaaggccttcacccactaaaccgtgagaacatgattcccaagagcagagtacaaaacagcatcaaaaccaggcgcggtggcaggtacctgtagtgccagctacttgggaggctgaagcgggaggatcacttaaacccaggagtttgaggttatcgtgagctatgactgtaccactgcactccagcctgggcaacatagtaagactgtatctcaaaaaaaaagaaacagaatcaagtgccaattgtgcgcagcccaggtttgcgccctgggattcagagcaggactcacaagtcgtgtgacgaggtggtattgcatgctgtgtgccaggttttagttccttcactccctgacatgcctgctgtgtgccctgtgccatgtgccaggccccatgctggtctgagtagggtgaaccagccaggcacagggtgacgggctgggagcaggactctcgtctccctccactctggggccctaggaaactgcatgtgtgccatggatgaatgtgagaaggttggataaactgatgtttctaaaacctgggtgcctgtcagaccctactgggagcccccagaccatctgacagccgcctgccctgctatcctggggttgctgaggcccagcctctgggatccttgtggagagagttgagaagctttgtttagtttgctgtcagctctgcctcagcctacccagggcgctggcatcccagagctgttgtggctcaccccccggtgggtaccacaatacctgcctcatccctct

SEQ ID NO: 202392 - DNA, 1000 bp, Homo Sapiens
tcatcttagtatctctatatgtaattgactatgatcatatgtagttgcatgcaaagctttgggttgatgtttgttgttgttgttgttgttgtttttcaggagaaaacccatagcctttatggggtcttaagtggcccaaaacccacgacactgccatctttcaggcccatttcacttaacaacagaacacatgcagctctagagcttggtaccctttccacttgatagctgcacattcattagtcaataggtcaacagtaactttccaacagtggacacttttatacatttttttaaaggacaggaataataatgaaagaaataaaataaagctccacagaaaaccaaaggtcttttcctatcccattctatccaacaacaacaaaaaaaataaaataaaaaaatagtaacctggagaaaaactctattatttaaaagtcctatgtcagtattttataagaagcaaatgtatatttggaaagagtgaacttgttccagaactaaaacaaggctctaccaggaagctctgtcaaaataacgcaaactattttctccagtggcaaaacttttagcccaaagagctagaactagctaccaagagttaaaagacttgctctccaatcctggtccctctgttaactcactgtatagccacagacaaatgactgtttccctcaacaatactgctatagtttggatatttgaccaaacctcatgatgacatttaatcctcaatggtggaggtggagcctaatgggaggtgtttgggttatgggagaggattcctcaccaatggtttggtgttatctttcctggtggtaatgagtgagagctcgctcactctgtgagttcctgcaagagattctccaagagctggttgtttaaaaagagcctggcaccttccccatttcttgtttcctttcacaaagtgatctgcaggccgggcgcggtggctcatgcctataatctcaggactttagcaggccaaggcgggcggatc

SEQ ID NO: 202393 - DNA, 1000 bp, Homo Sapiens
tgtttgtgccactgcactccagtctgtgcaacagagtgagaccccatttctaataaataaatgaatgaactttcttcctactcagatgatttttaaaatgaaccactgatttataaacactcccttactaaaatggacagcatcaacaatggaaattctaacaaaaagatggctttattcatttgagaattaaggacatgctggaacatgcttttaattggaagaatcttggagaatcctgaggcgatttgacataagtttattcttatctggcaaagctgcatgagctctgatttagtttgtcaaactatataattttgtgagttatcattgtcagcatttgtggccatcaaaagtcaagtaatttgttgaactcaaatgtatctgttgctatataaattttaaggtcttttacaaaacaaagacattattattaaaatttaccttttagcaaaattaaaatttattcttattttgacaatttgttttttttttatttttatttttattttattattattatactttaagttttagggtacatgtgcacaacgtgcaggtttgttacatatgtatacatgtgccgtttggtgtgctgcacccattaagtgtgttttcatgagtgaaagagacataattttttaaatgttatatttatgtgaaataaacagtataattattagcattttctgaaagaagggtataatttaaatcaaattatcagagtggtttgcaaatccaaagaggttagggaccttggcattaaattaccttgctttagagctaccatttgacccagcaatctcattactgggtatatacccaaaggaaaataaatcattctatgatgaagacacatgcacatgatgttcattgcagcactctttacaatagcaaagacgtggaaacaacctatgtgcccatcagcggtagactgataaagaaaatgtggtacatataaaccacggaatactatgtagcaataaaaaagaatgtgatc

SEQ ID NO: 202394 - DNA, 1000 bp, Homo Sapiens
gtcaggaaacttaagcacaaaatctctttctattcttaagcctgatccttgggcagattataaagatgtagtaattcttgttgaatgaggaagaatgtggatgaaattcaagccaggacttactaaaaggataaaggtatgctggcttggcatcatttggtataaggttaatgaaaggcgtatttcaaaggtctctgtcaacatcatgagataagttattcatctattcaacaaatattcattgcatctatatcagaatcagagtctagcaacaagcagggctgaggcggtcccttccctcagtggagcttacagttttattttttgagacggtgagacgttgtcttgttctgtcacctaggctggagtgcagtggcgcgatctcgactcactgcaacctccgcctcccaggttcaagcgattctcctgcctcaacctcccaagtagctgggattacaggcgcgtaccaccatgcacggctcatttttgtatttttggtagagacgcggtttcgccatgtcagtcaggctggtcttgaactcctgacctcaggtgatccgcccgccacggcctcccaaagtgctgggattacaggtgtgagccgctgtgccccgccacctcctcttcttacaagggcaccagtcttctgggattagggcctatcttcatgtcttagctttaccttaatcacctccttcaaggtcccatctcaaaatatggtcacattgtgaggtgacaaggggtcagggctcccacatatgaattttgggggactgaattcagctgataaaacaggacgaggtccactaaacagtcacaccaacaattgtggaactgtgactcagaaatggctgagatagagaggtccagaatgctgaaaggtgggaagttagccaaaaaggttgctgatgaaataaggatttaatagacatctgaaggaaatcgggaagggaggaagaaggcaggaggaagagcgttaagacctcagagcaggaagctt

SEQ ID NO: 202395 - DNA, 1000 bp, Homo Sapiens
ccacgcccagctaatttttgtatttttagtagagatgatgtttcgccatgttgcccaggctggtctcaaactcctgagctcaggtgatccgcctgcctcgagctcccagattgttaggattacaggtgtcagctaccatgtccagcctccagttggatttttgtgagaacctcaataaacattgtaataggcagaattatttagaaagcaagtctaaataagaggtccaggctaaaggtacaaattttgggaatgtcagtatataaatgttacttaaagtcatataactagacaagttcaaagtttacctcagaagaagaaatatgacaaggttaaagagggggcattttatgatgatgaattaattcatcaaaaagacagtgatcccaaatatgtatgcacctaataacaaggcttgaaaatacattaagtaaaatctggctgggtgtggtggctcacacctgtaatcccagcactttgggaggccgaggtgcatggatcacctgaggtcaggagtttgagactagcctggccaacgtggcaaaactccaaaaaactaagtgctgggattacatgcataagccgctgcactcagccacagataattcttagatttgctcttgagataattttctatatcttgtaggcattcttcattcctttcattctttttttctcttctgtcttttcctgtagcctatcttcaggcttactgattctttcctctgcttgatccattctgctgttaacagcctctaaggaattttccagttcagcaaatgtatttatcagttccagcatttcaatctctttgttaagcttctccgataaatttctgagttgcttttctgttattttggagatcaccaagtttccttaaaacttctattttaagttcttgatcagagagcttgcctactagtctcactaggctcagttactggctccttgctttgtctgttttgggaggtcatggttccccgtttgctattgtttcttg

SEQ ID NO: 202396 - DNA, 1000 bp, Homo Sapiens
cacatagcctgaaggtaatttcatgtaatatttttaacaattttgtgcattaaaccaagttttgacagcctttgactgcgacccatcacatgaggtgaaattcttcttgtggcatcatgctggcactcaaagcgttttgaattctggagcattctggagtttggatgttcagacgacagaaacccaccctgtaccggagcagtttgctctgcttttctgaatgttggaaagctttcagagcagcctgttaatgtgcacctactctgcttcagaaattccacctccttacatgtgggaggaaatcagacccttgataaaggtggaaatacaccgttcaccccagaattggccaaagaacaaactctagagccagccgtcctgggtttgcaccctggctctgctcctgaccaggtgtgtgaccttgggcaagcggcgtgtgaccttgggcaagttacttcaccatctcgtgcttcagtttccttatctgctaagtggggtgattgctcatgttacagataatgaaaagtcaatcaggggctggcacaacggctcacacctgtaatcccagcactttgggaggccaaggctgatctccaaatccagcctggccgacacagtgaaaccccgtctctactaaaaatacaaaaattagcccagcatggtggcacatgcctgtaatcccagcttctagggaggctgaggcaggagaattgcttgaacccgggaggtggaatttgcagtgagccgagatcgcatcactgcactctagcctgggcgacagagcaagactccatctcaaaaaaaaaaaaaaaaaaaaaaagtcaatcagcatcaggtactcagaacagggcctgctcccaggaagtgctaggaatgggtagaagtacagctgggcagatcctgcagtccccactgcagcgccaggcactcacttgtgaaggtaacagaggaggctccaccgccctgggacgatgctccaggggtattacaaagtttaagg

SEQ ID NO: 202397 - DNA, 1000 bp, Homo Sapiens
gggagaaggagggagggagacagagagagaactagatgtgcagatctcaaagggtcctaggtggaacactgtgaggagaatcttgcatggaaggaagagagagagcagaggaatgagagactttgtgttgcattggagaactccaggcagggtgcaagctgtgcatctccatctgcctctgatcaagtttgtgtagattagataataactcatatagatgtagataataactcacataggtatagataataattcacatagttgcatacccatgttgcctcactgatcaacatcattgtgtggaagaaatcttgggctgggaaatgatagacggcctctctcttgatgcctcaggtaaggacaatcaaggcagtctgctgctctatggccaagaaggttagggattggaacagagggtcggcaccaaatactttgcttatattttcttgttttaaaacatattttattgaggtgtaactcaataagtgcatgggtcaataacatgtatatacccatgtaaccacgactacctcaagatataaaacatttccagcccccaggaagctccctcctccccctcctggtcaatatccacccaaggtaaccactatgctgatcgttatcagcgttgaccagttctgcttgtttttcacttttacattgttgtggtctcaaacaacatgcattcttttgtgtctgacttccttaacagtacgtctgtgtgaaccaaattgctgcaagccatggtggcgtgtgctttattatcactgtgtagtattacgctgtgtgaacatgttacaatgtatccattagatcatgggtctccaattcccggccacagaccggtacctgtgaggaactgggctgcacagcaggaggtgagctgcagatgaccaagccaagcttcatctgtatttacagctgctcgccattgctcatattaccacctgagctctgtctcctgtcagatcagtggaggaattacattctcatcgtgaac

SEQ ID NO: 202398 - DNA, 1000 bp, Homo Sapiens
tcgctgtgttatttatatatctaatgcctaggagcacattcaggtgggtttctatgaagaatccaggcatcgaaatgcctaatcactcctttcagattagaaactttctagtcgtctcagccgggcgcggtgcctcacgcctgtaattccagaactttgggaggccaaggcgggcggatgacgaggtcaagagatcaagaccatcctggctaacaaggtgaaaccccgtctctactaaaaatacaaaaaaaaattagctgggcgtggtggcaggcgcctgtagtcccagctactcgggaggctgaggcaggagaatggcgtgaagctgggaggcggggcttgcagtgagcctagattgcgcgactgagcgagactctgtcttaaaattaaaaaaaaaagtttctagtcgtctgatgtactatcaaaaaacaatgtcaactgtattttattttcatgaaatactaagcaataaaattggattttattgtttaaatgttgcgacgaactctggtacttacaccaataccagaggcagcttggaaggcagccacaggggttaaggggaattaattttgctatagaaaaacataacttattttaaatttataatgcaggagaaatgccttacatttaaaaacactctgtcaaaaattatttagaatgctaaagaaacaaatctatgttttcagtaaatttcaattaaggctaaaagttaaaaaaaaggtggtaactttccaccaccaatgacatgggctgtggctcatatcattaatgatgatacagcaaaataaatgaaggaggactttacttgctttgggctgtgaagaagcaaagtataatgacagccaaatgacattaaacccaaaagagaggtggaaactatgtgatcttcgagctttgtggaaagtattataaacatgaagagaagaatgaacaattcaaactcagaaaaaaattctctgtttaatccattatgaaacctagacacatgtcaaagctt

SEQ ID NO: 202399 - DNA, 1000 bp, Homo Sapiens
tacactgttgtgtttgggaggtctggaaggagaaaagtcaaggtgctagaggcagctgtcactcaacagtgagatgcacagactctgaagttagtctgcctgggttgtcctgtctctgccacttagctactgtatgatctggggcaacttatttagcctctttgtgtttcagttttgtctgtaaaacaaggataaaagttttcttcacgcagggttgttgtgaggattaaaaatcaaaacgtggcctgtcgtggtggctcgtgcctgtaatcccagcactttgggaggccaaggtgggcagatcacctgaggtcaggagttcaagactggcctgaccaacatggagaaaggagaaacccgtctctactaaaaaatacaaagttagctgggtctggttgcacgtacctgtaatcccagctacttgggaggctgaggcaggagaatcacttgaacccgcgaggcagaggttgcactgagccgagattgcaccattgcactccagcctaggcaacaagagcaaaaatccatctcaaaaaaaaaaagtcttaaaaaaaaaatcaaaatgtatgggaaagcttagagtggcacctggcaccaacatgagtaagtgcccgaggttcctgggctggcaggggatggaggggcagctcacctgtgttagggttctggtcatgggccagccagggaggagctctgactcctgctgcccgacatccaccatctggagagcttggcttgggcatgctctgcacctcagcctgccacgggacctgggacatcctcgtgggccccatctgtgaaatggggaatagctgtggtgaggctgggaccagtgcagatgtgtgagaactgcaggggaatttgggatgtgggggctacagcttgcatgtgatgggcacgctgagggatgggggtacctgggtgctgagggagacggggagcaggaggctgggctggtggggctccccatgccccttgtacctgcgtcagttccctgatc

SEQ ID NO: 202400 - DNA, 1000 bp, Homo Sapiens
cggcaaagggagggatgaggggccagtgggttgtgggctgagccgcctctgaccaaggaagaaacgtgatttaacacaacgctttggaggtgcaagtcattgcaatggccactgtaggagagaacgccagctgaggcctcattaactctgtggaaactattttagttacttagggagagtcattaaatatagcacagatggatccttcaaaaatgacagccaccatccacgttagaaacaggaaatccattaagttcgctgttaaaatcggggacgagggagcaaagcgcttccatcttgactgcctgtcactcagctctgcgccgggccgccctctgccaccccaggggcttctaatggcggccccagagagagctgggagcttttaaaagtttccttcatttttacaggttatattttaagctgaaaagttatgaaatagcactgcaaatcttactttgcactatcacggaacaggggctgtgggctacagacgcccctggggctggatgatgggggctggggagttcggctctcgctgcgcgccagtggcggggctgggcactggtaggccacacccacatggccccgggacaccaggtggccttgtctgtgatccgcccacatgcagagccccagaccccacttctccatgtctctggccacggggaaaacatcttttgtgaccatgtttgaaaaagcttcagagggacaagtgcaggctctgccactgaggcctgcggccttgggatgcctcgttggctccctggcagcaaatgaaggtatgtcaggaacacccctctcctggcaactagccacctcccgggtgtcccctcgcagatcctctgagtgttgagctccgggtctgttatggccattgctctgcacagccagctctgggatcccctgaatattgagctccgggtctgttacggctatttctctgcgcagcgagctctgagagcatgagtactgctcagcgtcggggatggagacgcca

SEQ ID NO: 202401 - DNA, 1000 bp, Homo Sapiens
gacaggaagagaagaaatgctcaggctcccagtgtcgggtcctgccacaccagacccactctagtcccacagcctgcagtgagcacctgccttattccaggcatatgcttggtgctaggcatgtaaatggaaagattctcaacatgtctctttcagaagcaaaaactggtgatgcaagcagttccaaactggccactagacaaagctatagagtccaccagttgcttctgttccactgcttttgtgggctgcttccagtccagagaggctgccctgcagggccctggaagataccagaactgaccaccaccctcctcctccacctcctgccaagcccctggaccctgctctgctttcctagtgacccttccctttgggtgagctcctctctggaacagggtcttgttctgtcatcagattcagtcaggggacctcctgaatagaagtcctggtagcatggagtctcagaatggaagagttagttctcaatttgttttttctttccaagaggttccttgactccagtgcaaattaattaattaattaatctatttatttattttgagacagtctcactctgtagccgaggctggagtgcagtggtgcgatcttggctcactgcaaccaccacctcctgggttcaagagattctcctgcctcagcctcccgagtagctgagatacaggcacccgctaccatgcctggctaatttttgtatttttagtagagatggggttttgccatggctggtcttgaactcctgacctcaggtgattcacctgccttagcctcccaaagtgctgggattacagatgtgagccactgtgcccagcccccagtacaaatttattaacctccttcccctactaaaggaatactgggaacagcaggctttgtcaacctacaaaaggttctgttaagcaatggatgcctgttcaactgacacttgcatacttactcagggagcactctcaagttttgggaaaagttcaagatgatc

SEQ ID NO: 202402 - DNA, 1000 bp, Homo Sapiens
ggctgagcagtgccatggaacctgcaggcaacgtggagtaagagaagcccaagttgacactcatctctgccctttgtcagccatgtgaccctgagtaaatgacatcttgtgttcaaaacgtggggtaatttccattttaatcatcaaaaccccactgggagctgggcacagtgactcacgcctctaatcccagcactttggaaggctgaggcgggcagatcacttgaggtcaggagtttgaaagcagcctgaccaacatagtgaaaccctgtctctactaaaaatacaaaaattagccaggtgtggtggtgtgtgcctgtaatcccagctactcgagaggctgaggcaggagactcatttgaacccaggaggcagaggttgcagtgagccaagatcacatcactgcaccccagcctgggtgacagagtaagactctatctaaaacaaaacaaaacaaacaaacaaaaaaccctgttggggttactgtgagaattaagtgataggaatatgttttcaaaagcctagccagggtctgatgtgtggtgggggttcaataaatgcttaggacatctaaaataaaaagaatattgaagcagagcattgtggctcatacctgtaatcccagcactttgggaggctgaggtggaaggatcacttgagcctgggagttcaaggctgcagtgagccatgatcgcaccattgcacactggcctgggcaatagagtgagacactgtctcaaaattaaaaaaaaaaaaagaccacagaacatacacctcccaagtgactaatttctaatcaaataattaacaatttccttttttaggcagagagaattgtgcccctcacacatgtcagggtcttttgtacatctggatactgaggctgttagccttgcaacctgagggccatgaggtccagctctctcataggcagtaaagactcatggagagctcaagacaagagccatcatttggtacaagttcaagagtgtggaagatc

SEQ ID NO: 202403 - DNA, 1000 bp, Homo Sapiens
agaaagaagaaaaagacaaggaggagggggagagggaggaggaaacagaaaacggggagaaaaggaggagaaggagaggagaggaggaaaaacgaggagaaaatgtgagaacagtgagaggaaggggaaggaggtgaggagccaggggattagaatggggggattagaatggccttggggtcatgagaatgggaattcacacatgtacctctatgactgcctggaaatgctgacagagcagagccactgctcgctaaatgtctctatgacaatattttatcttccaatacttgtacaaccttttcattttgccacttgaatttgtagggagattcaaaaaatagactgagggtgagtacacaaatgaaaaaaagacaaggagaatgtgtgtgtacatgctctattttttgtaaaaattataatttatttccatccaccatccatatacttagccccaacctgtccttaccttggccaaagtcaagaacaacaccaaacttagtaacactgagagcaagcatatgctttcacatgctataaatgttatttctaaactgatttaacaggataatagtaacaatagatattgtgtggcaggtatcttgcaatctactgtaaaaattacaatttttttacagcagttttgtattattaacgccatttcacagatgagacaatggaggctaataattttatccaaggacataaggtagatgagatttgaaacccaggtctggttgactgctggtagtaagggcatattttgtaaatcaaggccatctaaacaggaggaatattgacaaatgagaagaaacagaagcgtcaatggaggtaagagcaaacagaaactcacgagctaacccgactgccaagacatgataactgcactgcacataatgtctgaaacctaatgtgggtttttttgtttgtttgtttgcgtttttttttttttaacacagagtctactctgtagcccaggctggagtgcagtggcatgatc

SEQ ID NO: 202404 - DNA, 1000 bp, Homo Sapiens
gaattgtgtggggaactagacctcagaaggcctggctggttttacagcacacctgaagaggtaaggtgctcagtatgtcagaattattgtgtgtaaaatatagtagcacagaaactgcaaaactctctgaattcaagttcaaccttgtgataccttgtagtaacccaggagatttttcctgacattttgctgaacccaacatagagcctttgcatgatctaagtattataatacaaacagaagtaaacataaatgttaactataaatataaatatattagaaataaattatatatatacattactaagaattagtaatataaaatagaactctgttggtaactgaaacaaattttttctatttaatctgttgtttagagtcagtaatttttattgtgggtggggaaacattaggtaacatttcttgcacatgcaaaatgtgaagttgcaattatccttgtcatttaaggattaggagggtaccatagattctctgaacaacaagaattataagtacttttaaaatttaattgaaataaatccctggactcactttaatcaatagtaacaaaactgacttttctagaattaatagtgcttttctaaatggccaaaatcagattattctttcactaaacagttttcatatttggtcccagaatacttggtcagtaaacagcacagcctgtctcaggaagtatagagttacatcttatcacatgttggctctgcaaacactgaggaatctaacaatggccttctctgaggcagaacttgctaagtgaggttagctccccttaggaactacagctattatcagtgtcctctcctacagtacaaggtcttgattattcataacaatattagtgttctcatgcatctgattttaaaaagctggaaaagaaaggagaaagagagaagcagctcattgttgatggttacactgtaggtttttttttaactactgcaaaatggtttttcttaaatattaaatacagatc

SEQ ID NO: 202405 - DNA, 1000 bp, Homo Sapiens
gcccttcttttctgctatacctgttcatttcctcaagctatttttccatcagacagtttcatgttttctcattgatttgaagcttctattaaagtattgtatacacatgggtaaatgcacataagtttaaagcttagtgagttttaaaatactatgatcatccagaataagaaaatgtaatagtcacacacctgatttccacccatccctcctaacataacactattctaacttttaccagtaaggaatcaaatagtgtgtgtagtgttttgaaccacatttttttgcttaatattatatttgtgagacgaattgactatatgacctgcaaatgaaactatttatatttatttctctaatattttattaggtgatcatattacaacttatttgtttactgtactctttataagtattttagtccacttttgggccacagtttggggttattttggtgttattctgaaaagtgttttcatgagtacacattttttttagctatatatatgcatgcatttctggagaaaccatctttacaagtagaattttggggcctaatacatatctttatccaaattatttgaactaagttatgccaataacatcaatttgagtgttctaattagtcaacattctcatcaatactttgcactttctcttcaacttagaattctaaaatattcctttcaaattcaggattctgaatgacaagtacttacatctcattgtggtttgaattattttttcaggtaaccaatataaataaaaaccttttaataagttcattggttatttgaatattttatttttgaagtgtctaaaatattttctttctaatccagtccagttatttttctgtggtttgcttcttgttgtcttattgagttcattgcctttttaatattcttttccggttaacatttccccctcattgatctgaaatgttttcattatataccacctttccatatctgtcaatgtcttgattttctatatgatc

SEQ ID NO: 202406 - DNA, 1000 bp, Homo Sapiens
aggtctggaagagtccagagtgctggacccacagagctggggtctgccaccctccaggcatgtagacgtgttacccgccaggaagctttcaaaaccccatactttgggggtttctgtgaaggcctcgtcaaggaggcataatggattattaactctacttccagccctctcccctctctggaaaatggaggatggagccagaagctccaagcttctaatcatggcttgttctatctgatgaccaacccccacacaggagcccattaagagtcgccttgttaggacaagagcagctgtgctgctatcacccaggaaatcccaagggatttaagagccatgtgtcaggaaccagggtcaaagattaaatattagaacaaaagctactcctaccacccaggaaatctcaagggattcagaagctctgtgccaggtgctgtcatcactctggaaattacaaaggttctagaagctctgtgtcagcaatcaggatcaatgaccaaatattagaacaaaagattctcttagcacccttatctacaagggttttaggagttctgtctcaagaaccaagggctgagaccaataaacacatatacatttcttattatttaacagtattcaacaaacatcattatcaaaagcaatgaagttggctgttctattacagagaacaaagtgaatttttctatttcccaacccacttctaacactggtacagctggttgaccttggaacaactctttttttttttttttttttttttgagacagagtctcactctgtctcccaggctagagtgcaatggtgagatctcggctcacagccacctttgcctcccgggttcgagcaattctctgcctcagcctcccaagtagctgggattacagtcatctgccaccatgcctggctaatttttctatttttttttttttttttttttagtagatgcagggtttcaccatcttggccaggctggtcttgaactcttgacctcatgatc

SEQ ID NO: 202407 - DNA, 1000 bp, Homo Sapiens
ctcacgcctataattccagcactttaggaggctgaggtgggcaaactgcctaaggtcaagagtctgagaccagcctggccaacatagtgaaaccctgtctctaccaaaaatacaaaaattagccaggcatggtggcgcatgcctgtaatcccagctactcaggaggctgaggcaggagaatctcttgaacccaggagatggaggttgcattgagccgagatcacactaatgcactccagcctgagactccatctcaaaaaaaaaaaaaaaaaaaggaaggccctaagacaacaggcttcatgcctcacatttataaagaatatcaagtcctccagacagctaagtttgctaagtttgtgatgatacgaaaaattagggaaagattttcctattttgtgaatcactgagggaagctatgtggttaagtacataaggaaaaaaactagactatttctagtttctggaagcggcattatctgtaaccttgttttgatcgtcttaataacaatcctttaaatgttaatgtgagaaatgactaataaacaattattaaaaatgaggctttaatttgccttatttgcataacactgattgctccattggttatcccctctcctgaatcaccaatctgattattaggctattcccatagacatgactgtccccacaaatccctagctaccagcctgtttcttttaaagcaattttgttgagagatctatcttcatatttcattttcaaagtccagtctggcttctgctgtcatcactcccccaaaactgtataaaattagcaatatcaggctaggagtggtggctcacgcctgtaatcccagcactttgggaagctgaggcggacagatcatttaagcccaggagttcaaaaccagcctagacaacatggcgaaaacccgttgctgcaaaaaatacaaaaaaattaactggacatgggggtgtgcgcctgtagtcccagctaccaaggaggctgaggtgggaggatc

SEQ ID NO: 202408 - DNA, 1000 bp, Homo Sapiens
ttactttaagttctgggatacatgtgtagagcatgcaggtttgttacatagatatacatgtgccatggtggtttgctgcacctatcaatccatcatctaggttttaagccccacatgcattagcaggggtctccctccccttgcctcccaccccaaaagaggctccagtttgtgatgttctcctccctgtttccatgtgttctcattgtccaactcccacttacaagtgagaacatgcggtgtttggttttctgttcctgtgttagtttgctgagaatgatggtttccagcttcatccatgtccctgcaaaagatcagaaatcattcttttttatggctgcatagtattccatggtgtatatgtgccacagtttctttatccagtctatcattgatgggcatttgggttagttccatgtctttgctattgtgaatagtgctgcaataaacatatgtgtgcatgtgtctttatagtagaatgatttataatcctttgggtatatacccagtaatggcattgctgggtcaaatggtattcctggttctagatccttgaggaattgtcacactgtcttccacaatggttgaactaatttacactcccaccaactgtgtaaaagtgttcctgtttctccacatcttctccagcatctgttgttccccgactttttaatgatcgccattctaactggcatgagatggtatctcattgtggttttgatttgcatttgtctaatgaccagtgatgatgagcttttgttcatatgtttgttggccacataaatgtcttcttttgagaagtgtctgttcatatccttcccccacttttgtatggggttgtttttctcttgtaaatttgcttaagttccttgtagattctggatattagccctttgtcagatggatagattgcaaaaattttctcctatcctgtaggttgcctatttactatgatgatagtttcttttgctgtgcagaagctctttagtttaattagatc

SEQ ID NO: 202409 - DNA, 1000 bp, Homo Sapiens
aaggacacctgtattagtccattttcatactgctatgaagaagtacttgagactgggtaatttataaagaaaaagaggtttaatggactcacagttccacatggctggggaggccttaaaaccatggcagaaggcaaaggaggatcaaaggcacatcttacatggcagcaggcaagagagcatgtatagaggaactgccctttagaaaaccatcaaatctcatgagacgtactcactatcatgagagcagcatggaaaaaacccacccctgtgattcagttacctcccaccaggtccctcccatgacacatgaggcttatcagagctacaattcaagatgagatttgggtggggacacagcccaaaccataccaacatcccaggtaaaaagttatgatccattgtccagttcctagacctgaggcagctttcagatccaaaatttgttaattgcagaggtcccaggaggagagaccctgaagactataatgagtcccgcaatccttccccaaagagatttatggccatttacttgggtgactgtacactagagaaaggagaatacctggactttttgaggacagttggacacagggtctgagttgacatttccagagacccagccccttgttagagtgagggtatgtggggtcaggtaataaacagagtcctaccaaaatccaacttacagtaagttcactgggcccagggacacacccagtggctattttcccagttctcacacatattgggagtgacatactgaacaatggggacaatcctcactttagatccttggtctggagtaaactctagcatagtgggaaaatgtagaagcctctgtaactgccctccctaccacccccagccaaaacagtgaaataaaaaatcatcatcacatttggggatgggagatgacacgttaatgcccctcttaaagatctaaacattcagaggtggtgctcccttacatagctctgctgaattcacccatctgatc

SEQ ID NO: 202410 - DNA, 1000 bp, Homo Sapiens
tcccatctccgcagcccggttttgaccggatggtgcttctaattttctgctaacctgtactgtggtgtgtgtatatttcttgccaacacgccagaaataaaactaaggttgtactgaagttggaaaaattcaggttaatgtagctcatgctggctaaagtgaaacgttctctccccgccccccgttcctaagcagtgttaagttttctttgaattttttcaagccggattttgggcctgcttaaaccacttaaatgtagttaatgacagatggtttgaggtttaaaagtcttctggagaaagcccgccagagaacattccctttgaagccccatgtaaaaatacgtgtgggagagaaagtgttttctctgacttctgctgacagtggctaaaactctgaactgtcaggagtattcaaaataagactgccttgtaggtaagcctgtggtagtttttttgagcacaggataaaatacttgagtctttgcttaaatgttactttctcaatgaggctttgtatgactaaataaaatctgtataatccccacctatttttttcaccctagaatttgtcactatatgctgtaccagagtttgctgatgtattgcttgtgtgttctaaaatacaggctcatgagaggaggaacttttgtttactcgcatatctccagtaacgtaggagcttttgatcagtatttgttggataaatgaatgaatgcatgggtatataatagtaaggagacatacccacatggaaaatctcaaatgaaagaaatacatcagcttggtagatatgctcaaatcagcttcttgtgggccaggaaagcccttacctcatccattcttgtattcagaatgctagatttctataacttcttctgtgagctctctagcattcttataagtattcaagattttccctggcaaattggcttgtgtatgtgtgttatcatctctgtctctccttagcttaacctgtgaaggatgtaagtggaaagatc

SEQ ID NO: 202411 - DNA, 1000 bp, Homo Sapiens
cactaaattatcccatatagtaattatttctatccgaactggtctccctccttaaagggaccaggtctgattgacccctgcatccaggagagggctggggtcacagcaggtgctcaagaaatactttttggataataaagatcccaaagggaactggagtggaacaatattaggggttctgagctctaggctctggggcaatgctcttggatctgtgtgtggctggacaaggagctctccctcatctcaccctctagcttgaatcatccatatatgtgcaaggctcctaccctttcccagaaaaaagcaaagccagaattcccaagctcaccctcttctccattttctccaccccacttagctgctgtccagccacttctaccaactacagcaagccccccaccccagggctttcccactcaaccacctaaggacttatcagaaagatttttgctgtggtcacctgctgccaaaactctctccctttcccaaagggcctggtactcagaaacttttctagtgccagcagagagaaattgggataggaagaaggagggctactttattggaattctggtcccctccctaaccctccaagccaagttttttcctacctcaggacatttgtacatgctattccttccactcggaaggctgggccaataccccagcctaagcgttatttacccctcaaatttcagcttaaatatcacttcctttgtgaaaccttccctgatccccaccccacctccaactagcccagctctccttattatgcagtagcatcacgtacttcttctttacatattaatagtttcccatgtatttattgtgtaatcattggattttttgtgcatcaccttcacacaaaaaagtactgtgtaaaactaaccattgaatactatgctcagtaacttagttgacaggataattcataccccaaacctcagcatcacaaaatatacccaggtggcaaatctgcacatggatcccttggatc

SEQ ID NO: 202412 - DNA, 1000 bp, Homo Sapiens
cgggcacggtggctcacgcctgtacccccagcactttgggaggccaaggcgggcagattacctgagctcgggagttcaagactagcctgaccaacatggagaaaccccgtctctactaaaaatacaaaaaattaaccgggcgtggtggcacgcacctgtagtcccagctacccgggaggctgaggcaggagaatcacttgaaccagggaggcagaggttgcagtgagccaagattgtgccactgccctcctgcctgggtgacagagcaagactcagtctcaataaaaaataaacaaattaaataaataaataaataaataaataaataaatgtaggggggatctggatggtggttggctggggggaaggaacagccctgagcaatagctgaacggtaggaacctcggatatttgggggtgggaagggcccactgtggggagaccagtcaaatggcacccaggcctccctcaggggagaaggctgaagaggatggaagaggtaagaggatctctaatcccaggagctgactaggagatttagccaatggctttgctcagaacagcttagagttttgctcatggacaagaggagagaaaaaaactaggatttactggatggacagcgtgcaggctccccactgggtactcagcactgaatctggtttaataaatgccacaggaatcctgtgagctggagatcaccctgcccattttgcaggtagaaacctgaggttcacaaggagttcaagatcagttcaggcaacaagggagaccctgtctctattcaaaaaataaaaaaattagctgggcatggtggcacatgcctatggtcccagctactcaggaggctgaggagagaggatcgcttgaggccaggagatcgaggctgcaatgagccaagatcatgccactgcactccagcctgggcaacagaataagatcctgtcaaaaaaaaaaaaaaaaaaaggaggaaacccgaggctcagagagtttaagagaa

SEQ ID NO: 202413 - DNA, 1000 bp, Homo Sapiens
gcagaggaagcaggcacaggggctcagcctgcagggagtgagggggcaagagcctcttttctggggaaaaagacttcaaaacattcaaaccacctgatatcccagggctttctctagtgccatgaaatcagggaacccccttgggccatcagtcccaatgctttcacttacctgggactccctgcagctccagcagctgcctgggctgggctttgtccttgctgtggctggtgctagctctgaactctgttgccagcaaaggaggaccaggtgtgggcaggtatgaagtggctctgccctggaggtccaggccagctctctcttctccttggagaggacaacagaggaaggcacccagctcctggtgcctggggttgttggaaccctcctctctccccttctccttctgctcaggctccaggttcccagggggtaggaggagacaccagaatccacaagagggagactgaagtttgcatgaaaagagccgatggctgggagtcaggagacttggatctggccctgactgtgccctgcaggctgctgtctttgcatctgtgtctcagttttcttctatgtaaatggcagggctgagatcaggggtctctcatcagccatgttggggcccgtgatgctgactggcatgcacaccccagggaggacttcctgatttgatcacccttttgccccctccttctcctctcggaggagctgcagcccccaactctgataggccctcttgtacccccgcagaccttcttagatgtgggacccttctcctctgagcacctccctcctaagctctggccctgtcccttccagcctggcctgtgttccttttctttgcctgggctggggccctctcagttagtcaatctccctcccctatgtgctgactgggaaccaggacacttgagtactcatctcagctccaccatatgctgtgtgatgtggagctagaaactaaccctctctgggcttcaggttagactggaggatc

SEQ ID NO: 202414 - DNA, 1000 bp, Homo Sapiens
aactgttcatgccactcactgtctccttgtcttctctggttttccccagccttcatcaccaggggcatcacgcacggatctgctttcccagccactctgtcttctcctgaggggttggctcctagggagagaactcggttcaccgccaccttccactgcccagaacactttccagcccccacgggggcccgtaagtatttaggaatgaaagaaaggccccctccaactggatggggagggcttcaaggggggctgtggcgcattcacaactcccagtgcctggctacagtctgaccctaggaggcattaaaggtaaggggttcggctgaacaaaacgagcccacagcatgggcgtctgtggtgactacgtccagagcagggttaagtgtctactccaggggctgccaccactagacaaagaccctcccaccaggctgcccagagtgacaacatgtgcccaaagcctcgccctgcacaaagctttctgtgaagagcgtgtcaatctctacaaggaaatgaacctccagctcccagaacctcctccccaggagctgctgagccaggaaccagcctgcctccctggatcacggtctgtatcccaccctgctgactctgccatattaatgatgatgatgtttttatgtgatatcatattagcaaagagaaatggtcaggctggcaacacaaactccaggaagaacatttagaagaaaaaaaatcacccaaggcatagcctattcccacaatatccccagagccacatactaatggctgcatttaatttaatgagacaatgcacagacttttcttaatctgtaaagaaacaacacacacgtttttctcagcatccacagaaacccatgtggctgtgtggcagaccatcttttcaaaggcagctgctgtggtgtatcttatcccacaagaagaacgaagcttttcttgtgacactgacacacctcccatggctcctccccttgaacctgggcagaccattgtgatc

SEQ ID NO: 202415 - DNA, 1000 bp, Homo Sapiens
attatatcattaagtgatgtcaatttcttttccttaaccaaaatggacttactacttcccctcttcaatctttcattcaactgctcagaatcaggattttgtttttattcttctatggaaacgatatttcaaaatccttgataactttttatctgtagtatcaatggcttttcatttctctttttctaatttatatgcagtattttatgattacagccactttttgtttcctgggttccacaacacaatgctctcctaattcttcttctgctctgatttttcctaatctgtctcctttactgagacccaaaacaggaactcttgagctgaaaaaatttctccagttaagggcagggataacgtgcctggctcacagctcttgattctcatgttcctattttcccagtcatcaccacatgatgtgtttgggttatggtacaaaggtagcaagcactgcaattggaaagaattctgaaatgaattgggaaaagtgctttctctctttcttatataaggcttgttcaaagcagctttctggaatggttggtgatgcctgtttccctagcggtcatgtggtcctgcagattttttttttcccttctaagttaccaccaaacccaaagagccatcactactctaagaatgtcctggcatcatttaagagccatcaacttactttagcacctctatttttcaactagactgctttttcaatttagtttttgagatccttctatttttatggaagtttgtttggtattagaggataagcaaagatgaagggcttaccttaacattgcttataaatttagaggagaaaataagttctcaaatactataaagatgttattacattataggtctttatagagcgagaaacaaaatgctaagggaattcaggagcaggagactgacccactaatatgaacagaaaggtttctgtattttagcctgaaagtgatggggaaggattttatgcagggtgcctttcagagagatc

SEQ ID NO: 202416 - DNA, 1000 bp, Homo Sapiens
tttcccaagcttttggccttgccctagatttttgactccagaaatactaagagaactgagagaagtacatttacaacaggaaatgcttattcctcagtttagatcactaaggttattctcttaagaaattagaaaatgtttagtttcttctactcaattaaggcaatgaatttgtaaaaaacaaatgacaaaaaaagcaacttggtctttaatgtcagcggcaggtaaaaagacagtctcaatgattcatcactcccatttaattatcaaccaatatctaccaaatcttttatagaaggcccatgtcctcatgagcactgagttttttactggaactcagggataccatgcctccttccttccttctcaatcaggagctgagctttgctatgaaataagaaattatggataataatatctatatcagaaggttatggcattaaatgagtgtatgggagttacttgtcatatagacacttaataaactacggttcctatccctttgttttcgtttaactgtatttactataccctacttctataatacttatcacactactgtgattgtcaatcagttcctttcactatgaatatctgcagggtaggaactttatagttctcatttcatgcacagtacccagtgcataacagggtctcaagtgaacaaatcaaactaacagagcctcacactttaaatgaatgatacattgagggggccagtatgtggtacaatgaacagcgttccacttataagaaacccaccggctgagctcagtggctcacacctgtaatgccagcactttgggaggccgagaagggtggattacctgaggtcagaagtttgagaccaccctggccaatgtggtaaaaccctgtctctactaaaaatacaaaaattagctgggcgtagtggtgtgcgcctgtaatctcagctactctgaaagctgaggcaggagaatcgcttgaacccgggaggcggaggttgcagtgagttgagatc

SEQ ID NO: 202417 - DNA, 1000 bp, Homo Sapiens
ttaataggacatatactgtgctccctgctttatcccatctcaggcaatattacctgttctctccgttgtgagcccatatttgtatttctacagttagtttagaaaccactctgcatcaggcgtggtgactcacgcctatagtcccaacactttggggaggctgaggcgggtagattgcttgaactcaggagttcgacatcagcctgagcaacatggcaaaaccccatctctacaaaaaaatgaaaaattagccaggcctggtagtgcacatctgtggtctcagctactggggaggctgaggtgggaggatcatttgagcccaaaaggtggaggctgcattgagcgaagattgtgccactgtactccagcctgggtgacagagtgagaccccatctcaaataaaaaaaatcatcaccccaccattacctgtgccttgtctacctttcccactagaccataggcagcactaatgtagtatgactgctgtgcccctggctggcacactgctcatgctcagtgaagatttgctgagccagggtggtagtggtggtggtggtggtgataacaataggttgagtagtgatgttccccaaaagatatgtgttaatttttttttttttttttttttttttttttagatagagtcttgctctgttgcccaggctggagtgcagtggtgcgatctcggctcactgcaagctctgactcccgagttcacaccatactcctgcctcagcctcctgagtagctgggactacaggcgccggccaccatgcctggctaagtttttgtatttttagtagagacggggtttcaccgtgttagccaggatggtctagatctcctgaccatgtgatccacctgcctcggcttcccaaagtgttgggattacaggcgtgagccactgtgcccggccagatatgtgttaaattttaatacccagtacctgtgaatgggaccttatttggaaatagggtatctaaagatagaattaaggatc

SEQ ID NO: 202418 - DNA, 1000 bp, Homo Sapiens
tgctgggtgatatggtcaaattcgtgtttaactttctgagaaactgccaaactgctttccacagcagccgcgctactttacattctcaacagcaatgcacagggtttcagtttctccacatccttctcaacactttttatgattattttcattattataaccaccctagtagatgtgaagtggtatctcattgtggtttgtatttatatttccctgatgactgataatgttgagtatcttttcatgagcttattggccatttgtctatctcctaaaattctgtcagtaacattttatagttttcaaggtacaaatattttgcctattgttccatttatttcgaagtactttatttttgatgcttttgtaaatgcaattgttttcttaatttccttttcagattgttcattgttagtgtatagaaatgtaaatatgtgcaacatttttatgtgtcgattttgtatcatgcaactttactgaatttgtctattagtttagacagctttttgtgtgtggattcttcagggctttctacatataaaattatgtcatctgcaaatagagataattttacttcttctttttcagttgggatgtcttttatttctttttcttgcctaatttctctggttacaacttttagtgctatactgactagtagcggtgactgtgagcatctttgtcttgttcccgatctaagtgaaatttatctaagtggaatgagtgaaaagttttcaactttcaccattgagtatgatgttggttgtgggtttttcacacattgtctttattttgttgagggcattcccttgtattcctggtttattgaatatttttatcatgaaagggtgttggactttgtcagatgcattcactgtatcaattgatatggttatgtgggttttatttcttttatcctattgttacagtatattacattgattgatttttatattttgagccattcttgcttgcactcctggggtaaatccatttgatc

SEQ ID NO: 202419 - DNA, 1000 bp, Homo Sapiens
ggccttcatccctgggatgcaagcctggttcaacatacacaaatcaataaatgtaatccagcatataaacagaaccaaagacaaaaaccacatgattatctcaatagatgcagaaaaggcctttgacaaaattcaacaaccttcatgctaaaaactctcaataaattaggtattgatgggacgtatctcaaaataataagagctatctatgacaaacccacagccaatatcatactgaatgggcaaaaactggaagcattccctttgaaaactggcacaagacagggatgccctctctcaccactcctattcaacatagtgttggaagttctggccagggcaatcaggcaggagaaggaaataaagggtattcaattaggaaaagaggaagtcaaattgtccctgtttgcagaagacatgattgtatatctagaaaaccccatcatctcagcccaaaatctccttaagctgatgagcaacttcagcaaagtctcaggatacaaaatcaatgtacaaaaatcacaagcattcttatacaccaataacacacaaacagagagccaaatcatgagtgaactcccattcacaattgcttcaaagagaataaaatacctaggaatccaacttacaagggatgtgaaggacctcttcaaggagaactacaaaccactgctcaatgaaataaaagaggatacaaacaaatggaagaacattccatgctcatgggtaggaagaatcaatatcatgaaaatggccatactgcccaaggtaatttatagattcaatgccatccccatgaagctaccaatgactttcttcacaggattggaaaaaactactttaaagttcatatggaaccaaaaaagagcctgcatcgccaagtcaatcctaagccaaaagaacaaagctggaggcatcacgctacctgacttcaaactatactacaagtctacagtaaccaaaacagcatggtattggtaccaaaacagagatatagatc

SEQ ID NO: 202420 - DNA, 1000 bp, Homo Sapiens
agacaagcaaaactgtacaaacagacgctagtaagatacaaaatcttaaggagaaagttgagccagattctttcatgggaaaaaaatgagagcaaatgtatgtgtattgttcattgtgctaatctgctgtatattttcatgtctcaaggacatattcaggtagaaaatgatacaataaataaatggtgagttaaagtgttggattaggttggacactaaatcactgatagttaattgtgatttaactctgctgggtcatccagatttgtcttagcactagttattacacaaatctgggaagcaataccaaccacataacctaggaaaagcagtacagcgtggtagttagaccagcacagcttctgggatcaggctgcctaggctcaaagcctgctctgccatttacgagtgatgaaaatttgaccacatttgtaacctctctgtgctctctgagatgagaaagatgatgatgataactatagtgaggattaagtgagtaaatttatgcaaagaatataaagcagtatctggcacacagtaggtgctattcaaagtgtgatctgtagatcagcagcatctgcatcatccaggagcttattaaaaatgcagatctccaggccctgtcccagactgactgcatcagagtctgtatttcagcaaaatttctattgacattaaacatctgagaagcattgctatgtaaatgttggtgttgctatttcagattggctttaactagcttatgttgtcagggtgagagaggcacccctgctgatttgcattttctttccagcctctgagctcaaaggagagactttttgtctctgacactggtctctgattatccttacatcatggcaaagagtggaccgtatgcttgtgaacctgccttctgtatcatcctcaacctgcatcccaatcttttttttttgagacagagtctcactttgtcacccaggctggagtacactctgtcacccaagctggagtacagtagtac

SEQ ID NO: 202421 - DNA, 1000 bp, Homo Sapiens
cccaaagtggtgggattataggcgtgagccactgtgcccggcccaggatctcattcttttttatttttattttattttattttattttattttattttgagacagagtctcgctctgtcgcccaggctggagtgcagtggcgcgatctcagctcactgcaagctccgcctcccgggttcacgccgttctcctgcctcagcctcccgagtagctgggactacaggcgcccgccaccacgcccggctgatttttttgtatttttagtagagacagggtttcaccgtgttaaccaggatggcctcgatctcctgacctcgtgatccgcccgcctcagcctcccaaagtgctgggattacaggcgtgagccaccgcgtctggcctcattcttttttatagtggaatagtacaccatggtatatatgtaccacatttcttttctccagtcatctgtggccgggccacgtcatttttaattcactttgagtgtgtgtccgtgggtgcagggctgtaggcctcttgttgcagaatgcggagcttgggagaaaggcgatgtccctgcctctcctgctgtgtgtgttgcagacccatggatgtaggaaagtggcgtttgtgggtgagaatgattggcggatgagtcattcaggcatgtcagaaaatactgaaactcggtgaaataacaggattgagtaaccttctcgccgttgactttggtggagagtggatggtataaagtcgtctaggcttgataaagcttccctaagtgtttgcctagttaaatacaggatattgcagtggcttttaaacagacgattgcaaagaaggaagtaggggcgggctactgttcaggcattgtctggatgcatggcagcgtgcttttctggaactcacagggtagggaaggatcggacctttttttttttttttttgagacagtcttgctctgtctcccaggctggagtgcaatggcatgatttggctcactgcaacctctgcctcccgg

SEQ ID NO: 202422 - DNA, 1000 bp, Homo Sapiens
aaaagacaataaaattcaatccctcctcttctttttgtcctcaggatcaaaatacttgctggatggtggactcagagaccaataaaaataaactgcttgaacatcctttgactggttagccaggtaattcagctttagtttgatttgatcctttgtaattttttgtcttcaaccttctgaagatattaccctcctctttaatttatgatttaattaaaactatttatgcttcatgtttttctctttaatgattattaaatgaatgtgcttagagtacttgagtgaatacgtatgtgtatgtacagttggcccttgaacaactgaggactggggacactgaccccttgttcagtaaaaaatgtgcagaactttcgactccccccaaacttaactactaataacctcctcttgcctagaagcctcactgttaatataaacagctgattaacacatattttgtatgttacatatattatatcctgtattcttacaataaagtaagctagagaaaataaaatgttattaagaaaattatggccaagtgcagtgactcatgtttataatcctagcactttgagaggctgaggtggttagatcacctgagtccaggagtttgagaacagtctgggcaacagagcgaaaccccatctctacagagaatgcaaaaactagccagacatagtggcctgtgccttagtccctagcactagagacactgaggtgggaggattgcctgtgcccatgaggttgaggctgcgcctcagctgtgattgtgccactgcactctagcctgggcaacagaatgaaaccctgtctccaaaaagaaaaaaaagaaatagaaaaaaggagaaaattttaaggaggctggacatggtggctcactcatatgctcacaactatgatcctagcactttggggattggaggtgggaggatcacttgaggccaggagttggagaccagcctaaacaacacagtaacacccccagttctacaaaaca

SEQ ID NO: 202423 - DNA, 1000 bp, Homo Sapiens
attaaaaatgatcttttcttcatgcccaccagcagcaagagttacctgcttgccctacattaaaacaataatggatagtaccaggttgttcactcttttacttttaaaacttactgcagccttcaaaagctttttgctctttgatagaatatttcaacgtgatcagaaagaccaccttgctttgagatgaagtttaggctttgtcttttgagaagtatacccagcaagatggtaaagccagaaaactgcagttgttgagatttaatgcattgagtttgtttttctgttgagcagttgttatataaagccactctattaagccaggaacactggaggaactggtttatctttgacttttgaattttggggaagttccaatttcctacaacttttaatctttctatgttgctgatttgtaggaagtcatgttgtttcattatcacttgagatattagtatctatatattatgaacatgagcctgaatcctccaaacatttttaaaaagatgccagcatatctaatatgaagttgaacttgctacctcttatattgttttccctataaacacacagaatagtggatacccatgcattttccaatactgcctagtgaattgcagggtgttctttatataatctatcagcagtaaaacatcctgaaacatgtagtaattgcttaggtcaaataatgtaatatatctttgatgcgctgaaatagacaatgaagagtactagcttttcagtgatgcctaggtggaaatatacttccacaaatttctgttgaggccatgtctgaatgggttcactgaggggagacagagttacataccatgtatgttgagaaaaactcgacagtgttagctttctgctactagcgcttcatgaactattactattattttttttccagtggacccttattggaaaaatctcatgttcacattttcctgtaggaggatttagcactggattggatcaatgtctttagggctcattgatc

SEQ ID NO: 202424 - DNA, 1000 bp, Homo Sapiens
acaaaatgagattaaattcagacatttatgagatatatttttaaaggccctatttcaaaatattcagtgcacatgtatgtattgaggcagtcttggaggaagggacatcaactttgcttcagagaaaatgaatttatctcctcagtctacctggctctgcacttattgatcctgagaatttatgaagaactttttttaaataatttttttattatgctttaatttctggggtacatgtgcagaatgtgcaggtttgttacataggtatacacgtgccatggtggtttgctgcacccatcaacccgtcatctatattaggtatttctcctaatgctatccctaccccatccccccaacccctgacaggccccggtctgtgatgttcccctccctgtgtccatgtgttctcattgttcaactcccgcttatgagtgagaacatgcagtgtttggtttttcgttcttgtgttagtttgctcaacttgattctctgtattctcatatgcaaaatggtaataataattactattgcaagggattttgttgagaattaagttaaatgagataatgcatgtcaaaggagtttcaagggctacagatatgctatttttacttgtagactgtattttcttataactcagagctttagaaacccgatgcaactacctaatgccagtaaaatggagtcgtaaagtaataaagaaaactgattgtcttgtttcctattttttttgaaaactgattttgttgcttactgtttttatcatttggtcaaaactgaaacgtaagttttgtatctctatccagatacaaagacagatttttggctttcgttacaacagcacagtaagatacaaaaatgttcacttcattttaatgttatattttgacttcctctcctgaatgctacttcaggcatatggcaaaataaactttcaaaattaggaagctctgagaaataaataataatgtaaacattctttatttgtgaaatgtagatc

SEQ ID NO: 202425 - DNA, 1000 bp, Homo Sapiens
tgccagcaaggatcaggccctgaaagaagattccacactggtctgatttgcaaaccaaagccccaattgattaatttactgaggaaaataagcacttcagggtgccaccaccagagagtctacgcccttctaggaacacaggtgcctgggaaaagtcattcataatcaggacaaacagcaagggattctttaaggaatatcttctatctgctttgagaggctacgtgacactaccgccacaataattatatattatacatgccaagtaggcgcagctcagtgctggaaacatattcttgaattcttagtcttggcctctcgtgtcttaagactttattcccaccatcttttgtttttgtgtttacattggatattgaaacatcaacatttttaatatcaaagaacatctttcactcaataaacacgtattgagttctcaatctaggctgaattctacaacagcacttagggactgcagtggagacaaagatggataagacacagggccaggacctagaaaactcacaatggtgaggggaagattacacaaatacacgtggctgtaccacagagggaaaattactttatataaatatccagaatgtgctgtagggattcaaaggatgagaaatggaatctgtttgacgagatggaaggaggctgattcatagaggcagcatttaagctcagacataaagaatagctataattgtagtgagcagaaatgttcaggtgagtcagtagcaaggaagtgaaggagagggaagagaggaggagggagagggaggtagcccgtgtggaagaaggggatggtgtgtaggcacacccgatgttctgttcaaatgcatgcctcatgcttgggctggaggtacagaggatgttcaggagaatcgtgggagtcagaacctgttgggcctacggtggacagccttgatgccaggagcttcattctagggacactgggcactcacagggttttgcccaagagaaggctgtgatc

SEQ ID NO: 202426 - DNA, 1000 bp, Homo Sapiens
cctcccacctcagcctcccaagtagctgggactacaggcatgtgccacgaggcctgaccaagtttttttattttttagagagatggggtctcactattttgtccaggctggaatgcagtagcatgatcatgcctcactgcagcctcaaactcctggccttaagtgatcctcctgccttagcctcctgagtaactggaattttagtataactttaaagaggcatataacgtttttttttggtcttatttccaagttttagttaatttttctttcctgttttcttgagacatggtcttggtctgtcacccaggttggagtacagtggcacaaactctgctcactgcaaccttcacctcccaggcttaagcaatcctcccacctcagcctgccgagtagctgggcctacaggtgcgtgccaccatgccccctgctaaagtttgtattttttgtagagatggagtctcgctatgttgcccaagctggtctcaaactcctgaacttgagcgatctggccacctcagcctctcaaagtgctgggattacaggcatgtgccaccacacctggccaataattttctttaacaaaataaatcacaattgagttcaagaactaaaagatgactagatcatctgaggtggaaaagagtccctggtaaaagtaattttaaatagttttgaagtagaattgtgaaattcagagtttggagaaaggaagagggtggtcacaagtagaaaagagaagacatggcacttacattcaaagaaagattgccctaccccacccctcaaaggcatgtgcagaagagggagtgagtacttttccagggtggatgatgaactaaagtgggtgggaagtgaaaacctttggaacagaagggagcagttcataggaagcttggaagcttgtgttaaagaatttgatttgattaagggccgggcacggtggcttatgcctataatcccagcactttgggaggctgaggcaggtggatcacctaag

SEQ ID NO: 202427 - DNA, 1000 bp, Homo Sapiens
tgcagggcttctgtgaatgtcacattgacagacattccttgctaggcagctggggaccagtttcttttgtaattccatccttctcatgggctgccagtctgtcttgttgtgacacactccttgaaggtgctagaaggacagcggatgtttggggggtttttttgtttgttttttgagacagagtttcgctcttgtcacccaggctggagtgcagtggtgcgatctcggctcactgcaacctccgcctcccaggttcaagcgattttcctgcctcagcctcctgagtagctgggattacaggcatgcaccaccacacctggctaattctgtattttttagtagagatgggatttctccatgttggtcaggctggtctcgaactcccaacctcaggtggtccgcccgccttggcctcccaaagtgctgggattacaggcatgagccaccgcgcccggactttgttttttgttttgttttttttgtttttttttttgagacggagtctcgctctgttgcccaggctggagtgcagtggcacgatcttggctcactgcaacctctgcctcctaggttcaagcgattctcctgcctcaacttcccaagtaactgggattacaggcacctgccaccacacttggataattttgtatttttagtagagattgggtttcaccatgttggccaggctggtctcgaactcctgacctcaagtgatccacctgtcttggcttcccaaaatcctgggattacaggtgtgagttaccacgcccagccaagagcaggttttttttatctagtgctatgcttggaccccagctttaagagcccagggttatgtacatggcatctgggactttggtggtggcttcactccttgtctgctcaacatttgttcatgtattcaacccacatttatcgagccatagaacattgagcctggctctgtgctgggcactggtgctcgggatacaacagtaagactcaaccctgccctcacacc

SEQ ID NO: 202428 - DNA, 1000 bp, Homo Sapiens
tacagccccagccctttttgatttagagtctagctggtgaggtcatttaccaaataatgatgcataatcattccataaatacaaatgatggtgttatgaagataaaaagagggtgctcagaaagaactaagggggtacaatttattttattttagaaattcttttagattcagaaagtacgtgtgcaggtttgttgcacgggtgtattgcatgatgctgaggtttgggcttccaacgatcccgtcgcccaagcagtgaatatagtacccaacaggtagtttttcaacttttgctctcctccatccccccttctggaatccttagtgtttattgctcacatctttgtgtccttgtggggatgcaatttagattgaggctcagggacagcttctgtgagaaagtgacctttaggctgagcagaaggaggtggcaggaatgtggagggaagacaatccaggtgacgggaacagctccgaggtggggaagagctcccagtgatggaagaggcagctttgtggccagagctggtcagcatgggagagagtgacacaagggcctgaaagaggacccgtgtggccatggtaagcccattggtgatgaagccaggggcaccaggtggacctggtaaaggaggacagatttcacattcacaagaatcagaatctactgaacgcttttaggcgggtggagacacgatcagcttcattcacttccttcccccatacagtatttacttttcactgaggtgtgatataatgtatccagaaaaaagtgcagaaatgtataacccagtgaattttatagaacattaccagcatcctaaaagcaccccttccactcattcccctagagtaaccactatcttgacttccaactatttgcctgtttttgtactttccatgtaaacgcggtcatccagcaggtgctgttttctatctgggtttttaactcaacgctatgtttatgatgttcatccgttcattacatgtagttgtagatc

SEQ ID NO: 202429 - DNA, 1000 bp, Homo Sapiens
aaatttattttataaagatagtctgcgatttatagccagacatggtaattgtttagttctaaagcagacaagagaaatagttaaaagattccccacacagctctgataatgagtccttttccttttaactttttttaaggagttgacttttcagcgaagggtcccagtgcttgaagttttctaggtttaaagttgttttttgttgttgttaagatatttatgtgcaattgagataaaatttccaaaaagatgttttaatatatgtaaaaaatgttggcttctcttccccttgctgatcgtataaaaggactaagaactctcacaaactagaactggttcctgagaaattcacatttgttgaattagtattgattttatttatcttcagattacatttgttacaggtgtgtgccttttctgcaactaccttttgaaaagatagcctaattaaaagtctttctatccccccttcagaatttacaactgagatgctaggaccaactgaagtgccatagcatgctttgcctagtttttctgttaaactctccaagcatggcctgtttattccttgtccttgttaatggaatggcacaatctgtacacttcctttcactggtaggatgggcacagatttactctgggatgagccaacctggtctagttggcagttttttttttttttttttttttaacagttcaatgttgtatgttttgtttttttcactcagattctctcccagcctaacctggtccctccattggtaagagccccacatactaacaccttcccagcgcctgttcagaggccaccaatggcactggccagtcagatgcctcctccgctgaccacaggcctcatgagccatgctcgtttgccacatgtagccaggggtccttgtggatcactatctggagtcagaggtaatcaggcccaggctgcgttgaaggctgaacaagacatgaaggttagtacagtgttaacagccaacagatcaagaat

SEQ ID NO: 202430 - DNA, 1000 bp, Homo Sapiens
agaggctgaggcaggtggattgcttgagctcaggagtttgagaccagcctggccaaattagtgagaccccccccccccaccacccatctctaaaaaagaaaaacaaaaaaagaaaataattagctgggcatggtggtgtgtacctgtaatcccagctactcaggaggctgaggtgggaggatagcttgagcctgggaagtcaaggccacagtgagccaagatcaagccaccacactccagcctgggtgacagagcaagactctgtttcaaaacaaacaaaaaaccaaagagaggcagagaagacgagcagagggcaatgtgaccatggaggaagagattggagtgatgaagccacaagccaaggaatcagaataataataagtgtcctgtgtgccacaccaatgagctctgtggccttggacaagtcaatggggctctctggccttcattttctcttgcatgagggtcacatgggcaaaggacttctgaactacttcatcccaaaggggttttatcaccatgatctttgcggggagacgggaggaggttgggcccttggtttgtcctggacccatcatctgtcaggtgggcttctctgtgctgccagagagcagggcctcccctctaacaccccacgtgatggtggaatgtgctgtgtgcctgtctgcctcccccatggacactggacagtgacaggtcgtggtgggtgttcagcgtcctatgaacacgagttaaggaagagcctccagtcacctgcctgcaacccaggccagctccacatctccctccctgctgtcagcatcagtcagcagccagggtgtcggcgtctgtcatttaaccatcacaggcaggccttggcgggggcgggggactttcatgtcaggcattctggctgcaggaactcgcttggcagctgtcagagggcggtaacctcaggggagcttggcgaccgaccctccctccaactcccgggggctgtttctctgcacccttggggatc

SEQ ID NO: 202431 - DNA, 1000 bp, Homo Sapiens
tcttcacacagagcatttcatctcaaaagctttctgctctttgttttaattctccggtggccatcaattcacttctcagaagactaatatttaaaggaccacgcgaattggaatgctgctattgaaaaccttataaggaattgattaaactgtgtcttcaaggtttaagtacctaaaaatacaaacttggcatgcttgttccattagcaaaccatcccaacacatatttttatttgtatttattattagtatatatttgatattaaacaagatgcaataagccataatttcagttatttatttaaatgttaacttagtcacaactttactttgttcatttgaatctagcatttctaggccagtggtttacaattggagatttgcatcacttacctatggagttttattaatatgcaaatattttaggacctactccaagcttaccaaatctccgtttgacattattaatatattttttatgtttttatttttatttttttagagacagggtctcactctgtcacccaggctagagtgcagtagcatgatcatacctcattgtaacctcaaactcctgggctcaagcaatcctcccatctcagcctcccaaagtgctggcattacaggtgtgagccactgcaccagcctttattgatatattcttggcataatcttatcatgtggtaatatctttgtggtatatcatgttgtatcttaagacttttttctttgtaaaaattatgttcatccactttaataaattaaatgcaatgtctactcttgtctttgaaaatataattaatcagtatgttcataactattttgtctaaaattgattttggattggctttattgtcttcttttacaggccacagaaaaaccaaaactccttattagtgtcattatttgtattatgaactctcatcagatatttcactttttttttttcttgaggtgaagtcttgctctgtcacctaggctggagtgcagtgtggtgatc

SEQ ID NO: 202432 - DNA, 1000 bp, Homo Sapiens
tgtggctgtgaacctgggcatccctgtgctcttgcgggccctggaagccctgtcctccacaggctccaaagtgcctgctcccactgcttggcatctccctggtcctggcatccactctgattttacagcaaagttgaggctgagcctgggtgcagtcacgacctgaccaggtgtgctcagggcagcgctgacatgccagcccctgccacctttcccccctccagactttgggcactgaagagcatgggaaggaggctggagccgggttgagggtggctcagtgtgggccttcaggcccagcacaaacagcctgggcaccatggaggacataattgatggtgacaggaggcatacaggctcctgggtggaaaggggtgggtcccctttgaagccccaccctccagccagggatggcctaacacatgggggctgggctgtcagttctggctgcaatccacagcctggccttaagtgagaacttctggtgcttcttccagccacccgtggccaccgtggaccaatcagcacgcacttcctcccttctgagctcataaaaacctcagactcagtcagattcaaacagacatggggaggacctaactgcggaaacgagctacccactgcaggtctcctctctgctgacagctggacactcatggatacaacctgtctgtggaaagaagccacccactttgggtctcctgagagctgttctgtcactcaatgaagctcctctccaccttgctcaccctccagttgtccacatacctcattcttcctggacatggaccaagcatgggccaaaaacttgggacctgccaaatggaaggactgaaaaagctttaacacaaacagggttgaaacacgcctctccatctgccacattgcaggcaatgaaaagaagagctgtagcccttaagtgagcctagatctagagactccctgagccagcactatgacaccctctttggggctctgtggctcctggcatctccaagct

SEQ ID NO: 202433 - DNA, 1000 bp, Homo Sapiens
gaaactgccagtcttcctactccatcactgcattgctagtgaaatgacttttaatgtgcaccgagtgtcagcagtcttctaggtgccctggaggaagaagacctctgcctgggcattcattctaaattaagcataaaagttagtgctcaattgtgaagatgtgcaaattataatttcaaaataccttaccatcttaaagctacgttccaacagctgggtattaatactacccagatacttgtttacttcagttatcttacaagctgtctacaatcagggtggatggtgttttagaatagaaaaagagcttatagctgtagatgatcaaataatcagtggccattaaaacacacaggggagttgcgttttggaattttaaaatgtttgaatcaaagggaacataaaaatagtaatagggaaatacagtctgttatggttcgcagactatagatgtgcctacattttgaaaaatcggccatttaaaatccaaatttaataaaacaaatggggtgattagttgcatttctgaagggttttgttgagggagatttgttaaaatatgtattgcatctgctgcttttaaatgttggctttaatagattatgaactctctggtgagatgaatagcaaggaaacaaaggtcaagtatttaatgtcaattgaaaaatgaagatgaaccatctctgcaattataatgtgttaatggggaaaaaattcaatttacaattagcaaagcactgcattcgaagaagcacttgtgttttgaaggccatacaagggaatcctggcatgtgtaatagcaaaaacataacatgtttaaacagctcatatagttagttaagccacgttttccaagacatgccataagtaaaagggtttatgaaaaaaaaaagagagggagagggtaagtggggtgggaaggcaagaagtggggagagataatgcttagaaaataatttggttgatcacagtaatgggtatatgagggaggattgggatc

SEQ ID NO: 202434 - DNA, 1000 bp, Homo Sapiens
cactttcacttaatatttaattgttagccatcactagcaccttttacattaaggtatctggggtcagggctgaggtaaataaaagaaagaaagcattcactgaaaacatctcactccctgagtctgtgctggccacaatatttaagctgatgattatagtcaccttcttccaccaccttttttcgttgttgtttctcttacatttttctagtacctcaggaagatggggatgctgaccaaactttcatttagtgttatctgagtctccagagatcttgctttattagattgcctcagttttcaattaaccaagattgttgcacaaaaaagtaataggaggcaccttagcgaataccctggattctacatgtgaccttattgtgtggcagaaatccaatttccaatgataattgagatcgaccttgttggccagtatagggactggtcctctttctgttgccttgtcaacataatgagtccaaaaagtccagagggcaatctcagtgcacaaatcatcagaaccatgactgtctttggtggtggcactgctcctgaggtaggagacctccaaacctaccaatcctaaggctatcagacaagaagcaaatgttctttgaatgagttattagtcataataacgtgagcgtccactctcacctccacctgaactgatacattctggctatgtgttttagctactgtgtttaagtatttatcacatcctataggacagtaccccaaccacccagtgtgctccaagatggtaccataaataagcctttaataactatattaggccgttcttgcattgttataaagaaatacctgagactggataatttataagaaaagaggtttaattggctcatggttctgcaggctgtacaggaaacatagatccagcatctgcttctggagaggcctcagggggcttttactcgtggtggaagggaaagtgggagcaggcacgaggcgaaggcaaaagtaggaacgagagaga

SEQ ID NO: 202435 - DNA, 1000 bp, Homo Sapiens
atgtagccctgaggtttccttcccaggacagctgcagggtagagatcattttaagtgcttgtggagttgacatccctattgactctttcccagctgatatcagagacttagacccagcactccttggattagctctgcagagtgtcttggttgagagaataacctcatagtaccaacatgacatgtgacttggaaagagactagaggccacacttgataaatcatggggcacagatatgttcccacccaacaaatgtgataagtgattgtgcagccagagccagccttccttcaatcaaggtttccaggcagagcaaataccctagagattctctgtgatataggaaatttggatcaaggaagctaaaagaattacagggatgtttttaatcccactatggactcagtctcctggaaataggtctgtccactcctggtcattggtggatgttaaacccatattcctttcaactgctgcctgctagggaaaactgctcctcattatcatcactattattgctcaccactgtatcccctctacttggcaagtggttgtcaagttctagttgttcaataaatgtgttaataatgcttactcctcagcttggctttttctagactgtggtgtctactcagcacagtagtctgcacacccactgtactcaccacagtctcagtttacctcactgcagcattttcacaagacccttattggatgcattttctgttgttgccatctgaattaccagaaatgtatagacatttttttttttttgagattggattgtgccactgtactcccaggctggagtacagtggcacgatctcagctcactgcaacctccacctcccaggttgaagtgattctcctgcctcagccttccgagtagctgggactacaggtgcgtgccaccacgcctggctaattttttgtgttttcagtgcagacgaggtttcaccatgttgtccaggatggtctcgatctactgaccttgtgatc

SEQ ID NO: 202436 - DNA, 1000 bp, Homo Sapiens
aaatgcagattttcttacttaaaaatgggatactgccataattaataaattctgaaccatgtgactttgggacttgacagcaagtggaaactgaaaagaccttgaggagaatatgagtaaaaacacctgaagacaactgctgcctgtcactaagtcccaaagtcagtgatgcttaatggagagtgtggaaaatgttactagaagctggaagaaaccggacttttgttatctagagacagaaagtttagcaacactgttgtgaaaatgtggaaagtaggccggacgcggtggctcacacctgtaatcccagcacttttggaggcctaggtgggtggatcacctaaggtcaggagtttgagaccagcctggttaacatggtgaaaccccgtctctactaaaaatacaaaattagctgggtgtggtgtcacatgcctgtaatcccagctactcaggaggctgaggcaggagaatcgcttgaacctgatgggggtgaggagcgaggttgcagtgagccaagatcacaccattgcactccagcctgggcaacaagagtgaaactctgtctcaaaaaaagaaaagaaaagaaagaaaatgtggaaagtagaaaatatacctaatgaatttgaaagaaagaaagagtggaaagtagaaaatatacctaatgaattaaagaaagaaagaaagaaagaaaaaagaaaagaaagaaagaaagaaagaaagaaagaaagaaagaaagaaagaaagaaagaaagaaagaaagaaaaagaaaaaagaaagaaagaggctgggagctgtggctcacgcctgtagtcccagcactttgggaggtcaaagtgggcagatcacgaggtcaggagatcgagaccatcctggctaacatggtgaaaccccgtctgtactaaaaatacaaaaaaaaattagcctggcatggtggcgggcacctgtagtccccgctacttgggaggctgaggcaggagaatggcatgaacccgggaggtga

SEQ ID NO: 202437 - DNA, 1000 bp, Homo Sapiens
agggggaaaaaaaggatagattacaatataacacggagagtgaggctaagctgaaattgtttcagttgtgtgtgtgcacacacacaggtagccacaaatactgggtctcaattcgaaagttcttattgcaaataaaagtcaaaattaacaacaacacaattccctcaggtacaaggtacagattataaaagtctttataaagaaagaaaatgggaagaaaaaccatgtttgaagaggaagtaaaggtggtgactaaattaagttaaaaaaatcaagttttgaaattgtggtatggtcctcattaaagaaaaaaaaagaaattataaacacatacgaatacacagaaaaactctaaaagcatctcctccagcaagggatttaggcaggcttgagtgcaacttattactttattcctttcagggctgttgaaattctttgacaaagggcagggaatgctttcagagtttaaaacaacaacaacaaaagacattcttttcttttttttttttttaataacaaaaccacctctgacccgtactttgctccaaacaaatattaactcaaaaagcagttggcgggagcggtggctcacacttgcaatcccagcactgtgagaggccgaggcaggaggatcacacttgaactcaggagtttgcaaagtgcctggaaaataaagcaaggctacaaaactaccaaaaaaaaaaaaaaacacaaaaatcagccaggcgtggtggtgcacgcctgtagtaccagctacttgggaggccaagacaggagaactgcttgaacccagaaggcggaggcggagattgcagtgaacctccagcctggttcaaagactgtcttttaaaaaaaagaaaaagaagaagaaaaaggaggggggtcatagtgctcaccttggcagctcatatattaaaactggaacattacacagaagataacacggcccccgtataaagatgacatgcaaattcgtgaagcttttctttttaaagtgatc

SEQ ID NO: 202438 - DNA, 1000 bp, Homo Sapiens
ggagcaaacgtgtgaaccttgatatgctaggaagaggccatattgtattagctttccagtagcagtcccaaaggcaggaaaaactgaaggatgtatatttagatctcttgaaatcgggctacttctactaggtattctatagccaagcaaactgtaggtgtacctagcaatattcttattgtcatcaggattaacttgtgattcaagattttattttattattattattattattttattttttaatttatttttttgagacggagtctcactctgtcgcccaggctggagtgcagtggtgcaatctcggctcactgcaagctccgcctcctgggttcatgccattctcctgcctcagtctcccaagtagctgggactacaggcgcccgccaccacgcccagctaattttttgtatttttagtagagacggggtttcatcgtattagccaggatggtctcgatctcctgacctcgtgatccacccacctcagcctcccaaagtgctgggattacaggcgtgaaccaccacacctggccccaacttaagattttaattgactctctggagcaggcaggtgtctttgatttgatggggctgtttaagtctgcgtcactattgtgctgccagtcgcccaccctggggagtggaacttgcctgcagtagcaccgttctggtgttgaagacaggaagcagggtgagggaaccctgtgggtggaggggatttcccagacaaggatcagaaagacaaagcccatgatgtcactggaatcgattgtgctgctgagtggaagatttctataaactataggtttgctccaactctgtgcctgccccccaaccccaacacctaattacctgctttatccaggagtttgcacaacatccacgcagtcactgaagtcagctcactgggcttggctatcacagtgttccctgcagccatcgctggagctatcttccaggtcagcaagtagagtggcaaattccaggggctgatc

SEQ ID NO: 202439 - DNA, 1000 bp, Homo Sapiens
ttttaaagcattgaaaaatggtcttccttgcttatattacccacaccttctttgttggcattaagatgcaaactttgttttaaacagttgagtaaatcaaagatgggactgttaagttatttgtgttatttacctgctttttgaaaatgtaaaaataaaactctaggtttaattagtagtatgctatttagtaatgaagtaaagctagaggcttcgaacaaatcttgtgtaatttcctcttgaatgagagagaaaatttaaagtaagcaaacaaataagttgtgtgtcaccactcattcagtcatttaacaagtatttccagagtacttattctgtgccaggaaatgttgtaggtgccctcaacaacttagagtctagcctgagacacaagtaagtaggtaattattatagaatggtatgatctttggaggactgggtattggctggctcatgggagtacaagataggtacccagtgatgaagtcaggaaaggtttcttatggtgatatgatgacgtctatgctgattataaggtcagtgtagaataaactttgtgcttttaaatttgcatagcactgtattagagagttcatcttcaaaataatcgaaaaggctgagtgtggtgacccatggctgtaatcccagcactttgggaggccgaggtgggcagattgcttgagctaggagttcgagaccaggctggccaacatggtgaaaccccgtctctactaaaaatacaaaaattagccaggagtgatggtgcgcacctgtaatgccagctacttgggaggctgaggcaggaggatcacttgaacccaggaggtggaggttgaagtaagccgaggtcatgccactgcactccagcctgggcaacagagtgagactccatctcaaaaaaaaaaaaaatgatcaaagaaaggtgaattttcatctaccctatttctgctgaggaaaatggactattttcaaatatttttaataagggtcaaaatgagggatc

SEQ ID NO: 202440 - DNA, 1000 bp, Homo Sapiens
cagggggtgccggtggggaggagatgaggacacggagaagagctacagagagacgcatgccagtgacagtgaccagaactgacatgcaggacagacatgcagaccaagagcgggacctaccgtaagggccgtatgttggcactgcccgcggccaaaccccgggcaaaagcagggcaaggggggcggggagagaagccaaagaaatagagaagacaagagacagctgagtgaacaatgtgtgcccaccaccgaggcccaccagcacgacacaccacacaccctgtccccacccccccaggccccacagggcacccaggaagctccaggtgcctcctggggcctggcaggggggatatccacctagggatgactcctcccctggtgttcacgccaacaggaaacatccgtctggcgactgagttccgcctccacgtctaggtcaggacgtcccatccccacttcttccccggctagcctggggccacatccacacctcacattttacaaacctcacaacacttcccagaccaggacatggaggctcagagggaggggttacaatcgcacagctgagccagctctgcacctaagcctatcctgagggctgagggtctgggcctgggttagagggtagcagggggctcaggaccagtggggaggcagaagagggcaagcagcttccccggccgggcgtgggtatgtctagagggacagctcaggccaggcagcagagcccctctgctgagccccagtggtgcaggaatggttctctgccatgggcccccttgctccttggggtggccccaggccccaggcccaaggatgatgttcccacgggcacagggtataccacaccaggtccaagggacactgccctcaatgctgggtgtgtgtttgctagatccttccaactgggccaccaggtggcaacccctggcctttgtgcacctgctctttgggcacagagtaggtcttcccccaccagggaaggcacagagga

SEQ ID NO: 202441 - DNA, 1000 bp, Homo Sapiens
gtcaccgcagggcctgaggctgcctctggcatcgctcagctcagtgtcttccagggcagttcccaagttctgcaggccccaggtgcctggaacaaaaaccacacccccctttcatgacgggcacattccacagctgttggcggcaattctgattcacaatatttttatgacagggctttttcttccctacgttattttgcagggcctgaatccagtacctgtcagaatgagattaccctccaggttccaaatccctcagaattaagagccaagccaccttcttcttcctccacctgcaccgactcggccacccgggacatcagtgagggtggggagtcccccgttgttcagtccgatgaggaggaagttcaggtggacactgccctggccacatcacacactgacagagaggccactccggatggtggtgaggacagcgactcttaaattgggacatgggcgttgtctggccacactggaatccagttttggctgtatgcggaattccacctggaaagccaggttgttttatagaggttcttgatttttacataattgccaataatgtgtgagaaacttaaagaacagctaacaataaagtgtgaggacggtaaactgagagcgcacagagctagtttgtacacaaaggcttctaaatacacatgtccttaaggccactgtaactcagggttccttagagtgaagggacgtgcaggtcattgagggccaccccgggaggttgcatgtgggcagggcctgggccaggtggtggaggctccacagggctgagttctgcatgaggcagggaatgacctaccgtttcacaagtggaaaatgccacttcctgtagaagagctgactgtagccaaaccactctggcaaagcttggggttttccgttgatcattacagaagtaagtaagtatcattagtccagtagccagccagtccaacccctactttttcacactcctgggcccaaaagaacagaaacaagccca

SEQ ID NO: 202442 - DNA, 1000 bp, Homo Sapiens
ccatattcttatacctaagactattactagagccactttcattctggactcctattccattctacattgaacagctcttatatcatattctacatctcatcactcccctgcttaaaagtcctccaatagcttaaaatccaaattgttttccttggcctacaaggccttagataatttggttctttctcatctctccaaactcatctcgggccacacttcctcctcagtcactacacctaagacatgcttatcttcttttgacttctcaaaacatacctattgtggactgaatgtttacatccccctataattcatgttgaaatcctaacctccaacatgatagataaagtggtggggcatttgggagctgattaggtcataagggcggagtcctcataaatggaattactgtccttagaaaacagaccccagagaaagctctgttttagtctgtgaggacacaaagagaagatagctatgaatcaggaagagggccctcatcagacactgaattgcaggcaccttcctcttggactctctagccgctagattgtgaaaataatcagacgtcttccctaatcaccttaatgtaaacaggtccaattctaattggtcaatattctcagcactttattgctttcaaaatagtataaacgaagctttgtgtactggcaatatcataaccaatgaggttcatccaagacatgataattgctaatggcaaacagcataaaaccaactgccaaaaaaatgctttgcatcccacaagaactagatatagacaagtgccatttttgctacacagaatgctttaaaaaaaaaaatggtgggaaatagagaagggtatccttgaagaaaaacctgtgtttatctacacttttaaaagctatgcataggattagttctctggaagtgcctagaatattcccactttagtgcctttgctcttgctgttccctctgcctaggaagtttttaatcccagataaatatgcatgatc

SEQ ID NO: 202443 - DNA, 1000 bp, Homo Sapiens
ttagaggatgagcagaagccggcaaagacagctgagaggcgtggcgagagaaggaggaggagaaccaagagagaaggatgccccagaaagtgagggaagagagtgctttaggaaggggatgggacccagtactgttgatgggtctcagaagttaagagcagattacccgtggaggttatcagttgtcacttccacgagagcagtcttggtggctggatggggtcagaggcctgattgaagtcaggggagaatagaaagaagatggagatggtatggccatctcagtgatttttcctgtggagcaaagaagtgggtggtagttgaaggatgcagtggggtcggggaacatgtcattttcccaaggaaaatactggatgtttctgtgcattgggaatggtccaggaaaggggaaaattatggtgcaggcaagagggaattgttgctagggggctattgaggagtgacttggaaagcaggtttctctagggaggaggaaggggcaggaagtggcagtgaggagggcagacacctagctcactgcctgtccaagtggtacaggattcacaggggagagccctggtcctggagactaaatttcaaacctagccggaaggtgagaggatcatcagagaagagggtgaggacatagggaggtttgctgttggtttttggagatgggtaggagatgagatgggattaaaggcgcacagacctgaatggggtgagggatgacctgagagtgttgcacgtcttgtgcagcaagacgtaaccaggatggcgggcacattggaattgggtcttgacagggatggttctaggccagttgaggagttgggcgaggcagtgaaggtcataggggagcatcctgacatccaggctgcatcatcctcctatgcaggcgctttgagccccggggagaggcacggtagccagagttctgggacctctccttcgagatgcctgggaagaagtcaaggagggagagatattgagccagatc

SEQ ID NO: 202444 - DNA, 1000 bp, Homo Sapiens
ttcttaaagaactgctcttgatctgcgaacccctctgccctctttaagccccaggggcaccgccatctctaggaatggaaattcccagccaatggctcctgcaccagagacagtgggcccttcccttcctcacagacagtgcttcctcaggatcatggcccttccagggtgagcttcccgggtaactggacaggggctgaaagtagcatccttaggctatcccattgatggtcttggttaaaacaagcacagttcaaataccttcgtgaccgctgtcaactgcaaatggtatggccttgggtcagatacttggcctcattgagcttcacttccaccgtctgtaaaggagcaatgcctctgcagtacctaccttcctcaccgggctgttactggtaggaaaagcgtgactgcagtgcatggcacccaggaagctgctcagtcaacagtaacggcggctgctgctgtaggggtgggcatgggaggggctgttcctctcatcactagttttattcagtggttcagatggttcaaatgcagcctcctctatgaggttggaccccgttcctctgcacagaactttccctcctcccttggtctcctggaacactgcgtttgtgcctgtctcacagcgcctgctactttctctgaggcagtggtgtcacttatacttgttacacttttcagaggcagggtgctgactggccagaacgtaggaaaggccaggtcagagactttctgtttaaataaaatgccacgctagcgggtttcgggtaactgaagaaagtgcattccgcggtctccatgtggtcaggacttggctctgtgagtctgcagccttgttcagccctccctgcagctgttactgtatccctgtcttcctactgaggccatgcttgggccattgtggcacctatacatctttaatacacgccccaattaatgagttaagtccagataaagtgggtctgaggagttcacagattggagtgccacagggatc

SEQ ID NO: 202445 - DNA, 1000 bp, Homo Sapiens
tgcagatttggacttggctggtctccacaatggtgtaagacaattcattataataaatctctttctgtatatctactcatcctgttggttctgtttctttgaaaaaccctgactaatatggggggccaaggagagaaatgtttttatgtaattgtctatgaaaaacaaaaatattcttgaatacttcagaattttcttttgaaagggaggcaattaataatgttagtaagcttgcgtaccaggataattaaatcaaaacgcaaggtttttggtaaatgaaaactcatttcctgtaatcatatgaagtatgagaaatatttattgacatcatttatatctaaatactggtgatattaggtccaaatataaccccagaccttctcagcagcacttacttgattctcttagaattagagccatgactaacagctgaaccttataactttcgtgttatttctttgaacattatttcagaatgagcaagactattaaaactccaaacttagtctttgtttattacataaaattgtcctgacattatttgaagtgatacataatttgaaatatagtttgaccaaacatcaatggtttctctccgtaaaggttacccctttctttctgagcaatgataaaggaaagagcaaggaattttgatgccagacatacctcagttcaaatcttgattgtattacttattagctatctatctatggacaaggtattatctgcactcctcacttgaaaaatgaaacaaacaatgacttccttttgagagttgggaagattaaatgaaataaattgtgtgaaagtgtccatgagagagtgcaaggcacatacaatatgttcttgacacatctaatttcccattcttttttatagttcatagttacaattttatagttttataattcatgtttctgtaggtgttacagaatctagaatgttactagttgctaaaagcttcaggatcaatatttttatatatcaatatatcaagatc

SEQ ID NO: 202446 - DNA, 1000 bp, Homo Sapiens
gtatcataacaacttgatattgcaggccaacagctcccctttgttttaatttatgtgtaagattcatggaagcagtcctttcctaaattatttaagtactttgccttctgacacaacgtccaaggattattagccttctgcacagatcttgtgaaaaaaagtagcatcaagcagtctaggagttggccctttaggaagacaaactaatctaaaccataaagtaagaaaagctctgattctagaaggaatacatggaaaaacaaaagaacacattattaagaaagagcagcaggtagagtactatttttgaaaacataaatcaaattatgttaatgtttttctcaaactctcccatggtttcccatcacatttaataaaaaatttaaataccttatcatgtctataaaattcaactcggtctgttccccttttacctcactgactttaccttggcagcttttgctcctttttcactacacttagttcatcttgattgcttcatttattaaacacctcgaactctttgttaactttcagtttcaggtcaaatattacttatctaaagattttctttgattgtctaattttgcgtcctccctcccgttgttcatgatcttatcacctatttacttctttcgtaacattttctcacagtctgtaattaccagtttttttattcattgtcttccagtagctagtggtcattgccttttttcctctccactccacttcctttaaaaatgatgtttcttctgggtagcaaaataagatgtatctattatcacagtgtgttgggtgagtcagtagtccttgaatatggatttaaaatttactgcagaaaaggccacataagtcatttcattcctgacttctacttttgtggttagcttgctttagagcaatggagcatagttatgtgaatagtagtaaaaattaacctcttttacataccctgccacatcacaacctactttacattcaaagtaattattgatagatc

SEQ ID NO: 202447 - DNA, 1000 bp, Homo Sapiens
taatgttaattccaaatgaagagtatttggtacttctaatattgctacctactacactctgtaattttcaaaatatcatctaaaaatggttttacaaagaatttttaacaactaaatttgcaaaaataatgcaagctttttaagagcttagaaaaaaggcaaaggagaggtaataagtgctattattttgcttggagcccaggggaatggaaacagggcttgcagttgattattttctgcttcaagtctattttctgaattttacacagtgtccacattgtgcatgcaattcttctgcaatcagggaaacgaaaaaaataagaaaaagaaacaaaaaatctcctcaagaagtaaagttcaggaatgacctgtcaggaaaaattacaaagattaggtcaaatggcagactgagcactaagcactagcgcatttctcttgtcctaccaaaaatcctctccaatgacaagaaaggcaggtttttgtatataaagaataactccgtaagggcactgggaaaaggaaatcttgaaagatggaaagcagatgaggcagggccgctgaggggttgaaggtggaggtaggggtgaggagtctgggacggcgggtcgggggacataaaatgaaaacgttgaacctagcaggagagggagagggggctttggacctggtacctgtggatttgggagaaggtgcggttgggcgtggggggcaggagcccaggagcatctctagggcccagggcggtggtccaggattcactggggtgggggtgctgcgcggcgtttggcaggaagcagaggcctccctcctaccaggaagctaagctaggaaaagagcgaggagattgcaacagcagcaacggctcctggaagtccagtgtagcagaagggccgccaccgacaggaaggcagagggctaacaagcctagtgctggggatgctgctgccttccctttcgcctgcctcacaacccttctagacgttttccacgcctacagatc

SEQ ID NO: 202448 - DNA, 1000 bp, Homo Sapiens
gctacaaagctactagaaagaaacataggtagtgtgcttcaggacattttcccaacaaatagaacaaacagcaggtcaggaaaacattttatcaataagacctcaaaggcacaggcaacaagagaaaaaataaatcggattgtatcaaactaaaacgtctctgcatagcaaagcaaacaacagagttaaaggtcaacctaaagaatgggaaaaatatctgtgaactgctcacccaacagcagattaagatccagaatatttttaaaaactgcaacatctcaacagaaaaaaaatcaaatttttaaagaaataagtaacctgaaaagatatttctcaaagaagacaaaaaaatggccaacaggtatgctgacattatactgattgggcaaaagctggaagcattccccttgaaacccagagcaacacaagaatgccccctcccaccactcctattcaacatagtgctggaagtcctggccagagcaatcaggaaagagaaagaaataaaaaccatccaagtaggaagagagaaagtcaaactatctctgtttgcagatgatatggttctatacctaaagaaccccatagtctctgcccaaaagctcctttatctgataaataatgtaagcagaatacaagatacaaaagcagtgtacaaaaatcaataacatttctatacaaaaacaacatccaagctgagagccaaatcaggaacacaatcccattcacattaaccacaaaaaaaacctaagaatacagctaacaagaggggtgaaatatctctacaatgagaattacaaaacacagctgtaggaaatcaaagatgacacaaataaatggaaaaacattctatgttcatggataggaagaatccatattgtcaaaatggccacctgcccaaagcaatccacagattcaatgctattctgatcaaacctatgacattcttcacagaattagaaaaatctgtttaaacatttgtatggaaccaaaaatgatc

SEQ ID NO: 202449 - DNA, 1000 bp, Homo Sapiens
aaaaagtctatgcatattaatacatgatgtggttggcattataactacatgaaaaaattggcttcccttgtgataaaagcgaaagttctttttctcagtatatctaaaatgaatgaaagattcttagctgtatgtatgtttaaaatataatttataattattagaagaaaacataagggatatctttgtaacctcatggtaggaaagaagctcttaaacgtgacacaacaaagcacatattagaaaataaaatattgatggagttgactatatcaaaatgttaaaataattaaaaaacagaaagttataagacaagccgaacttggagaagttatttgtgacattcgctttaaaaatttatttagcaattgcaatataaggaaaatcaaattcatgagacacaatagaaaatggccatcttgcagaagaggaaattggaatatctaagaaaaaaaaaacacaaaatatgttgaacatcactagcggtctgaggaaaagaaaccaacacaataatctatcagatttgaacctgcaccccacaagtgtttatgagaaggtggttaaacattgctagtataagtaaagaagagcaatgtaataatagacccccaatgctaaaacaatttacattttaaatagaggcaactactatcaagtaaacaaaattaggtacttgattgatttaataaatttctgtttgtgattgtttcatgttagaaaaaaagagaaattagactgttcaggaatacaaagggatcagctcaacctacagttttccttttattaaaaaaaaatatctggaaacatccctgtctgacagctttgaagagagtagtggttctcccagcacggagtgggagatctgagaatggacagactgcctcctcaagtgggtccctggcccccaagtagcctatctgggaagcacctcccagtaggggctgactgatacctcatacagctgggtgccccccgagacgaagcttctagaggaaggatc

SEQ ID NO: 202450 - DNA, 1000 bp, Homo Sapiens
tgtgtactatgctcactacctgggtgcaatatactcatgtaacaaacctacacatgtatcttctgtatctaaaataaaagtcaaaattaaaaaaaaagaagactgaggtgggaggaccacttgagcccagaagtttgaggttacaatgagctatgatcacaccactgcactccagcctgtgtgacagagcaagaacctgtctcttaaaaaaagagagaaaaaaagacattattaagaaaatgacgaggaaaaaactgcagacacatatttgataaagaacttgtatctaggatatataaatatataactccataataagataattcaattttaaaatgggcaaaagattagaatagacatttcaccaaaagaaattatgaatgactaataagcacacgaaaagatggtcaacattatagatcattcaggaaatgcagattaaaaccataatgaaataccatttcatgcccactagaatggcaattatcagaaatacagatactaacatatgttggagagcatgtggcaaacctaaccctcatacgctgctggtgggaatgtataattgtgcagccactttggaaaacagtttgcagtttcttaaaaagttaaaaacaaacttaccatacaactcagcaatttacactctaccctagactagaattgaaaacagatgtccacacaaagatttgcagacaaatgttcatactagcattattcataacagcaaaaaaatgaaaacaactcaaatgtccatcaactgatgaatggataaacaaaatgtggtctatccatacagtagaaaaaggaacgaacttgatacatgctacaacatggatgaacctaaaagatattacactaagcatacatgctcagtgaaagccagtcacaaaaatgccacatattgtataattccatttctatgaagtgtctaggacaggtatatctacagagatggaaagtagattcatggtggccaggggctaaggcatgaaggatc

SEQ ID NO: 202451 - DNA, 1000 bp, Homo Sapiens
ttgcatgaatctccaggaagtttgtgtactgcaatagagcaggcatggataaaaccctttctgacatctaatcagcctgatgagacatcgtccgtgattcctttcttttgttattctcatcccagtgggtcccttgtctcctcttttcctcattcacttgttgctcctgttggagatttcacgggcatttgcacagccagaataactgatgagtattggtgtggtattgctttttctattgattgctagaggaaaatcccatttcactcattatctatttaatgtcagaatggcttctgtaatagaaactgagcaattatctatgggatattaaagttgcatggcagcatttgctaaattagagttttaatttgcttttgagagaatgaatgggacagtcagtctgtttttgagagctgcctggcctcttatgcattggagccaggggcagtgactgcctgagtgtagagcctgggggctttggaaccttacagcactctaccccaccaccccccagagaggttttggccttcttctcttccatgtcccacacatacagcccagctgtgagtgtggatgcagagtcacagtgagcagtcagtcattaaccaaatcaacctcccttcttctttgctcccccttttctttactctcaaacttgtgggaaacaattttttctcaggtcagaggtgtcatttgttgctgacaacagtcttgtggcatcccacgtcttcgccaggctgtgggaggcagctgggctgggctgagggattaagctctgcttgaatcagaatacatccgatttacagaatttgaaggggtggtttccagaggggctgccttggttgggggtggctgctgctcctcctctttggtaacctcattttgattctcttcccttctttctcttttccctcactatgaaaagaactgattggaatttttttttgtagatgaggccgtgtaaaatgggagacagtgctttggcctgtgacagatc

SEQ ID NO: 202452 - DNA, 1000 bp, Homo Sapiens
agttttattatattctctatgtgctttgaatgataggaactttaggttaactgataacttatggatacagcctcctaccatggctaaaattcctttcataactagcaaggtagtctcttcaattattataaagttctgtgacttagaaaatacttcctaattaatgagccccaaaatcttcctattgatcctattgacataggatcaaatgtccaccatttgatcccatgtcatatctctgtggaaacacagaaataagtctccctttatgatgtagcttttctggcacatgaaaactactgttatatctgccttctcttctcagattaaacatctttatttctttaacacattgctaattcattcattcagcgaatatttattgagcattttttttgaggcggagtctcgctctgtcacccaggctggagtgcaatggtgtgatctcagctcactgtgacctccgcctcccgggtttgagcaattctcctgcctcagcctccagagtagctgggactactggtgtgtgccaccatgcccggctaatttttgtacttttagtaggctctgggtttcaccacattggccaggctggtttcgaactgctgacctcaggcgatccacccacttcggcctcccaaagtgctgggattacaggcatgagccaccatgcccggcctattgagcgtcttttgtgtgcaagtcattgtttaggtatttggaatctggtgaacaggaatgataaactcttttctcatagagcttacatccaaatagagataaaaagtattctatattaagatgccagcaagtaaaaaaaaataagataatttcagattatgattaatgccatgaaaagaatagaacaggacatcaggatggagaagtgatagagatgggaggcagcttctccatgaactttggtttacaaatatctcatcattttggttgccttccaccacaacaacatgcatggacttggcacttttaacatatgatc

SEQ ID NO: 202453 - DNA, 1000 bp, Homo Sapiens
aaaggctgggtgcggtggctcatgcctgtaatcgcagcactttgggaggccgaggcgggcagatcacctggggtcaggagttcaagactagcctggtcaacatggtgaaaccccctcactacaaaaaatacaaaaattagctgggcgtggcggcacatgcctgtaatcatagctacctgggagtcggaggcaggagaattgcttgaacccaggaggcagaggttgcagtgagcccagactgcgccattgcactccagcctgggcaacaagaatgaaactccatctccagaaaaaaacaaaaaacaaaaaaaatatatatatatacacacacacacacacacagaggacactttcaggttaagacgcatagagagagcactgcctctggaagcccataaatccacaacaaagagatatttaaagatataaatccacaaggacaggaagaacaggaaaggggaccgccagcagcagaatctctggaagctggaaagcaggtaggctggtattacctgactgagctgatctcagacagctaaatccctcccaggagtggggaaggctgcgagccaatccttatgcatacaacagaatcctcaaaaacttaagaacaggtagcagctgctgctgcttctagatctaagagtgaaagaaggctaaaacaaagaggattgtttggaggtgcctttgagaaacagatctttaggtcccctccacctccctagccactgggtgatgcccctcccccactttgggacccatctggggtttcaccggaaagggacaaacaaaggggtctctgggccaggcacagtggctcatgcttgtaatcccagctactcaggaggctgaggcaggagaatcgcttgaacccgggaggcggaggttgcagtgagcggagatcacgccattgcactccagcctgggcaacaagtgtgaaactctgtctcaaataaaaaaaagaaaaagaaaaaaagaaaattattggccagacacagtg

SEQ ID NO: 202454 - DNA, 1000 bp, Homo Sapiens
gtttctacaaaaaataattttttaaaaaaattagccaggtgtagtagtccttgcctgtagtcctagctgctccggaagctgaggggttgaggctgcagtgagccatgattatgccactgcagtctagcctgggcaacagggtgagaccctgtctcaaaaaataacaacaaatactaaataaaggtcaaaggggctcttcccagacagagagacaggaagaagtctaaaaggatgtaagaggacgtcacaggactactgcctatctggctctcagtgtgggaacatccactccacaaaagcagagagcatttgcttcctggtacaacttccttcctgcattcggccacaggttcttttcgggcactaggaagattgtcagttggctcgttcattcatttattgaactaatatgtataggtgatacttacaggtgataaaacaacatgaacagataaggtcaatatttataggcaataaaacaacaacatggacagatgaggtccctgccctcatagaacatatgctctagcagggaaaacataataaataaggtgtacgtattataatttcagggagtacattatgtgaagaaaaatatagtggaacaagagaacagagagtgacaggggtggtgataattttagatagggtacacagagaaggcccttttgaagagaccgatgactcttggacagaaacctaaataatatgacaaaccataaaaatgatctggagagtattccagacataagaaattgcaagtgcaaaggcactgagaaaaggcttgccttgaaaagaaaactaaaatagaagaaatgaggactctgaccaggcgcggtggctcacgcctgtaatcccagcactttgggaggccaagacaggcagatcacaaggtcaggagatcgagaccatcctggctaacacggtgaaaccccgtctctactaaaaatacaaaaagttggctgggcgtggtggtgggcacctgtagtcccagctactc

SEQ ID NO: 202455 - DNA, 1000 bp, Homo Sapiens
tcagcacatgtttaaaggaatgtctgtggccaagagaaagaatagaaaatggtttacaggcttcctctgaatcagagagggctcttgcaagatcctcgatgatgttccattcatctttctcttctgtaaacaaaagtaggtgtcttcctaattccctttcaaaaagacatcctttcagttcctcactctggccatggacatttccatgtgaaaatacacatagtgcatcttgcggccactagatacaaagccatgtacagaaatgaggccaggtgcagatggggcgaattgaaaagaagaaagaagaaaagaatgacagggtcgagaaggcaacattgattgagtgaaagaatgagaagccgcagtcagtcaggaggtgattctcactaagggtaagtggggtggtgatggcacaccattttgagtatactgaatgctgctgtgtggttcacactcctttggttaattttgtgttatgtaaatttcacatcaacaattacttgtttgaaaaagagaaaacaaggctctgagaaacaactgcaacccatacatttttactatcctcctcctctgtttgataaatatttgtgtgtagcgagcctgccatggcaattcctgcccttcccctggcccagcttagctcttacgtctccccaccgagctgctgtacttcagagatttacacacctgcccccctgcctgcccccatggggtcccctcacctgagctcctcagcttgcttgagctgctctgcaagcttctcctccttgaactgtcgctcattcctcagcatagattttatgagatctttgcactcttcatattctgagaaaagacagacacacctgcctcagtggaaggctggacatgctgctgtggtcattgcctacaggacaggagccaggtccatcccaaggacaaaactctccccagtaccagggtctagacagggatttccacatctttactcttcagtctcctgactttctggcatctgatc

SEQ ID NO: 202456 - DNA, 1000 bp, Homo Sapiens
gcttgcttctacagctagaaggatggagtaatcaaatcttcagccaacattattgaactcattatgcatgagacatttgctaaatgctttaaatacattatctcatttaatactcacaaccaatcctatgagggacatattaacattatctatttcagtgaaaaatgaactaagacacagagagaataagaatttgtccagtcacacatcactaactggcaaagccaagtgtgtccaactcccagtcttttcatgcacaacctccacacaatcttcttatcaaaaatctgttttttcaaagttgatctcatggaggtagagtagaatgattaccagaaactgggaagcatggtgagggtggtaaagagatattggttgatgggtacaaaaatatagttagatagaagaagtaagttctagcgtttgattgcacagtagggtgacaatagttaataagaatttattgtatattttaaaatagctagaagagaatatttaggatgttcccaaacaaagaaacgataaatgtttgaggtgatggatattctgattaccctgatctgatcattacacattgcatacatgtaccaaaatatcatatgcaccccataagtatgtacaattattatgtatcaataaaaaatgaaataaaagtctgtgttttcttggtggttgtagagtttgttataggatcttatataagacatttaaactcactgtctatgaataatatggatagaatatgttaaatttcacagtctaaattttttttttttttgagacagagtcccactctgttgcccaggctggagtgcagtggcactgtctcagctcactgcaacctccacctcccaggttcaagtgattctcctgccttagcctcctgagtagctgggattacaggcatgtgccaccatgcccagctaatttttgtatttttaatagagatggggtttcaccatggtggtcaggctgatctcgaattcctgaccttgtgatc

SEQ ID NO: 202457 - DNA, 1000 bp, Homo Sapiens
agtgatggggaccgccaccttttctgcaggaaatgtgcccagcagctcttggtcaaagcactgttgctataagctatctctgggatgcctctaggcccccttccctctacacacctctgggaaaagattacactgtattaactctcgaggagtttcctcaccaataaacagacaacctcaactgccagtgccctgcagcctcgggccacagcggcagccttgtttgccttcccacctgcctctgccacacctggtggctgaacatctctggtcgcccagaggccatgttggggccatcctccaagagggatctctgccctcaccgcctgccactgggcaggatccctttcctctgcagggagaggtggctcctcggccatgcagcccctggcaggctccttctaaacatgcctgttgacctggagctggcgccaccaactccagggcctttccagggccagacaggtaacacgcatgaacccgagtgacagctctgacgggctgtttcggtgtcaggagacaaagctggcaggggcaggggtgaactggaggcaagtcaagtcacctgtggcctgtggggctgaatgtgggcccggtgttgccagatcctttgtcataagaagctagaaatccagattttatgtgtgtgtaatttgtaaatgctgaaagctagcctgaattttttttttttttttttgagacagagtctcgctctgtcgcccaggctggagtgcagtggcgcgatctcagctcactgcaagctccgcctcctgggttcacgccatcctcctgcctcggcctcctgagcagctgggactacaggcgcatgctacgacgcctggctaattttttgtatttttagtagagacggggtttcaccgtgttaaccaggatggtctcgatctcctgaccttgtgatccacccaccttggcctcccaaagtgctgggattacaggcgtgagccaccacgcccggccactagcctgaatttcaatcaag

SEQ ID NO: 202458 - DNA, 1000 bp, Homo Sapiens
ggtggtagagctgacctctggcgaataaggagcagctgattaggcacaatgaaggcagggctgtgggagagagagcagcaggagccgaaggtggaggaggcatggctccttcagagacctggaagaaggctggatcacgaggagccagtggaagagtgtggggagcactgaagggaggagccagtggaggagtgtggggagcacctaaggagaggaggcaggcgggtctgggccacgtggggcctcatgagttgagctaaagagcttagctttatcccaagagcaatgggaaactttaaagggcttagaacaggcagggctgtcatgatctgatttgcatcttaagaagcaaacggattacgaaggggtcaagggtggctccagggaagcagtgagaaggctactgcagctgatcggagaggagtgatgccggtgcttgggccagggtaggtacaaagggcatggacagaggcagatgtgtctgagagatgtttaggaggtgaattgaagcttgatggatggatatgggtagtgaagagggtggcgttgaggttaacttctaggtttcagacttgccagctgggtggaaaaaaccacttagggggactgggagaggacccagcctagcagtgagtagagagtaggggaggagcctgggcgaggtggctcacgcctgtaatcccagcactttggaaggctgaggccggtggatcacctgaggtcaggagttcgaaaccagcctggccaacatggtgaaaccccatctctactaaaaaaatacaaaattagccaggggtggtggcgcatccctgtaaacccagctacttgggaagctgaggcaggagaattgcttgaacctgggaggtggaggttgccgtgcaccaaaattgtgccattgcactccagcctgggcaacaagagcggaactctgtctcaacaaaacaaaacaaaaccaaaacaaaacaaaacaaacaaaaaaagagactagaggaggaagatc

SEQ ID NO: 202459 - DNA, 1000 bp, Homo Sapiens
attcattcgatctaattctgttttcgtacccaacaacaatccccacccctccaacccccactgcccttcccatctccatcactgcccttcccatttccatgaattcaattgttttaatttttagctcccacaaataagtgagaacatgtgagctttgtctttttgtgcctggcctgtttcacttaacataatgacctccagtttcaaacatgtggttgcaaagacaggatctcattctttttcatggctgaatagtactccattgcatatatgtaccacattttctttattcattcatctgttgatgggcacttaggttgcttccaaatcctgggtattgtgaacagtgctgcaacaaatgtgggaatgcagatgtctcttccatatactgatttcctttcttctgggtatatactcagcagtgggattgctggatcatatagtagttctatttttagtgttttgaggactcttcaaactgttctttatagtggttgtactaatttacattcccaccaacagtgtacgagagttcccttttctccccaccctcaccagcattcattattgcctgccttttggataaaagtcattttaactgaggtgagataatatctcattgtagttttgacatgcatttctctgatgatcaatgatgttgagcaccttttcataaacttatatgttttcttttgagaactgtctattcagatcatttgcccaatttttgatgggatttctataatttttttccataaagatgtttgagctccttatctagtccagttattaatcccttgtcagatagtttgcaaatattttctcccattctgtgggttgtctcttcactttgctgattgcatcctttgctgtgtagaagccttttaacttgatgtgatctcatctatcatttctgctttggttgcatgtgctggtggggtattgctcaagaaatctttgcctagtcccatgtcctaaagagtttccccaatgttccttt

SEQ ID NO: 202460 - DNA, 1000 bp, Homo Sapiens
tcaaacttccaggctcaaccaatcctcctaccttggcttcctaaagtgctaatattacaggtttgagccactcagcccagccccaaatccttattatatcctatttgtttgctttgcatggaagtttatacttacttccatcccacccttaacataactgcagagggaatttcttttttttttttttgagacaagattttgttctgtcagccaggctggggtgcagtggtgcgatcttggctcactgcaagatccgcctcccaggttcatgccattctcctgcctcagcctcctgagtagctgggactacaggcccccaccatcacccccggctaatttatttttgtatttttagtagcgacgggttttcaccatgttagccaagatggtctcgatctcctgacctcgtgatccacccgcctcagcctcccaaagtgctgggattacaggcgtgagccaccgcgcccggcccagcagagggaatttctaaaggcaaagactctgctcctgaattaggagaaggcgtggcagcttcacctcttactgcctggggtcaggcagttctctgcagagccattctcaaggaggtgtcttagcttgacttgccccaaaatagatgaggagccccatctgccccatctaattaccctgagccctacttctgcctaaatgcagccctggctgagctcaggctgagaagtcccaggatctacagtcagcaagcaaaagaaaaccaggagagccgacagtgtcattgcagtccaagtccaagttcaaaggcaggagaagaccagtatcccagctcagctcacagtcaggcagatggagtgaattctatcttactttttctttttcttttcttttctttttttttgagaaggagtcttgctctttcacccaggaatatgctttaggcaatgcatagtatttcactggagcttgaatcttcctgagtgctttaactggtatttgtctgtagtgacttaccaaaagcaagctt

SEQ ID NO: 202461 - DNA, 1000 bp, Homo Sapiens
ctaacacggtgaaaccccatctctattaaaaatacaaaaaattagccaggtgtggtggcaggcgcctgtagtcccagctattcaggagactgaggcaggagaatggcatgaacctgggaggcagagcttgcagtgagccaagatcgtgccactgcactccacctgggcaacagagcgagactccgtctcaagaaaaaaaaaaaaagtgcttcctgaggaccctcccaggatcccctcacagacacagctcccaccaggaatgattcagaactgtgggatttgaggatcagggcctacctgacctcacaaggccaggattccccagtgcctgctcctgggcttcatcctgcgggaaaagagactgaggcaggagaggccgaccagggattctgtcctgaccaggatggagcccacagcaaggccagaacaggccccaagtcaggatgcagggatggccagcatttgaagaagagctgggccaggccaggccgaggggccctgagcccgagggacgttcttccctcgcccttgcccagcacagcccctggctggagaggccaaattctgcttggctctggtgctggaaacggggttcctctgggctctatgagcttaatatgggccctgctgggcccacacacactgcttggaagctactttcaaaggcaccggtccccatcactgtctaaccagtgggatgggactcccccaggaatgacccacagccccttctcagcacaaatcgtgtcatccattctaccccgagtcctctctgcactggactcctgggcttgactagttcccagtcgaaatttggacaaaacaccatcattccttgggctcaacaaggacaatcaccccatgactggggcccttcccaatgtggggttagtcctgctgggggcccctcatccccacttctccctgcaaagggagccctctggcctcagtctatgtcactcgtgggcttaatacagggtaaagcacaatgtggaagctt

SEQ ID NO: 202462 - DNA, 1000 bp, Homo Sapiens
taaaattagccaggcatagtgatgcactcccagctgcttgggaggctgaggtgggaagatcgcttgcacccatgagtttgaggttacagtgagctatgatcattccactgcattccagcatgggcaacagagggaaactctgtttctaaaataaataaataaataaatacctcactagacagaaaaattctaagtgggcacctacgaaaggagaataaatgaactgaaagatgatctaatcacaatgcagcatggagatatgaaacaaaaaaaagttttaaaaagctgctgaaagccattaaaaatgacagagtaatccaatgtatatttaacggaaattaagcagaaaaagtgttcaaggagatggaggaaaagtaatgttttaagagctatatgctaaaattaaagatgtgagttgtcatgtgaaagtgcaaacaggagttaagtagatactatgtctgagaaggtcgcagaacactgcagaaagaacagcaagtcctgcttctggttctggtggctccctctcacaagatcaacccaggaggtactataaaggaacgacatcaaaatgagaagaaaactgaaaggcccccggggagacacagagctcttttgaactggtaaatgtgtgtgagagtgagtaggggtgtcggtgctggctttatcctgggacggaaggaagggagtctgcagtgacaagataacataggaagaaaagtatcataatgacactccatttgctgccctgcaactggcctccacagctactgggactcaggcagctgtactcaggagtaccttccagtctgtgcagaagccgagtgggcaaggagctgagaaaatctgggggcgactggggtaggcttgggaagatgcttcttcacccttcctcttcctgtcccccaggtgggcatgtggtttgcaatttaagaagtgtctccccctaaggctacttcttcttggggtattaagaattaattcataacttgaggcattgatc

SEQ ID NO: 202463 - DNA, 1000 bp, Homo Sapiens
aataatgcccactttagatgatgttaatcataatcctggtagttatttatgtagtatcagctgtatgccatttaatcctcatcacaacactgtaagtttggtataactatccaaattttaggaatgagtagataaagatattgagcttggaggtcgagctgtgcacataagatctcaaagccagtggttgctaaactgggactcaaatctagggctgcatatcccaacccaggttccttccactacactaaactgtctttagagaacaatgaagtgatgtttgggaaaacatgttgcaagaaataaaacactatgaaatgtgagttgttgttattactctctccctatagaacatgtaaataagtttgcggacatgcagttctgtgcagaagacgcaaagtcctcctagttcattacgaaactcctcctgttggggagctcaatgtagacgtggatcatcccagcccttgttatctgccaggcactagcctttatctctgttgtgtctgtaatctgcataatagccctatgaggcaggtactcttatccctattttacaggtgaaaaaaatgaggcacagagagaagctggaacttatctcaaatcactcggtttgcagtagagttggttcctgagtccaggtgtgtttgaaccaatagaccagtttgattccaaatagaacccgtgttctctgactcctatggtaagctgctaagactcaggacaccaatataggccacacttgttttctttcttttttttttttttttgagatggagttttactcttgctgcccaggctgcagtgcaatggcgtgatctcgggtcactgcaacctccgcctcctgggttcaagcgattctcctgcctcagcctcccaagtagctgcgattatacaggcacgcaccaccaggcccagctaattttttttgtatttttagtagagacggggtttcaccatgttggccaggctggtctcaaactccttacctcagatgatc

SEQ ID NO: 202464 - DNA, 1000 bp, Homo Sapiens
ccgagatcgtgccattgcattccagcctgggtgacagagtgagactctgtctcaaaaaataaataaatcaataaataaatacttcaagtttgaaaagcctaagtttgaggtgctgagtaagcaactagatttgagtatgtcattccagggaaaggtctggactggactggggatataaatttgtgggctgacagaatagagacggcacttaaagaaataagactggatgagatcaccatccgaaaacgagaagaggcatttaagacatgaccctatcaaaatccactgtgaaagacacagaacatattctcccagggagccaccctctacaaagtgaagtttgtaacacactcttcactacggccccttactccttgcctacctacttcccccagcacacacacccaatagatgtctgcagacacacacacacacacacacacacacacacacacacacacacagagtatttaaatttctcctttctgtatctcttagtgatgtcattctgctgagtaagagggaaactcccttttggggagtctctcatgtaacaagaaagtaatccacggaaggaacaagaagtgtcctaaacagtagcaaaccttacacatcaggacaatcacacaggctctggtgtcagattccagcttcaacctcatcggtgtgacctcaagcaactcatgcgccctctttttctcatgtgaagtgagaatatcattggccacaccaagggtagcctagaacatcagacagtccgtaaatatttgttagataaacgatgactgaatgaatggtgaagagaacatatacagaagagcctgactcacaagaggtgatgaacaaacactgccaaatgatacactgaaagacaagggacctcctgctcatccttctctccttgtcttctcattctagccctttccctttccactcctttcaattctgcctatgacccaacagtaaaatcatgtatttgtacagggccatactggttata

SEQ ID NO: 202465 - DNA, 1000 bp, Homo Sapiens
tggtaaggctcttcctatgtgtcatgaaatattaacatgtttgcttgtggagtgttgtcctactcacatgttcatgaaccttgttttcatttatcatcccctaaggggcctttctaaacattttttccctagttgccttcccagtaactgtactaccacatagtatagtatatcaatagtatatctgtactgccacagataaattgtatatctgtatatgtaccatatgcatatctgtgcattatacattgaaagatatttttcccacacatcccccaagaaacaattttccccgcttggggataataccactcctgttgagactgcaccaactagaccagtagttctcaacctggtgtgactttgcccccagaacatttggccttgtctggagacatttttggttgttgtgatggaatggggtgctactgacattggtggctggagtccagggatcccacattgcacaggacggcccccaccacatgtccgtagtgccatggttgggaaaccccatcctagacctcactgggggaatctcacaatatgcaatatacccatgcattgcctttctaaaacctgaaaagtcctgagttggaaacatacctggcccctgggtttgagattggggctggtggagctgtgacagtagaacccgcctcacggtgttggtgagaggcccctttgggggctggcatagtcaaatgcattgctgggcacctgccccacagtgtgtgctcgcccaggaagaacccaaacgcctagagtcctgggcactcggatgttgccctacattgagaaatgggcccttctgccacagagcatcctggctgcagcatcccagaggcctttgggagccttgacgaatcagagaagtgcagtccctgcccaaggctgcacaagcttctaagtgctggggagccaggattggagcccgggtctgcctcaccccaaggcgcctgctaacctggtgtctcttccatgaatcctgtgaccttca

SEQ ID NO: 202466 - DNA, 1000 bp, Homo Sapiens
gaacacactagaactttccacaccagaactttccacaccatctgcacatggaaaatgtgtgtctgttcattgatttatgaagacacctagaaagattagctataaacaacgtgtttatttcattttaggatacattttcagaggcaactaggtagaaaggtgaactttcccatcacttagacctcaagtcagcagctcatgcagcagtgattgctcgggtgactctgagtgacctgttctacctctagagctgacgtttctgttctggttaggctaaatggaggaaataaaaattctccaaacatttcattaagattcactgggaaacagtaccctgagtgcttagagctgcactcctcacacagaagacacagtaagggttagggaaccttctcaggggatgaatacacacgaactttcaccacagcgaccaagagcttatattgggagtctgattccggcctctagggaagctggaaaatccaaaaccaatctcattaaactatttcatctactcataggaggaggtccagctcttataaaactgccaacccttccttctctccctctcctcaccctccacccacaggacagggccgggcacacggaggagggacactgaggacctgggtggtggagaccctggctttcctctcttctcacccatggtgggctctgcttatcctcatcttttcttccccagttagggtttcctgggaggctgtgagttgtctggggacctcatcaacatttgcacaaatgccccagactctgctcacctctttcaaaggggctcctccctctgagcctgcaatgtctgtgtgattgggaggtgtcacctccaggccctgaaaccacagcacccgcagggtctctggccccagtctgaggtttctctacaagctttggagatgaatgaagcctctgttttaacaggaatagatcggtttatcaaagcatgtaaaggccagatgttcgtttctatgttagggatcctgaa

SEQ ID NO: 202467 - DNA, 1000 bp, Homo Sapiens
tcttcgtcgttgcggttcaggtgttcgctccactctgcggcaccaaaggcccgtcacgtgcttcccctgcccagacaccccaaacaccgaaactgtcatccgaaggccccgcacctgccgcctgtcggatgctgaagaacgaatcccaggtggagaggacagcaccccaaaagggatgggggatggattggggcgtctgagccccgtggagtatgtcagcctttcagagcgacccgctccacgctgcgatgtggtccttaagaagttagggccgggcacggcgcctcacgctgtaatcccagcactttgggagccaaggtgggcggatcatctgaggtcaggagttcgagaccaacctggccaacatggtaaaaccccaactctactagaaatacaaaaattagctgggtgtggtggcaggcgcctgtaatcccagctagtcgggagtctgaggcaggagaattgcttgaacccgggaggcggaggttgcagtgagcggagatggaacacccctgcactccagcctgggtgacagagaacgactccgtctcaaaaaaaaaaaaaaagttagggccggtcgtggtggctcacgcctgtaagcgaggccaaagctccagaacagcatctctactaaaaatacaaaaattattcgggcgtggtggtgggtgcctgtaatctcagctactcgggagtctgaggcaggagaatcgcccgtgaacccaggaggggtaggttgcagtgagcagagagcattccactgcactccagcctgggtgacaggctgagcactcactcagcctggagcgagactccatctaaaaataaattaatagataagttagggctgggtgaggtagctcacacctataatcccagcactttgggagactgaagtgggtggatcaatgaggccagaagtttgaggacaacgtctctacaaaaaatacaaaaattaaccaggcatggtggcctgaacctgtggtcccagctacttgggagg

SEQ ID NO: 202468 - DNA, 1000 bp, Homo Sapiens
tggcacttggggccccccatgtggcacagcctcagacagacacccacgcaggcagagttgtgcacatccaaccatctcagtgtctccctgtgtgacgcacggctgtggatggacccacagggacgggtgctgtgagcagggctgtgggtggagccgcagggagggggcgctgtgggcacggccgtgggtgcagccgcagggagggggcgctgtggacacggccgtggatggagccgcagggagggggcgctgtgggcacggccgagggtgcagccgcagggagggggcgctgtgggcacggccgtgggtgcagccgcagggagggggcgctgtgggcagggcctggctccaagcaggagcagctcatactccccacacgcagctgtggctcacttcacatggccgagcccacctcgaggtcccgccccaccctctctccccctcagcaccacattacccctgccctgcagctcagggccaggctcagcatggggtagtgggagcggggagggctgtgggtgcgtccctggtggtctccttacccgggaaatctctgccaggtgtgtgttcatgtcctggtcgctgacctgcaccatctgccggatccccttgtagtaactgcaggggtgggagcatcatacagtgtgggcggcagggaccacaaagggggtggtgggggaaaccaaggcctgaacctccccgcagggggtcgagggtgggcatgggggcctggcctggagggcaggcagacttactcctccaccatcttcttgtaggtggagatctccttggcgtacagcagcttgttgctgggagaatcctgttggggacaaaacccagtgatgcctggccaagggggccaggctggggctgctcagagtacccctgggtagcttcccctgccccgaactcctgacactttcatcaagaaaactatgggccgggcgcagtggctcaggcctgtaatcctagcactttgggaggctgaggcaggcagatc

SEQ ID NO: 202469 - DNA, 1000 bp, Homo Sapiens
tagattgttaaaaatgcagattcctggggccagccatggagtctctcatttcaaaggccaggagtggggcccaggaatctgcatttatgtagtattttttttttttttgagacggagtcttgctctgtcacccaggctagatggtgcagtggtgtgatctcggctccacctcccgggtccgcaacgggaatctgcatttaaataagcacactccctctcctgttctcccccaggagattctggtttagatggctccagagcacactgtgagaaacccccgtgtaaggtagaagatgggcagcggtgccatttgctggtttaatttacgtgatgttggttctcaggctcctgaggacagatggtatgaggcagagaaagtctggctggctcagaaggatggatttactcttggtaagtaggggtgttagcacctttggagggtctgagtcttctcctgtgccccctactgctgccagccatatgttccaggtcctgattatactttggtggtcaggagggaagaggagcagtggagactgtctttcaaaggcatttgtgtcttgataatgagttatttacctactgtaactcactaatgcaacaagcatgctttcttcctacggcgttcttcgaggaagccagagtctggtacaagtgggccaatagatttgatctcatgagcctacttttgtcgattggttgtggctgatcactgcactctactgagaagtgatgctgagtctcagtctgaacatggctgggaagagtggttgattagtgatgtctgccatgggcactggagggggaaatggcagtctgtgtgtgagataggccagtgtacccaactgtctgggtgcctgctctgtgcctggcactgtgacagctggtaaaagcctaaggtgagtcagacttagcctgaccttaaaggatttggggtcacaactcagctccaagtgaatagaccccaaatggagacctgtcccaagccttctcccaagct

SEQ ID NO: 202470 - DNA, 1000 bp, Homo Sapiens
tcactactccggcgtgcctcccccttaccaccgactacttccctgaccgccagggcctgcagaatgactacacagagggctgttatgatctccttccagaagcagacatcgacaggtcagtgtcagagaaaaaggcacttggcttggttggtgagggtttcggatatatcccacacatgcatcagaacactggatttgtgctggcttcagcaacacatatattaaaattggaacgatatagaggagattagcatggccgttaaataaaaaattttaaaaaaacattgaattgtattttatctttttttttccttttttttttttaactgagagagggtctcactctgtcgctcgggttggagtacagtggtatgatcacaactcactgcagcctctacctcctgagtacaaacagtctttccacctcagcctcctaagtagctaggagtagctgggagtggcagcaccacatctagctaatttttgtgtattttataaagacgctattttgccatattgcccaggttggtctcaaactcctgggctcaagtcatctgcccatctgttgcgtcccaaagtgctgggattactaccttgagccactgtgtctggctgaacactgaattttcaagcctgtgtcctctttttatatttgggtaacttttttttttatttttttgagacagagtctcactctgtcccccaggctggagtgcagtggtgcagtctcatctcactgcaacctctacctcccaggttcaagcgattctcacgtctcagcctcctgagtagctgggactacaggcgtgtgccaccacacatggctaattttttgtatttttagtagagatagggtttcaccatgttggccaggctggtctcgaactcatgacctcaggtgatccacccacctcggcctcccaaagtgctgggattataggtgtgagctgctgcactggctgtgggtaattttatgatgtaagaactgttcgtttctcca

SEQ ID NO: 202471 - DNA, 1000 bp, Homo Sapiens
agctccagggccttgttcatggccccctgggcatcagcaccaaagtccccgggatgcttgctctgcagaacctggatgatgcattccgagatgaactgcagggagggtgaggagagaaaatggtcaccagggtgggacaagccaggggccagatgggagtcagttgtcctcctaccttctctttattccaggaccgtgtattgagcacttgctaggcaccaggtgagagtctgtgtgatctccacggatgaacccctttgatccccacaaccactgtgagatagatactacaactgccctcgatttacagatgcagaaactgaggcgaggggaggttgaatggaagggacatttggacccaggagggccggctccggagcccacgctcttactcacagccccctccactccatcaggatgtagaccccactgaaaccaggtgagagctcagagcaccacccgcttgggggcagcagaaaagaagggaaatgctcagatttcattattgtattcaggattttgcaatcagaaagtctagaaaggaactatttctatttgtgtgtatgcaatttttgcatacttaatgacttggtatggttattgttttaaagaccctattttgggggcacagcctcctattttttataccaagcacagaaacactggtgggagggaaggagagagaggaagaagacagggatgaggcccgcggctggctcccaggatggagaatgtctgctatcagcctcagcattgccatttgctttagtacccacagtctcactgcccggataacagagatgggcatgggaaaacggagatgtagcatggtgctgctttagggatggaaagactcatggatgtgaaatgcggctgtgctttctcaagttaaccagatttgatcccaaccacagccctggctggtgcaccaaggagtgtcgttttacagaggagaaaatcaagtggccagaccgaggtcacgcaggaagcagagagcaga

SEQ ID NO: 202472 - DNA, 1000 bp, Homo Sapiens
agcctcagcgtctccccggccatgtgtgctgtgggctctgaggacggcttcttgcggctctggcccctggacttctcctcggtgctcctggaggcaggtgatgctgtgggcacgctctcccaactccgggagagcctcgcctggatgctggggcggggaaggcccagtccccggggctctgctgtcagccgccctggctcctggctgcacagggtgccacggggccaagtggcatatccagagccctggggcggctgatgccagggcggcccgcggggcagcctcacggaagggcccggtgggacgtgggtagtgtgtgaagcccctcagcctgggtcccgcctagcctaagagtggtggcctcgagggagctgcatcttgcagccgtgtggagcctgggactttgagcagcagggagtgcatttgctggggtgtcggggacccgaagcctgagcatgcggctcaccccggggtggccctggaggcccctgaccccaccccacccacagagcacgagggccccgtcagctcagtctgtgtcagccccgatggcctccgtgtgctgtctgccacctcctcgggccacctgggcttcctggacacgctgtcccgggtgtaccacatgctggctcgctcccacaccgccccggtgttggccctcgccatggagcagaggcggggacagctggccaccgtgtcccaggaccgtaccgtccgcatctgggacctggccaccctgcagcaggtggggtttggcaggggcagcacggcagggagggccgggaggtcctgaagctggggtttgtcagcgggggtgagaggggcctatagggacctggactttccagcctgtgtcggccccatgggtttgggccgcctggagagcccctgggcccttgagatccctgccctcccctcagcacggcccctgtcccacagctatacgacttcacatcatcagaggacgccccgtgcgctgtcaccttccaccccacaaggc

SEQ ID NO: 202473 - DNA, 1000 bp, Homo Sapiens
aactgttcacagacttactccctaagttaccaggagtctgggtggaggacaatcccccagggttagcagtaaatcaagcacctgtcatagtagagctactacgaggaatctacccagtgtggatccatcagtatcccattcccatagaggctcaccaagggattgcaaaacacttaaaatgactccctgaatttggaataatagagagatgtgtctcctcacggaatactcccctactgctggtgttaaaaccttctggcaactaccagcctgtacaagatttaaggacagtcaacaaggtagccagtacactgcatgctattgtgcctaacctgtacactatgcttggacaaatacctgctagtgctgcttggttcatatgcttggacattaaagatgtgttcttctgcatctgattagcccctataagccaagacatttttggttcatatgcttggacattaaagatgtgttcttctgcatctgattagcccctataagccaagacatttttgcctttgagtggggcccatctcagtatacctggactagacttccccaaagatttaaaaactcctcaactatctttggagaagcactagcctcagacttaaaggctttcacaccaccaagtgatcgcttgtcttactgcaatatatagatgatctgctgttagccaaacccacaagaaaataatgtatccaaggaacagagagtctccttcaagtgctgtgggaagctggctataaagtgtctaagaaaaaggcacagatctgtggctgaggagttcagtatcttggattttacttctcccaaggacggtgtgagcttggacaggagcgaaaagagattgtctgtagcattcctcagccagacagaaggcagcaagtgcaggaattcctaggggcagctggtttttgccaattatggattcctgactactggctcctagcaaagcctttatatgaggcaaccaaaggaggggaaaaggagcccctcc

SEQ ID NO: 202474 - DNA, 1000 bp, Homo Sapiens
tggtattttccagattcaactaaggatatgtccttcctctctcaccaattgcttccaatttcaaatctaatgttttatctataacaccaacagcaagaaaacaacaacaaaagtcttgctcataagaggaaaatgtttgaattgctagtttgctctaagccaacacaaactacattatatactatatggtttttaaatggctttaccttatgagttgcaaaattaccttctcagaagtagatgtgattttagagccttagaaacaatgctgatggagttacttttgagtgacttctcacttcagtatttcaagggtgaagtgtcaattaaggcattaactttaaccatactcttctttcaatggtatcttccgatgtaacaaaagccctttggaatatatttgccacataaatcactgatgacactttcctttggcatgtgttttctggtgtttagtaaggttagaactcccatggaaagctttcccacactcttcacactcatacggtttctctccagtatggattctctggtgatgaataagcgttgagatctggctgaatgcttttccacactctccacactcatagggcttttctccagagtgaatcctctggtgattaataagtgctgagttcacatagaaggccttcccacattccttatactcatacggcttttctcctgtatggattctctgatgcttgatgagggctgagctcacactgaaagcttttccacactcatcacactcataaggtttctcaccagtatggattctctgatgtttgataaggtctgagctcacactaaatgctttgccacactcattacattcatagggtttctctccattgtggattctctgatgtataatcaggtgtgcccttacactgaaggctttcttacactcattacaagtataaggcttctcaccagtgtggattctttcatgcacagtgagggttgagcgcacgctaaaggcttttccatagtgatc

SEQ ID NO: 202475 - DNA, 1000 bp, Homo Sapiens
tccgaagtagattttaaaaaatcacctgttggccaggcgtggtagctcatgtctgtaatcccagtactttgggaggctgagatggtttaatcatttgaggccaggagttcgagaccaacctgggcaacatggcaaaaccatgaagatggactgaaaacagacagaacctccaacacttatgaaacaatagcaaaagatccaatattcatattatcagagtcacaggagagaataaaaagaagggctgaaagagtattcaaaaagataatgactgaaaattccccaaatttgctgaaggacataaacctagattcagaaggtgaacatatcccaaataggataaactcaaagaaatccacactaagacacatcttaattatatttctgtaaattaaagacaaagaataactcttgaaagcagagaaaaacaacatactacctataagggaatatcaagcgacaacaggtttcttatctaaaaccatggaggcctggccgggcacactggctcacgcctgtaatcctatgactttgggaggccaaggcaggcagatcatttgaggttaggagtttgagaccagcttggccaacatggtgaaaccccgtctctactaaaaataaaaaataataacaaataaaattaaaaaataaaaccatggaggccagaaggaagtggcacaacatttttatggttaaaggaagtttttcaaacagaaaggaaatgattaaaagaattctgaagcatcaaaagggaacagaaaacaacagaaaaggcagaaatatggggagatatatatatatatagattatcctcctgtagtcccagctatttgggaggctaaagcaggaatattgcttgagtctagaagttcacttctaccctgggcaacatagcaagactctgtgtcttaaaaaaattaaaaattaaaagggggaaggtaaagggacctgaatggaaatcaggtttccacatttcactcaaagtggtaaaatactgatc

SEQ ID NO: 202476 - DNA, 1000 bp, Homo Sapiens
tgcttttctctggatttaatttcacatttctcgaggcacaaggccttctgcagcccataggatgatacactcgaaagaagaatgaagttttcaaacacatcttcgaaggaactgaggcggcctggctctgaatcaatttaaaagttcctcctcctcttatctttctctccacaccccaccccacacccccgccctcctcccggcatagggcgctagtgtgaggggacaagaataggctgcacgtgtacatcaaaacttcctgtctgcgataggacatcaccggcgattaatgctgagatccttcccacgttgacttcccaggtctcaactccaacttccatccccgtctcatttcgctggcggccaaggagccgaaacgttcccaacagggtttaatatacccaataaatccccgggagtacacaaagaaatagcctacccggggcctcagtctctgcaccccacccccacccccaagcgcggccaatcaccgggcgggccaggctgggctcgcaccgcggctctgagcaacacctccccacgagctaccgccgcctcccctccaggcgccaggggcccggttggcgcgaacgccgggttccgagcaccctgggcttccttgtctgcctcccagcgcggcacctcttcggggctcccgaaacctgagctctcgctggttttaggtccagactggggcctctccaccggttcctcccccgccccgggctctggggcccattctttgggctgaccctgtcagggcagagtccgcgcgtctgcctgccattctccgcccgcataaaagcacgttgaaggtgtctcgggcagacacctccaggttttgaatcagtttattccctttcactgttcaaagcagctgttcaaatacacaggctgcttacgttgacgtggagaggatttcaaacaacgctaaaatgctttgaactgacaaggtgtcttgatatctccctcactccatccagcacagctcctcgagatc

SEQ ID NO: 202477 - DNA, 1000 bp, Homo Sapiens
ccaaggccaaagctgtctaccttttgccaacctaaggaatgacacagagcatggagcaccatcactgaaacatctgccccagtgccctgccaccttcgtcctcactgacctctgcagcctctctcatctgccagttttgattccgcaaggagaggtggccctgggctcacagctggtgtttgtccacagatgttcatgggtttctttgtgttctctcattttttcaaagctgggtgttgggaccaacatcaccactgacattctgtggctctaaacaagtcctcacgaccacttctcagttttctcatctttatgaagtatggagtaatccccactagccttatagagggactgtgtgagaagggaagagactgctattgtttgccctatatccacctacttccctagttccagaacgctggactttaatgagataacaaagtacctagtaaaaacactgcatcattttccatcccccaccccttgcagtaaaatgtggcccatgagacagaagcactaactactgagcaggacttctaggggagttctttaaaactcagaggagcaccacttttaccttctgctcttccctttttcctgcctggaacgcagaagtgatggctgaagctcctgaggctataagctctgtacgtaggagagtggtgaagaaaggagcttggttctgcaaggatgttgtagagctgccataccagtcctgcatggtattcctgtgcactactgttacgtgaacacacaaacacctaatttgtttaagccattaggccaggcctctattagccattcctgactgatacagaagacaaaaatggcatcacagactcctgaactccaaagacactgcctattctttcgtctgttcttggcaagcaccaacattgagactgtacttcagggttgatgctggccatttggtggcgtgaggagtgggcactcacatgtctctgctagcagttctgacgtgtccattccacactggatc

SEQ ID NO: 202478 - DNA, 1000 bp, Homo Sapiens
aaatgtggtgctagaacagtcagtgcggaaggccagagttggaggcctgccatctctcatgcacacacgcaagcagactgccgggcagcatccttgtcctcccacccgtggttgccagcatagaccaatttatcccattcctttaaattacttgatagtgttctctggaatactcttgaatataccataatttagttagtaaaacatattgatggattgctgatagttcagtttcttactattacaagcagtgatacactaagaatcctgttacaaatatgtctttcgagtatgtgtttctggagaataaatttgatcaaatgatatattaacttagcatcttaataaattcaaaaagattgttcttatttaaacatcagccttcttacctgtttccttatgcttttaggaaaactaggtattatcaatttttatactctctgtcaatgtaattggtagatacgtttcattgttttaatttgcatttaaaagattcatgaaatggggttttctataacatttttattttagtcatgttttacatattgtgacctgtactgtgtcgatatccttagctcagttttctattggatttttctttattctattgattagtaagattgtggtatattagtgaaaatagccatttgtcaaatgttggaaatttttttgcttttaaaaaatatacatactctataccgtcatagattttttaaaattataggtagtcagatttttaaatctttttaatggtaacttgattttgttcttatgcttaggaattcctttccctacaagagtattatgaatttgaaagattttctgtcatcagtattattgtctaatttttattataatcaagatttataatatctaggaatgtttatttccttttctcttttttgttttcattgtgttcctagattttggtctctaatttggcatgtacaacataatcaaatagcctgaaaccttggcacattattagttactgtggatc

SEQ ID NO: 202479 - DNA, 1000 bp, Homo Sapiens
tttaaaagaaagaagtggccagggagcagaggctcacacctgtaatcccagcactttgggaggccgaggcaggcggatcacctgaggtcaggagttctaagaccagcctggctaacatggtgaaaccccgtctctactaaaaatacaaaattagccaggtacggcggtgcatgcctgtcatcccagctacacgggaggctgaggcaggagaattgcttgaatctgggaagcagagattgcagtgagccaagatcgtgccactgcactccagcctgggtgacagagtgagactccatctcagaaaaaaaaaaaaaaaaaaaaaaaaaggaaagaaagaggcagggcccacgcctgtaatcctagcactttgggaggccaaggcaggcagatcaccagatgtcaggagttcgagaccagcccggtgaaaccttgtctctactaaaaatacaaaaattagctgagcatggtggtgcacacctgtaatcccagctacttgggaggctgaggcaggagaatcacttgaacctggaaggcggaggttgcagtgagctgagattgtgccagtgcactccagcctgggcaacagagcaagactctgtcaaaaaaaaaaaaaaaaaaaaaagaaagaaagaaagaaagaaagaaagaaagaaagaaagaaagaaagaaagaaaaaaggaaaaggaaaggagaaaggagacgggagaggagactggaggacaggaggcaggaaggccaaagtcaaagaagatgatgtgaagacaggagtagacgtcagaatgatcccactgttggaagtggggcacatgccaaggaatgcaggcagcttctatatgctagaaaagacaaggaacagattctcccctagtggcccgagaagaaatgcagccctgccaaccagttttaaacttctgacctccaggatggtaagataataaatttgtgttgttataagctactaagtttgttatggcaccaataggaaagtaataaaaagatc

SEQ ID NO: 202480 - DNA, 1000 bp, Homo Sapiens
gctgagccaactgagatttaacaagttgagactctcaaagcagtttggttaatttccttgacattatttactaatgcttaccaaattgctactctgtgtcatactttctactaaccattttacctaacaatatcatggcattaaaataaactaaatccttattctcgtcaaaagggatgccacggaagatagaaacagagttcctgtcttctgaaaaaactctaaacatattttttttcttttttgagatggagtctagctctactgcccaggctggagtgcagtggtgcaatcttggctcactgcaacctccgcctctcaggttcaagcgattctcctgcctcagcctcctgagtagctgggattacaggcacccgccacgatgcccagctaattgtgtatttttagtagaggtggggtttcaccatgttgtccaggctggtcttgaactcctaacctcacgtgatccatccacctcagcctgccaaagtgttgggattacaggtggctcagagctactgtgcccagctgacacctttttccttctttctttgcaggctccccacctgctttttctaggtttcttttctttttttgagatggagtcttgctcaatcgcccaggctggagtgcagtggcgcgatcttggctcactgcaagctctgcctcctgggctcacgccattctcctgcctcagcctcccgagtagccaggactacaggcgcccgccaccacgcccggataattttttgtatttttagtagagatggggtttcaccgtgttagccaggatggtctcgatctcctgaccttgttatctgcccgcctcagcctcccaaagtgctgggattacaggcatgagccactgtgcccagccttttttctaggtttcaaccacaagcttccaatctcttatcatcaggtggttaggttggagtaattctagccagggccctggctgggcactggagctcaaccatgcctgcacagagtaaggaat

SEQ ID NO: 202481 - DNA, 1000 bp, Homo Sapiens
cccagggagaagctgaaagaaaatgatccctttctggggtcaggcatattcatgaccaaactgccttactaaggtttgcggaccaggaggaggcaagggaggtagactctgaagtccttttgagtcagtttttgaggaggcttttccagtgcttaataataccagatgcctgtggacggtagagaatatggaagtctgtcgaataccttgacatcagcccattgtcacatggattttgcaataaaaggtacaccattttcaggctgcgaatagtccagaaaactgaaaatagccacaattatgaggccagagctggctgagcagattgaaacagcaccacttttacctgaggagacgtcaacagtggtgcaacctcagtgaaagctcttagaatgggcttaaggaatgatgccatcaatttgccaggagtgagtggggccacacgtcatgtgatgtgacctttcttatcacaatgggtaatcttttagaaggagtcagaagtttggcatgcagtggtagcttctgcatcagaaacttaagaatcttgtaatttgtgcccagtctgtgacaatggatgcattgccatcaccaatggatgatggatccaggcagcagtgactttagtatgaatagtatggaatcagcagcttgatttcactcagtttcatcagagagcggatccttaccataggcatctatggggtgacccaaaccactcagctagtagctacaatttgtttctacagtccatggttccaaaaagagctgactgatctcagtctgtagtcttccaagtgggagactgaaaagctatgccattggcaatagctcaagagttaagaaatataaaagagaatattgagcagagttacgacagtggccttgcattctgcctgctgagcagagcacccacatccattctcagttctgctgaggttgaacagccacatggcccagtggaaaccatcaggtttcagcttagccagaccattagtggatc

SEQ ID NO: 202482 - DNA, 1000 bp, Homo Sapiens
tttacatatgtgatacattgtttttaaggtaaaattccaaaatctcagtatagtaacaatgataataattatagctgataactcttgagcaccttttatgtgccagacactattctaagcattctacatatatcaattcattgttctaccaatgttactctattataagctaaataatgatactccattatttaaagtctttttttttttttgagacggagtttcgctcttattgcccaggctggagagtaatgacgcgatctcggctcactgcaacctctgcctcccgggttcaagcaattctcctgcctcggcctaaagtcttcaatttatatagcatcccagaaagcactagtgatatgttatctaatattctttgtatagggtaactgctaatatgcccagttgatatgtgaaaacatcaaaacccatagaaatgtgaaaatctgtccagtgctccacaaaaatcagcagaacatccaggcccatgtcaaagactggccctgacagcaaacaatcaacaatgctcagttctcctttcacggtctctgacttctaaaatcaagcatgctttcctaagagaagggaggtccataagcttcataattccaagggctatggattaattcactgatgacccacgttccaaacaggaaatgtgcctgaaactgagggaattaacagagatgggctgttcattcccttaggaacgtgggctaggctggtggaagagcaaaagagaaatgaaaataagttgtttatcctgctttctgtttcaaactttcttcaaaaaatctgaaggacttgggaagttgaaacataaaaagaaactgataggcttccacggataaaactgagtgtctaaaagaagaatagctggtgccttgagaaacttaactaaaggctaaggaagagctaagagtgtctcaagcctgggtgataagagtgactgccagtgggctgtgtctgaggcctcatgaacttggccaccaaaatgatc

SEQ ID NO: 202483 - DNA, 1000 bp, Homo Sapiens
taatattaactgtttcaccaaaatccaatgtaaataacaactgctccattactaacacatgataacgatactttaatcaatggctttgttagaagcaacatgagacttttcaaaaccattgattaaagactggtaactaccaataagccttgcctatgtttaggcttagcatacacctttatttataaatgatacttcaaagtgtgtgctggattaacactttgaggattaaaagtatacaactcctttaaacgattaaattgcaatatttcacagtgtaagtcagtctgtcacagtgtgtcctggcagcctttggtttcctatttaagcaacgtgacaaatctcttaagactgctaacaaagtccaagttctgtgggccacaaagatatgcaaatacctctcttctctatgttaatagactggttttaccatgcaggtccagaggctctcaagcagcagtcctaattaccatcagagagaacagcacagtatcctctgaaaaccaaaacccaaatcatcactcttggtaggtattccctagcattcagatggaacacactcaataacttcatttaacaggataattaacttagttatctgcgcccatcaggatgtaatgtggctctaaaacagacctttctcaggagcaacactaaggcaaaagtaacttctttcatactctatggcatggaactctggacctaagccagtactcagtcatgcatttgagaagatccaaagttgcttcttgaagtcaacatatatcctcctgacagggaaccctacaacttactttcttgaaaagtaggagggcattccaactgggtatgcaaacaatctggatcttaacattaaagaaaaaaaaaaagtcactgttgccaccagaacttctgttctccaaaacacaaagtgttcattacaactaaaggcatgatccagatgcttgccaaagatcacaattacagggtgttgctagttagtgtccacagcaggctgatc

SEQ ID NO: 202484 - DNA, 1000 bp, Homo Sapiens
tgagacccctgatttcccacttcacgcctctatatttctgtgtgtgtgtcttttaattcctctagcaccactgggttagggtctccccggccgagccagtgttggcaatcacatgctactgtatgttagggaacctttctaaatgttctcatagcatcacttgctgaatcctgttacaaatgttcatcacacggtattgcaattgtttctcttacctcctacattgtaagcttttgaaggcagaaactgtgtccttttttaaatccacacgtatagcataatacatgacccatgtgggaacttaatgtcaattatcaaagtgatgtgaatatagcttttaactataaaacgcaataccatttacacaaaaccaaggtaaggttatttgaaaattataatactctttatattgtattaagatgaagttatatgagatagtatagtgatgaaggatgagtgctctgaaattagtttctagattcaaatcttgtctctgccatttaccaggtgaacaatctcgatcaatttcctttctataccttagtcggtataaaatggagtataagtacttgcttcctagagctgttgtgagaattaaataaggcaacacatataagatacttaaaacaggccctgcacattgtaaacataactgttattattagtattaaaatgatgataatcatgatgatgacaactccatgattgaagttatatgacagtgatatactgtgtgacagtctttacaacatataaaacaaaggattagcatatagaatagataaaagaagtcaaaatttaatttctaaaaaacaccaaaaatgaggaaaagatatgaggtaattaactgcagtagaaacttaaatagctagcaaacatataagctaaaaactcattaataatttagaaaatataaagtaaaacctatgaaataatatttcttacctactaaattgacagaaatttcaaagtctgatgacatcaaaagttggcaaagatc

SEQ ID NO: 202485 - DNA, 1000 bp, Homo Sapiens
ctagttatttttatttgtctttttttttttgagacgaagtctccctctgtcaccaaggctggagtacagtggtgcgatctcagcttactgcaacctctgcctcccgggttcaagtgattctcatgcctcagcctccctaagtagctgggattacaagtgcccaccaccatgcctggctgattttctgtactttagtagagatgggtttcgtcacattggccaggctggtttcaaacccctgacctcagttaatccacccaccttgacctcccaaagtgctgggattacaggcgtgagccaccacacccagccaatttctggcttaataacattgtagtgaaagaatataatctgtagaatttcaatcctttaaaatttgttaacacttatgtcacaaaattgcttaagttttatacatattttatgtggtacttcaaaagactatgtattttttagttgttatgcagtgttttctctctattatatatatgtgtgtgtgtttaattttgctgtattttactgtttatgttgttcaaatattctattagttactgggacaggtgcattaaaatatcccaacatgactatgaatttgtctaagcctttctgtgtagtttttgctttgcatatttttaaactatgtttctaggtacatacaagtttaaaattgttataatctatctggtgaaggaagcattttgtcattataaagacaccaataatgctttttacattgtctactttgatattaagatacctacaactgactgggtgcagtggctcacgcctgtaatcccagcactttgggaggctgaggtggacagatcatgaggtcaggagcttgagaccagcctgaccaccatggtgacaccccacctctactaaaaatgcaaaaattagccaggcgtgggggtgtgcgcctgtaatcccagctactcaggaggctgaggcaggagaatcttttgaacctggaaggcagaggctgcagtgagccgagatc

SEQ ID NO: 202486 - DNA, 1000 bp, Homo Sapiens
tgagccctctatatgaccagtggggctgctgggggcctccagcccgccagagtgggtgcggtgaggcctggacacacagtcccgctgtgtggggtcggctcatgcctgcctagaccctgtgggcagtggggggctcctaggaatgcttttccagcctggggggcactttggacaggcagggtggtctggggagacgggtgtgtgcagggcagcctcagaagccgccatcaaagggacctagcagacgtggcgccaggcaagcgccatagtgggcacggaagggctggcggtcagtctgttcctctcccagggatggcggggagggggaggccccatggacacatgtgctcagggtgaccagccatcaggggttgcctgggatgaaggggtttcctgggacgtggagctttcagtgctaaaacagagagtcccctgttattggaacttcctggaccttcggaaaggatacagtgactgacctctctggtctgggcagcctcctccctgtccggtgacctctgagtcagaccatctcggccagacctgcccagggccattttgtccaccccctgcctccacacaggcctgcctcatacccaagagtccactttccatttctcccaggcatcttcaggggaggagctgccggccaactccaaccactgctagggggacctcggccagacccacaccacgctcccagccctccctgtggctcccgagccagctcatactttcctgcttccacacctttgcccaggacgttccttctgcctggaacatcctttccctgtctttgttacctctttacccttagggacccagtttccaagtcactcctccagaggacttgttctctctttcccaaggctgggctagtacccctctttgaactcacagccctggttcttctcccaaaaaacctttgtcacgccccagggcaattttctgttgacccatctttttctacaccagatggtgagctcttaggatggagatc

SEQ ID NO: 202487 - DNA, 1000 bp, Homo Sapiens
tatttattaatactcccaactggagatatcagagcatatacgcattttaaaaatgtaagtgcaatggccaggagcagagttccagcttgtaaagcagatgtaaatatgttgtttttataccttagggaggtaagacctctgacttctcaatgaactgaggctctaaaaagcaacctattctaccaagtttattttgcatgcaagcataaggagctgttacatatgtagtggaattttctgatttccatgaacaatctttatccccagaagtttctgctatgccaatttgttgaaattcctaccattgttatagaatcattctcttttgttaaagccttgtacctttgttacccagttaaaagacagtcatcttgaaaggacatcatagatggggtcaataacttgttaggatgaattatgttttttatgtcatctaacaagctctaaggctgtgttctccaatattatagccactagcaacatatggttatttaaattcaaatttaaatttatcagtaactaccacattaaacagtgaaaacatagaaagttgccataattgaaaaatgttttattggacagtgctggtttaatggtaatattttgtgggcaacagaaaattagaaagtatcagagcctgaggatgcatcctgtgaacaagacgtgtggggagagttgctgctgtaaagaatcctaagtcctgagtttagagtaaggtacataattacactgtgttctctaatcatgatcacctccttaccataggccgactatgtagagaaatcactttgctgcttagtatgagacagcacattatatcaaggtatgcgtcattttaatacacctaccaaatatcatagcttagcctatcctaccttaaaagtgatcagagcacttacattagcatggctgattgtgagatgtagcttgctgccactgtccagcatcccaaaagtgatacattctatcatattgtatatgacaagcctggaaaaagatc

SEQ ID NO: 202488 - DNA, 1000 bp, Homo Sapiens
attctggcactgaaaatactgagcaggagcatttcctaggcacattagttatattttgctaatataacaaatgatcacaaagttagtagcttaaaacaacacacatttattctctcacagttctggagctgttcaaatgcccagaatgagtcttacagggctctaacatcaaggcatccatagggctgtttccttctggatcctccagagaagaatctgtttcttgcttcttccagctttagaatctagctgcattccttggctcatgaccacttcctcccatcacttcaaacttatgcttcagtcttcaacattttctactgccctctcttataaggacctatctgattacattgggcccacacacataggcccccaacttgagattccgaatcacattgacaaagtcctttatcatgtaaggtaacatttcttacaggtttcagggattagggcatggacatttttggggtgccattattcagcctaccacgctgggcaatctcaggctagtcacttaacttttgcaagcctagaataaatatttaactcttcaatgcacagacactgatgaagatctacaagcatcaagaccatccaggaaagtatgacctcaccaaattaactaaacaaagcactaagggaccaagcctggagagacagggatatgtgacctttcagaaagagaattcaaaatattatagctgtttcaaagaacctcaacggaattcaagataacacaaaaaactattcagaatcctatcagataaatttaataaagggattgaaataattaaaaagaagcagaaattctggagttgaaaaatgcaattgatatatgaaagaaggcattacagtctactaacagcagaattgatcaagtagaggaaggaattattaagcttgaagacaggctgttagaacatagagagacaaaagaacaaagaatagaaaacaatgaagtgggcttacaggatctagaaaacagccccaaaaggga

SEQ ID NO: 202489 - DNA, 1000 bp, Homo Sapiens
gcacaaaaatcaactttatctgataaattgttttctgaagtgattacacagtaccagacagttttaagtgtactatttgctccataaccttgacaacatctaatttttgcacataaggtaggaagaaaatggtttgtagttaacttccatgcagttctttgcttactaatgagattgaacatcttttctcatgtttatttctatactacagaggcttcttcaacgcaatgcttctataagacttttgccaatattttcctgtcactttttaattaatttttaagagttcttttcttggagttatttttaaatacttcatttttaaaatatgatataaattctacccttttaattaaattgtatttttgaacagtctttgctcatgtgttgagtttgagtagattttttaaagaattttttgcatccagtaaacttgttaaattttaattacatttaatattttatgtgtacaagttttattatatcatttgttgataaaaatgttttctgcattatccttgcaactttcacttattattattattctttcacatttcattgtgcttactaaggccttcagcataatgaatagtaatgagagacaacacacttgtcttgctccagatcttaaagggttttccacatttcaaaaaaaaatgtatcattttgctgtaggacttttttagacctttaacatgttaagaaagtttccttttgctcttagtttgttaagaattttaattggagctagaaagtaaattttgttggaaaacattctctatctctttagatgatcattttttccccttttacactttcactatcattattgtaatcaaattatgccacccttgacattctgtggttaaacaaacattttaaggattaatggcttgtcttagtctgttcaatctactgtaaccaaataccgtatacttggtagcttataaacaacagaaatttatttctcatagttctggagcctgggaagtccaggatc

SEQ ID NO: 202490 - DNA, 1000 bp, Homo Sapiens
aaccaatacaaatactaattgatccaggcaagaatcactgaggctaaagttaatggatgaatatataagaaagaagagaatatttacatggtttcaaaataattcctcataagatacttactaactgaaaaggaaaaattggtaacctgatagtggagaaacttagcagataccacctcaaacacgtgatggaggttaaagctggaacaaatcaacatgtgcctcctgatacgatacatggagaacaaaacatcacttctgcggcattcaggcgaaaaatatattacctcagtctaatcataaggaaatatcaggcaaatccaaattgagagacatcctacaaaacaactgcccttgaatgcttcaaaaatgtaatatcatgaactacaaagacagagaggaagtgataaagattaaagagacaaaatagcacaatacataatcttgattttcatttgttagaaaagatattgggacaaatgatgaaatctttataaagtctatagattagacaatggaaacccccaaaagaggagtaactaaacttatatcggacaaaaacagacttcaaggcaaaaactataaaaagagacaaagaaggtcattatttaatgataaaggagtgaattcattaattgcagatataacaactgcaaatatataggcacccaatactggagcactcagaaatataaagcaaatgttagagctaaagagagagaatgacaccattacagtaatagctggacacttcaacaccacaatttcagcactggacagatcattcagacagaaaatcaacaaacatcacactcaatctgcactatagatcaaattgatctaataggtatttataggacatttcatcctatggctgcagaatacacattcttctcctcagcacatggatcattctcaaggttggaacatatgttaggccacaaaacaagtattttaaaattcaaaaataattaaataatatcaaggaccttctctgatc

SEQ ID NO: 202491 - DNA, 1000 bp, Homo Sapiens
tgataaggatgatatgacatggcagctgcctccaggggttattatctagctggggagacagacacaactaaccaccacccctgtctccactcaccggaacagggactcccccagggaggagaggtactccagaaagatttcttctgtgacttctgtactccccacatcaaccacagagtctggaggcccaagcaatgtccctccctaaaagagccaacccaaaggaagtcattaagttaccatctccactgaatgttttaatgtggcttcccacagtagaccacaaacactctgttctgactttttttttttttttttttttttagacggagtttctctcgtcacccaggctggagtataatctcagctcactgcaacctccgcctcccgggttcaagtgatcctcctgcctcagcctcccaagtagctgagattacaggtgcctgccaccatgcccagataattttttgtatttttagtagatacagggtttcaccatgttggtcaggctggtctcaaactcctgaccttaagtgatccacccacctcggccttccaaagtgctgagatcacaggtgtgagctactgcgcccagcctgacttcatatttaacttgcagagcaccctgggcagatgaagaatgtgatttgctatttgtatcaaggatgcaatagcttagaagcattggtgtccaatcctttggcttccctgaggcacactggaagaagaatggtcttgggccacacacaaaatacactaacactaatgatagctgatgagcttaaaaaaaaaaaaagataaaaaaatctcatgttttaagaaactttacaaattcacgtcaggccactttcaaagctgtcctgggctgcgtatggcccacaggctgcaggttggacaagcttggcttagagctttctggtcacttttcattgccatgtgctggcagcatagttaggagtcggacttcttgtttctagaggggagggggggccctgggaag

SEQ ID NO: 202492 - DNA, 1000 bp, Homo Sapiens
gagtagagcctcagtggagagccaggggagacaatgggaagaccatccaatcaattcagttacagctggagctgagcaggcaatcctgatttagtgccatgggttaactttgagctgattctcctggttggtttcatattttcaagcatactttaaggtctttggaggcaaagatggcagttacctgcagaccttcccaagcactttgcaggatgttatacacagagaaaatgtcaacagtttgtactgatgaaggagacaaagagagagacaggcatgcagagggagaggagataaagaaaaagggatgccagagaaaggatcttactgttgcttacctctttttgagtatttctttcttttcaaatatctagtatagtggtttccaatgagagcaggactgattcctagtggggtattttggaaacctctgcaggtgttttttgttgttgctataattagaggatgccattggctaaatttagaggtgaggtcaagggatgatcaacattctgcactctacagggaaattccacaccacacacaatagtcccttgcctctcatgactttcaaatgtctcagcagatagtcattttagtgaaaaagacgtcaataagcagctatgtataaaatctaaaccacattttacatttaaactctgagtgtttctgcacattttaatatgtgctgagttttctagcaaagcatctaccatgtaaattgagggaagatcgtactccactttgtttggaattttaccaagagctgctcgtcattttgtaaagtaatgataccagtagcagtgctgctggcagcatctgagtcatcaaacgatgcacctgtatctttctgcatttgtagctgtcatgtgtaaaggaattctgttgatgcctgcacaagatcatttcgtcctgtcttctagagcactggggtggtcaaatatcttggcttgcctgggactgaggggtttcctgaatgtagaacttttaatgctaaaat

SEQ ID NO: 202493 - DNA, 1000 bp, Homo Sapiens
ttcataactcaacttccttcacaagtctgttaattttccattgtctgcacataaaccatgtttttttaaaggccctcagagaccctacagattttaacctctgtgtagccaggagaagagaactcatatatatcacaaactgtaaagatgagtaagaagttgttatttaattcaaattcagacctttcatttgccagctgatttcgggggaaaacagaagtctcagtgatgtggtctagcacatgcaccaagtccattgtaggaagaatcagaaagttgatcataagtccttccagtggattactcatatttgtcaggtttgtagctggtagaaggccctacatgcttgctttaagaccaattagtagacactcagatggtcactgaattgctttttctgtgtgccaaattatattttcttggatgaaataaatagcccttaaccctgagaaaaacacaatggccagagagcattataatttgttgacactcctcattccctcatccttgtcctctgaaaacttaaataaatgagtactcagattgaagctaaccagcaaatctctcagattccattgtttagcatagcagagtttaatgctttccatattacttaatatttccttctttggactttccatataaaattcaaatactttctatcagaatagtcatctaagagaaaatttccattagcataaagcacaaagatacatactttctgcataaaagaattatctagaaaatctcagtctctctgtgtgtacatgtatatgcatctatatctaatatctaatatatgcatgtatattatatatatcatgtatacattttttcttttttaacgtctactcccttggaatttctatagccatgtcattgcctgtggaagccttcgttggctagaaggattacaatagtaatacaataaaaaagtaggccaggcgcagtggctcacgcctgtaatcccagcactttgggaggccgaggcgggcagatc

SEQ ID NO: 202494 - DNA, 1000 bp, Homo Sapiens
tgtagcatatatcaaaatttcattcctttttatggctgaataatattccactgtatgtatatacgcattttgtttgtccatgcatctgttgatggacactttggttgtttccaccttttggctgttgtgaatagtgttgctatgaacatgggttacaagtatcttcaagttcttgtttttaattcttttggatatacacttaggagtggaatgctgggtcatatagtatttactaggatttttcaactaacattaatgtctcagtgtgttatttattatttatttatttattgagatggagtcttgctctgtcacccaggctggagtacagcaatgcatcttggctcactgcaacctccacctcccaggttcaagtgattctcctgcctcagcctcccatgtagctgggattataggtgtgcaccatcaagcccagctaatttttgtatttttagtagagatggggtttcaccatgttggccaggctggtctcgaactcctgacctcaagtgatctgcctgcctcagcttcccaaagtgctaggattataggcatgagccaccacacctggccttagtgtgttatttctaatggtgatttaaactggcatctatggagttttctacgacacatgaaaggaagacacatcaaatgtgtttctttgctagagtctcataaatgtgaactacaaaaataatcaagtagaaatgaaagtgggcatcaaccaggttctttatatcttttgtgattccaagtcacttctgattttaaaatattattcaaaaagcaaactttgaaaatatgaggatcagaaactttatttttaatcaacagaaactgtcaaatgtgccgtgaagaaggccaggactgtgcatgtaccagctggttctttgaggcactcctcctgcctcgcctgtgttgcccacagctctgcgaacttaactcttctaagctcagggaaccggcgcaaagtggccttcctcctggctcatgcatgatc

SEQ ID NO: 202495 - DNA, 1000 bp, Homo Sapiens
cctaagatgtattctggggaattcagccccatcagagtgtatgtacctttttccctgtcagacttgaagcgaattaaaatagacttaggtaaattctcagatagccctgatggctatattgatgttttacaagggttaggacaatcctttgatctgacatgaagagatataatgttactgctagatcagacactaaccccaaatgagagaagtgctgccgtaactgcagcccgagactttggcgatctctggtgtctcagtcaggtcaatgataggatgaaaacaaaggaaagagaacaattccccacaggccagcaggcagttcccagtgtaaaccctcactgggacgcagaatcagaacatggagattggtgccgcagacatttgctaacgtgcgtgctaaaaggactaaggaaaactaggaagaagcctatgaattactcaatgatgtccactataacacaggcaaaggaagaaactcctactgcctttctggagagactaagggaggaattgagaaagcatacctctctgtcacctgactctattgaatgccaactaatcttgaaggataagtttatcactcagtcagccgcagacattagaaaaaaacttcaaaagtctgccttaggcctggagcaaaacttagaaaccctattgaacttggtaacctcagttttttgtaatagagatcagtaggagcaggcggaacaggacaaacggatttaaaaaaagaaaaaaagaaaaagaaggccacgctttagtcatggccctcaggcaagcggactttggaggctctggaaaagggaaacgctgggtgaatcgaatgcctaatagggcttgcttccagtgtggtctacaaggaccctttaaaaaagattgtcccaatagaaataagttgccccctcgtccatgccccttatgtcaaggaaatcactggaaggcccactgccccaggggatgaaattcctctgagtcagaagccactaagcagatgatc

SEQ ID NO: 202496 - DNA, 1000 bp, Homo Sapiens
agggtttctctttatcgtttacataacgctggcgtaatgtacctttaagaaggtaaaattcagtgtcacattacctcaatgttttaggttggtttttggtgttagcttcactctcctaaaccctgcaacacaataggaagcttagtgaaaggaccacatattaaccaggaaactccatcacctgcactgaccaaagctgataaactaaccacccatactacattcaaatagtctgatcatctataagtaataaaagtgtctccatagaaaccaagtatacagggaaatctgcttacagtacaggatctgcttgaacaaaaagacttcacttcaagccaagattttgctctaacttaggttcacacatcatcatacacggatagcattcgatatcacacctttggaatttcacagtcctgaagattacaaaaagctctgcacatggagagagaaaggggggaaaagctttgggagaaaagatttgcatatgtagttacaaaaataccaaagcagattccatgctaagctctgccaaaaagagaacaattactgttgcccatcagcacgcagccttgaaattatattctcttctccaagcagaagcagtcatcagattatcaaaatgaggttatcctgactcaattcaaatagttcttatatggaataagcacagtgcaatcaacagacaagcagctatttccttcccacacaaactataatcttttgtgaaatatatttttaatgaagaatacataaccctcctacatgtttacttctgccctcacactcctacacataaaagtgcaaatacattttaaagaaagggagaagaattttatagcttctaataacatcccttacaacgtagggcaaagaacagtagcatctgaactaaccctcaaatgaaactttttcatatagtgtgatgcttatgaaagtaaagctagtctccagcagctcctcaggaaaagtacaatgaaatcgacataaacaatggatc

SEQ ID NO: 202497 - DNA, 1000 bp, Homo Sapiens
acctgagctgatcctcctgtcctttcattccacaggatcaaagcaaaccactgaggaggcagctgtattatagcagctctgcttgctggatgcagcaaacatttcataaattccactccttgaagcaagtctctacctaatctacccagagctgggacaatcaatgaatttctgaattcattagaccgattattacagggtaaccattttttctttggagaaatataatgattgtatgccaactttacaaagcagctgtttctgaccatctctttcttctggaaggggctaaattttcccccacaatattgaataaaagtggtttaaaagtacttagctcattatatttaatgcatattaacaagtaaacaatatatgatgctaaatttctccagcagtagtagctgactaccacttaaaggcagccaaactttaacagtggcccatactttccatgttcaatgacacagtgaggaatgccaaaccctactgtaacacagcagcatagattaactgatgctccgaaaaaatttatagaaaaagttgttgttgtttattaaacaatattatttggcatgtatttgtatttttttataaaacaggataaaattttcaaagtgttccaaactgacattgttaagtgtttcaaagtcagtcaagcatttcatccccatgcctccccttcaatagaactgacatcttagtatctattactaggaattcctttcagtagaaacctaaatttcaagttatgaatcttcagaaaatttaccatcctcatggttaagataacattaactggatgtataatggacactgaagaggcaggtattaggcatgacatcacagatcactctaaacagtgaacgtgaaagaaatgaaacccaaaacaaatgcatagagctataaaacattagcattttaaaagaatcaactagggctggccacagtggctcatgcttgtaatcccaacactttgggaggccaaggcaggaggatc

SEQ ID NO: 202498 - DNA, 1000 bp, Homo Sapiens
ggatttcttataactttgtaataatacacattctcagagtccaactattaaaatattcattgtttaaacagccaggcatggtggctcatgcctgtaattccagtactttgggaggccgaggcaggtggatcacctgaggtcaggagttcaagaccagcctggccaacatggtgaaaccctgtctctactaaaaatacaaaaattagctgggtgcggaggtgcgtgcctgtaatcccagctacttgggaggctgaggcaggagaactgcttgagcccaggaggtggaggttgcagtgagctgagattgtgccacggcactccagcctgggtgacacagcaagactctgtctccaaaaaaaaaaaaaaagaaaaaaaaatcgtaaacaagctaaactcctttaaaatcaactatctgaaatttaacttatagtttgataatgttataaaaataagaaatggagaaattatccttaaaagaaaaccccaaccatttatcactgcaaattattttgaagaagttgcttactgtgtcatagattctgagcctagtctgaagtcctgggacttgttcttattgattgattgctgtggaagaagaggaaaaacaagtagtaagtaaaaaatgagaaaagacaacacagtcaatattcacatgctgaaaacccaccaacttcctgaatggggagagaatatgcctgttctgaacaggaatatctatgcctgtcctgaacatatattgtctatcaggacaatatatttgctcccatgaaaaaccaaggaagtagttctccagagagttcaaacactcatttataagtaaagtcagctttcaggtatgtgaccaaaaaaaaaaaaaaaaaatcagttgtgaatcagtttaaattaatctcccaatacaatgtggtatattacttaagctctaaatatatcttttagcctgcatctttccttcatattctttatagtatactctatattttcatagtaatacacattgatc

SEQ ID NO: 202499 - DNA, 1000 bp, Homo Sapiens
aataggaggtgaaggaaatcatgcacatgtgggaaggggagagctgagttatggatcccaggagttctcattttggataatttcagaaaatgcatagcatatcactgctgggtgatgtgattgttaaattgttgttctggcctcagaaatagagcctgggtgcagctattggtgtttgggaaaagaaacatgtttatggtattatatgttcaaatgacaagtgagatttaatatgcaggaatacaatatctcctgcctttactgcccacctactctgaccatgggaaatgaaatgtatacaatatggtgctcgacgttgagcatcaggtacataatcccaccttctagggactcttaagaatgtctctgccctgatttttttttttttttgagattgagtctcgctctgtcacccagactggagtgcaatggcgtgatctcagctcactgcaacctccccctccagggttcaagccattcttctgcctcagcctcccaagtagctgggactacaggcatgtgccaccatgcccgactaatttttgtatttttagtagagacagggttgtaccccatgttggccaggctggtctcaaactcctgatctcaagtgatctgccttcctcagcctcccagagtgctgggattacaggtgtgagccactgcgcctggcctgcctgtcattctataccataaggacagactctggagttcaaacccagaaatctgtgttttaacaaactcttcagaaaattctgacacatactcaagtttgagaaccactggcaaaatccttcagccatttattccaggtgatgtttctttctactattttagatccaactatgttgttttttgatatgtgttgtttttactctttcattccttttttttttccaggtatccaacgatttttattggacaattgaattatttctaacaattgtttttctaccctgaataacctccccccttgaacttttttccaggggtggggatc

SEQ ID NO: 202500 - DNA, 1000 bp, Homo Sapiens
aggcctggatgttgcaggcctgggactagggagggagggctggctgatgcactgaacatgggaatgcgggacaggcaggactggaacagcagccaaggtggggtggagactgggctcacctgttaggaagtcccggacctgctggattaggagccgtgtgcgtctgacatcttcctccatctgggagcggctggcgctcacctgggtctccaagcgctgggcactggattgaatctgtgaggcagattcctcggctgccctaatctgttgacatacactctaggtcagaaggggtaaggccccaagggaacctctcagcagccccacgattctgcggatcatcctctatgccaagacctacctaggaagcatttgtaaccaacccagcttacatgtggatgttcagtaaaagagaaaaaaaactatcttgcacttgctgtggcaccttaagcaggtcacctaaaatctctggactttagtgtaaaatgggaactctgacttgcccgggggatctatcctgtctgcctcctcctacctgtgcccaccccgcctcggctgcacttaccatctgcctggtccgctggagctgggcattgaagccccgcagctgctcagccacctgccccgccatcaagaaggccccaccggccctgggaaggacacccctgcagcgggagccacaggctgtgccattgtcttggggacatagctcaccagggcatgatattggggtgcaagccatctgcctggagttgccacagagctgtggacagatggcggtgttaaagaggctacccaaagcccctcaataaccaatcccaccccacacctgggaaaccaacagccagacatctccatgacaaccaagcaccagaaacagccagacatctccatgagagctaaggaccagaaactggtttccttggcaaccactgagctcacagtgagcagtacaagggtcgggatggctgggggagtggggttctcacaggggcagatc

SEQ ID NO: 202501 - DNA, 1000 bp, Homo Sapiens
gatctctatgtgctgacatggaaagatgctggatacattttaataagtgagtatcatggcatgttagggttgcaatagcaaagtaccacaacctggatgacaaaacaacagaatttcattgtctcacagttttggaatctggtagcccaagagcaaggtgtacacaagattgattccttatgaggctgtgattgggggatgctttccaggcctctctcattgccttgtacctagctgtcttccctccatgtctactcacattgtcatctccatactcatatctctatgtccaaatatcccctttttatactggcttccaatacggccagcattaataacctcattttaacttgattgcctttgaaataatcctatctcgaaatcaatgccacattttaatttcagtgtagaattttgtggaagaggcaattgaatctattatagtggcagaggtaagtggcagatctatatgtatatcattatatcattacacatgtgtgtatatatgtacatatatgtgtatatataaaatagcacatctatctttatgaaagcctgaaatcgaaaatcatattttaaaatttacacggccacattgttacttgtggaaatttctgagtaggaggctgagttttggaggaactttgtaaagaaagcaatgcaatttctatgtctttttagaatttttttgcaacaaaaatacatgcactatttacttttaagtcaaatactgaaatgaccctaagaaaaggaagaggagcactccagtagtcacattaacagtaacctgatggaaaagaaaaaactccctgaaagttaaatggcttcacacgagttgatttttgtgcacataaattctgatttaagttggcagggtgttatgggctgaattgcgcccctttccgagttcatatatccaagcctcaacccccagtactgcagaatatcactgtatttggagacagaacctttgaagaggcagctaaggtaaaatgagatc

SEQ ID NO: 202502 - DNA, 1000 bp, Homo Sapiens
taatttatcagagtctcagttttcttatctgtaaaatgggagtaatgatattgcctactttataatgacctcataaagttgttgggaggagttaattaggtgggcacagagtaggtggtaaaaatgtcagttccctaaaattccttataatttattacagaaaatacaatctgccttgtgtggaaaattgaattagatgctcttgggtcccttataatgctgagattctctgttggttcatcctttctgctttgttttgtcaaataatccagaagctgttgcctttttgctttggatttaccttcaaatgggttttaggtatagaatcttgggaaattattattatttttttgcctcaaaatccagcttaaaaatgttttacaaatatcttcagctgctttgaagggattttacatctttattgtaaagtggctctgagtttccctgaggaagatgagatttttgactaaattgctgacatgttgcactttgtagccaaattgtctagggagatacacatttatagtagatagtgtacgcttagagtttgtgatgtactttggcttcaggcttttaaataagtccgccaaggcctgttccaaaaaccagatctttaaaacgtataccttttaacatgcctctggtggactatgcttccctggattcaagcccttccttttaacctgggctagcatttgactaattgaatgtggcagaagtgacaatgcacaactttgtaggctaaatcataagaagacttgcaacttcagtctgtgttttttggaatgtttattctgggagaagctgggaaccaggtaagaagtctgactgtgtactccaccatgttggagaaacttaaataggaagaggccacatggagggagagagatgtctgaccagcccttagctgctctagtcgtcccagctgaggtgccagaaacttgagtaaaatagccattttagacatgcagccctggtggctgcaattgcagaagagatc

SEQ ID NO: 202503 - DNA, 1000 bp, Homo Sapiens
aggaccatcgacgctatgaagaaactgcatcaactaacaggaaaaataaccagttagcatcataatgacaggatcaaattcacacataacaatattaacttgaaatgtcccaattaaaatgccccaattaaaagacacagaaggcaaactggataaagagtcaagatcagttggtgtgctgtattcagtagactcatctcacgtgcaaagacacacataggctcaaaataaaggcatggaggatgatttaccaagcaaatggaaagaaaaaaaaaaaagcaggggttgcaattctggtctctgataaaacagactttaagccaacaaaggtcaaaagaaacaaagaaaggcattacctaatggtaaaggaatcaatgcaataagaagagctaactatcctaaatatatatgcacccaatacaggaacacccagattcataaggcaaatccttagagacctacaaagagacttagactcccacacaataataatgggagactttaacaccccactgtcaacattagacagatcaacgagacagaaaattaacaaggatatccaggacttgaactcagttctggaccaagcagatctaatagaaatctacagaactctccaccccaaatcaacagaatatacattcttctcagcaccacattgcacttattccaaaattgatcacatagttggaagtaaagcattcctcagcaaatgtaaaagaagagacatcacaacaaactgtttctcagaccacagtgcaatcaaattagaactcaggattaagaaacagactaaaaactgcacaactacatggaaactgaacaacctgctcctgaatgactactgggtaaataacaaaatgaagacagaagtaaagatgttctttgaaaccaatgagaacaaagacaaaatgtatcagaatctctgggacacatttaaagcaatgtgtagagggaaatttatagcactaaatgtccacaagaaaaagcaggaaagatc

SEQ ID NO: 202504 - DNA, 1000 bp, Homo Sapiens
cctcctgcgaatagaggagctcctcctgcctgactatcttcaagctgggacatcaggttttttttcccctgggtttggactcaaatggaaacattggctcttcctgggtctcaagcctgctggcatttggactagaacaacaccattggctctcctgagtatctagcttgcccaactgcagattttggaacttagcttctaaaatcgcacatgccagttccctctactgaatctctttgcatatcaatatcatctctatctatccatctctcctcttggtgctgtttctttcgagaactgtgactaatgcgctgggcatcaaggatatacaaattaaaatcccactgatatgctagtttttctcatgcctcttgattttttgagaattctctgggattctcctgatcagaatctagacaaagcttatccaatgtgtggcctgtgggctgcatgcagcccaagacagctttaaatgtggctcaatgaaaattcataaactttcttaaaacattatgagtttttttgctatatatatatatatatatatgttcatcagctattgttagtattagtgtatttatgtgtggctcaagacagttctttttttttgagatggagtctcactctgtcacccaggccggaatgcaatggctcaatctcagctcactgcaacctccgcctcccgggttcaagcgattctcctgcctcagcctcccgagtagctgggattacaggcgcgcaccatcatacctggctaatttttgtagttttttctttttttagtagagacagggtttcaccatattggccaggctggtcttgaactcctgacctcgggtgatctgcccgcctcagtctcccaaagtgctgggattacagccgtgagccactgctcagcctcaagactgttcttattcttccaatgtggcccaggaaagccaaaagattggctatccctgatctggacattcttaagtgtctcccaacttaaaaaatgatc

SEQ ID NO: 202505 - DNA, 1000 bp, Homo Sapiens
gtatttatggtttatcctacaacagtgaggctgacagccacaggcagaagtttgcctaataacttcattctcatacttcagaggttcggaaaatactgccttgctgcctgtggggtcctatcctatttgaagttgagatcgtatcttctcaccctctaaatattaaacttgaaagaattatgaataaatatggtcgcaggcctgtcccaaaatatttgtgagtacattactctcttgttctagaatttcataattcataatttgggtcaacagtatacagattgacatttggtcattgtcatttattagctaagttattttaattctcaaggcatcaatcttctcatgtggtcagtgggtaggactctaatcctcactacacatcacagacagtaatgagactgtgtgtgcaagaactcatcctggtgctcagctcatagcactggtggtatttattattattaaacacacatggaaggaacggacatggccgttgtttggtgggggagcaggaggacacattaagaaaatgataaaaacaaaaacaaaaccaaattacattacttgattattgtttcaggcttttattggtgaaatcagtttgataatttagaatgctcagattgttaagtgatcagttaagacaaacaaattgaccatttttttttttttttgagatggagtctcactctgttgcccaggctggagtgcagtggcgtgatctccgctcactgaaagctctgccccccgggttcacttcattcgccattctcctgcctcagcctcccagtagctgggactacaggtgcctgccaccatgcccagttaatttttttgtatttttaatagagatggggtttcacagtgttcaccaggatggtctcgatctcctgacctcatgatccacccgcctcagcctcccaaagtgctgggattacaggcgtgagccactgcgcccagcatctgaccattttttaactcatggattacatcatccaac

SEQ ID NO: 202506 - DNA, 1000 bp, Homo Sapiens
cccctgggtgacagagcaacactccatctcaaaaaaagaaaaaagaaactgtgtgttaaattgtcagtgaaacaacagttgtgccaggtgggactcattaggtgctgggtctctggctgctggagtgaatgctcttaataagagtctatggataatttacattgtttaagggaaaaattaattagatatcagaaaatttgagatccagactcttctcgttagatgagaacgccaagcttagatgaggtttccacacaattaagcacagtcatgaatgcagaataaatgtccttaaaagttttgccagggccgggcacagtggctcacgcctattataatcctagcactttgagaggccgaggcgggtggatcgcttgagctcatgagttcaagaccagcctgggcaacatggcgaaaccctgtctctgcaaaatatacaaaaattagtggtggtgcatgcttgtagtcccagctacttgggaggctgaggcaggaggagtgcttgagcctgggagacagaggttgcactgagctgagatcacaccactgcattccagcctgggtgatagaaccagaccttgtctcaaaaaaaaaaaagtttgccaggatggtggcttatccctgtaatcccagtgaccttcgaggctgaagcagaagggttacttgaggtggggagttcgacattagcatgggcagcgtagcaagacctcgtttccaaaaaagtagaaaagaaattacctgggcattgtgacacatgcctgtagtcctactcaggaggatgaggtgggaggatcacttgagcccaggaattcgaggctacagtgagccatgattgtgccactgtactccagcctgagcaataaagggacccctgtctcataacaacaacaacaacacttttgaaaatattgaaacatttgcataacataagatggaaatgtgaatgtcctgggctatgaaatgtggaagagacaattttagttgataaaaatttaagatc

SEQ ID NO: 202507 - DNA, 1000 bp, Homo Sapiens
gctacttgggagactaatgcaggagaatcgcttgaatttgggaggtggaggttgcagtgaatcaagattgcaccactacactccagcttgggcaacagagtgagactatctcaaaggaaaaaaaaggatgtataaggattttgtttaggtacggtggctcacaactataattccagcattttggaaggccaaggtgagtggatcacttgaggcaaggagttcaagactagcctgggcaacgtgacaaaaccccttctctacctggtctctaccccgtttgtacccatctctaccccctctctactaaaacacaaaaattagctgggcatggtggcacacgtctgtaatcccagctactcaggaggccaaggggtgagaattacttgaatctgggaggtaaagcttgcagtgagccgagattgctcccctgtactccagcctaggcaacagagcgagactctgtctcaaaaaaaaaaaaaaaaaaaaaaaaagatgtacgagttttaattaaataaaactgcatggtgcagcttgctcaaaaatggcacaaataccatattctgacatatgtggaagctaaaaaagttgatctcatggaagtagaaagtagaatagtggttactaggggctggaaaggggaggccagggggaataacgagaggttggttaatggatacaaaattacagctaaattggaggaataagttctagttttctgtagcactgtagggtgactgtaattgacagtatgttgtatattttcaaatagctaggaaagtggattttcagtgttcccaacacaaaaaaatgataagtgtttgaggtgatggatatgctaattaccctaaattgatcattatacattgtatacatgtatcaaaatatcacactttaccccataaatatgcacaattgtgtgtcaactaaaaataaaagcaagccaggcacggtggctcacgcctgtaatcctagcactttgggaggctgaggtgggtggatc

SEQ ID NO: 202508 - DNA, 1000 bp, Homo Sapiens
acgtgatgaatatttagaggttaattaaaacatgagtgatatattttaaacccaggtttaggatcagagtgagggtgatggtagctctctgaactcccagtgactcagcccaatgtagagggtcatggttgtcttggaaaccacacattccgtgggcatggaccaaatggagacagaagggtcaaaagagattttgagcagactgaaaaacagaaatttattccgaggagggctgatggctgatgcagtgactgtttagcctgagggaaggacctgggcacagaggtagctgcagtcaaatagctggggagggtgtgggtgctgcaggaagagaagcactgattccattaccctgtgtgacaccagagggcagacaaaggccagcacgtggttgctgactaatacatggttgtgtacaaaagcaggaatgaatgaagttacagaggacagattttggcttaattgaagagagaatacattatgagaaaagatggaaccaggtctgggcttggaactagatctgagtgtgaattccagctccatcattcattcattcatatattcaaacaagtactcaatgagtatctgatgggccagagagttgggcaactgtcattatgtactgatcaacaacaatgaggggtgggggatttaggatgcagtgtttaatacagctcttagcttggggtcatcaattatgccatttatgaaatcaagataatgattcctaactggttgcattgttttgaggatcagagacaatatgtgaacagcacctagcaaaatgactgacccagagagagtcccaagcaaatgtagcaatccttgacatcacacaccatcaagtcaagagtttttgccagagaagatcagggtcaggccagttttcccagagacccatttcccagccagctggccattttcctgaaagggttaaggaatctttacaaagagtttaccaccaccccagccagcctctattgttttaaaagccatgatc

SEQ ID NO: 202509 - DNA, 1000 bp, Homo Sapiens
gaaactggatttggatctgtttcatgttttcacttgcgttctctgacccctacttagagggcaccaggtgcttcctattctaaccgtttgcaaattcaagacttggttggagggccattcaggggactggtgtggggttagataggatctggacacagcgactccctcgctcctgctccagtattttgaccttaatttgaacagttcaatgaactggcaactgaagtcgttttttcccactgaactagacctttcattgttttgcagaggaagatgactcatagccaggttctaccattgtgctaaagtgaaattttagtctaggactaaaggaacacaggccaaactttctgtctgagctgcagagtattgaaacttagattgtgagctgggcaggaattcctgtggccctctgtgtggagttgctctcaaggaaaaggagcatttaaatacgtttttgactccaaatttaatttttagtaatatagttcaaatgtcctttaaaatatcttaagtaatcagactgttttctaaaaaaaaaaaaaatgtaatgcaaaatgaaaattctacaaagtagaaaactgtcatttccttcctctctccaaaaccattgttaatagtttcgtttcttctgctacccttgttttctatgaatgtaaaaatgtatgcctctatgggtgagcatggcttttcttttttgaaccaaaattgaaaccatcctgatttagtggcatcccacttaaaacattattaaaaactacctgtgtacatgtatcttcgcttacttgggcaattgctggggcaaatatgcttttactgttaaatcgtcatctacaacagatgacatgtagagagatgaaatgtagtctatagttgtttgaacttgcatttctttttttgtggaactgaacttctctgcatatgtttattggctctttggacaaattcgtcagtgatttggcttttcatgcattgctcattttcttttgttgcttggatc

SEQ ID NO: 202510 - DNA, 1000 bp, Homo Sapiens
aactgtggacctctttcaggacagagagaacccagctccattctttcctccttaaagaagctaaagctgaagtagagtccgaggagggggaatcaggggcagagagggagagaacagttctatgttagtaaacaagatttatttactttcagttttgattggcagctggctcagggctcaatcaaataaacttctactattttcattccatgcaatgctctatatttggcagcaagatcattacagacaccatctattccagttctgggaacccctagacttagcagccataaccactttctggctgtggctatagaatttgttccatttgtctgatttgggcttgacctgcgcagcagctattttttttaaggagtctgtttcaattgagggcatttactgccccattattataacatctcatgttctatcactgcttcaccaaaagaattatgagagttttgcgaggcaacaggggtgacggtaagaatttgtctagatttcattaggtcagtttctcattttccaataggtaatcttcatcagcattacaaacccattctaggacaataacggcccaaagactagtcaatacctcatccatggcttcctatgggagcttttctctttcaaggaaatctcccccaaggtaaccaaagctcccttatagcagcctggccccactctaagaaattctaagtctcctagtgaatctaaggttggtgtgatagtctacaggaggggataagctgtaaaatggtgcaactaaaagaaccttgagggttaatactttctgaacaagtattacataccccacaccttcatcttctaagggaaccacccaaggttatagctatttgcttggtttctacctatagtggttacaaatttccttccttgtatgccagagcatgaaattataactgttgttacaaagagggtcagaaccttcctccagactagattgggtcactggcctacttgtcacaatgggtggatc

SEQ ID NO: 202511 - DNA, 1000 bp, Homo Sapiens
gcctagaagtaagtaaaaacagacatccatgtgctgggctctgtgttgtgaacatggcactgctcaggtacgtgatgtaagcacgtggtccaggggttgctaagcttgggctcactcagacataaataccaacgactgaatgacaaaggtccatggtagccaggtaggatgcttctgagtggcagatggtcctgttctcacctatactgtcttcctaatagtggagacttaggagccacacgggcctgggttcaattcctgactctgtccctcacaaattgtacaagccacttaacctctctgagcctcagatccttcatcttaaaaatggaacttaataacagtaacctcattataaggtttctgcaaccattaaatgtgtgaaactcttagaccagtgcctggcacataggaagtgctggaaaatgtcagcttctgttatccttacactaacactctgcctgcttggcgtgctttggttgaaaagccaaactgaattaaattgcgcagagaaattttatccattcttgtggatgaaataatggaaaggaccctctcaagggtgcactgttaacttcctgttggtaggcacatatttctatctttattactgttgcataatcgcccttatattaggatgtcagctcagcacactgacatatcaggactgtatcattgcctgtagagattgttgctttttgttttaaggagaagggattagaaaccctgtccaaatgttgatttaatgatattttgttacagacgtataattttcagatgaaatcaaacccttgtaattaacgtatgaccttcatattttgcataacgatcagcgtatcttgggatgaaaatgagctgagaccactgtgcactatcagctccctgttacctcggattctcgaattctctttttctggggttggtagaaagaggccatttgtctcttgatggcgcttcttctagcttctgtctctgatttgctctctggtcttggatgatc

SEQ ID NO: 202512 - DNA, 1000 bp, Homo Sapiens
cgcaaaaaaagggtccctgtcgcttctctagtttctagcgccttgcctcctaagggggctccccaaggcccgacccccgacccccgtcctgggggaggggaacagctgcagttattgcctcagagcctctcctagccgggggacagatataaccgacccgggccatcaagcccgaccctcagtaggacgcccctcacacagcccgtgcgttctggcagaaagagggtctccagatccagcacaccccaaaaaagatgcccagttaaatttgcatttcagataaacaacaaatgaatttttagtataaacatgtcccatgaagtatttgggatgtacttacactttgaaaaagctttccttgtttttcttgaaatgcaaatttgactaggtgtcctgtatttttcttctagcaactctagccgggaacggatttaggtgcagggagggagggggaagcttgaggagaaataaaaacatgtgggaagccctcactatgcaagatacttatttctatttggtcttttgaaaatctatctatataattccatttataaaaacccagctagctttttaaaaatcctacttctctctgttttgtttcaggtaagatcaagtacaaccttgtctgtgactttttttatttttattttttttagacagggtctcactctgtcacccaggctggagtgcagtggcaccaacacagctcactgcagcctctacctccccagcttaagcaatccttccacttcagcctccggagtagctgggaccacaggtgtgcattaccatgcccagctaattttaatttttttttctagagacagagtctcactatgttgcccaggctggtcttgaactcctgggctcaagcaatcttcctaccagggcctcccaaagtgctggaattacaggcatgagccaccatgcctgccccctaccccacaacttttttaaaaagttagctttcttaacagatttttaaaagaagtgactgatc

SEQ ID NO: 202513 - DNA, 1000 bp, Homo Sapiens
tttcatttaatcctcacaacaaagcactcatcccaaagaggttagtctaaaccggttgtaataatcccatcctctttgctagtgatttgtgtagtttgaggctgatgaaatactagaagcatgaaggcataaagaaagtctggagtaagtttttacaagcatgttttctcagtcctaagagaaagatacaggaaaacattgcctcagttcccctcgacactggtgcagctaatctgggttggtcttggaatggccatagccatcttgcaatcccgagtaggggcagcccaaggtcaaagccacccatggccatagcaagaaaaaggacctgactgatgtctttcagctgctggttcaacctgcacttgagccagtcctacttctgaacttcatgttttaggagatacactttcttatgattaaatccattggagtaaggtgttctgctacttgcaatatgccaagagcattctaactcatctacgcaagtgttaattttttttaagtaataaaacagaatattctaagggtaatttgcccaagatcacactgtttccaagtattgtgtaaacactgatcccttgtgagtctcccattagttcatacttcttcaacaaaactgaaatctagacatttctggaaatgtctattcctggaaacttcaggaaggagggcctaggatacagtaaaaacaacactggatctgaaaaaataagatctgaaattttattaatcacagggcaacacgaaattcactggagttctttgatttttaatttcatcagttgcaaaatgggaagaagtgaccaggtgtggtggctcccatctgtaatcccagcactttgggaagctggggtgttagtatcactttgctccaggtatttgagactagcctgggccacatagcgagatcccatctctacaaaaaataaaaaatgagccaggcatggcggcatacacctgtggtcccagctacttgggaggctgaagtgggaggatc

SEQ ID NO: 202514 - DNA, 1000 bp, Homo Sapiens
gcatttcatttagtaaacatttattgagcacttactatggaccatgccctgttatagtcatttggaatttattttcacatagataaacagaagagataaatagtagtagcttttttgggataaatagataccaaataaatcacagtgttcgctttgatcatgacaaacttttgaatacatgttttctagagttatatattgatttggtggtatttttattttggatttggatcagtcagcactaacataaaaaatggcctctttcatggtgcaaattagtaaggcttcactttcagctcttgaatttttccaagactcattattccagtctgtagattattctgagccttagactctcattttctgctcattagcacctcaaagaatggagaggaaggaagagagagaaacttcagtctgacttgctacttgttagaagatttggtaaagaaggtgatgaaattaatatttagttttcaaaatcaggttacagattgtttttgggcttgttcttgcctgcagttcttgctttctctcaaccatagctaacttgctgtctggatacatccgagtgtatttgcctcatgcacaatgaagggtaggattaaccttggaaatttgctgtgggcaaatagcccaagaattaatacatttaataatacatttaattattttaccaatcacactggttatttgcagtgtcaaagcagttaccttggtatgatataaggacatggaattaattttgttgtttataatctttgtgtgtgtgtggggtgggtggtgaggacggaatcttgctctgtcgcccaggctggagtgcagaggctcaatcttggctcactgcaacctccacctcacagattcaagtgatcctcctgcctcagccttccaggtagctgggattacaggtgtctgccaccacacctggctaactttttgtgtttttagtagagatggggtttcaccatgttggtgaaactgctgacctcaagtgatc

SEQ ID NO: 202515 - DNA, 1000 bp, Homo Sapiens
gcctgtaatcccagcactttgggaggccaaggtgggcagatcacctgaggtcaggagttccagaccagcctggcaaacatggagaaacctcgtctgtactaaaagtacaaaaattagctgggtgtggtagtggacacctgtaatcccagctactgaggaggctgaggcaggagaatagcttgaacccgtgaacccgggaggcagaggctgcagtgagcagagatcatgccactgcactccagcctgggcaacaagagcgagactccgtctaaaaaaaaaaaaaaaaaaaaaaagagagagagagagagagaggaacttatgctatttacttctaggagggaaaaagacaaacaagattccgtgactggctgggtacggtgtttgacacctgtaatctcagcactgtgggaggccaaggcaggtgtatcactcgaggcaaggagttttagaccagcctagccaacatggcgaaaccccgtctctactaaaaatataaaaaattagccaggcatggtggcacgtgcctgtaatcacagctactcaggagcctgaggcatgagaattgcttgaacccagaaggcggaggttgcagtgagccagggtcactccactgcactccagcctgggtgacagagcaaaactctgtctcaaaaaaacaaaggcggggagccgggcatggtggctcacgcctgtaattccagcactttgggaggcggaggtgggtagatcatctaaggtcaggagttcaaaactagcctggccaacaaggtgaaacctcatctctactaaaaatagaaaaattagctgggtgtggtggcgcatgcttatagtcccagctactagagaggctaaggcaggagaactccttgaacccagggggcggaggttgcagtgagccaagatcatgccattgcactccagcctggatgacaaaagcaaaattccacctcaaaaaaaagggcaggggcaatataagcagagatatggaaattttaagaaa

SEQ ID NO: 202516 - DNA, 1000 bp, Homo Sapiens
tattggatattctgatgtttttgtcttcttcaaactctgttcgggggctaagactctgtttggtacctcttgcatctggtaagaaaatagggagaggccagaaagacattattttgggtgaataggatagagactagatagcaaggggggctttatgagaaggaatgcaggtggaggaaggggtgtgtgccagagaagaacaaggtgaaatcatagggtaggtatctatgcagaagaagaagaggagcatgggtagagtcacctgttagtccaaactgcatgattttgtaagtttttgctatgttgcagaccttggtcaaagtgaaacattccatgggggttcaggccatgagcaacatcctgcctaaccacctgaccacaaggtggacaaaggctcaactaaagaaacatccctatcataagtcctgttccccttattctttcatcttctccagccctgggctaacctccagatattgattaaactctccatcttatttttccttcattcccctttccaggcagctgcaaaggaacaccacaatgatattccactggaaaaagggccaaaccacctgatcataagaacatcttatcaatatcctcctgggcagcaagccatactgcccagctccctcccacccatacctgtaagtaccccaggctataagcggcagtgggctctggcattaagctggtcccccacttccacaggtgtctgcaatattcctgtgttgttgtttgagatgcaccctctctgtctgtctttctttcaccctcatcttcccttcaaaacctaacactttggtgccaaaacccaggacggtgattgggttctaatgggtaagttttctcttgcaacctggaaagcagaaagcagcaagcagcacaaactagaccggggcctacttccagatcctgagtggactgtctgttcccagtcctgtttcccctattctctcatcttctccagccctggactaacctccagatattgatc

SEQ ID NO: 202517 - DNA, 1000 bp, Homo Sapiens
gagactggtattcgtgttgagatggagctagggctaggagtaaagctcagtatctcttgccccctgcataagttacatgctttttgaacgagctgaaaacacagaaaaattttctggttctggtctctcatgatcctatgatataaaccaaagacggccctggaagcatattctgccataatcatcatcagtttttctgcggagtttggtctgatggatgtcaacaaagcaatttatctgctttattattattatatatttttgagacagagtctagctctgttgcccaggcacgatctcggctcactgcaacctccgcctcccgggttcaagtgattctcctgcctcagcctcccgagtagctgggattacaggcacccgccaccatgcccagctaatttttgtatttttagcagagacagggtttcactgtgttggccaggctagtcttgaactcctgaccttgtgatccgcccacctaggtctcccaaagtgcagggagcgtgagccattgggcccggcctattattattattattatttaatttttttttttttttgggacagagtcttgctctgtcacccaggctggagtgcagtggctttatctccgctcgctgcaaccttcacctctcaggttgaagcaattctcatgcctctgccttccaagaagctgggattacaggtgcccacaactgccatgcccagctatttttgtatttttaggagagacgaggtttcatcatgttgcccaggctggtctcgagctcctggcctcaagcaatatgcctgcctcggcctcccaaagtgcggagattacaggtgtgaacaactgcacctggccacaatttccctgctttccctctaagacatttacgcacagatgaaactactactggtgggtcatggacttcatggagagggacccagagacacagtcagcagcagcccttgggttggcatcagcgtcggggcgtcaggagtgggtgctcaccagatc

SEQ ID NO: 202518 - DNA, 1000 bp, Homo Sapiens
tcggctcactgcaacctctgcctcccaggctcaagtgatcctcccacctcagcctcccgagtagctgggactacaggcatgtgccaccaggccctgctaattttttgtgtttttagtagagacggggttttgccacgttgctcaggctggtctcaaactcctgaggtcaagcaatctgcccaccttggcctcccaaagtgctgggattacagatgtgggccaccatgcctggccctgaaagttgattgtcttatgctttacgttgaagtccaggatccgttttgagttatttttgtgtggggtgagacgtgggtcgaagattttgtttttgtccatggaattgcttttgcgcttttgtaaaaaaaactcatccgggcatgtttgtttgggtctctttgtgggttctctgttgtgttccatggaattacatgtctgtccctctgtcaatactacactgtgttgactactgtagttctgtgtcttgaaactgggtagattgattcgttccaccttgttctctttcaaaatggttttagctatttttgctcctttacatttccatagaaaacttgggatgacttgtccttacctattaacacatcttgctgggttttttttttaataggaattgcattaaacctgtccatcaatctggaaggacctgtcatctccacgttgttgtatcttccaacccacgaacgcggccgtgtctctaggtgtgtgctgacgtctttcagcagcattgctgagttttcagcatgtaagttctgtgcatgttttgtcaggtttatacctaagtatttcgctttttggagtggttttaagtggttctgcgtatttaatttaggtgtctgtgtgttcattgctagcgtacaggaatactattgaatcatttaggttgatcttgtgtcttctgactttgctgaactcacttattaattttctttctttttttttttttttttttttgagatggagtttcactctgtcgcccaggctg

SEQ ID NO: 202519 - DNA, 1000 bp, Homo Sapiens
tccactcttaagtacgtactcacaagatttgaaaacaaggagtcaaacactagatccttgcaccaggattattcacagtagcccaagggcgggaatgactcatttgtccatcaacagatgaatgggtaaacaacatgtggtctgtccatacaatggaatattactcagccatagaaaggaatggagcattgacacacgctacagcatggatgaaattattatggatgaaatattacagcatggatgaaatattatgccagtatttaaaaatttgactttgaggctgggcacagtggctcacgcctataatcccagcactttgggaggctgaggcacgcagatcacttgagtccaggagtttgagatgagctgggcaacgtggcaaaaccctgtctctacaaaaaatagaaaaattagccaggtgtggtggctcacgcctgtagtccccactactcgggaggctgagatgtgaggatcgcttcagcccaggaggcagaggctgcagtgagccaagatcatgccaccgcactctagcctgaatgactgaacaagactcttgtctccaaaaaaaaaaaaaaaattgactttgatatttaaggaatcattaatattcgcagttttgagggtgctactgttattttttaaaggatgttttaagagctacatcttgaaatatgtatggataaatgaaatatcaggtttgtttcagaatagtctgtagaggattgggggggtcctgaggtcagatatacaagcatttttgtaaattaaaaggttatatggtcctgattttcattgtccatttgaatgagggtaaaattttctgagtgagtcctgatttggtggtttgccttgttgcaggatcatgttttcttatgtgaaggagaagaaccaaaatcggatcttaaaggtgagcttttgttttctttcccttctcctgagtggcctcattatttctggaagagttgctagtctctcctctgggaatgaaaaggagtct

SEQ ID NO: 202520 - DNA, 1000 bp, Homo Sapiens
ctgcagcgttcacctcccaggttcaagcgagtctcctgcctcagtctgcagagtagctgggactacaggtgcatgccaccatgcctggcaatttgttttgtattttttaggagagatggggtatcaccatggccaggctagtcgcgaactcctgacctcaagtgatccgcctgcctcagcctcccaaagtgctgggattacaggcgtggaccatcgtgcccagcccctttttgttctatctgggcccccaggcgattgatggtatccgcccccatggagggtcttccccttggtcccccgacccccaggcaggctcctctggaaaccccctcgcagacacacccagaagcagcgccttatgaggtctctagggatcccttcacccagccaagtaggtgcttgagatgacccacggcaggtcggacatctccctcctcgtccactaggacagtgtctgatttgccctctttccctccctgcataagctgatccagagaattgtcacaagacagagttacaaatttagtttaaagatcctcgtgggctccattcgtgatgctagattcgggcaaccgcttggctctacagagagcagggagtgccccggggggctgaacagaggaggctggttttctagacggaagggctgaggaaagcggaaacagaaaacacggatcgctcacttcgaagctgcttttcttgtaagggtgaaagcagaagagaactccttattgtaccggcaaggatcagcctgtttggggatttggctgttattactctcctggtttctcagaagttcagataaacaacttagcttcagtttggtgacatggaactttttttttttttgttgttgagatgaagtctcgctctgtcgcccaggctggagtgcagcggcgtgatctcgggtcactgcaaactccgcctctccgggttcaagcgattctcctgcctgagcctcccaagtgtctgagattacaagcacgtgccacaacgcctt

SEQ ID NO: 202521 - DNA, 1000 bp, Homo Sapiens
acttctctggaccccagtttcctcatctatagccttgtaggaaagttgtgagattaatacaaaacatttccaacagtgcaaatagaaatatgagcttcattataggtgtggttttgtaactttcttccttaatatgtcttagatgtttttatgtgttggaaaatttgaaataatattctttttaacggctgtagaatatgccaccgtatggctccatgtaagcagccgtcttctaagaaggactggactggtttcccatgctgcggtgagcactcttgaacacactcttttgtgtgacagttcccctaacgtcaagcctgaggggtggtatctgctggataaggccccttatggtctggcacaagcaggatcagaagtagggtgaggtgagtgaagcattcaggcacaaaatttaagaggatgccccaaaaactcagtaatcaagataaattgtatcttaatgcaatatttttaaaaatcaaaattaatgctaaaaaccatccataatgagcaaaatatcaacgttttaaagacagcatctgacagtgtcatactggctttgttgagcctgtggccaaaggaaaaacgtgccttcatatacatattttaatgtattctttaatggtaattttctcccaaatcgttgaagtagttgaaaaatatacactgaaaagttagaagtaagtgtattaaaactcacagcattacttatgttttattttatttataccccaaacagaatttgtatcaattttactttgctgggtttaatggaagcaaactcatcgctaatattttcaaaatctactcctggaaagaatttaactgtgaaaaaatagattatttatatgtatgaggctagccgggcatggttgcgaatgtctgtagttccagctactcaggaggctgaggcaggaggatcgcttgagcctgggagctcgaggcttcagtgagctaagatcgagccactgaactccagcctaggtgacacagtgagatc

SEQ ID NO: 202522 - DNA, 1000 bp, Homo Sapiens
ccacgcctggctaattttcttgtatttttttagtagagacggggtttcactgtgttagccacgatggtctcgatctcctgaccttgtgatctgcccaccttggcctcccaaagtgctgggattacaggcgggagccaccgcgcctggccaacggtaactttatatgatcttcaaccttctttaaaaattttttttggccacgtgtggtggctcccacttgtaatcccagcactttgggaggcccaggtgggcagatcacctgaggccaggagttcaagaccagcctggccaacatggtgaaaccctgtctctactaaaaatacaaaaattagccaggcgctatggtgcgtgcctgtaatcccagctactcaggaggctgaggcaggagaatcacttgaacctgggagatggaggttgcagtgagccaagatggcgccactgcactccagtctggacgacagggtgagactctgtctcaaaaaaagaaaaaaaaatttttttttatatcctctgtagagttatgcaatttctcaacagattatttttgtggctcacttatgtcttagacattttaagatcttttccctcaggacaggactttctttaaatatcttattgatgtatttacttttaagggagaatgactaacatgaaaaattttacatttctccatctaattcgtattttgtttgttacacactacaatgtaagttttttgacaaggttttatatgtatgttttcatttcatctgtcatgtcaggcctaaactcagtgtacagaattctcaatcttaaactttatgaaagctcatacagctattcaatctatatacttattttcagatatagttacttcggttaattttttaaccaagatatttcaatcataaacaatcattttatgtttagtggtttatctttttctttcaatattaaatattcaggttgtatacttcagtattgtgaagtgtgtttgagtcatggccatgatatgaagatc

SEQ ID NO: 202523 - DNA, 1000 bp, Homo Sapiens
tttgaagtcaccatgaggcttgcaaataatatcttatactccaatgttttaaactgatgataacttcatgctgacagcatgaataaacaaagaaacacagagaaaactaataaaaattctatacattatcttcatccccacactttttaactttttgttgtttctgtttatatattttgtactgtctaggtcttgaaaattgttatagttattttgataggatcatctgttagtctttctacttaagatattacatatcacaattacagtgtcataatattctgtttttttctgtgtagttactgataccagtgagttttgtaccttcagatgattttttattgctcactaacatccttttctttctgaatgaagaaccccctttagcatttcttgtaggacaggtctggtgttaatgaaatccctcacctcttatttgtctggaaatgtctttatttctactctgtgtttgaaggatattttcactggatataccattgtaggatgaaagtattttttgttattcagcactttaaatatgtcatttcactctctcctggcctgtaaggttttcactgagaagtctgctaccaagcatattcgagcttctttgtatgctatttgtttcttttctcttgctgcttttaggattttcctttatccttgactttggaagtttgattattaaattacttgaggtattcttatttgggttatatctgcttggtgttctataaccttctcattcttggatattaatatctttctgtacacttggggagttccctgttaatattcatttgaataaactttttaccatagtctttctctctatgacctttctaaggccaataactgaaagatttgcccttttgaggctattttgtagatgttgtaagcaagctttattcttttttattattttcctttttgtgtcctctaactttgtgttttctaatagcctgtcttcaagctcactgatttttaattctgtttgatc

SEQ ID NO: 202524 - DNA, 1000 bp, Homo Sapiens
aaaaaacacttatgcctgggtcctatctcctaaggcaattagtctctggagttgtagggccttggcaagataattttatagggttctccaggtgttatggacttaatatgttctctccaaatttctatgttgaaagcctaatctgcaatgtgatggtattaggaggggggcctttgggaggtgattaggtcataagggtagagccctcaccaatgggattagtagtcttataaagagatatgagaggttgctctgtctctgcttagcaccatgtaggaacacaagaagaagagaggtgtctgcaaacggaaatgggccttcatctgacactggatctgctagtaccttgatcttggacttcccagcctcttccagctttaaacaaatttctattgtttaagatacctagtctattgtaatttaacataacagcacaaattaagacaccaggtgactccaatatgcaaccagggtaaaataacaccagtttaagttgtagaagtggaattctatagttgtggtaaactcctagaatattaaaaacagactagaagaagaataatagtaagttttaatattcttactgagttaggctattatatgcaattgaattgttaatttgagggtattttataattctttttattaggaaccagttacctaaacaatgtaaatgcattagaccaggagcatactagatccccgatctagttactgaagcacaaattctattggcaaaacatgcataaacatacacattctagatgcaacacagcaaaatgctgatgtatagtaaacccattcaagaaaatattgtaaatatacaaaactgattataaaactccaaactacctttgaaataatctactccaaatccttcattccataaaggaaactaaagcttaaaacagtagagttttctaatgtcacagagtggcttaataacaattggattagttcagcccaatgtactttccattccataacatgatagtgaaaa

SEQ ID NO: 202525 - DNA, 1000 bp, Homo Sapiens
ttcactgtgctcctctggttggtcttgaactcctggactcaagtgattctcccacctctgcctcccacagtgctaggtataagccactgtgcctggccctagttttatataggtaaagcattagtcactcacaatgatctttgaatgagttatgtaagttatgtttggtttctcctactttgttttcctagtcagttcaaccagtcaagtatgagatgagtggctgctgtgagcttgatcaagtgggtcggaatcccctgggaatattgttaaaatgcaggttctgatcctgtcggtctgagatagggcctgagatgctgctggtcccaggaagacactttgaggaacaagttgctaggtgatgcagaagacagaagccatatttgattttcaaaaatcctatgatctgaaaaggaactaggagaagtatacaaataagtatggcataagacagaaggtgataaactgtatataaaagtaaaaacacgcttcagagggttaaagatagaagtgatcacttctgattgggaagatcaggccaatttccacagagaaggtgatttgggaatgggattttagtttgcaacagggattgcggggaggcgtgcgagggccattgagaccagagacgcagattctggaaagtgaagagtacgttctggaacaaggggccacccgtatgcctgtgatggggaaaagtgggagataacagttgggaaggtaagtggaagccatattgtagactgtcagacagtctgggatggaaactctggacttaattcaggaagcgaagaggaaccagcaacaagagattttgaaacgagaaagaagattgaaactgcagtttagaaagattcatctggcatgtatatgtaggatagacgggagtggggagtgacagcccattccaagagaaggagtagtagataggacagatagcatgattactcttagcaatggggaaaatagagactagatgcgatacagagagagaaggatc

SEQ ID NO: 202526 - DNA, 1000 bp, Homo Sapiens
gccttattctttgtaataggattcagattgtttaaaatccccatattctaccgcaaagtcatgttatcaggaaagaccaaccctaaccccagttccatggagtaaagattaattaatctaaactctattaattgtattccctttatctggtgataagtttaagagctgatcccttaattttggacatgggagcacaagagaaactcactcaagactgggattaattgtaggaaatatttcacagtttccacaagtcagaagagctaatcccaaccctctgtatctggaacatacactgctgccattttctgcccatgaagggaaatacccaaggtactctggcagaacagatttttgaaaacttgagtccctgatgatgtaagtcagccacaatgttaatcaaccccagagccaccttatttctagacttattatgcaagataaaaaaaatcaacttgcagtatgaaccacttttagttgggttttatttcggcaaacatatgccaaggcacagcataaaattccacaagggacaaatcaatgagcccagaacttccaatgagggggacaactaagtcatatacacaataactagaatgtaaatggtattgaacttcaagcacaacattggatgctagaaaaaaagaatgccttcaaagttttaaaagaaaacacttttctaccttgaattctgcaatcaaccataccattgatcaagaacaaaagtagatagaattatccttagacatgcaaggacgaaaatttaccttccatatgccttctaggagctaatagttgatgggtttcaggaaaagaaaggaatataaatgaaaataagggaagagaagggacctaggaaccagtgagtccagtcagcagggtggaagagctgacagctacactgtgcagtccacacaagagtagaaggggaagacatccagggaaaaattacatagacttaacagagtagaaatatggcagatctagtggcaaagtgatc

SEQ ID NO: 202527 - DNA, 1000 bp, Homo Sapiens
taaagtgatttcaatgtcaacaaagaataacaaaaaggtatttccaatgaaaagatacataaagttaaacaaagtacaagttttagaatctgaactaaataaaattatatttccttttgaagagtatcttgctcattgaatttgtgccacaataaacattttttattaaatctcattaaaaagaaacgtgttgtgatttggatagatgtactagtgaaaaatggtaaggaatgagaaacacaaagtccaagaagctaattttcaactcataatttttcttacttgtatttctattttaggttcaaagtcaaggctactgcttaacactatggtaggactttaaacataactgaggaaaaaccatattaaagtatcattaaaaatatttatcattttatatatgtaattttttttctttaaataataaaaagtttaccagctaagtcaataccacagatggagttgtgtggaaattgtatttggcagcaatgttagttttttttaagagtttctggcttctgtaacaaaataagaaagtaggcctttttctctccaccatgaaaatttgttggaatgctttgtcctccatacctataaaagttgccagtgttacaacaggtataccactatgaagacactagaatgtctcagaatatgctgaatgatagttttcaacattttttggaagctagagttgggtggtatgacttaaggggaaaatgtagctatatctgaccactgactaccagtaagaaaatttcacttctgtatttgttcttaatgggtaaaataagaattttcttcatatctataaactttaaactgaaaatttctctccaaccttaatttgttctttccacttttgtctctgattcctgtagtaccttaaggaatcaagtttaatttatttcctttaggaaggatggtggtgctgacagacttagtgctgagatgagtggggtcttgatgtttcattaatttacttcttttgcttctgatc

SEQ ID NO: 202528 - DNA, 1000 bp, Homo Sapiens
attcccaggagcatttagttcatagcttgacaaagccaggatttggacccaggtggttgtactcaaagctgatgttcaaaatcattcatctgttaatttttagtcaaatgaatgggccaggcactgtgctaggttctgcagatacaaaagtgagtgaaatagacacagttcctgccttcaaagtgcctccagcctagcaggaaagagactgtcaataaattatataaaactgaaagggatcagagtgtattgccttagtaaaaggattgttttgagctgaaggcaactgggaaagagcagactgcagaaaggctctctacttttccctatttgcttaaaagcagggcatatatttttctttgtgaaggtgttccccttccctctctcataccaggaaaggcagaataactcttagtcaccagagataactctagactcttttcatcccaaagatgaccccaaaaggaatctataacacaaaccctactaaaataacacttaccttccattagcttccccatatatttaccttctcacaacttcctgcctctagaagctcaactgccttttcatttgtcttgttagttctccagaaattcatcgccctttgttaaaatggtatatacacctccaactctgactatgtctttgggattttcatttcatttctctgaggtaccttacatgcccatgaaataaacttttttctcctgtaattatggcttttgtcaatttaatttccagggccacagctgcagaattgaaaagcatagagaaaaaagttttttccctcccctacaaaatctcctggcacttaatcctatgccctttctagttcatgatgttgatatcacactcctgagtcagcagtgaatgacatttccgagattgtttgttccatcctcaatcctcatgtgctccttttacccaaacctgaccttctcaccactctgtctgccttcctaaatgggctttattttgtgaggtgaggcttgagatc

SEQ ID NO: 202529 - DNA, 1000 bp, Homo Sapiens
acaagcagaatgtgatgtctctggcagatcttacataactggtcatttaaacaaacctagagaataatcatgctaatatctgaaagaacaactcttccttgcctgattttaagtattatggatgtctaagttcaaaagacagtactcttgatgtgcccaccataagaggacatacagcgttctggttcattttctttgaagtggtatagtagttttaaagtctttttgtcaggctgaaaatctggttttcaattttttctgacagattttagccctcttcattgctttctctgttcatttgtcttcgtaccttttgtttccaatcactaaaactgtgctacgctaagtgctagcagttaatacacctgtgcccttattgctcttcccttgagagtgtcttgttaatctcatgtatagttaactgaggttttgcctgattatcttttttttcccccttttgagaagctgtgaatgacattgcctacttacctaatgagctttttccgtagctaactttaccataatatgagtgaaccagataagggataacattcatgatactgtgattatttgtcttgttttgttgtttttgttttgtttttttaatcttctagaaaggaatgtttttgattttggttctccaatttagtccattttattgctaaaatacaaaagttcatgtatgaagttcttgcattcgtttttttttggagcaggcatatgggcaacaaagctatggaacctatggacagcccactgatgtcagctatacccaggctcagaccactgcaacctatgggcagaccgcctatgcaacttcttatggacagcctcccactggtaaggcctgccttggagagatttttgggtcgttctggctagggcattggctaagaagcttattagtcatgctttcggatgtatattctggtccataccttggcatctggggaatcctttattcttaggaagaggtattttttctctttcttccctactc

SEQ ID NO: 202530 - DNA, 1000 bp, Homo Sapiens
aatcactctaacgtattttcatggctgtctttataataagagaacttttaaaaataactctaaaggccgggcgcggtggcttacgccagtaatcccagcactttaggaggctggggcaggcagatcacctgaggtcaggagttcaaggccagcctgaccaacatgcagaaatcccatctctactaaaaatacaaaattagctggatgtggtggtgcatgcctgcaatcccagctactcaggaggctggagtgggagaatcgcttgaacctgggaggcagaggttgcggtgagctgagattgcaccactgcactccagcctgggcaacaagagtgaaactccatctcaggaaaaaaaaacaacaaaaacaaaaactgtaggacatgtacttgtaacagcaattcatctttcaattctagtcagcaatgttcatgttctgggttttttttctgacactcttctattcattcagttttctgctaagatgctcagggaactacacaatacaaaccagcaggtttgttgtttatttatttatttttgagacagagtctcactctgtcgcccaggctggagtgcagtggtgcgatcttggctcaccctaacctctgcctcctgggttcaagcaattctcctgcctcagcctcctgagtagctgggattacaagcatgaaccaccatacccagctaattttcctgtttttagtagagacgaggtttcaccatgttggctaggctggtcctgaattcctgacctcagatgattcgcccgccttggcctcccaaagcgctgggaatacaggcatgagccaccatgcctggccaccagcagtcttgttgctgttgaaattttcttgagacagagtctcactttgccgtccaggctggaatatagtggcacgatctcggctcagtgcaacctctgctgattcttgtgcctcagcctctgagtagctgggattatgggcatgcaccactacatctggctaatttttgtattt

SEQ ID NO: 202531 - DNA, 1000 bp, Homo Sapiens
tggctcaagtgatccacctgcttcagcctcccaaagtggtatgattacaagtgtgagccaccatacccagctacagggttattttaataaagtcactgaaagttagggggtcataatgacccatttatagcatgctaaactttcatcaggcactggaggccacgatatgggacaacaagcaattcctgaggtgcactgcacattagcaaaagaaggccatgcagctctggaaagattctcaacaataaacataattaagtttgttgtatgttcctccagatttttttagggtatctaaacgttttttattataaatatggtattatattacatgtattgtttacctttttaaaacttaacagtagctgctaaacatctgttaaacatattttaatacatagagacctacttcataatttagggggtgatggaaacttcataattctgggtgtgattaatatacttattaccttgattgtggtgatcatttcacaggtacacacatcaaaactcagtgtacactttagatatgtgtttttttgttttgttttgttttttgagatggagtctcactctgtcgcccaggctggagtgcagtggcgccatctctgctcactgcaagcttcgcctcccgggttcacgccattctcctgcctcagcctcccgagtagctgggactacaggcgcccgccaccacgcccagctaattttttgtattttttagtagagacggggtttcaccatgttagccaggatggtctcgatctcctgacctcgtgatccgcccgcctcggcctccccaaagtgctgggattacaggcgtgagccactgcgcctggcctagatatgtgttttattatacatcaattatacctcagtaaaactgaaaaaaggttgtgttttaaatctctccccaccgtttttttttttttttttttttttttttttggcacgacagggtctcactcctctgcccagactggagcacagtagtgtgatc

SEQ ID NO: 202532 - DNA, 1000 bp, Homo Sapiens
tggttgaaaacggtgttattcaaaggccgcctgtatttctaattcgtccctctttgtgattactgctggctaaattcagacctacattattagattattggatttatttcctaacatcctttctgcctacaagtttacttccctaattcctcctgctcagttttctgaaggatgtcatatatagctactcctctgcttattgcttattgacctcatctcctgtcaccccactacacccagaccctaactctgcttttctcagaaaagatgtgcttttcctaactccgtcccacatcttcagtctggaatgttctgtgctcttcagtgtagccttcagcgctcacctacttaaaagtcctttctgctgaagcctgtcttcttctaggagacttagtggacatctgttggggctctcctggctcttattttcttcttagttatagcaattctctgatcactttgcttgcatacgtccacctctccgggtcatgtgcttctcaagagtgggagctttgccagggaatcgttgtcagatttctgatgtgtgtaattcatccaggtctggaagggtctttattcagtctgaaggacattttaattttgtgtagtattttcatcacaaatcctcgtacacatgagggtattggaagaaacttgaacctttcctttgtgctcactgtcacatgacatctcacccaagtttcatgtcccaccaggttggttttaagaacatgcagaatgtggagcatgttccgctgtccttggacagagccatgcggctggtgaaagatgtcttcatttctgcggctgagagagatgtgtacactggggacgcactccggatctgcatagtgaccaaagagggcatcagggaggaaactgtttccttaaggaaggactgatctgtgtgctcttatcaccaatcagttcagacctggttgattttgtactttggaactgtaccttggatggttttgtttattaaaagagaaacctgaag

SEQ ID NO: 202533 - DNA, 1000 bp, Homo Sapiens
gcacaatggcagttcctgagggggacaaaaagtcccagaataattatctcaccatgaactgagaagcacaaacaggtggatgaatgtaagaatagtatctaagtcaaaagaggtaccaagttcaaggaactctgtactttctagcccacattcagaatatcataatctgttctaaaagacacattctaacaatgacgttgattgactggatgcaatcagtagagggtgaccaggatggtaaggcatcaagatatcatgtgctataaagaacatcaggaggagtctgaagagcaggaattgtttgcttggagcccctggtgagactgttcctcccacagccttaccactagaaaccacccaagagtccacaccagagaaagaggctataaatgaactgacctcccaccttctaaggagctaatgccatcatgccttgctttcctatttaccttagtcatccacaaaagtccaagttccaaaatttagggtcatcactagattttctccccacaggacactgtacatgtctgacaggtccaatctttgtccttcctgagccacacaaatatctctactatgtcctatggaattcacaagtgtcagcaaaaccccctctatcctcacacacctgagtgtttcctactctatgtgctcctcaataacccctttgagtgcactgctacacctgggtcctcctcatgtgtaattttttctttccacattcaacctctcacaatgcctggagatggtataaatatccttgcccctcattctcatatacaaaagttttactctttaaagaacattccattagatgttctcatatcccctgccctttttataactatctatcaacctccctcgttccttaaagatgtgaagctcttgagcttctgtgtctttctaccacaactgctatcatgcatcttactgattctacaatccaaatacatgagtcaaccaacacttgggcttctcaagtccttgaccactgaggatc

SEQ ID NO: 202534 - DNA, 1000 bp, Homo Sapiens
gggcgccactgcactgcagcctgggcgacatagctgtctcaaaaaaaaaaaaagaaagaaagaaaaaaaaaatggaaaagggaagcagaggctgctaggccacacccaggacatcttcagtgcacagaggattgggaaacgcttggtggggaaagggaaggtgacagctgggctgctgcggaagagcttgggggagacacctgctctacgcacgccaccaggcggcaaccgtcagtgtcactgaattgaagctggagaaagggagcagtgaaactcgctcgccggggaatgagaaaatttcctccccactgaaatactgtagggcagggcaaagagcactgagatgggagtccagagacacactgcggtgcgaccttgagcaactcagttttcctccctgcatctcttttcttgtcaccaaaatcaggggatgaaatcaatctatctgattccaaacacctggtgtaagcttcgggtattgggctgcccagggctgagctgttccctcgagcagtggttctccactaggggtgattttgccctccaggggacacttggtgatgtctggagaatttttgattgtcaccactggagtgggaatgaggctggcatgtaagtaaataaagaccaaagatgctgctgaatagcacgggacagcccccacaactaagtaagatattttatttatttattttattttattttttcttttgagatggagtcttgctctattgcccaggctggagagcagtggtgtgatctcagctcattgcaacctccactgcccgggttcaagcgactctcctgcctcagcctcccgagtagctgagactacaggcacgtgccaccacgcctggctaatttttctgtttttagtagagatggggttttaccatgatggccagactagtcttgaactcctgacctcaagtgatccatctacctcggccttccaaagtgctgggattacaggagtgagccaccgtgcccagccaagatc

SEQ ID NO: 202535 - DNA, 1000 bp, Homo Sapiens
gcaagtattatatcagtttaatctatttaattaaagcacctagtttcaaatattgacttgatcaaaactaactggaaagtggcagcaatacatgacggaatagattagaccaattttccttaatattaagaacaattcatagtatattcatactaaaatatatattattgctacaatagactaataataatcaccaaagtaactgttacaagcaaaaaacagcttagaatcataccatattaaaatcgctaaaattctacgaacccatctttgtatagatttgcaaacaagaatctaagctactatgctggaacaaacgatgggaaaaaaaaatcaaacaagcttcagtttactgaaatggcattaaattatttggttaagaaatgagcaggactgctataacaataaacagatgaaaacacaaaccaagaaatgcttatacaccattttttaaaaagaacaggagtcaaattagttctgaaatacaaaaaagtaccctctttcaaaaagctgtcaggtccattaagtcgtccaactgaagaaactgtcctaaagcatggtgttaatctcagtagtgaacacacgttatcaccacactcttgctcccttacaatccagtctccatagcacagtggggaggacatcctaaaaatgaaaatcagcttgtgtcactgtcccgtagccctaaaggccctataaaacttgcctctcacaccaatgtcctcttatcccagagcccctgatagggccaagctccagaccatagcttgctctccgtttcatgaactaccaagctcatttccacttcagggtctttgtactactgtgtgttcactctgcctggaattttctttttccagatcttcatgtgtctatctggttcctggttattacctaagtttcagttctactagcaatcacctccacagagtagccttctctgaccatgtaatccaaagaccttctttcacctctacccatcatcctttataacaagatc

SEQ ID NO: 202536 - DNA, 1000 bp, Homo Sapiens
aaaacacttaaattaaaaaaatttaagttattttatgtggattaattttaaaattaatagcatagtagaaagatgattgtaatcttcaaagattttcaaattagtgtataccgttcatatgacttagaacatttaggaaaactacaggtatattttggcatagaaaataacaaaatgtggattattgtttttacttttttgttggatttcaatttgatgtttacaagtattgaggttattttatatagtattggaaagcttggatacctagaaacatggattcttagtggtgggttttggcatcaaacacacattggcctgagtcagagcttcatccatttcaagcaatgttaccttgggctaccattccgagcctcagtttccttggttatgaaatgggagtgatggcaattatctcaacgaattattgtgaagatgaaatgataagatgtttagcgcagtgcctggcacttattgagggttggtaaatggtagttgttgctaattgtagcaatgacaacagttctagtgttgtatagtgtgagaaaataaaatcaaatctgaaacatatatcacatcactttcatagctttctctctctgttttcaatttctgttcctgggactctcttttaagttcatatattataatgttattaattttagaccctaataacttctaaactgtttagagtcatagttatgtaatcataaacttttagagctgaagggaatttggggatcatttagtccaaacctcttattttacaagaaagaaaattatgtttggagtagtgaagtgatttacccagtataaattacttgtggcaggcttcttcttttttttttttttttgagatggagttttgctcttgtagcccaggctagactgcaatgatgcgatctcaactcactgcaacctccgcctcccgggttcaagcgattctcctgcctcagctttcagagtagctgagattacaggcgcacaccactacgcccag

SEQ ID NO: 202537 - DNA, 1000 bp, Homo Sapiens
cactgggggcagttttgcccttagggaatatttggtgatttctggagataatttagattgttgtaactgggggcagagtgctactggcatctagtgggtggaggtcagagatgctactgcacatactgcaatgcacagcacagtcccctacaacaaagaattatcgggccccaaatatcaatggtgcaaagggtaagaaaccctggctcagagccaaggctgaggtcagacaggttcgggtctgaaatcctggttttaccacacatttggctggttgatcttgggcaacttgtctgacctctctgagcctcaatttctccatctgtcaaaagggattaatagtgatactcacctcagaaagatgatgtgaggattagataagatcactgactgtaaagagcttgaggcaaatgtttactcttccttcgagtgagcagatctactcccaaagccaagtccttagtatgctggagaagggaacacagagtggtaagaatgaggaccctgtagccacagtgccagatctaagcctggactcagtcacctactagcagtgacaccttgggaaattgcccactttttgaagcctgagtttcctcatctgtgaaatgaagatgatcatagtacccacgaagtagggtggatatgaggacttaggagctaatttttgtaaatagcatagtgtctggcacacagcagcactcaataaatatgaactaatgttacaaaagacaaaaagaatcagcactgcctcatttcctagtggcaggcaagatagcaacccaaactgctatattgtaactcaacgcttccagagatgctagaatctcaaatactctgtccatggccctatgagaactttcacttgtcagactgtacacaccgcttttcatttcagaagacatgttccctgtttggatgataatagtggctgtttaggaagccctgttgtgctgagcactgctcagagaagcccctcctctccgggagtttcgagatc

SEQ ID NO: 202538 - DNA, 1000 bp, Homo Sapiens
gggttgcctgacttgtctctgtttttccagccctgaacttgccacaaggcaggtacctaatacatgtttaatgaatgaccgtgatatgctcatgacatggttaggctttgtgtccccacccaaatctcaccttgaattgtaatccccataatcgccatgtgtcaagggagaaggtaattgaatcatagggcggttcccccatgctgttctcatgatagtgagtgagttctcgccagatctgatggttttataaggggctcttccccctttgctaggcaattttccttccttccaccttgtaaagaaggtcccttgcttccccttcatcttccaccatgattttaagtttcctgaggcctccccagccatgctgaactgtgagtcaattacacttctttcctttataaactacccagtctcgggcagttctttatagcagtatgaacacagactaagagagctatctttaaataatgagccacttcagggcaggaaccatgtctccttacccctctgagccctcctctaaaacaaggaataagtgtttgttgaatggacgaataccaaagcccccagcccatcagtggaagcagaacacacattgtccttcccactctaccatgagcctcctcaagggctggcagggtctgtttatctgcagagttttaccatgtttatatgcctgcattgaaaagctactgacttatgtgcgactatatactaaggcgaccaacttgtcccatttttcctggtaccttcccagttttagcattaaatgtccagtgtcttcactcctgaagttccaggcaaaccaggatggtcaggtcaccgcacagcaactcccttctctcccagcatcatttttccctcatcttcgtatgaaagggttggacctggtcctgtctctgcatatgagatctaagattttaggaacaggccagaggggaagaggtgagtcaacaaagaaagaaagattcaacttggaattttctgagagatc

SEQ ID NO: 202539 - DNA, 1000 bp, Homo Sapiens
gcaaggagaccccacccaagggaggcgcacaggacacactgaaaggcaggcgggcaaatgccaagaagtcagccatgaccacgcccagtccctcactagtcctcctccgacaggtggtttcaggagcacctgtgccgccccaggatcggctccaaggagcaaaaacaagaccgtgctggcgagggacaggctcagcctagacctggagggaaaggtgcccagccctgcaccgaggcatgcacttggagagcagaggtgttttcttcaagttcagtaagaaggaaaatgaaagagatgaggaagtaacttgaagatgtgaaagtgaggctcagagggttgcacagaggagtgcccgggcaccatgagtgcctccatgatggtgtgaggctgtgaggcccaccagtgcagccaagatactggggctggtaacagtgagcctcaagcagacatcccagtcaccagctgccctgttgtggctcctgaagcagggtttacggggagacaacatatatccccttctgtgtccaagcttgtgaggcctgtcagaaaaaaatccgctattttcatgaatatagaaaatgttctgcttctcactatatgaagacaccgtgcctaaaaatgccaagttttggccaccacagtgggctctgtcactgacagctgtgcacgctgtatcatgaaggccttaggctggacttctgatcaatgcttatgtatctgtagccatcttgatcagaatgatccaggcaagggccgccgtgtctccactgcccgagaggtatgcaaagaacaaagctctaagagcaagcgttgagtctccctgcattggcccttagggatctgctttgataaaaatctgagactggatcagagggctggaaataagctttttttggagacggagtttcgctcttgttgcccaggctggagtgtagtggagcgatctcagctcactgcaaccttgcctgctgggttcaagtgattctcctgcctcaggatc

SEQ ID NO: 202540 - DNA, 1000 bp, Homo Sapiens
taattgttcttccccaagtagttgtattctgccaggccttgcagagttttgccctgagcatttgcagcttttgattcagtcaaattttcaatacaaatttctggagcacataagggaagatatccactttgtcactctgttcagcactgcattggcaaccctagccaatgaaataagactagaaaaacaaataaaagacgtacgtattggaaaggaataaataaaagactttattctcagatgacataatcgtgtgcataaaaaatcctaagcaaggccgggcacggtggctcacgcctgtaatcccagcactttgggaggctgagacaggtggatcatgaggtcaggagatcaagaccatcctggctaacacggtgaaaccccgtctctactaaaaatacaaaaaattagccgggcgtggtggtgggtgcttgtagtcccagctactcgggaggctgaggcaggagaatggcatgaaacaaaatcaatatataaaatatatatatatataaaatatatataaaaaatatttccagatactgacaataacatttggaaaataattttaaaaataacatttataacagctcccaaacatttaagatactagagccaagtttagtgatagagatgcaagatatgtacatgaaaattacaaacactactaagagaaattgaagacataaataaatggagagatgcatcatgttcatcaattaaaagattcaatattgttgtaatgttaatccttttgaaattaatctatgaattcaaagcaataccaaccaaagtcctcaaacatttaagaattaaattgtcacactgtttataaaacctatatgaatccaatggaaaaagtaaatagatcaaaaaacaaaagagttcagaaataagcctatatctttactgatttctttcttttatttattgttattttttactaaagttctaaagcaatttaatgggaaaaaaaagacttttcaacaaatagtgttggatc

SEQ ID NO: 202541 - DNA, 1000 bp, Homo Sapiens
tttgctaagaactagagcacaggatattagaaactgggaattattcttattggttggggagagttgcgcttattacctatgtttctcttttactgtagccctactggaacacctattccccagtgtcttgcttaggttactagatccccaggctgattagagagtaaggagaagcttgggcctaaaaatgttgctaattactgtcagaatcaagttaagaattaaaacttactaacttctgatgagtgctctttccattttattatgctgcctgccttaataccagtgtttttcaaacagtagaaaccgcttataaagtaaattcttacatagaaacccagcatattaaaaagataagaacgaagctgttctatttgaagccaaggtagaaagtgtaaagcccagatcattaagtcttctctgcctctcttttcctttccctaccaggtaacgctaaagaaacttgagcctttacatagtatagttttaatatgcacaatatactgtagagtttttaaagtcatgcatgtttctgtaatgataattacctcattgaatatttttcttataaaccattttctttgtataagatcttgatgttagctccttgttcagcccacagtacagcaaacaacatctctcaaagtatagtgagcatttcgtttcatgcttcgaatcctccaaggcaggatgaaaaccatcttaaggagctggagagggagtttgagaagggcaaggagtcttgtgtagtgaactagataccccatttctaatatatctaccttgcaccttgtgcctctggtatacgaatttgataaaaggtgtatgcatggaaatagaagaatagtttctcaactcattctcaaagttactaaatgcttgcctggaataacatatcttaagcacatggccctgcttactcactgcttgggaatcacaccacagtacttacttctattccgcagccttatacatttgtttcttaagcttagagatgatc

SEQ ID NO: 202542 - DNA, 1000 bp, Homo Sapiens
aactcagcaaaacgcactgctaacttcctagttgctcaagtcagaaattacagcttccttgctggtgtgtttctctctctctctctctttctccccaccccatcaactaatcttatgaaatttacattcattttagccccacaccatccacttctcttgctccatgcccacggccactcaagggctgtgtaaagtgtgtggcctgaggcagactgcctgggtttgatctctgaccttaccagttgctaactgtgtaatttggggtgaatttcttaatcttcctgtgtttgaactttctcatacataaactggagataataactgaactgatttagtaaaggtgtaggaaaggctaactaatataattcgcaaagacagtttagaaccgagcctgggatatattgagtgctttctaaatttacttattctctcaatgcctgttcacttacctgccctgctcaccaccaacaccatcggatggcaggtgccttgaaggacaaaattatgccttgttctccactataatatcccacatgccttatatgtaatacacactaatgtattcaacaattcattaaacaaatattcattaaatgactacaagtgtttgttgacttaataaatcatgtctaaagacttgcatacaaaatgactacactatatattctgcaggtacaaactagataggatgggtttaaattcgtctggggcattgctgttctgggttcttttgagatgctctgggttcttttaagaagaggggcatcaatccagagtgggttctactacttttgggtgcaaataggaattcttcaaagataacctagttgcagagatttggggaaagactgcaaaaagttcattttgcaaattttctaaaacatacaaacacatctcaaagatcattaattcccttgggatgtgagcacttaagcttaagaaagggagcagccaggtcttgtgctgaagggcagacagtgtggttcaatatggtgagaaa

SEQ ID NO: 202543 - DNA, 1000 bp, Homo Sapiens
cactttggcctcccaaaatgctgggattacaggcataagctaccacacctggcctgaattttatatctatgtgcaatcaagtagccaccagagggtcttacatattggattgatatgttttaaaagactactctggctgctgtgtggagaaaaatttggaaggggcaggaggggacgaaggagagagagaggaggctgctggattgccctgagtcctctcaccacattgcagcccaatcatgttcaaactgggccagcgagtgccgagttgctgctatgtgtttgtcactgtgcaaagtacctccttagaccttattttatcatcacaaccttaaaagagataacgcacttcaaccatttaattccacgcctggcacattgaagtgctgaataaaagttaatgaaacaatttgtaaaaacattggcaaggagcaccagtctactatcttgggggcgtttctcagaagcagagcctgagacgaggatttgggcccaagtgatgtattaaagaagtcttccagtaatgggggtgggaagagggttggggaaggaagggaagccaggcgagcattggttggtttcaggcaaagttgtgcctgggggaacctcagcctgaaccaacttggagtgtaagttacacccacctggaatgtaagttacacctcggggtgtgtcctgaggtgaggcaagggagcgctgctttcaaactcacaggtgggtcagtcacgggaggaggggctgccctgaggggacattaattcccaggtacttaagttctcggaggccgggaggcaaagggagagtcctggaagaggagccacaatgcaggatgctgaaatcagaagcacaccaaggcaggcaagcgtggtgcacaagaaaaggcttgaagggatctaagaggatctggacggtattgtctgctacacatactcattgttcagataaggaaactgaggctcatggacaccgacctgttctccaatggcagttgggatcccaa

SEQ ID NO: 202544 - DNA, 1000 bp, Homo Sapiens
tcaggaaaaaaaaaaagaaagaaaagaaaagaaatctgagacccaaagagattaagtaatcttcccgaggtgacatggggagttactcactgaggcaatatctaaacctggcagtgtggctctagagcacaagctcctaacctctgggccactgttgcctctttaccaccgttcgttcggtccacagtcttctcctggttaaacatcccgttcctcctctgtaaagctctgctcagagagggtccccctaaccacacaagtactgtgccacagtgtcctgaggtatggtgtacctgcatcaacaccaacagcgaatactgactaaacccagtgttaaactacaggccagggactattattatcccaactccgtaggtgaagaaactaagcctcagaaaggttacccaaaaatcacaattagaaagtgacagagcttggacttgaacccatatctaggcctaatactaatactggttcctatgcttggaaccccatggagggccatctcattacaccaaatatttcttaaaagcttattaatatctactattgcgtttaactttccaagttggaattgccatcttcattttacacatgagcaggtggtgcaggtgaatggccaagtaaagatattaacgtggctttctgagagggacccagtgccaggagtgtatttttccctctatacagttataactccttctcaactccctaaggtaaaaataccaccaccgactgatcacttattaggagccagaacactgccagatgtgttacttacattttctctaatttccaaaacaaccccaagggaatgttgtccgttttacagacgaaagagctgaggtttagagaaagtaaataactatgtcattaagtctagaaagtggcagaactattgggacaccctagcttcagcttttattttttctgctccatacagctacgtctcccacactttttctgcgctgagaatgggagaggggaaaacatcaggatc

SEQ ID NO: 202545 - DNA, 1000 bp, Homo Sapiens
ggagcaggatggtgatgaccacagtgacccatttttaaagcagtcagctctctttgaaggatcacataagtttaacttgtgatcccttccttcctcccttcattcattcaacacatctgaatggagcgcttcctctgtgacagacacaggtttaatgaggtagttggggaaaacaaaccacctcgatgcagcgaaatctcagcctagatctgaatgcatgttggcattattttattttttaaaaaaattatgtatcggccaggcaccctgactcacgcctgtaatcccagcactttgggaggccgaggtgggcggatcaccggaggtcaggagtttgagaccagcctggccaacatggagacaccccgtctctactaaagatacaaaaattagcccgtcatggtggaaacgcctgtaatcccagctacgcgggaggctgaggcaggagaatcgcttgaacccggaaggtggaggttgtaatcagctgagattgtgccactgcactccagcctgggggacaagagtgagacttcgtctcaaaaaacaaaataaaaataaaaataattatgtatcatttttatttatttattttgagatgggatctcactcagtcgcccaggcagtggcacagtcttagctcactgcaacctccgcctctggtgcttaagcgatcttcctgcctcagcctcagcctcccgagtagctggcactacaggcgcctgccaccatgctgggctaatttttatacttatttatttatttatttatttatttatttagagatggaatcttgctctgtcaccaggctggagtgcagtggcacaatcttggctcactgcaacctccaactccctggttgaagtgattctcctgcctcagcctcctgaatagctgagattacaggcatgcgccaccatgcccagctaatttttgtatttctagtagagatggggtttcaccacgttggccaggatggtctcgatctcctgacctcatgatc

SEQ ID NO: 202546 - DNA, 1000 bp, Homo Sapiens
aaccggaaaccagttttatctaagggctactgaaagaaactagtgcaactctaagaccagtgttacccactgccatcactcaccaatcagagcttgacagctccccaaatctagtgccaatggactttcttgaagagctatatgtaatatgtctccttttttataagaccgctaaccttctcctttttctgtggacataccgaacaattggtctgcatgaatgctccaaagtgcaattacttcctcccaaataaaacgttctgttttcagagatttgtctattgactctaatgataacacaatcctatcattatttttaaatgtgttaaaccacccccaaaataaatcaaaacctttcctgtgattctttctagtagacgaaaataggatttaaccttccatgttagatacttgtgtaatatgtgtgagttttctgattacgtattacatttgtaaattgataaaacagtgggtagtgccaataatatgcagggagggctatagattcatctgcctggatttaagtcctggtcctactacaactactatatgatctggggaaagttattaaacctttctgtggcccagttttctcatctataatgaggctaatacaggattattgtgagatttaaacagtgtctgacgtttaagcaacttagctcaataaatattggttgttccaccacccaagtttataatacacactataatccaaacagctttaaatagtgccataaaattaagtcaaataaattactgtctttaatttgtgaattatttcatatgaaaataacatatcttaacttatatgttgattggctatgtttcttttccaatatagcaaaatcttcattaaaccaaatcaaaacagagttggatggttcgctaatggaatatgatccctcattttgacccttattaaaaatatttgaaaatagtccattttcctcagcagaaatagggtagatgaaaattcacctttctttgatcatttttt

SEQ ID NO: 202547 - DNA, 1000 bp, Homo Sapiens
tatgtttttgtttttgtttttgccataaactgtaggtgctcaaaaataggtgctggattgctatcaatagtcaggagacctcccagtgatacaggcccagggataattccccttctaggtgtaacttcatctgaagcatcttttttttttttttaattttaagttttcctgtttttggggtctagattaagggactgccagaagccagaggttgcaattgttatttcagttaaccaactatgaaaagaacatgttttacccaacaacaaatatacacatctacccattgacaaatacacctatgtcacataaaaattgaaactaaataaaatttcatttatatgactaaagtaaacaaaacttcaaatacaattgaatgtaattttcattgtgcatttgtgggtattctgctaaaagactggcaatgtatttctcatttattaataataaaaaataggaagttgaggcagttccctctgctctgttcaagttatggatttgataaaaaaaaattttctactcaatattagatctttattcaataatttgttatagactttggtaaaatccatgtctgctttcttttttgcaattagaaataaatgaagtaaacttatttgagaagattttctattttgattgctttttgattcccatttttagtattttctatttctattaatgtctcatcttgtactcattctcagtgactccaagtattaaaaaataagggaattatgtgaagtataaaaatgttaaatgtttttccctgaaaaaatataagtttgaaaaagttaagaaatttaaaaaattgaaggttatatgtcttcaaataattattcaaaaattttcacttgtattaaaattaaaaatgtacaatgataagtatataatttgttgtatctaaactttaaatacagctgaaatgttttagtttatttaagactttaaagatacttttattgggaaaaaagaaaattacaatagaaccttcaagatc

SEQ ID NO: 202548 - DNA, 1000 bp, Homo Sapiens
ctcctcatcctggcattcgaagctctctatgtttatatgtttgcctatctttcttttctagcttctttcccattacttgtcttcatatagctttagcttttgccaaactaccattctttgttttcagagcacaccctatactttccagcatcagtgtttctttcacctggaattaactgcctgccacagagatctccgttcatcagcctattcattctttaatgcccaagacacatgccaccaatttcatttgaatggtccttagagacactgaaatggcgcctgctgtacacctgtccaccccgacccccgctgcccactgctggctcttccagtcttgtgaaacattaacctctcctaacagcaagcacagcttctccatggagaagacactgaaatggcacctgctggacacccgtccaccccccacccctgctgcccactgctgcgtctgccagtctcgtgaaacattaacctctcctaacagcaagcacagcttctccatggggcctgctcactctggccctctggtcccaccatttttctcactactcaaataaagtttggagacctttccctgattttttaagaacatgctagctctttcatgatactcgttatcataccacccccatctgcttttcagtgtacctttcaattgctctctagtgctccattcttgattgttttccatttctattatagctttcaaggagagtctttacttggcctactttcttagtaaatggtttggtgagattctgattttcatctgatattagttctttctccaagagggacagagaaaaatgaaaaaaatatcttgccttcagttattcttttcatattctttgaaattctaagccacagaagtcttctgttaggctgctaccttcattttaagagactcttccctaaatgacaagttgtgacttcagaactagagaacatggcagcctctcatggctttctgctcagtcccatttttcttttctggatc

SEQ ID NO: 202549 - DNA, 1000 bp, Homo Sapiens
tgccactgtgccagactaatttttgtatttttcttttcttttttagtagagacagggtttcaccatgttggacaagctggtctcaaactcttgacctcaggtgatctgcccgccttggcctcccaaagtgctagaattacaggcatgagccaccaagcccagcctctcctccacctcgtaagtgttttcaaagtaaagccagaatcctcaactgcttctgcccccatgaaatcattacccttcaatgagccaattcaaatgctgcttcttttgtgaagctttctgccaccacccttccctcccagaatgttgtactttccctgatctgcttcataacacctccttccaagcacacataggatttcacgcatcctctagtagctaggtggtacaggtctgatttcccatcagactgtgagctttttgagggcattcataatgaccttcttttctgtagtgcctacaattacagcagaaaagcagcactcaaaatgtttgttgaagctctccagtgaactggggttctaattattgagtgaagaacttgacactaagtggctgttgcctgcattatcccaacccatctctgcagagagatgggagcagcagagggcgctgtcactgcaggtgtaggggcatttttcctctccatgacatgccagatggccccccggggccacagctccaccgtaagagtccccaattttgttttgtttttttacagtgagggtgttctagaggaaagggctcaacgaatccaattgcaatagctccagtttgtgataaagatgacaatttttttttatttgagacagagtctggttctgttgcccaggctggagtgcagtggcacagtgttgactcactgccacctccacccccggggattcaagcaattatcgtgtctcagcctcccgagtagctgggattacagaccccaacctccagctaacttttgtattttcaccatgttggcaaggctggttttgaacccctgatc

SEQ ID NO: 202550 - DNA, 1000 bp, Homo Sapiens
agcaggagacaagataagggtaatcacccagcacctggacccattaggattaagtaaatttaccgaggctccagaggaaggtcttcaggattcagatcttagttatagattagaagaagttaatcacttatgtcttcagatgaatgcacactaacacacagacatatagcttagaaggtatataagctctggaaaactttgtaactttgagttggcctggcgatattttccaggccttttccctgtacccagttacagaaataaactgtcttctttcccagttcgtctgcctctcattattgggctgcgagaataggcagcctgaccctcagcttggtccggaaacagtttggtcacctcaattcctttatttaattcaccttttgatctcttcttggcttctaggccttctccatactgccgaggatccatagttgattattagaattactctccattgggccgggtgtggtggtgcacacctgtaatcccagcactctgggaggccgaggcgggcggatcacgaggtcaggagatcaagaccatcctggctaacacagtgaaaccctgtctctactaaaaatacaaaaaattagccaggcatggtggcgggcacctgtagtcccagctactcgggaggctgatgcaggagaatggcgtgaacccgggaggcagagcttgcagtgagctgagatcccgccactgcactccagcctgggcaacagagcaggactctatctcaaaaaaaaaaaaaaaaagaattactctcaatttacttgcatccctatatttccatcctatttccaatgatcaatgttaggtcattgccacaacctgccttctccatttttacactggttggggagggagtgataaagttgataagaatgtaaacacaaataaccacaatatacagcaatgtcccatttaaatcataagcataatacagaaattcgtgaacttgtaaaggcaggaaagagaacatctagttagaatgatc

SEQ ID NO: 202551 - DNA, 1000 bp, Homo Sapiens
agtaattttcagaatgagcaaaaaatgtgagactgtcaaaacagacaagtttcctttaaataaaggtgtaagcaaatacaaccagcaattactaacagaaattgccttcactacaacagctatcagctagactgcctagcacatgaaagaaactaatccttaaaacctcttttcttttgtatgaatacttaaatgaaagcaactagttaagccaatgattctaattggactttttaaagtaaacatttttatttatttaggctaggtatataagtcaaaagttacaattatgacaaatttaaattcaatctatgaatgcaaaagaataatcattcttatataatagtacggaaaataacttttcagtttgtctgaaagacatttgaacattcgagtgtcgggagtagcttaaggtcaagaccagttacattcttttacatccaggaattctaatggagaggaatctctggatcggtcactggtttaaagatgacccttactaaagtctggcaaatgctctgagccttgagcttcaaaatttatacaacagaaagaatgatactgacctttctcatttacaagttaagggatgataaatattatttctactaggctacataatcatagcttgattttattctcaaacttgtctttaaagaagaattttttaaagtgtaagtcctcatctcttgcctattctgacaaatacctcaaattgaaaaacattcgcctctatcacctgtataagtcaaaatatggaatcttatctcaagctgatggtggaaatactggcttgctttttctatcaatcttacataatcttgaaagttgatcttcttatctctctaatccttctgaaatgtgaaggacacgagtaatgacttgaaaaaatgaatgacagatctgaaccatcacattaataccttctgaagcaatgagctaaaaatgttctagaaagatattttttaattaagtaaggctaggtgcagtggtgcatgcc

SEQ ID NO: 202552 - DNA, 1000 bp, Homo Sapiens
gacaagtgctcactgtctaaaattggaacatatactaaaattggaacaatacagagaagattagcatggctcctgtgtaaggatgacgtgcaaatttgtcaagggtttcattttttttataacacaaaggataaatgcttgaggggatggataccccattcactctgatatgattattacacatcatatgcctgtatcaaaatatctgatgtaccccataaacatatatacctactatttacccataaaaataaaaattaaaaaaaaaagaagacgaaatgtaaaaattatcaggtaaaggaaaattaagagatttttgtcaacagcagacttcttctaagagaaatgctgtaggttcttcttcaggtgaagggagatgatatcagagggaaacatggaactttgggaataaatgaggagcaacagaaatggcaaaatatatgggtaaatgtaatgtataatttttctccttttgaattctttaagatatatatgatagttgaaagcaaaaaaatataacactgtctgagggatttaaaatgttattagatgtaatatgttcgaaaactgtaacatgaaagaaattaaagatatctatactgttgtaaagcttctacatattacttgaagtattaaactataagtagaatgtgaaaggttgtgtgtgactatcttagtatctacagcagccactgattttaaaaaataacaaccaggcatgacatcacacttctgtagtccaagctacttgggagagtgaggcaagaggattgcttgtgcccaggagctcaagatcagcctgggcaacatagtgagaccccatcttaaaaaataaataaataggccaggcacggtggctcatgcttgtaatcccagcactttgagaggctgaggcgggcggatcacgaggtcaggagatggagaccatcctggctaacatggtgaaaccccgtctctactaaaaatacaaaaaaaaaaaaaaaaattagctgggcattgt

SEQ ID NO: 202553 - DNA, 1000 bp, Homo Sapiens
tcttcagatgagaaaaaaggccccagccagcatccccaggaacacatattgtttaggttaggatttttctgacttttcccaaaggaagtcctgctgggctcccatcttcaagaagaagatccttaaccctggtctctttccaccaagcttgtaagatgttaacgttaactgtgcacctactatgtgtcagtcattatgctaagcactttacatgcatgatctcatttttctcataataaaactccattgatgaagaaaggctgaaagtgagaaagtaactggcaaagttcccatcaccagcagatggcagaaatgaccctgttcctgtgggcttcctatcccctcagcctgaggctactcactgccagcgaaggacatggaggaaatattcctcctggagtgccgagaaggtcatcctcaagcccagcagagggggctgcctggaggaggtgtgcctgtcagggacaaccagcccaggggagatctgagtggcatcgctggggcgccccatggagttaaccccatggagcttacctgggcagttcagcagcagccacgaatccattccaggcttcatcatcagtcagcagttgtagcagattctctctgctcacttggtcctggaaatacttaaggtaatcctcaataaagatactgctctctagttggaaagaagaaaggataaggttggaggatagtgtaggggagcataacagccattgcacattaggtggttacatgttaatttttcctggacaactgtgatgtgggacatgtttgatggagtcatcagtgctatagagggattgtgtgcccccaaaattcatatgctgaagccctaaactcgagtgactatatttgaagattgggcctttaaggaagcaattaagactgaatgagatcacaagggtagggctctaatcctactagagggctagtgtcctattgtaagaagagaaagagaaacaataaggccaggtaagcacacagcgcaaaggca

SEQ ID NO: 202554 - DNA, 1000 bp, Homo Sapiens
gcccagacttcagagttggcattcctggcgctgtcccccaccagtcacacaccatcaacaagctgccttgcctctctgagaggttttaggtcctctaaaaatagtacctacctcatagtgttgttgtgtggatgaaaggcaaagcccttacttaccatagtgctggttcattgtaagcgcttggcagatgctagctgtgtgcacctaagtacctggcttttagtccttgaccagctactgacatgctgagtggatgtggacaagtctgtcttagatttggtttccctattctgttaatgaagcatcttaagccccagaggcctgtggatggtttggggggtggggggtggggtaaattaatatgtagcccacagtgctggggcctctgggcttttttccagaaggcgctccaggctgcccactaaagaagcccaactgccacagcagcagaccctgcggggagctggacgctctgcagccgcctgagccgccatggctgacttggtatgagcaaacataggctcatgctctgatcttgcctggcctcctgtggccagtgctcaggacatgtcatttgagtgctgaaataaacctctggacctttctttttttttgtttttttttttgagacggagtcactctgtagcccaggctggagtgcagtggcgcgatctcagctcactgcaagctccgcctcctaggttcacgccattctcctgcctcagcctcccgagtagctgggactacaggcgcccaccaccacgcctggctaatacctctggacctttcttatccctcaaggacaaattcaaccccctttttcccttgagactggcatcctgctggagaaggcatggcccaaggcaggaggccaagagcgcactccttcccaggcatcctggactcgccatctttctcatcccccaccttactgtcccctgttccccacccataggagggctgaagacccatgagttctaccagtaaatagcccttgatc

SEQ ID NO: 202555 - DNA, 1000 bp, Homo Sapiens
tcttaagttgatatgggaatatgagtatttgttgtattatttacctttttgcatgcctgatatgttgaattttttcagttaacctttttttttttttatgtatttagttttttgagacagggtctcgctctgtggcccaggctggatgcagtggcacaaccatggctcactgcagcctcgacctccctgggatcaggtgatccttccacctcagcctcccaagtagctgggactacaggtgtgcacagggctaattttttctagtttttgtggagacgggattttaccatgtttcccaggctggtttcaaactcctgggctcaagcgatcctcctgcctcggccttcgaaggtgctgggattacagccatgagccaccacacctggcttaatttttaaacatttttaaagaccattagtttgtagctgaatccaaaaagaaaaaaaaaataagtgttattaaccaggggagggagagatgaggatcatagagataaaagcatgtcatgagaccattgagacttcgcagtttgagatcgtactgagcctgacaaaatgctcagagaggcatgttggaaaaacgggctctggagatagatatatttaggctaagggctttatgtccactgtgactggcagattagcgggccatctcatgcattcctatgaaccaaaggcaagtggaggactcgggaatttgaggctgtatgatgctgagaaagtgacctcccaagctgggcctggtggctcacgcctgtaatcccagcaccttgggaggccaaggcgggcagatcacctgaggtcgggagttcgagaccagcctggtcaacatggtgaaaccctgcctctattaataattacaaatacaaatacaaaaatttctactaatacaaaaagttagctgggtgtggtggcacgtgcctgtaatcccagctactctggaggctgaggcagaagaatcgtttgaacccgggaggtggaggttgcagtgagccgagatc

SEQ ID NO: 202556 - DNA, 1000 bp, Homo Sapiens
cccaaatcactactcattgagctcactcctaggctccagatgcatgttttccaactacttccaccctcagctcctctctactgctcatgatttacatacaattcctcagtaaactgtgttaacattgcctctgagatatagccagaatcctaccatttctcattgcttcccccatcacgaccctgtccaagccacagtcatctgtggtctgcactatggtgatacttcttccaaaccaatatcagtaccatagtgctgttgcctgcccttgattcattcccctttcttttggtaatagagacttgaatctcctttgttgaatgtaaccatcagcatcccagcagatgattaatctaaagggggtttagtaaaggttacatacagatgtgtgggcagggttgagggaaaaagcagggctgatggtgtgatacactgtggcaggcaacagaggggagccattatcacctccagggtggataattctggaggtggagaagggagaatttactagaactaggagagagtagctgtgtgaagaaggccagttgacagaagcttcaataaatacatgtagccaacctgcagcgacccagaagggcaggggccagaggaataatacccttaccttcctcctcctccaaccctcgggtctcatttccaatgtcttctatttggtgaattcaactgtaagtcagaggacaagggatctgtggaagcagtccatgcaggttggcctcttgaggttcaaatcaggaaggaaaagggtggagagtaggtctggaagggccaacagaaatgatctagcacaggaagccacctctccccaaatctcagtccacgcgatttgtgaggagctgtcagaatgttccatgccccttctcaggagagtggtttagtgatgcacgggtaacacaagttagaccaatgggatgtagtcctgggacttttgttgacagcatcagggaaaagaaactccctttctgctggaaagggtgtgatc

SEQ ID NO: 202557 - DNA, 1000 bp, Homo Sapiens
agactggggtccacgggacaccccagccacgccaagccgggaagtccccgcctcctggagctgaacccgcccctctcccagaggtggagctgcggggggcgggaacaggcacggagaaaataaacaagactaaaaagtcctgagtagcgctgtgtggccgcaaacctgaacccaccttttgcaccacgcgggacccggcacgcttcctgccacccacccctgagagggctgcgcggccgaccccagtactagaaaacactcgtcacctcaatcaagacgggtacgaaggccaacggacgccttcctttagaacgctcagcacacagagcaacttctcacgcctactctcaaatggcgtactccaaactagcactcccgacgtccagctgtgaacccagagcggcggaaagcccctgaacccagcgcccgggcatgcgcagacgcgttgttgtggtgggcgtggctccctccggacccggcgccccgccctccgccccgtgtccgcatgcgcgactgagccgcgggggtggtactgctgcatccgggtgtctgaagatccgatgaaataacatatgcaaaatgattgggtccgtgattggcattccagaaatggtagctgttattcagccaacaaatatttattgagcacctactatggacttccctggtgctgaggatacaacagcaaccacagcagtcaaaagtccctgtcttcatgttgctcagattctcataggggaaagcaaataatgaacaaatacacggccgggcgcagtggctcacgcctgtaatcccagtactttgcgaggccaaggtgggcaagtcacctgaggtcaggagttcgagaccagactagccaacgtggtgaaaccctgtcactactaaaaatacaaaaattagcgcggtgtggtggctcatgcctgtagtcccagctacttgggaggctgaggaaggagaatcgcttgaacctaaaaggcagaagttgcaatgagccaagatc

SEQ ID NO: 202558 - DNA, 1000 bp, Homo Sapiens
tttttaaacagaggtgttagatattataggatatttatatattttagaatattttcctctttctcattttgaaaactatgcatctgacaaaggtctaatatctagcatctgtaaggaacttaaacaaatttacaaggaaaaacaaacaaccccattaaaaagtgggcaaagggacatgacatgcatgtggccaacaagtatatgaaaggtagctcaacatcactgatcattagagcagtgcaaattaaaccacagtgaaatatcatctcacaccagacagaatggctattatgaaaaagtcaaaaaataacatgctggctaggttgtggagaaaaaggaatgctttactccgttgggaagaatgtaaattagttcaaccattgtggaagactctggcgattcctaaagacctaaagaaagaaataccatttgactcagcaatcccattgctgggtgtattagttctgttttcatgctgctgataaagacatagccaagattgggcaatttacaaaagaaagagatttaatagacttaccattccacatggctggtgaggcctcacaatcatggtggaaggcaaggaggagcaagtcacatcttacatggatggtggcaggcaaagagagagcttgtgcagagaaactcccattttaaaaaccatcagatctcgtgagacttattcactagcacaagaacagcacagaaaagacccacccccatgattcaattacctcccaccaggtccctcccccaacatgtgggaactcaagaagagatttgggtggggacacagccaaaccatatcactggtatatacccaaaggaatataagtcattctgtcataaagacacatgcacacatatgttcatcgcaacactatgcacactagcaaagacatggaatgaagctaaatgcccatcaatggtagactggataaagaaagtgtggaacgtatagaccatggaatactctgcagccataaaaaggaacaagatc

SEQ ID NO: 202559 - DNA, 1000 bp, Homo Sapiens
ccaccctcctcagacccccaggcgtgctcagctacactaactgggcccaatccttgattctgcccaacaaggccagccccgtgggccctgatcactctactgaactccagaagcttagtaatgaattctatctccagaagccggtatcacctcagctctaaaataggaatactggtgctctaactggccagcgttccccactctaaaatcctgcagtaatgaggaacagaatacagatgtggagagcagccaaggccagaggtttggcccccaaaggaaccccatccaagcctcgctcagctgaggtttcctgacaggaggggaagctgccagctgagctgaggcccacataggaccgggcagggcactactctctcctgaaggcgtgggtgggaaggcagcacttccccaactccaggacacgggaacagactgtcaggctgaaatacgagagtccaaagccacacggtttattgaggggtggggccaagtgggctctggtggccagaatgggctatgtgtcacagtcctcggggacagcagctgtgatgatgagggagggctccaggacacctgggccggtgaagctctcctctgcacacagtctctggccggggagctgggaggccaggccgccctgggccagggactccacaatgacctccgccgagcccacctccagctctgcaggcggctgcagcgccaccaccaccatcttctcgtcctcgatgatcaggttgcggagcttgcgctgccgcgggttgtagttctctacccggtcgtggatctccatgtgcctccgcaggtgggcctggcggggagggtgagctcagaactttgggggatcctagggtaggggaaggggcccaggccctggcctacctgtcgggtaaacttgtagccacactcggtgcactcaaacttcctcacccccttgtgccgtctgacgtgcacacgcagttgctccacggctgcaagagggagaacaccgtgggggatc

SEQ ID NO: 202560 - DNA, 1000 bp, Homo Sapiens
ttcagctaatttattttttaattttatgtagagatcagagtctcacaatgttgcccaagcgggtatcaaactcttggcctcaagctatccccctgcttcagcctcccaaagtgctgggattacaggcgtgagctgccacacctggcccctcatttattactttcatttattcttgggcgccacctagaaggaagacatgagagtgttaggagcaccaagctcttgtgtcactgagcagggttgggaggtcaccggggggctgagaggagccagggcaggcccaggcaggcagggagcacagggccaggcaggctcctccctgaggccccctcaccctaggggtcagtgttgtggaaggtggggccctgcacggggagaggggctggctgggatttgaaggggctacagaacatggcaggacgcagtggaggtcatatgatgatgtcatccctcagggttctgtttgcctggagcccagagcaggaggagttggtgggaagagtgtacccagtgcatctcagcatcgtcccccagagaggatgccccaaacgctcaattatgcctcaatttcctcttctgtaaaatggtgacagtgtagacacaaaactatatgactgagaagaaaaataagtgagttgatacatgtgacattactggtaatcatcatcatcttgggttgccagtgggttcccagtattcattatattattaaaaattaagaggtgtccacatgtggatcctggggagggtgtgtcataaaccaagggttatggttaatccagtgtgcacccaaggtcctgaaaaaagcctccgaagttcttgtcacctgctgagtgccagtccgcatggccctaaactctggccataatcaagtgagggtgagacggaggtccctgaggggagagagcccgctgttgacagagtcctggctgtgtgacaggcgctgtgcttctcctcattccctccttacagtatccctttgaagaagggatccttgatc

SEQ ID NO: 202561 - DNA, 1000 bp, Homo Sapiens
tctcggcttgtcctcttctttaaagccagatagtttgaatttctatccctgggtctgagagagatttgaaagttggtatcaaggacgtggaagttgccttcttgacctcagaacaggcccaccttgaaagaggttctgagaaaactactgacttttgactgcttcttgcattattaatcaatacctcacatgcactgggtacactgaaaatgtgctgaatatggttgtttggtgaaagtgttcctcttagggtcagtatttggtaactataatctggtaagaaatgtgagtttgttactttattatgtcttagtttaaaaatatggaaaaaaatgcaaaatatcaagatctttttatagggtggggtgtagtgcaggccattttgttccttttttttttttttacaagtgcccaacaaagtttgtttccagatttagccagcaatagattcttcaacattattgcctaatagtaatcttctgagactttggttttccaacattatgttatcaaatgtagtgcttttctgttaaacccaaaagaccactgctctggttatcttgaaaggcatcacggcaatagcttctcagttagctcagtgcatttaagtgtgtgtaccagcactagcaagaaatagtctcttgtgccttaaaatccaggcaaatctgaaaatgtctgtggggaattggatgaacatagcatagacataatggaagggattttcttagctttatttttaaaaactggtttaccctaacagtcaatccaggctctggtaactaatcagctttttcatcaccactacccagatccaagcttctattatctctcacttgaattcctgtagctttctaacctgtctcccggtttcacccttgcccccaaaccccctacagcttgttctccacacagaagccaggtgatttgaagtcattcttctgctcaaaacttgccagtggtttcccatctcagagtaaaacccaaagattttattatgatc

SEQ ID NO: 202562 - DNA, 1000 bp, Homo Sapiens
cccccgccccaaccccccgccccaggccacattccaggaggggctggcagctttctctagaatgaagctaatccacgcctgtgcctgggaatgtgggggggggaggggccaaaacaaagggtgctgtgtccaggccgcctgagggcagcttgctggtggtcccagcccttggccactgccacctctcccctgacccgagcagccgctacttcctaggaaacccacaggtcgaaatgagagcaggtggagatgggggctgcagcgcgagggctttggggcagccctaaagagttctccaaacaaacaaacaaggggctgggagtgagatggcttcccggggaacagccaggacctcagtaccccctagaccccattctccaatgggggagtctctatccctcaccccctgccctgtcccccaaataagacaccaccagtcctgctgccgcatcactttgcgtccacttcctttatttctcatcatttacaaaagatgtacagagagggcatgtgttgggcacggagcaggtacaaggggctcctccccacgggggcagaaaagggggaaagaggttagggggcaagaggtgggccccccagggagagtcctggagcccctggagggggagaaattgtcctgtccccccattccgcctgctttactttgaaggtctcggaccccaagccagtgctttggagctgctcaggctgccggggtggtctggggagggcagccaccccccgtctcagggacccgcttcttggatctgctgctgttgctgctgtcgctgccattgccagctctgaacagcccctgggcaggtgcactgtggggtacgacctcggaccccgcctcagcggatgaggggtgctgagcggtcattggtgatggtgggacgaagcttgacagtggcaaaaggatttgtgcccctgtaggaggagagagagaatggggtgagaagggcagatgatccccacctggccatggctcaggaaggca

SEQ ID NO: 202563 - DNA, 1000 bp, Homo Sapiens
aggctggggccctgctccctggcctcctcactccaggaccccaactgatggagcctccaccatcaggaacaccgctcgtctccatggcaggaaggaaaagaaccaattccacactggttcttgaagatttccacccagaaatgacacacacgacaacattcccatttcactggccaagtgagtcaccagagccaactgaatttcaagtgaacagggagtacaattctattacatgcccagaagacaaacacatagaaatgctcatgaatagcacacctacgactaccatttacttggaaattaacccataacccagtatcggacttaatgaaaaaccacagaagcaattccattaaagccaggcacgtggcaatgacatctccaagcacaattcttaacactgttctggacacataaagcaacacagtcaggcaaaggaaggaatgtggaggtaacatgatcacactgcacagatgccatgattatagacacgagaaacaaatcaagaagatcaactggaaactactataagtagtaaaaggataaaagaacatggctaaggacaaaatcattacagagcaatcaacagctttcatatctacaaagaacagtgagaagataacatggaagaaaatacttcgtttctagcagcaacgaaagatgcaaaataacgataaacaaacctaacaagaaatatgcaaaatggatataaagaagacttggcatatcataaaagtaacatatcaaataaagagggaaagtagaccgggcagggtggctcacatctgtaatcccagcactttgggaggccgaggagggtggatcacaaggtcaggagatcgagaccatcctggctaacacggtgaaaccccatctctactaaaaaatacaaaaaattagccgggtgtggtggcaggtgcctgtagtcccagctacttgggaggctgatgcagaagaatggcatgaacctgggaggcggagcttgcagtgagccaagatc

SEQ ID NO: 202564 - DNA, 1000 bp, Homo Sapiens
tgatcgcacagctagtaaatgatgggctttggaaagatgccaagatttctgcttttgggggaagtctttactcattttgcagtgcactactgtataggaatagctaatccaaagtcaactgataactcttcaaatatggaaaaagaactcgggttcatatgacaaataatgagagaataatatgtaagctctcttccttaaaaaaataatgtagacaggtaccgaggagaaagatgcctgtggctataaataaaggggtagcaggctgggcacggtggctcacgcttgtaatcccagcactttgggaggccaaggcaggcggatcacgaggtcaggagtttgaagccagcctggccaacatggtgaaaccccatctctactaaaaaatataaaaactagccgggcgtggtggtgcgcacctgtagccccagctactcgggaggctgaggcaggagaatcacttgaacccagggggcagaggttgcagtgagcagagattgcaccactgcactctggcctggggactagagggagactccatctcaaaaaataaaacattaaaaaaaaaagggtaacatgagggatccttgtgatggaaccgttctctctcttgactggggtgttggttataagttgtatagaactaaatacacacataaacgagagcctgtcaaactggtgaaatctgaataaggttggtagattttatcaatgtcagtttcttcgttgggatattatagttatgtaagatattaccattaggggaaactgggtaatgggcatacagaatctctgtgtggtattccttgccttctttctttctgtggtttttttttttattttggacagagttttttgacagagttttgctctgttgcccaggctggagtgcagtggcatgatcatagctcacttgaacttctgggctcagatgattttctggtctcaacctcttaagtagctagaactacaggcacacaccaccatgcccaactaatta

SEQ ID NO: 202565 - DNA, 1000 bp, Homo Sapiens
ctaaaactatacaacttcaagaagaaaaaataggagaaagtttttcagctttctgtaaggcagtgattcctgagagaggaccccaaagcacaattcataaaagaaaaaagtagcaaattaaacttcatacccagcaattccactctttggtatatacccaaaatgactgaaagaagagactcagatacttttacaccaatgttcatagcagcgttattcataatagccaaaggtggaagtagtccagatgtccatcaacagatgaatgggtaaataaaatgtgatctatacattatacagtggaatattattcataaaaagaaataacattctgataaatgctgcaacttggaagaaccttgagaacattacgctagcggaataagccacagtggacaaatactgtataattacgcttctatgaggacgtggaataggcaaattcatagagacagaaagcagactacaagttaccaggggccattgagggagtaattgtttcatggtgtgttcatttcctgggcctgccataacaaagcaccacaaatgggtgatttaaaatctagagatttattgtctcacagttctggagagtagagatccaaaatcaaggtgacaaaagggccatggtcctctgaaacctgcaggggaattctctttgcctcttcctcacttctggtagttggcaggtaatcttgggtgcaaatgccaaaaatctgacttgcagatgcatcactgtaatcctccatcttcccgcggggttctccctgtgtgtcttccctctgagtatgtctgcgtctgtgtccgcgtccaactttccttatgacgacacgaatcagatcagattagggcctacctgctgatctccatgtgactgcatctgcaaagactctgttttaagatcctgaggtactaggagttaggacttaaacatacctttttgtgtgtgggatgcactttaacccataacaaataggcacagagattctctttgggatga

SEQ ID NO: 202566 - DNA, 1000 bp, Homo Sapiens
actaaacagaagagatggtatgtaacatcctttcctctaagaatgacagaagggccaggcgcagtggctcagacctataatctcatcgactcaggaggccaaggcagaaggatcacttgaggccaggagttcaagaccagcatgggcaatgtagtgagaccccactccattctctcaaaatttttttttagaaaagtagcgagttgaggccaggcactgtgggtcacacctgtaatcctaacactttgggaggctgaggcaaacggattgcttgggcctaggagttcgagaaacatgggcaacatggtgaaacaccagctctaccaaaaaaaatgcaaaaattagctaggtgtggtggcacacacctgtggtcccagctactagagaggctgagatgggacgatcacttgagcccaggaagtcaaggctgcagtgagccaagattgtgccactgaacttcagtctgggtgagagtgagaccctgtctcaaaaaaactaaaataataaaaaacaaaataaataaaaagcagccaagtgtggtggtgcatgcccataatctcagctacttgggaggctggggtggaaggacagtttgagcccaggagctcaagactgtggtgagctgtgatcatgccactgcattccagcatgggtaacagagtgagactccaactctaaaaagaagaagaatggcagaaaggaaactaatgttaacagggaaaatacccatagccaagtctgctaatttaaagatgaatgctaaggaatttccacgtcttgtgaaggcatgcatatcttgtgctaattctcttaagatttaagatgaatagccataataattgtcataatctatccctcactccattcttcagttccaaaaaccctgtctccaagaagcttgtcaaaagcatacttccatctagtaatttacactttcttattatacacagtaaacatttattaaaaataataatattcataacaataaacttttaaggca

SEQ ID NO: 202567 - DNA, 1000 bp, Homo Sapiens
aggttgtacatctcaagggatgcttaggtgaaccccagttctagctgtctatttggcagtgacctttgaccccaggtgtccaggagagggaggcaaggccaccagttcctttttggcagaggaagcacctacagagcattgtccaggacagcaggacacgagggttgcaaactccttaaatacccatctgactccttcctcttaccgatggggaaactgaggtaacagaccttgcctgaggtcacgctgttctcagtggcagagctgatgtcagaatctgggtcttgggcccccacctcaaggcttcctctgccttctgaggcactgcacgtgggacacagctgtggcttccgcagctgggctagtggacaggctgtgcacccccttacggcaacatggccctgggacggctcacatcaggggagaggaagccattcctttctccaatcgagaccccaagcagaggttctcccactttgccaagccatatgcctggacactggcagcactgcctggaggagacagctggacccaaagactgaagccaggggcctgggtcttccacagctgacctgtgtgatcctgggcaagccacttgacccagctgagtctgtcttcttgtccataaaatggggagagccccttcttcatggggctgttgagaggatggacagccaggcagaatggaggatgctttataccctagcaagtttgttctgcttttccaaaggcaggacattgtgtttgcacagcttgactcacagcagagcccagagctgggcactatcaccctcatctccttctgccttccctctgggtccccagccacctggctttcttgtgccacctggctttcttgtgcttccttgaaaccaccaagcctgtggctgccgcaggatctttgcactagccgttccttctgcctggaatgctcttttcctatctttaacgcccattactggctcctgtgtgtcattcaaatctgggcttcaatcatctg

SEQ ID NO: 202568 - DNA, 1000 bp, Homo Sapiens
cctgttgctttagggttcctggtgtactttcacttacagtatcttagttcatcctctcatttgggagtgccttttctggattctgccccagaaggctgtctgctgttcaggtggtctgaggcggagtcttgctctgtcggccaggctggagtgcagtggagtgatcttggctcactgcaacctccccatcctgggttcaagcgattctcctgcttcagcctcccgagtaggtgggattacaggcgtccaccatcacgcccggctaatttttatttttatttatttttatttttatctttttgagacggagtctcgctctgtcggccaggctggagtgcagtggcgcgatcttggctcactgcaacctccgcctcccgggttcaagcgattctcctgcctcagcctcccgagtagctgggactacaggcgtgtgccaccacgcctggctaatttttgtatttttagtagagacagggtttcaccatgttggccaggatggtctcgatctcttgacctcgtgatccgcccgcctcggcctcccaaagtgctgggcttacaggtgtgagccaccacgcctggcccctatatttttagtagagacagggtttcgccatgttggccaggctggtctcaaactcctgacctcaagtgatctgtctgcctcagcctcccaaagtgttgggattacaggcgtgagccactgtgcccggcctgagaatgcttttctttgtacctaatttgtatacttttctttaaatgcatttgacattgtgtgtttagcacctttatgggatttctggaatatcgctgggtacctggagacttggcatcttttcagaaagtacatcagtcttggagtaggtggtgagcagacagctaatggcatgtaaagaatgttgcaagcttgacttgcaaagctatttcaaaatttaaataaaggtagcttgtggctgagttgaagggaaatggtggtatcttcaagacaatgcttggcttgctc

SEQ ID NO: 202569 - DNA, 1000 bp, Homo Sapiens
atacttctctctcttgcctgaggttatttgatggaggaaaccaaccagtttttactgtgtcttcaggcgtccattaggaggtctgacggggccacacactaggatgtgttagcagagattatgagcaccagcccgagaaggagacagtactgctgctccgtgacttagtctccgagtggcagctctgacaaacccaggtgcagaggcctcctctggagtgcacctgagctgggggcaggaccagtcaggttgggagcagtgtgggggcctggaggggtggcgggggccagcttgaggtcaggaagacaatcttctgggggctggttcctctgctctctgggcctccactttgtctccaatgtcacctctggtcctgtcctccagcagccaccttgggggtgaccttgggccaccagggaaggttttggggaagacgacaggctcagggtgggaggggacccccaggaggaggaggcgttggggctggacgatgaggggtgtccagggccatgaccagttgagaggggctcagggctggggctgcaagggtgatcttgagggtggtgggtgacactgccgagggaacccccctgcacacgcgtccctgcctgccttggctgatgcagacggtcatcccccctgccccgcccagctgtgtccttgccccagcacgctccatttacctgccacaccacctcgctggttttggtttttgcatttttggggatgatgaagaaaacatacttgaaaaaattcagcatacagcagtctggagagggtggaagcattggtgcgggccatgccgctgctgcccaccctcctctcttcagtctcgttctctgtcccccgccctccagagtggctgtgtctctgaggtgtgggccacctgcattttagatctgagcatgatctcccgggtgttgcctgtcagagtggcctcctgcactgcctccacgtgcaacctgcggggacccttcccccacccaccagtgtacagggc

SEQ ID NO: 202570 - DNA, 1000 bp, Homo Sapiens
tgggtgacagggtaagacgccgtctcagaaaaaaaaaaaaaaaaaaaaattctatggaggtgagaggacttagaacagtgctcttctgacgttaatgtgcatatgagttacatatctcaaatctcccctctctccatcttgacagctaccattctggtccaagtccaagtccccctacaggcctcatctctcactgggacaactgagctggacttcagacgctcaaccctgtggtttaggcttggtggtgaagaggccaggacagggctaactgaatggaagaaaacagaaggggccggcatggggagtctgaatacgggcatgctgctggggagaacttggtgatgcttgaggttgggatttcagagaaggctgttctaggcgtggctctggagagaatagctacagtcatgtgaaggccactgaggatggcaaggaagggccctgggacattcacacggatgagcaggatattaggacagaaacccaagtcccggatggatgaagggaggtgacagggaagatagaagatgaaggtgatggggaggcacagcagagtagagccaggcagcagaagtctcagaggagaaagaaaaagataacatatgcgcacagaaaacaaaacaaaacaaaacataaagccaggcacacgcctataatcccagcactttgggaggctgaggtgggaggattgcttgaggccaggagttcgagaccagcctgggcaatatagtaagatcttgtctctacggaaaaaaaaaaaaaaaattagcctggtgtggtggcatgtgcctgtggtcccagctacttgggagactgaggtgggaggactgcttgagtctgggaggtagaggttgcagtgagtcgacattgagccattgaactccagcctgggcgacagagtgagactctgtctcaaaaaaaaagaggcggggggtggggggtcattgtggctcacacctgtaatcccagcactttaggaggccaaggcaggcagatc

SEQ ID NO: 202571 - DNA, 1000 bp, Homo Sapiens
gtcatgtgtatgctcaagggtgaaccaggatttgcattacctgggccacctgggccaccaggacttccaggtttcaaaggagcacttggtccaaaaggtgatcgtggtttcccaggacctccgggtcctccaggacgcactggcttagatgggctccctggaccaaaaggtatggaggctgtcactgcatctcaacttgcttttaacttttatagaaattgacacctttgggaaagtttatgggtgataagcccaattaactggaaaccctatgctgccattctgttactgctacacatttttttcaatccttcattgattatttttgtcttttatttcattgaatagataataaaatcatggcccggcacggtggctcactcctgtaatcccagcactttgggaggccaaggtgggcggatcacctgaggtctggaattcaagaccatcctggccaacatggcgaaaccccgtctctaccaaaaatagaaaaattagccgggcatggtggcacatgtttgtaatcccagctacttgggaggctgaggcaggagaatcacttgaacttgggaggtgaaggttgcagtaagccactccagcctgggtgacagagtgagactttgtctcaaaaaaaaaaaaaaaaacaatcatatatgttataaaagtaacactgagaagtcttccttccaacccatcttcatccactttgttcctctccatcctcctgcttaactattttttattctcctttcttccccccaccctccccccataccccaagacagagtcttgctctgtctcccaggctggagtgcaatggcgtgatcttggctcactgcaacctccacctcccaggttcaagcaactctcctgcctcagcctcctcagtagctaggattacagatgcatgccaccaggcccagctaatttttgtatttttagtagagacagggtttcaccatgttggccaggctggtctcgaactcctaacttcgtgatc

SEQ ID NO: 202572 - DNA, 1000 bp, Homo Sapiens
tgaaatattttctatccttcccactgcattcatgccgagcacatacggcatcaaataatggtattttatcccacgagttccaagtagatacagtctcagtctgttatagtactcctggaaactactatcaagcaattgcacatggtgtgatcaacatttgttatcttttctatcactttctatcttctttattctttaatgatttgtaatcgaatgcttccattttttcagaagagaataaaaggcccagaatggtaatgactgttaccaagtcacgatgtagcaaaattggtgtgtcacttctgacagtttctctaactcccaaaccaatgcatattttgataattgccctcattatttcctcaaatatacttccctgtcagaaaaaaatgattatatataaaattaaatgaggaaaactattaataataaaatatcatgttgtcttgggttgccttttaccagaagtagaccctgagcaaattatttgagtgccagcaacttatttcggaggtgatcccaggaagcacagcaaagaagtgagtgagacggagaaaagaacaccagtacagtgtgagtttcatgagcatgtcatcagtgataaaatgaggttcagtaccacttgagaccactaggagaatgatttgtctcacctgagaagcaagaaaggtagggtagttcccacaaactcccatgtgtaatgtgttaagaacaataatcattataattaaataatggattattaactatcacaacattgtagttctattagtctgagccttaatgcatacagatttttgcaaacttcatggaagtttccattttatttgaaattagtttttgattaaaaataatggaacgctccttcaatcaattaaaaatatcagcagatccatctgcttggaaaatgattcttcctgatgctggcttccatcctactggttgacatcattacgttgggttaagcagtgacatgggtaattgttcttaaaatgtgatc

SEQ ID NO: 202573 - DNA, 1000 bp, Homo Sapiens
caagccacatggggaggccacctattttgtaggtgatctggtggcagctccagctagcctgcctggactgactacctgacatgtgagtgaggatgacttccagataactctggccccaggcattatctaaccacaagtcagagcagcactgttttgctgagctataagagacaatactaaaatgactgttgacttaagactctaaatgttgagatgcttcgttataacagcaatagataattgaaaaagtcttctccactatataatgttgtacactaatagactcatataataacacactctaagccttttcttggagtagccacactccatttctgctctcttttaaaagaaaagtttccttttcctacagatactggagaaaccactggagtcaatatgatgcactgttctgaacatgaatgagtaaactctggacaaaatggccaagaggcacaagatccactcaatatgctcttgcttcctctgcctggaatgctcctgtttctggcagccacagggtccagtcccccatgtctctgctgtaacgccaccacatcagagggatcttctgaccagcctccataagacagtacccatcacttccatcactccccattctccttaccatgcctaaattaatcctaggaaacttagtatttatcaccccttgtttggtggggattttgtttgtttatttatctatttgtttattatcacattcccagtccccaaataagcttactagaggaagtgattttgctttgttcatccctaggatttagaactgtctgttacacgtagcagacattcagcaaatgttcagtaaatgaatgagagaacaaaccaataaggactaaaagcatctacaatgtgtctatttatgtgagctctttacagggtgcacagggatgcaggaggtgtttgagacaaaggttctgctcttgagaatgacaactcaatgatttaaaaatcttgcacattgaggggaggggagatc

SEQ ID NO: 202574 - DNA, 1000 bp, Homo Sapiens
cagaaggttctgtcatctggaaaaaactcacctatgattccaccatgtagaaataagcattgttaatattatgttgtatttccttgcagtctttgttctaaatgctcatagttgcacagaatgacaatatgtacatgtttttaatgttgtatttatatctaatacaccataagcattgtatcttattctttaaagctcttcataaacattactttaaaaagctgcatactgttctgtctaatgtccttaaatgatttttgttatatatgttgccttgaatgtactaaaatatttaagaattttgcaaatcagttgggtttgggaaaatcaaatttatagggaagacagtgatttatagttcttttgttatatgtagaggaccatctaatacatcacgctttggagatgctttttttgttccaaatcactattcaaaaccaccttcacaaaacataatagctttagaaatcaatgtttttgataaagtgcctttattttcaagtatccactttccctactgaatgcaacaatgcacagacatctttgttattatccaccttctgagatttatccaaaatgtgtcacctctctttgaatccctttagaaaccattctttgatgaacatactttatttggctctcctggacaacattttgataaatataaaatgactttaacacaagaatcaaagggaaaaaaatttcagaattaaagaacaatgacctgaaatccatggaagaggagcacgtgtaacaaatttacttgacatcttgctctgcaagttgcttttgctgtatttgaacttctctccggaataaaactgaaatcaggggctttgtgttctataccataccctggtacataaaacctttccaattacatttatgttctcctaggagggatggccccaaaggcacctcagactttgcatatcaaaaaccaaactcataatcataatcataccctgtactcctccccaacagggtccttctccagatc

SEQ ID NO: 202575 - DNA, 1000 bp, Homo Sapiens
gggtaaaaataaaagaagcacaatgaaaattaaggaaaataaacagtgatcaaggcttttcttttccacttgcccgtggagtcctgctgtgtgtccaacaataggggaagaacaggactgagatgtgggattccgtcagctctcgctgcatgcaaggacagaaagatgcctacaacaagccagagttacgggactggggtgacatgactctcacaatctccttctcccacgtgaaaggtgaggccatggctatataacgagaaagctgggaagacagtacaggcagaggaaaggagtgatccaggaatgaatgcagcttggtccctggctgtgagacacaggattgcactcagatgtacccttcaaggtatccatccattcagatctcttggggagtgggcttggacttgactggaggctctcccatgaaatcatagataacctgatttccccatggctacctcttctcttctcaagattttgtgctacactcaggattccagcatctgggttctaagctgagatttggcctggacttcccttggccaggctgaattgaccacagcttccaatgaagccaacaaggatgataacctctgccatatgccacgcactgtgctatgagcccagcatacaattcctagtcctcccaaaagctctctgatgcaggtagatttgccctaattttacaaatgagaaaggctcaaaatgaaagtatgacaccaaacacatgaatccatgtctgtgtccttaatgttgacaaagagaaaacctgacttactacccaacgtcattcttctagaaagtggcagaacatagaaccttattctggtctgactgacctggagcccacacattccatatttctccaggagggtgctctgatagatggtagaagttgggcttccagactcactgctagaaataagaccaccaaaagggaagaatcatggcatgagtaggaagtgaattgaatagctgacttcagacatagctgatc

SEQ ID NO: 202576 - DNA, 1000 bp, Homo Sapiens
aaggagatgtagctgatgctaatgcggaccctccgatgccccctgggccttaagtaagagctgcacttctcttcctggagaccctctggtggctgaagcatgcaccagggaggccaaaatgctggaaggtcagtacccctggagtacccctcatccggtgtccaacaggagttggtgtgtaaatgccccagctccctcgcctgacaggtggagtaaccctgaagtgggtatatctccagagatccctgcagaattgaactccagttgcccacaatggtaactggcttcatgatattcctttttactggcttccctcccttccctgtctcatccacctactcccctaccagtgtcttctgcatctcctaaataaactattttcacttggatccatgtccagggtctgcttctggggaactcaaattaagaccagtggataataccaagggttggtaaagataaggggaaatgatgggagaaagagtggggcagtggcgattctgcaaacacctgtcattcttggcaaagcaagtacttaacaaaattctaatgtaggacgataaggggacgtgtatgaggatgtccactgtggcactatttacactagtgggaaattgtgtgcaatctaggtgtccatgactaggagaatggataaataaaatgtgaaggatgtaaacagtgactacacgtacagccgctacctttggcaacatggctggatattaacaacagtgatgggggtggcgggagggaatgtacaaaagtgaataagtaacattaaacatacattcagaacattatctgtttttataaaaagcacatacagactaggtgcaatgactcacacctataatcccagtactttgggaggccaaggcaggaggttcagttgagccccggagttcaagactagcctgggcaatacagcaagaccccatctctatttttttttaagttgtctatgccataccacaccgaacacatctgatcttgtctgatc

SEQ ID NO: 202577 - DNA, 1000 bp, Homo Sapiens
aaggaaaagagcctagagaggacaaggacattttccatgatcctccatcaaattagttttggagtgggcacttcagagtgggcctcctcattcccaggccggcagacttccttccgctccatgcagcagcctcccaggtacaatgctctattcacagtattccccattcacagggatcctcagcctccatcacctgcacgtgggaaagggtctgaaaaaaaggaaagcttcttgctctttgttgttgggcctctggggaagaaagaacagggacaaacaggaacacctgcttgattggcccctccctatgcacacccagtagtttcagggagttgaaacaacctcataggagggcagactttggtggggagggcaagtcatagtaaacacaataccccgctcattcaagataaggctcagcaactgcacaagttaaccaagaggctcaacatttgccacaaatcctgtgccccaggcataggtcaagaccccacagcaacctctgagctatgagaaccgaatccatgggtttgcagatcccactggatgaaaatgggaaacaagaattatccagtgtagggtaagataagaagaatagaggttatgtcactaaggataaaatagctccagcctgagcaacatggcgagaccccatctctacaaaaaaaaaaacacacaaaacaaaacaaaaaaaaacttatctaggcatggtggcgcatgcctgtagtcccagctactctggaggctgatgtgggaggattgcttgagcccgggaggttaaggctgcagtgatccatgatagtgccactgcacagtagcctaaatgtcagagcaagaccccatctcaaagaataaaataaaatagctgtcaacagacacattccacatgacaacttaaggagtcaaaattcactgaatgaagtgtagccgagcccaacagcattgctggcaaccctgatgactgaaggcactccagagtttataatctatcattatgatc

SEQ ID NO: 202578 - DNA, 1000 bp, Homo Sapiens
cgcctgtaatcccagctactcaggagggaggagaattgcttgaacccaggaggcggaggtttcagtgagccaagatcacaccgctgcactccagcctgggtgacagagtgacaatcagtctcaaaaaaaaaaaaaaaaaaaaagtagatgaaggaatagggcaaagttactactttgttgccatttcataatctggatgatattcaaaagtaaaattggctccttacaaaatttcaactttttagggatatctcagcccctaccatgccataatatgccctcaagtcatgtaacaacaaaagtatccaagagtcctaggccctgatcattgccctatttggagcagcccctagttgtcaatgtctcaaagttcttcattttcaaagtatgtgaatgtaaatatgcttagcagaataaaaaacaaaaagaaaggaagcactcacctccatggtgattggcatgcatatttttcgtgaccttgtgaatgaacagcttgaaaaaaactccatctgaagatgaatgtgcagagaccctggctaaggagctgattcagttgtcaggccactgcagggagtaacgtgctgttgctacctttttgtcttagtcaattatcatctgttttacaggctctctatccagttatctcatctcccaccccagcattctagagtgtgactacacaatgagcctgtgctcaaagagcacagtctaagggagcatctgataggctctggtcatagatctctcccatctctcccagcagtttctttgcttttccttttctttcttctttttttttgagacagggtctcgtcattgtctcctaggctggagtccagtggtgtgatcatagctcactgtaatcttgaactcctgggctcaaatgatcctcctacctcagccccccaagtagcttggagcacacatgcttgccatcatacccagctaatttttaaattttttgcagagatggggtctccctatattgcccaagctgatc

SEQ ID NO: 202579 - DNA, 1000 bp, Homo Sapiens
gtgtgcaggggaaccttagagatgatccaccaggtccctttagttcacaggtaagaagactgacaccagcatggggaaggagtctgtctgaggtcagatggtgagttaaggtgtgtctaagacattccgtttcaggaccctgaccaatccccataccctgccatggtgctgtaccttgtgccacacagacacttgcctattgtcttgttcctgggtaaaaggccacacttgaatgatcacaaggatttatttggaacagttgcagagctggtttgcccacagtcactccaggggcaaccccagacactagtgagcatcttttctttgctccactgatgacagaaatggatggtatgagatttcccagagggcctgggcacactctactggatcttggtgcaccagaagcaagaacaatctcagatgaccttgggttaacagagaaattccttttattccttctgtgactatccaagcctaggatcttatgatactcccagacaaccagatgaacagatgagcttcccccgcctactcaagcccccatttcccatatgtgtcttcatgatccttatgtattttttattttaaggtgtgaaaaactaataatcctttactgtattaactcttagagtgcatgcatttcaaaaatgcaagaggtgggtagagggagaaagaggaagcaagagacagagaaaacatctttatgccaaaatatacatctgtattggtggaacttccgatactgagaaagctatgaaggtatcttggaatagagtatcttccagagttcctgaagccataccatgtggctgcctaaaagtaaagacttgtgacaatttatctccccaaccttttttgttgggggagttctaatcatgtatcctcttcaaattttacaatagtgcctatactctctggtcatggaaattatgaccccaaacatagtgatcttgattttgggcctcgctcaatcccttataacagcatatcttggatc

SEQ ID NO: 202580 - DNA, 1000 bp, Homo Sapiens
tcagctgatggacatgttgattgtttccactttttaactactatgaataatgctgctatcaacattagtatataagtttttgtgtatataagttttgatttttcttggttatatacctaggcatggaattgccaggtcatgtgataactttatgtttaactttttgaggagctgtcaaactgttttccaaagtagctgcactattgtacatttctaccagcaatatatcagagttccaatttcttaatatccttgacaatacttgttattttcctttttaaaaattatagccatcctagtgagtatctcatggttttgatttgcattttcctaatgactaattatgttgaatatcctttcatggggatttcctaatagtttattaaggatttttgcatctgatattggtctgtatttttcttttactgtctttttctggttttgatatcagggttatactggcctcataaaataacttagaaagtgtttcttcatattctattcttctacaatagattgtgtatatttgtgttatttcttcttgaaatagttgatagaattcacccataaacaatgtggatctggatatttatattttgtaaagtttttttaaccatgaatttaattttttagttgtaggactattcagttacctatttcattttgaatgagtttgggtagtttcttattttaagtaattggtctatttcatctacttttgtgagtttatgtgtgtagaattgttcagagtattcccttattatccttttaatgtctgtggggtccatagtaataacccctctttcatttcagacattgttaatatgttttctcttttcagttgtgctagaggcttattaattttattgatcttttaaaagattttctcttttgtttttctgctttctgtttcatttcatttattcctgcttttacatttattattattgtcctttggcttgctttgggcttattttgctctttctagttttattaaggt

SEQ ID NO: 202581 - DNA, 1000 bp, Homo Sapiens
tgggtgacagagcgagactccgtctcaaaaaataaaaacaaaaaaattatgtgttgtatttgcttttcagggcagcaatcttgtcctttacaagcacttgattcgacggttcatctccagagcctagagtaggtcccacacaggggagtctgttgatttgagtgaacgtcaattcctggggctcagtacaaatgctttaaaacaatttgctcaatactgggcacaataggcttaatgtggccttgctaagttcctggagtgacttctatgggctttagcctcctcctgctgccaccactgcctccatcgccctcctcgttgtcatgacgacatctcctcctcctcatctttaccttggaagagtggcttgcacttattgaggtgccatgtgccaggcactgttccaaacacactttacgtattaattaatttaacccctccaacaaccctatgaggcaggtacaaggataacccccattttacaggtgagaaacctgaggtgcagagagatcaagtaatttacacatctgaaaaaaggaaaacattcataagaaaaatgaaacctcagcctacttggcctctaaaatttcaagaagctaaaactatggagaaaccaacacttacaggtgatcaggaaccaatttaccaacaacagcagcaaaaaatagaccaaacacaaacagaaattccagagagggcaattcaatcacaattcatctcgtgttctgaggccccccaaacctccctgtgttttccatccacctggtccctcaagtcccagatctggacatcacccttgaccaccgcttccccatctcccatcccaagccctgtggcttcaccttctgagcgccttccactgccgactgcggcggcgtagctccattctgcacaggtgcttggctccagagccaccattatctgctatctgggctggaagggaacagcctcctcaccccgactctgctcccatcctccaccctcagctgctggaaggatc

SEQ ID NO: 202582 - DNA, 1000 bp, Homo Sapiens
ttggctagccagacaatattcttgcctagctctcactccagccaataatggtcattctaggttctctagccaaaaatctcttcacagaagatgtaatctgtgctaatgatataaaagctagaaacatgagccaccaacctcctggacagtcttagatgccaggatcttctcaatgatgtttgcatcatcttctggaggctcctggggacaaagataaaaaaaaaagaaaattgctggaaccacagaatccaagaaaacaattctgtaagaaatactacaatgggtactacttcattcaaaagttcacctttgagtaccaaggcctcccatcaggccacagagtggtcaaaaggtcacaagcattttgcaaagctagaatttaaagtggtggcttctaagctctggacacaactctacaagagcagagaagtttttcagatgcaatttcagatctgcatttaacatacctaaaattggtcctcagatttaccttctttgcaaaactacctacatgttgctgcatacaattttcagaaagctctaagagtatggggtcttaaaattagttctaatatctaccagctattgactttaggcaagtcaattaatacctcctagtctccaaatatattaaaataggagttaaaaatacatatctcactgaattagtgggaagataaaatagtattactattggaaaaatgttttcacatactattcaaaatcaaggtataattattctctattaaattgtaccatctttcccctttgtagctggaaaaggctgtttcactgatcatcctttgaacgtaaatcccaactgaaaacctaaattcctttttaccctagataaccatcaacacttctatcctccaatctccatgaaatctctttctacagagtatttatagttaaaaacacaaaatgtttaacattctttctagaacctcaagcagcattatttctcagtggttcatatgcacaatgaccttttcagatc

SEQ ID NO: 202583 - DNA, 1000 bp, Homo Sapiens
tatcagttatgtccccttcaagctgtagggggaggggaatttggcccaacctgggtacatgtccccttctccctctctgatttaaagcagatcaaggcagagctggggaagttttcagatgatcctgataggtatatagatgtcctacagggtctagggcaaaccttcgatctcacttggagagatgtcatgctattgttagatcaaaccctggcctttaatgaaaagaatgtggctttagctgcagcctgagagtttggagatacctggtatcttagtcaagtaaatgatagaatgacagctgaagaaagggacaaattccctaccggtcagcaagctgtcccctgtatggatccccactgggacctcaactcagatcatggggactggagttgtaaacatctgttgacctgtgttctagaaggattaaggagaattaggaaaaagcccatgaattattcaatgatgtccaccataactcagggaaactaagaaaatccttctgccttcctcaagcggctatgagaggccttaagaaaatatactcccctgtcgcctgactcactcgagggccaattgatcctaaaagataagtttattacccaatcagccacagatatcaagagaaaactccaaaagtgagccctgggccctgaacaaaatctggaggcattattaaacctggcaacctcagcgttctataatagagaccaagaggaacaggccaaaaaggaaaagcgagatcagagaaaggctgcagccttagtcatggccctcagacaaacaaaccttggtggttcagaaaggagagaaaatggagcaggtcaatcacccagtagggcttgttatcagtggtgtgcaaggacaccttaaaaaagattgtccaacaagaaacaagctgccccctcacccatgtccactatgccgaggcaatcactggaaggcacgctgccccagaggacaaaggttctctgggcgagaagcccccaaccagatgatc

SEQ ID NO: 202584 - DNA, 1000 bp, Homo Sapiens
cctgggctaggatgaagggtatccacctaacttaacttgaaaatatggattaagtgccaactgtagtggatgaaagcatgttgagaggaggctgaaagaggccaggtcactttagagcaaattaggtagtataatattcactagctgctataataaatatacacacaaaagaataatggctccaacaaaaagaagtttattgcttgcttatatagtacttcaaggaaagtattttcctttctttctttctttctttctttctttctttctttctttctttctttctttctttctttctttcttttctttctttctttctttctttcttttcttttctttctttctttctttctttctctctttctctccctcccttccttcctttctttctttcttttttttttttgagacagaatctcactctgtcacccaggctggagtgcagtggcgcgatcttggctcactgcaacctctgcctccccggctcaagcgattctcctgcctcagcctcctgagtagctgcgattacaggcacatgccaccacgcccagctaattttcgtacttttagtagagatggggtttcgccgtgttggccaggctggtctcaaactcctgacctcagatgatctgcccgccttggcctcctgaagtgcggggattacaggggtgagccaccatgcccagtctaaaggaaagtatttctggttgacaagtcacaatcctctacctagtgattcagggggattccttctacgccataactacatcatcccctagggttttgtcatcttctgcatccaactagcaagaagagattgtggttaggacacacccccttttaaaaagcctagaaatcacacatatcacttctgcttatgtgtcattggctagaactcagttacatggccacaccaaaccacaagagaagctgaataatgtagtttgtatgtacccaggaagaagaggaaatgaatttttgatgaagacatagcaagatc

SEQ ID NO: 202585 - DNA, 1000 bp, Homo Sapiens
aaatacagcaccatgtgcatagctcttagcaacaatttgactgctgatcaaatttagtccagttggtccagggctacttaaacttgatccccagacaactctggacccactgcaaagcatgctagataatgtcacaggagaagaaaacagattaggaaaaacatttgtattaaatctgaccaacaataactagttttgaatacaatgttttatacagataagttaaaataaacaaaaaaaaacagtatgactccaatccaaaaggacagtgacacaaacaggcaaagtatacaagcaatataacaggcagcgaaaaattcaaaccactagtcatcaaacaaaagtaaaattttagacctattaacctcgcaaaaaaaagcaactgaaattccaccaccaccatcagtagttgtagtaaaattaatccactcattcaccgctaaagatgatctaaattggtgcagcccttgtgcaaagcatcatgacgataaatgtcaaaattcatgagcatgatcatttctgtagaccagaaatctcactcctaagccccatatcaagaataaaattcaaccaaagaataacttcatgcttaaaaatgcttactgccgagttatgagcaagcaaccaaatgccaagctctgttatttgatataaaagaacttgatcaaataaatatacaaccatgaaatgtatatttaagtataaaatacaaattgtggtatgcacaccaactaaaatttctgaaaatacgtaagcacaggaaagggaacatacaataaagaaaaaagaagttatgatattccaacaaatgtttaattacttgatgctgatacagtatttttttaatttaaaatgagacaaatcctttgtgtcttttgaggtttccttttaagctacatgcctattattatctaaagaataacttcttaaaaataaaaataaaagaataatttaacaactatacacacagggacaagccataagctgcaccaactggatc

SEQ ID NO: 202586 - DNA, 1000 bp, Homo Sapiens
taaatttaagtaaaacatattttttaaaaataaagaaagaaaagtgttcaaaatatggtgacctgctttctgaaactgcccaactctgttctcctacagcacttttatctggattttctccttgcctccctctcccgcaaaataatcaatcccaaatctctcgacatccttgaaaagcccagaaaagggagccaagggaagggaaaggggaaatgattagaataatacaagacttttccaagcacacagatggaaaagtcattccgcttgggacaacaaatgaaaaacacccgcgccaagcacacccttgtgaacttcagagcaaactaacgagtgagccctacagatgtccagagagaaagagcagccccacatcacagcaacagggatcagaatggcaccatgcccacagcagcaaggctgaaagttcagagccaacccagggccttccatgtgctcagggtaaatgactttccacctacccaagagactatataacccacgctgaatacacacttcggcaaaataaggggtgaaccaagaaagtcaaagacacaggctcacgatctgggctccatccaagacgagaggctttggtgtaggagctcagccaggccagggatgggaggtgaccaaccccaacagactgctgtgtactgcccactgagcctttgagaaaaatagggataggcttttgacaaggctgatggagcatttggaaaaaataagaataaattcattaaaaagtaagccagggctgggagcagtggctcacgcctataatcccagtactttgggaggctcaggcaggtggatcacttgaggtcaggagttcaagaccagcctggccaacatggtgaaatcctgtctctacaaaaatacaaaaaatacaaacattagctgggcatggtggcaggcgcctaaaatcccagctactcaggaggctgaggcaagagaattgcttgagcctggggggcagagttttcagtaagctgagatc

SEQ ID NO: 202587 - DNA, 1000 bp, Homo Sapiens
cagactgctgcctcacaggtcgatctcagactgctgctgtagcagtgagcaaggctctgtgggtgtgggtcctgccaagccaggtgcgagatataatctctgggtgtgccatttgctaagactgtaggtaaagcacagtatttgtgtgagggtgtccggattttctaggttcagtctgacttggcttcccttggctgggaaagggaaatcccctgaccccttgcacttcccaggtaaggtgatgcaccaccctgctttggctcaccctccatgggctgcatccactgtccaaccagtcccagtaagatgaaccaggtacctcagttggaaatgcagaaattgccatcttctgcattgatcatgctgggagctgcagacgggagctgttcctattcggctgtcttggagcagaatcctggcttatgtttttttttcaatgggagcctccaatcaccataaaagattatgtaccttacatagttgtacttgttatactttttaatttttatttttcatttctttagtaggtacaagtgcagatttcttacatgcatatattgcatactgttgggtagactgggcttttagtgtacccgtcaccttaatagtgatcactgtacccaataggtaaattttcaaccatcacctctctcccaccctcctatcttttgtagtctccaatgcgtattatttcactctgtatgtccatatgtatcaattgtttagctctcatttacaagtgatggcatgcagtatttgactttctgtttctgagtttttcacttaagataatgggcttcaataccatcagtgttgctgcaaaagacatgattttatggctgagtagtattttctatatccagttctccgctgatggacatgtatgtttatttctttttttgcaattgtgaataggtctgtgataaacatgagtgcaggtatatttttgatatactgatttcttttcctttgggtatatacccagtaatggaattggatc

SEQ ID NO: 202588 - DNA, 1000 bp, Homo Sapiens
atagtagttgtggccccaaatccactttacctaatatccctttatgagaccttcaaaacaattaccactctaaaaagaggtaatgaaaactgatctgggtttcttgggcctgagaaggggcaggaagcagatgtgagagatagatccaaaaagacttaaagactacctggctattaagacataggaaagagaaaaaattatgttaattatgttggtgggtgcctagaatcttggaaatgccatattgcagagataaagaagacaaaaggaatagcttggagaattaaggcaattatattactgctattatccatcataaataatgtcaagcaggcatttccctcccaagaattatctactaaattctgggaggtttaccctctcccagtcacacatcaactctgatattttaaatccaaagacataatatttgatcacacaccctaaccttttgtcatgaagacatacactctaaattttaaaagccttcttccagaaatatttaaagctaaccattccattaaataagtcccggatatccagacagtatgactgggataatatggaattatttataaagatggcttgttctgagaaaattgttatgctgaagagagggaaatcccaccttctgtctttgttcatgaactgtgattaaaaccaatttatctgagatgtatcaaagagagataataagtaaagtggatttgggaccacccggttaggtgacaggtcttttggttgctttcatgtgggataccacctccagttacacagcagcacattctcatctcatagctgtggaattcttggatttgaaaccggctctgttcactttgtataactgaagcctcttattttgcgttgcctaattctcgtcctttatttgcatgcaaccttttatcattaaatgatgcttaagtggatcaggatagaatccactttgttctctaaatcaagaactctttttcatatgaccttgaaagtaggagattggatc

SEQ ID NO: 202589 - DNA, 1000 bp, Homo Sapiens
atgacataagcactttggtcttctccccagggttctgctatttcagggagacaagcagaggtcacaaagcatctctagaagtaaaatgccatccaggggttctgggccaccaacagagctgctaagtgctacttcctttgtcctgggcatccgatagcctaaggcaaggtacagatccctaggggctgaagacagagtgaatcaaatctgatccaaacgcctaggagcagcaagagctaagttgagaaaacctccagtaaatgccaaatctgagaccaagaggagaactgaaatcagggccacggctagagggaataagtgaaatggaacaacagggaggcagcgatggaatgggacagtctacagacacgggtcaggaagaaacagagtcaggcttctcagagtcaattctttatgcatcaccccttggagtccatcacccagaaagaaggctgtgcatcttcaagtcagggcaggaaaagaggagagtgggcagtcatccatctacctcctctcagctgcctgcccagaggtacaagctttgaatttcctctcctaaccatgagatctatcttgtcactaggattttctgttctttccacaatttattccaccttgtgaatgattggaacaaatctttaaaagggcatttttcaaagccatgatggtacagtagtcacactgtctggccctgacagctctgaacaagtcacaagcccccaaattacacggaacagctgtccatcaagtattgccatagtctactggctgcttgtgagatacagttaagtcatgcacacaggccacccaccaacaagcaattgtgattggaagtgcttcggctttcatcaccaacttcggcagcagagaatatggcatcacgccacaaatggcagcttccagaaacaaatcagatgtatcacgtagcacttcattctcctaccttcaatggccatgcatcctgcaaactggctccaaaagactccagggcagttagatc

SEQ ID NO: 202590 - DNA, 1000 bp, Homo Sapiens
tttttaatagagacagggtttcaccatgttggccaggctggtctcgaactcctgacctcaagtgatctacctgccttggcctcccaaagtgctgggattacaggcatgagccaccacgtccagcagattattcttaaagtataccatttggaggtgtggggtatatttactaggtgatacaataataagcactatctcattcctgaacgttttcccaaaagataccacatgtctattagcaaccattccccagcccccggctctggcaaccactcatctactttctgtctctggatttgcctgtgctggacatttcatgctaatggaatcataccatatatggccttctgtgtttggcttctttcacttgccataatggtttcaaggttcatctatgttgtagcatgtgccaagacctcattccttctgtggttgagtcatcttttggtatatggctggaccatacttcatttgtccatgcattagctggcgcacagttgggtgcttttcactttacggctgtcgtaaacaatgctgctatgaacgtttgcgtacaagtttttgtgtaacatatgttttcatttcttttgggtagatacctaggagtggaattattggcagatctttttaggagagctatggaaactcgttttaggaagtttctaacaattttccaaagtgactacaccattttgaactcaactcgttttaggacgtttcaaacagttttccaaagtgactacactattttgaactcccacccgcaactactataattttttttttttttttttgagatggagtcttgctgtgtctccaggctggagtgcagtggtgcagtctcggctcactgcaacctctgcctcccgggttcaagtgattctcctgcctcagcctcccaagtagctgggactataggcgcctgccaccacacccggctaattttttgtatttttattagagacggggtttcaccatgttggccaggatggtcgtgatc

SEQ ID NO: 202591 - DNA, 1000 bp, Homo Sapiens
ttttaattattttattttttatcattatttttagagacagggtcttactgtgttgcccagactggccttaaactcctgagtgcaagcgatcctcctgcctcagccttctgagtagctgggactgcaggcatacgccactgcacctggctccccttttttatttatagtaaactttattttcactgatactccatttaacgtaatttcaaagtagctctgtgccctaagatgagcaaaagaacagatatcctaaatatcataagagattttcttcacactgttcctctgagcacagcatgaggtttcagagcccccagtgttgccacttaacattttattccttgagattttacctataagatacagaaagaggccaggtgcagtggctcacgcctataatccctgcactttgggaggccgaggcgggtggatcacgaggtcaggagattgagaccatcctggccaacatggtgaaaccccatctctactaagaatacaaaaattagccaggcgtggtggcgtgcccctgtagtcccagctactcaggaggctaaggcaggagaatcacttaaacccgtgaaccggaggttgcagtgagctgagatcgcttcactgcactccagtctgggcgacagagcaaaactccgtctcaaaaaaatgatacagaaagaagatataatatcaatacacaagaatcaaactgtattagggtatctgtgggattgtaatggtaactgaatttttccctgctaagtttttttttttttttttttttttttttttttggagacaggatctggctctatcacccaggctggagtgcagtggtgcgatgtccgctcactgtgacccccgccttgcaagactcaagccatcctccctccttagccttctgagtagctgagactacaggcgcacaccaccgtgcctggctaatttttgtatttttgtagagacagggttccgccatgttgcccaggctagtctcaaactcatgatc

SEQ ID NO: 202592 - DNA, 1000 bp, Homo Sapiens
catgagaagtcactcactattatgagaacagcaagggagaaatctgcccgcatgataaaatcacctcccagcaggcccctcctccaacactggggattacaattcaacatgagatttgagggaggacacaaatccaaaccatatcacctatggtttgggttttggtagcacaacactggtacaacctactactcagggatcctcaaactttaatatgcatgctaatcaacttgaggttctattaaaatgcagattttaatagagtaggtctaggtgcactttgtaacaagtacactttgttactgactttaaaacgagctcccaggtcatgctaatgttactggtccgtggaccacactttgagtaggaagattctaactcaaaagcccaaactagtagcttaaacaccaaatcatgacagaagctgtttcccctggcttgtatcatattgattaacacagtaaagaattagctgctgacatgtacaaagtgtgaagtttcacataagcataagcacctgaagcgtctcttgaagtctgggaagatccggccagggcaagtctgcttccatacatggtccatacaaaagtccactggagcagagtagaggccactagctttcgagagcccatgatttatccttcaccataagtcccacctccactacactgacaccttgccaaccatccatctcacttctttatttgcctttctaaccttctgagacaaggactctcaacctaagctaaatattggaatcagaggagctttgagaaatactgatgttttggtctcagccccaaagatcttgatatggtcatttcaaggggtgggaaaagcctgggcattttaaaagctacccaagtgattctaatatgaagccaaggttgaagacttctgtttaaatcaatttagtgacactagcaagattctcacacaccatcctcagacattctgattctgaagctcaggatcaccacttcctaatatttgcaggatc

SEQ ID NO: 202593 - DNA, 1000 bp, Homo Sapiens
ctcaaaaacagaaaagaaaaaaaaaagaaaatatggacttatgaaggaaatagaaacaagatagtaagaaaaccaataactgagagacagagatatgaaggaagttatggttatgaagatatattttttaaaaggaaagttgaaaagaataattttgtatgggaaagagtctctggtaaatttatgttctaaagtaaaatgattggtatttaatgaagaggaagtataagacagggcacagagtcaaagcacatcatcaatggtctgaataagtcatgatggtgttcatgaagggagaacttatgaaaggcattttgtgtgtcatcaagttggctataattagaagggaattatttctacgtctttctaaagatagattaaaaatacactgatagaaaactaaaaaattcatatcccctatgttaaaacaactaggttttcttttttcttttcttttttttttttgagacggagtctcgctccgtcgcccaggctggagtgcagtggcacgatctcagctcactgcaagctccacctcccaggttcacgccattctcctgcttcagcctcccgagtagctgggactacaggtgcccaccaccacgcccggctaattttttctattttttagtagagaccgggtttcactgtgttagccaggatggtctcaatctcctgacctcgtgatccgcctgcctcggcctcccaaagtgctgggattacaggcgtgagcccctgcccctggcccaggttttcttcttctttttttttttttttttctctgagacagagtctcgctctgtcacccaggctggggtgcagtgtcgcgatctcggctcactgcaacctccgcctcccaggttcaagcaattctccgtgtctcagcctcccgagtagcttggactacaggcacactgccacgcccacctaatttttgttattgttgttgttgagacagagtcttgctgtgtcgcccaggctagagtgcagttgcgtgatc

SEQ ID NO: 202594 - DNA, 1000 bp, Homo Sapiens
ctcaagctctgaccccgtctgggcagggggtctcgtgtcccgacacatcggtgggaggtgttcctgcacctgcgccatcccctcactgtccccggagcacggcagctgtctgcactccggtccgaaggcagagacgccagggtagccccttcagagtgaggcctggggctcagggtggggagggtgggcggcccactctcctgccctctctcttagtgggaggggactcacgcgaggatgggcttccagccccaagctatggaaaggtaaattgggtcactggaggggccggagttctggctgggtggctgcagttcccatccccaccaactgggactgaggctgacctgctgtgagttgagactggctcactgaggtcccccagctgcacccaaggtgggtgctgctgttgtccccattttacagaagagggaaactgaggcccgggcagtggagggtcgccctggggcaggggtgagcagggtgctgggactttgatccaggtcagcctgtcttcagcctcagaacaagttggagaatgaaggccttggtcactgagtggggtgtcgctcggatcgttcattcctcgactcctcaccaaatgtttgtggaggggacagtcctagtgaccgtcctctcctggggaaacggaggcccagggctggtttgggactcaacctatcactatgtggccctggaaaagccctttcccgtctccggactccagtctccctacctagaaaagagtggggagaggtctccaagggtgctcccgcacccaacggactgcagtgttggtttcagggttggtgctctcgtaggggccggagcagcggctgcccctcccaacttcctgtttaccgtagctgcagagcctgtcccttcacttaaagccagtgtgatcaccatggcaaccggcctgtgtttgttccaacaggtgggcagaacctggtgcaagaccgcagaggcaggggcgtcactcccagacccggtctccaga

SEQ ID NO: 202595 - DNA, 1000 bp, Homo Sapiens
ggagctcaggggcctcttctgtggaggcgaaaccgtgtctgtgagtgctttagagtgcagtcctgagtccgcattgttctggtcctgggggaggacagccatgtcccctcaagctgtagtcaaggctggatcctgacagattctgggagccccatggccctgtgctgccaccgggtagcctcaagctcgggctctgaccttgatcccgtgccctgaaacaggccaaggagctccctgaaatggacgccacctccagccgggtgtggatcctgaccagcaccctgaccaccagcaaggtggtgatcatcgacgccaaccagccgggcacggtggtggaccagttcaccgtctgcaacgcgcacgtgctgtgcatctccagcatccccggtgagcagctggagtgggcgtttccactcgggcgccactcccttttactagcaagctaagtaaaagccctgccacacagcagctgccttctcggggtgtcctgtggacacgggaatgtggcagtggacggtgggaggggcagcacccagtcaagtgaggccctgggccctgtttctgggaggaagctcgcggcagcctcggcctcttctccctacctactcaggaccccacgcttacctggttagagggtgacgggtgggcacggcctgcagcttgaagcatcactcggagaccacaggaaaacatttcctcatgctgaatgtgaaacctccagttgggccgaaggggctatgggggtgtgggtgaggagcttcgtgtcacccctgtgggcagtagccttggtgatgttctgggccagccccaacactgggaggacgaaggggtgccgagggctctgccaggtctctggtgtgaaaccacagggccgtctggggtcctgagggtctgccacaggatcacaggttgtttgctcccagaaccagagtcttactactcagctccccttggcccaggggcctacccaacagagcaggcttgctggagtcccagacct

SEQ ID NO: 202596 - DNA, 1000 bp, Homo Sapiens
tgtctcagaatgctcgtggggcacacatgggctgctgttctgcagagaagctgcagatcctttgatcagcacgccctctcagaagcagagaatgactgtttcaggtccaaaagggaccttggagacacggggaccaagtcgcagagaaggaaataacttgttcaaaagaacctactggggtgtgtgtactgatgacgatcccattctctcagtaatttaaaaacacgtccatgcatgagtcacacacggacgggtgtccagaagccagaaccctactgaaaggagccaccagcctgcccacagtggctgcctccaggctgggattatggagatttgtactatttgggtctttacttcattctttgtagttcctaagatccctacagtgaatatagaaatgcataattttaagaaggcagctagaattttagaaagacagaaaagctaaaaaggtgttcagcattcggggaaaaggcaagggggaagggtgcagagtcctgagtcctgcccgagagctccttcacccggagacagcactcattagcacgagttctctctatcctgagagcaaaaccacttccaattctccccagacagaccgcagtgtttgctggaatttcaggcgacaagtgagactggatggctgatgctgtctacggagagggaagcccggcagagccacgagggctaactcacatttcagctccctgggacgcttgcaagagcccagccaggcaaggggagagatcagaagacacctgtgcggatgtcgtggcttcgtacctttcttgtgaagtagtaataaggcacttccatccccaggagactgtgggaggtggcaggccgggggaagctctcatgaagcaggaagccgtgctcttcggaaatgaagaaggacaggatcaaaacatctgcctgggagagaaagaaaagtactgttctgtttttttttttaacttacataaatttctggggtatgagtgccattttgctacacaca

SEQ ID NO: 202597 - DNA, 1000 bp, Homo Sapiens
agacaggaggattgcttgaggctaggggttcaagactagcctgggcaacatggtgagtccccatctctacaacaaatttaaaaattagcccggcgtggtggtggacacctgtggtcccagctacttgggaggctgaggagggaggatcgcttaaagcccaaaaggccaaggctgcagtgagtcgtgattgtgccaccacacttcagcatgggcaacagagcaagaccctgtctcaaaaaaaaaaaaaaaaaaaaaaaaaaaaaggaggcgaggaaggaagggagggagggagaggaaagaaagacagggagggagggagggagaaaggaaggaaggcaggcagccagccaggcagctgggtacagtggctcacgcctgtgatcccagaactttggaaggccaaggcgggtggatcacgagctcaagagttcaagaccagcctggctggtctactaaaaatacaaaatttagccgggcatgatagcaggcgcttataatcccagctactcgggaggctgaggcagggaattacttgaacccgggaggcgggggttgcagtgaaccgagatcgcgccactgtactccaggctgggtgacaagggcaaaactccatctcaaaaaaaaaaaagaaactggaaaaagttttaagaaaatgccttactcttacggacacctaggaggtgagagggaatacctaagagaaagcacagagccattgctcacggatgcccaaggaggggacgcacgagcccccgggggtcgggtgacaaacacggttctcaaactcatccgagacaatcagtgagcagagccacgtgattacacccagcacatgggcaccgctctgcctcacgctccaatgccctggacccaccgagaccagaggataggaggcagccagatcctggagtgcaagaagctgcccttccctcaggaagctctcacctgaacccaaggagggtccaccagacccccttaacacattctcgagactgcgagc

SEQ ID NO: 202598 - DNA, 1000 bp, Homo Sapiens
tcccatgatacctggctaatttttgtgtttttagtagagacggcgttttgccatgttggccaggctggtctcatgaactcctgggctcaaaagaaaaagaaaaagatgcccactattttaagctacctttagaaagtagaaatatagtagttacagaataggaatctggtatcttttaccatgtcaaacaaacctttacaggcccaatttcggcctttaaaaaaatccaaatatatttaaacggtcacttacaatttatggattctttgaaataactgtcaatttcatcatccagaacattcgtttctttattttctcgtataaaattcagcagaatgttagcttctggtatatcttaaattgaaaatgcataataagtaaaaagcaaactgattatcatttaaatcacatttaaatcatccaaaatcattttaatagtaaaaagtgaagacatgtaagaatacaatcaaatagaatattacgtggccattaacaatgtgatgtagaattctgtaaacatagagagatgtacaccacattacatctaaaacagatgttagtgaaaagagcagcttactaacctatgtggttcaatacccttttaattaaaaaatctacatatataagggaccgggcgcagtggctcacgcctgtaatcccagcactttgggaggctgaagcaggtgaatcacaaggtcaggagatggagaccatcctggctaacatggtgacaccccacctctactaaaaatacaaaaaaattaaccaggcgtggtggtgggcgcctgtagtcccagctagttgggaggctgaggcaggagactggcatgaacctgggaggtggagcttgcagtaaactgagatagcgccactgcactccagcctgggcaacagagcaagactctgtctaaaaaaaaaaatacatatataaatgcaaaattatctggaagaatatatacgaaaaaatgattctctctagacagtgggattgtaggtgatc

SEQ ID NO: 202599 - DNA, 1000 bp, Homo Sapiens
aggaaaactcctttttgaagcactcctgaaaggaattcttttggaaaatatagaattattttataatatgaatagtcaattcctgaaatatatataccgtgagttaatattttcattatatttcaattaagtgcttttaaaaagatcatgcttggccaggtgcagtagttcatacctgtaatcccaacattttgggagctgaggcaggaggatcacttaaggccaggagtttgagaccagcctgggcaatacagtgagaccccatctccacaaataataataataataaagatcatgcttgtacatacttactatctggagctaatggttattgttttgctacagtgtcactaaacaaaaatcaacatacaaaggtgaaagggtggcacatgtctgctgattacatttaagggcccccaaagtctctctttttgtccttgcaagtggtaggattgtttcactgcgatataaataaaacgccttagtaattacatcctgagaacaccatggctcagtactattcatgccaacttaactgaactgaaacatggcactggtgtcagtggcttttacttattgatggatttgtaaggtggcaggctctttcatgtccaaaagcggtagtttcccagggtctcaagaagatttaaaaatattttccttccatcacaacacaaagcctactgactttaagtaatgctgctgagggttaacatttgaaactgacaagcagcacatgtgtattacagagataaggcctggcacatgttgctgcagcctcctgagattttgaaatgctagcagctccagctggtggctatgctccattcctaatgtgcactttttagggaaacttgagcccctccttctgactgtgatagggacatgtctgattggaatagggttatttttaaagatattcagaacaacgaacatatttattctaagaataaaaagagagtggaaagaaataaaagaggtaaaatgttaagctgagatc

SEQ ID NO: 202600 - DNA, 1000 bp, Homo Sapiens
cgggtcctccttggcaggatccactcagttactcattcactccacagtttaaagacctcaatctttccccagcgttgaaccagttgtttccaactccttagcctggcacagtgccaggctcccaccctgacctattagcatttcccaccaacccacctggggggcctcttacgtgggctgcagagacaccagatgccaccgtttctagacacccctgagagccccgcctttgcccatgctggccgaccctctggaatgccctgccctagtccagctgccgtctgccaaatacagcatagtggttaggagtgagggctccagggccagactccctgggcctgaatcctggctctggcacttaggattcttgtggcttcacctctcagcctcagttttctcatctgaagcagggagactggtggaacctccctcctgtggctgcagtgagggaggaatgtgatcacacttgcaagtgcttggaacacagcctggcacccggtggatctgcactagctcgtgggcacagcagcatgtgcctgattccctcacccaaagtccagctccttcatcttcctgaccactcacagtgcactgggcactgtgctgggcactaggggggcggcagggctcaaggcagaccctgcctacctggacttcacatctaatgtgaggctggagagcggacacaaaatgacaagttctgacatctacacaacactcaccacagttccctgtgcacagtaggtcctcaggttggaattcagaggacatttactgagtgtacccaaactggggccaggaattctcacattcgttatgtcatccccccatgatcctttgagataagtgtacaaagctcatatcctttgaggaagctgaggcccagagaggttaagtgactagcccaaggtccgacagccagtcagtggcaaagctaggagccaaatccaggtctgcctaatatcaaaacccaaaatctcagctatgggccatgaggatc

SEQ ID NO: 202601 - DNA, 1000 bp, Homo Sapiens
gggaccagcacatagttgatgctccataaattatcaaactctacagaaaggctcttgtaggaaatgaggccttgtttaataagcacctcttctctgcatacactatctcatggggcactcacatgaccactattttaacagatgaagatcctgagggtcagaggggtgaattgatttgctcctggtcacacagcctgtaagtggcaatgaaggatgtgaacccaactctgtctgattttaaagttcctgctctccaccatggctttgtacatcatcactgtagttctttcatgtggagggaagaacttgaggactccagctacagctgcctatgagtgggggatcagggggcctggggcatgggaaaagtcactcagggtccctgggcctcagacttctccttttttttatttgtttgtttgtttgtttgtttgttttttgagacagagtcttgctctgtcacccaggctgcagtgcgagatcatggctcactgcagcctcaaccttttgagctcaagtgatcctcccacctcagcctcccaagtagctaggactacaggtgcacaccactacacccggctaattttttgtacttttttgttgagacgggtttttgccacattgcccaggctggtatccaactcctaggctcaaactatccagccaccttggcctcccaaagtgctgggattataggtgtgagccaccacacctcaccagtctcctcctttgtaaaatgaaggggttggatcagcaattgtcagctctaggggtccatttgcatcacctggggagctcttaaaaggtactgatgcctgcatcccacctcaggtcaattaaaccaaaataactgaaggcaggtccccccaggtgatttggatgctggagagggctaagaacactaaactcgcccctcagtgaggcccattgcaggaagcccctcgacctggcatgatggaaagaccagggctgtggagccaagtgggcatgggttctgatc

SEQ ID NO: 202602 - DNA, 1000 bp, Homo Sapiens
tgtcaacacttgttagtctattcatgtacataaggggttctagatcctagaaaggaattgcctggagagcttcaaaatgccgatgcccaagtcctaccccaaaatattccgattttatgggtctggggtggggcctgggcatggggatttttgaaagcttcttgggtggttccaacacacagcccactggataacctctaattgagctgttgagctgagtgtcacacacacctgtatttagtgtactgtcctaggtgtgtgtacactgtgatatccattagcgtttttcactctgagtggctgtcagttactatgggttctcccccacaccagagacctggtatgaacatatttattcaaacatttcttaagcaccttccaggcaccgtcgaaggcacttggggagtcaacagtgagcaggacagtcaggggccctgcctttgagtgtctaatctgatggaattgacaaatttagtcatgcgtttttccctgtgagtagcaggggttcgagcccctcgagggttgctgagagggggaaagaggggtggacatctgaccctcacaccttaggacggggagagactttctggtgtggctgtgtatgctgggtcttctggccctgtgtggatgagattgagagagggaggcccagggcatgtttctgggcttgaatgagtgtggctggctgtgtggcatgtgtgtaaaggtgtgcatgatttgggcctgtgaaaatgtggacggtggtggtggggagaggaggttttgaatggaggggggctgtgtacaaggtaggcactagcccagtgcgtcacacagatgcgcacatgcatgtacacgtgtccacacacacacagccagctgtgaggaggaggctggcttccagtcccagggccaggagaactctgctttgggtatgtgggggaggcacagctggggctggaaactctagagtgggagggagggagagaggaagggaggctgaggagccgcatccttgatc

SEQ ID NO: 202603 - DNA, 1000 bp, Homo Sapiens
gggacccggtgggaggtaattgaatcaggggggtgggttttccccatgctgtttccatgatagtgaataagtctcatgagagctgatggttttataaagggcagttcccctgcacgcgttctcttgcctgccaccatgtacgacgtgcctttacttctcctttgccctccaccatgattgttatttgttgctgcaaaacggcctctccaaacacggtggccaaaagcagcaataactgatcatttctcacgattctatgagttggcaagaccatttgcctctcctgcctgggcttagtcatgcagttgtagtcagagctggaacacccaggaggtccaagttgacctcattcgtgtatctggccatcggtgctggttgtcggccaatgcagactcctccctgctctccaaatctacttttcccagggaagcctttgaaaagttgccatcctctctgctgtcatcattttgcttctttccttgtcatctttccctctctggcagcaaaccgtctatctgccaggctcgttacctagagagatgtagtcttattaatagaaccaattcttcattcagagggcatgtctctgcctccagttagcataaatgctatgttaacttaagatcgttagtacaggcaagactttaattcccctgccaaacaaattgaattaattaccatgaaccatttggctgtggtaaccggaagtgaggtcgactctcagctgtccccagaatgtgaggctggaaactggaaagagggaagagggaggcaggtggcttcttggtgacagggctggtttgtgtgacactgggaagttcctgcactacagccttttgggggatggttcccaaagcagcttccttccagcatctttcctgctcgctgctcccacccctggatcctcatggcccatagctgagattttgggttttgatattaggcagacctggatttggctcctagctttgccactgactggctgtcggaccttgggcta

SEQ ID NO: 202604 - DNA, 1000 bp, Homo Sapiens
gtttaaagatgaagacaggccaggcgaggttgtttggattacgtctgtaatcacggcactctgggaggctgaggcgggcagatcacttgaggtcgggagtttgagaccagcctggccaacatggcaaaaccccgtatctactaaaaatataaaaagtagctgggcgtggtggtgtgcacctgtgatcccagctactcgggaggctgaggcaggagaatcacttgaacccaggaggcggaattttcagtgaaccgagattgtgccactgcactccgggctgggcaacagaatgagactctgtctcaaaaacaaacaaacaaaaaaagatgaagacaacaaaatcccataaacctagagttcatctctgttaatactgttattctttcatgcatgcactgaaagatgtctggaaaaatgaacatatgtatatatacatgtataaatatatttgtagagtttgtgtgcatgtgtgtacatgtgtggaatcatagtgtacatactgcttgtatcttactgggttcactttcaatacattgcaagtgtagttaagaaatcgaccacataataccaggacacctaaatataagatgcaaagtcaggagatttttttttccccacctgaaacttaaaagtaccgagccatccatcaatagtcaaaaatccccaaagctttaaaaaatttaacattcagttaaatatctaagtcagcgcttgtttagtcagcagagtaatccctagtcatgactgaaaaagtatacatttgcctttaattgccacataattatctctatacacctgagataaaaatgtaaattcaacattaggtatgaaaacatgcatttgttttccaagtggtcttatccagcaaatgaatctgcaaaattaggaagaataagaatggatcaggagtgaggaacaataaaaccaggtatctcaacatctgtgaaaatcacagcacataccctgggtgaggaggggcggggagtgtaattacacaaaa

SEQ ID NO: 202605 - DNA, 1000 bp, Homo Sapiens
gagctttaaggagcccccacaacacagtcagcctatagggaagaggaggaaacagagggaaggaagatgggcagggagctggtggtgtctgctgattgggggtaaaggaagtggtctctaaaaggccaaattacccccagagaaacaagaaaggaacaaagggaggactcaagactctgcctgtgtggggcacgaggaatgaggcttgagagagctgtgatctcacctgcgattttgtattctccactctgcctctgaaccccacggcccccggcctggcccaccattcaggctccccagccttgactcccacacggcaccagcggtggcagagcagtgggacacttgctgtgggcagtctgggcagcctctgttcaggaagcctcctgctaccactgcagccagccaagtgggcaagccatttctcctgttcctccggaagtggctaaggtgatgtgtgctggggagggagtggggaggggaaccccttcttggactcagtgcatgccctgggttcaaagctgaggggcactgctgcaaaatgctgtgcaaatataaaatcctttcatagttattgtcatcgtcatcactgggcacattgtgccacctcccagagcaggcactgccctgcaggtgatgtggccttgctatcttatggaagagctcctctaccaactagctgtgtgacctcaggcaagtaagttaatctctctgagcctctgactcctctatgagatggggagagtgtggcctattttctgagccagttctgaggattaaatgaaataaacatttataaccagtgttaggaacataggagatgataataaattccagctcccttgtgggaaaaactagcatgaatttttaacaaaatatcagaatcttcaaggttggtgggaaagcagggtagggagggggagggaggctatttttagggtctagataccaccaccctgagaagagccctgattttcttcactggacactgtggttgatc

SEQ ID NO: 202606 - DNA, 1000 bp, Homo Sapiens
cctctttaatttcattgagcagtggtttgtagttctccttgaagaggtccttcacgtcccttgtaagttggattcctaggtattttattctctttgaagcaattgtgaatgggagttcactcatgatttggctctctgtttgtgtgttattcgtgtataagaatgcttgtgatttttgcacattgattttgtatcctgagactttgctgaagtttcttatcagcttaaggagattttgggctgagacagtggggttttctggatatacaatcatgtcatctgcaaacagggacaatttgacttcctcttttcctacttgaataccctttatttccttctcctgcctaattgccctggccagaacttccaacactatgttgaataggagtggtgagagtgggcatccctgtcttgtgctagttttcaaagggaatgcttccagtttttgcccattcagtatgatgttggctgtgggtttgtcatagatagctcttattattttgagatatgtcccatcaatacctaatttattgagagtttttagcatgaagtgttattgaattttgtcaaaggccttttctgcatctattgagataatcatgtggtttttgtctttggttctgtttatatgctggattacatttattgatttgcgtatattgagccagccttgcatcccagggatgaagcccacttgatcatggtggataagctttttgatgtgctgctggattcggtttgccagtattttattgaggatttttgcatcaatattcatcaaggatattggtctaaaattctcttttttggtggtgtctctgcccggctttggtatcaggataatgctggcctcataaaatgagttagggaggattctctctttttctattgattggaatagtttcagaaggaatggtaccagttcctcttgtacctctggtagaattcggctgtgaatccatctggtcctggactctttttggttggtaagctattgatc

SEQ ID NO: 202607 - DNA, 1000 bp, Homo Sapiens
ttgttgtctggtacatggacctgggtgtatcagggaaggtggatggtggcccagagcatgagagccccatgagggaggtggtcggggtgtctatgaaaggtgagcttgcagggagttgtttatcatctcaaggaattaactaactggcggtgtggtggggaggagtggggaggagcagtctctccagggtcagcctagaccctggatgtggaagcaccaaagtatagaaaataaaggcacggttcatacggcatgcagctggctcacggatggtgtgcctgagtgtgcaaaacgatctcgtgtcaagtgaggtggctcaggctgctgtccttgtcgctgcaagccctgcttggagaatgaaagctcacttgttgtcagggtcctccatgcatcccagcacccctgggtgggaccaagggcatgctccaccttctatcacgaggaacaattagtattaacaagacggcgccgcggaatgcacttcctaaattgtggacagtgttagcaaattcctaaaagcacccaacacctcttcaaggaggaaggtgaagccttgttgtttagagttcactttttctttgtaacatattctatttccgagatctttcttatacattttatttagccaaggctgtttgccaaggagtttgcatccaccccactgctatttgaggccatgcttgctgtgagtttctccgattcctctccctgcttcacccactccttctgaaaaacacagctaattgatggtcaatttggccacagaagcctagtattggaattgttggaatacaggaggatttgtggactagatttttttttcttcttcaagaatgacaagctaaccccaaattatggcaagaattcttcaggttcaataattaaaagcaaaaggcagtccccacggagaaaaaacagtgtggtctggaagatatctttcaaattgaagcagactgtgtaactcccaaatattatggatacaaattagctatatttgatc

SEQ ID NO: 202608 - DNA, 1000 bp, Homo Sapiens
agaggatgaatggaaacctgatttatccaaaaattacccttaaagcaacattttggttaacatgaacttgactacagtttacctccttttattgtgcttcactttactgtactactcagatactgcactttttacaaattgaaggtttgtgacaaccctgcatcaagcaagcctatcagtgccattcttctaaaagcatgtgctcactccatgtctctgtgtcacattttggtaattcttgcattatctcaaacttattcattatcattacatctgtcatggtgatctgtgatgagtgttctttgatgatactattgtaactgttccggggcaccacaaaccatgctcatatgagacagggaacttaattgataaatgtgtgtgtgactgttccaccaaccagcattctctctccctctcctcaagcctccctattccctgagatgcgacaatattgaaagtaggccaattcataatcctacaacggcctctaagtgctcaagtgaaagcaagagtttcaagtctctcactgtaaatcaaaagctagaaataattaagcttagtaaggaagccatgtctaatgacctgacagtctaaagccaggccttcttgtggcaaacaattggccaagctgtgaatgcaaaggaaaaattattgatggaaattaaaattgctactctagtgaacacacgaatgataacaaactaaaacagctttattgctgatatggagaaagtgtgagtgatctagattgaagataaaccagccacaacattcccttaagccaaaacctaacccagtgtaaagccctaactctcttcaatgctatgaaggcttagagaagtgaggaagctgcagaagaaaaggctgtagttagaggatggttcataaggtttacggaaagaagctatttccagaacataaaaatgcaaggtgatgcaatgagtacttatgcagaagctgcagcaagttatccagaagatctagctattataagatc

SEQ ID NO: 202609 - DNA, 1000 bp, Homo Sapiens
ttgttggcgttttcctgccacaacaactaaatattgaagacacatatttgtgatgaggagcgcacttccaaccatcttttcctgttgctctttcaggctgcgtgctcagcccctcccccagcgccacatcactgcatgccgcaggggaaggctcccagcactcacacgatgaagtacatccatttgatttaatagacaggggataggagaaatcacataaaacaagcctcctccaaatacatatttcttgtaacagccatgaattttccggtaacaaataagaaagcaaatgaacagctattgaaatattcccattttcaccatccctttagacaagctggaaagtttactttttatcctcctagtaccttataagccagtttgccaaactttgagactatttgatcagagttcagaaaagaacaggaacatccaacaaaggtttagtattttttttaatgccatcagatatgaaaatagcagctggagaaagcactgcacatttgttctgaaggatgccaacgtcactcagcaggttcagtgatatctcccttccaggatgatatgacttgcagttcatttgtcatcttatgcacaattttttattattctactcagttgtcaatgtttgcattattacagtcttaaagattcattttaatgtgaaagggccattgggaagttggaccaaagcaatatggaaatttaaaacatggaaaatagaagaaagaatgtaagcacataaaagaattatgtttgcttagtaccataacaagatttctatgaattttccataagcacttcacaagaaactggcaaaacggaataaagcaaacccgtccactgccatcattataaccgtcacccaatgacccagaacacatacacacaaaaagacccagtaatttttttttagatatggtttgtagagtcccatattttgaatgaaaatttcccctagaatcatgaccctcaaaaacggagggagatcgcagggatc

SEQ ID NO: 202610 - DNA, 1000 bp, Homo Sapiens
cccctgccatatctgcatgaggacaggacaaagccaacatgctgaggtcagaatgcataagaacactcctgcagctgaatccaggccaagacgatcaaattgtggccctcttgtgcttttcttaggaggactcaagtggagaaaaggtcacaaagtcatccttgaaaaacaagtacagcaagcctgagccctagagcaaggcaggagagctgtgtcttcctctttgtttccttttaatgaaaagcaacataactttatttttattttttaagttggggacaggactacccataatatcactattgctaacattttcataatatagttaccatgttagattaaaaagtcactgatcagcaaccaaagagaaagaaattcatgaagctgttactatcatttccttgtaacacttatcatcaaaggcacaattaaccccaatccacaccatccggaaatactcactagatcctctgggagggaacaatgatctgaggtctcaggctacaaaagaaaaccaagtgttaaattagggttgcttataaaatatagtctcaggtatccatttatcttcaataagatatctcttttcacctatcaggctggcaaagaaaagcatttttatgaaacaatgtataaatcagagtgtctggaggcctggctctgtggctcacgcctataatcccagcacttcgggaggttgagcagcagtttgggaggtcaaggtgggtggatcacctaaggtcaggagtttgagaccagcctggccaaaatagtgaaaaactgtctctactaaaaatataaaaattagccaggcatagtggcaggtgcctgtaatctcagctactggagaggctgaggcaggagaatcactgggacccggaaagtggaggttgcagtgagccgagactgcgctactgcgctccagcctgggtaacagagcgagactccatctcaaaaaaaaaaaaaaagtgagagtgtggggagacaggcacatgagatc

SEQ ID NO: 202611 - DNA, 1000 bp, Homo Sapiens
gagactcagtctcaaaaacaacaacaacaaaaaaattctccctgagccctctctcccctcatcagcacagatgttaaaaattttttgtgaattcttccagagatattttatacattttctagcaaatttatatttatatttttcccaccccattcgctttcccacaagaggtgagtactgtatataccattctgcactttctttcttcacttaacaaaaggtgctggtatataacagtacatgaagagcttctttactaatgcaaagtatttcattttatgaccagaccatagtttatttaattggttttctgctgacacacatttggttgtttctagtttttctttcttttttccatcttttctttttctttattttgtagacagggtctcactctgtcacccaggctggagtgcagtggcacaatctgggcacactgcagccttgacctcccaggctcaagtgagtctcttacctcagcctcccgagtagctggcattacaggtggtgccactatgcttggctaattcttttattttttgtggagatgaggtctcgctgtgttttccaggcctgcctcgaactcctggactcaagtgatcctcccgcctgggcctctgagagtattgggatgacaggtgtgagccaccatgcctggcccagactttttccatatgtgacaatctcttaggtaaaaaatggcatctcactgttttaatttgcatttttctttttgtgagtaaatttgagcatctttttcttcttttcttttttttttttttgaaacaaagtctcactctatcacccaggctggagtgcagtgtgatctcagctttctgcaacctctgcttcctgggctcaagtgatcctcttgcctcagccttctgagtagctgggactacaggtgcatatcactatgccacactaattatttttttttaagggataggttctccctatgttgtccaggctggtcttgaaatgctaggctcaagtgatc

SEQ ID NO: 202612 - DNA, 1000 bp, Homo Sapiens
cacacctgtaatcccagcactttgggaggccgaggtgggcggatcacatgaggcaggaattcaggaccagcctaaccccataagtactaaaaatacaaaaattagctgcgtgtggtagcgcatgcttgtaatcccagctactcgggaggctgagacactagaattgcttgaacccaagcgaggcggaggtggaatgtgccgagatcgcgccactgcactgcagcctgggcaacagagcaagaccctatctcaaaaaaaataactaattaaacatcacctcctccctccacacgtctttagcctgtttcagtgatagcacttagcaccatctgatagtttcacttactttgcgtgtgaaagcacacccaacagacgccatgcatacagaaaatactgttttgttcactgtcattcactcctatacttctcagagccatgaacagtacctggcatacgttatgtgctcaatttttgttgttaaatttatatcctcatacaaaccagtgccttagctctgataacatcgttcttttcatattaatgtacaagtgcatatctttaaaaaagatgaaaccctaactccattgattttctcgatttcaaagttataaccctacaatttgcttgctgaccacaaagaggaaaaatctgattttacaatggaactatcatcctaaagcagcaattgtcctattatcttcaacgtagataaaccagacatatgtctctgtataaactgacaagcatattaacctgatttcaactaagtatataaaagtcacttctgctcaggacagagtatagaagccaagtaaaatgatgccgtaagaaaagccaatccaggccgggcgcggtggctcacgcctgtaatcccaacactttgggaagccgaggcgggcggatcacgagctcaagagatggagaccattctggccaacatggtgaaaccccacctatacttaaaaataccaaaattagctgggcgtggtggcgcgagcct

SEQ ID NO: 202613 - DNA, 1000 bp, Homo Sapiens
aggtgtattatataagagaaggaaatctgggggaagaattttttttttttttttttgagatggagtctcactctgttgcccaggctggcatgcagtggcacggtcttggctcactgcaacctccgcctccagggttcaagcaattcttctgcctaagcctcctgagtagctgggattataggtgtgcaccaccacgcctggctaatttttttttttttttttgtatttttagtagagacagggtttcaccatgttggtcaggctagtctcgagttcccaacctcaggtcatctgcccgtctcagcctcccaaagtgctgggattacaggcgtgagccaccgtgcctggccgtaaggtattatttttaaaggttagctcacctaagacttccgcagctgagggcagtaacaagataggcatgatgcacagagccatgtggggattccagacccctcctgttgcatagtttcccagttgaatttgactcttctccatttatctcatttttttctggataggtctacctgcaagtcggatttcccaggttattgttggagatgagcggcagcaatacctcttggtgattgggcaggttgtagtgatgtccagttagctcagcgtttggctcaggcgaatgaaattgtcctatcctggaactgctggatgctttgcaagcagtatatgtttgaagtggcaatcatgagggaggatgaagctgtgaaggtaggaggctagcttcctgtactgccattctgaaaaggccttcctagtacacagcgcaatgctctggtagtgttcacatattgcctggccaaaccaatgaccattggaactcaatttaggagggaggctgggaatattctcctatgaagatagatgaggtagaacagtgaggctgaggagataaaaggcaaacaagggcaatagaatcctcagcctttcttgtgtgggggcacagaattaaacagtttcctttctgtagttaagagatatgtggatc

SEQ ID NO: 202614 - DNA, 1000 bp, Homo Sapiens
attttcccaacatgttttcacacaaaaatttttggctctttcatcttatattcttcatcagtcatccacttgttattgcacaaatgctttagggtgtcttaattcattccatccactttgttagggacaacagtacccttcattttataatacaatgaaaggaacattgtatggactctgccttcagggttggagaagacactacagaaaaagcaacattttcacctagtaatggaagaagggcagaaatttggcaggttagaaggagagaaagtaagtatttcagtaacattatttttgaaaataaaaaccatctccaaaattgttcagactaataacgtcatgattatttatttggagtaatattagccccaacaaaagcatggcctaaattttagacagaacatgctgaagtaaacagtaattatcttgatttttactttgtatattctctctattggaccaggaaaaaaaagctgattctcctttaaaattctgggaaaatatttgcaagtgacattttacagttattttatcatcaaagaaattatctacaaagataggtgagtcaggaagaggttaaccatgctggtgtgacattctaagactgtcaatgaataatgactgaaaccagtgataacctgaactgcaactttaggacacagatcagctttgacactatgtgacctaaaaccaattatgttggatctcagttttcacatctactaaattaaaaacaaagataattacattatctgtctagtctcgtgtaatataaaaagtctactattttaaaataattaacatatcagtgaactaaaattcagatttcaggcaattttaactgtttggaacatattggcctgtaaatagataaagaatgccctatagctagttgaagtatttcccaaaagaaattgccttttaaatagacttctcataggcttgattatctgatttctcaacctacaataaattacaaaactggggaagaaggatc

SEQ ID NO: 202615 - DNA, 1000 bp, Homo Sapiens
tgatgtgatctcggctcactgcagcctccgtctctcccaggctcaagcaattctcctgcctcagctttccaagtagctgggattacagcctgcaccaccacacccagttgttttttttgtattttttgtagagacagggtttcaccatgttggccaggctggtctcaaactcctgacctcaggtgatccgcccgcttcggcctcccaaagttctgggattacaggtgttaaccaccatacctgacctcttaatctcttttttgaatagtttgttgttagtgtatagacagaaaactgatttttgtatgttgatttttgtatcccagaacttgactaagtgaacagatttcttgatgaagtcttgggtttttctacatacaagattatgccactgcaaataaagataattttatttcttcctttatgatttaggtgtcttttacttttttttttttttttttgagacagtcttgctctgttgcccaggctggagtgcaatggtgcaatctcagctcactgcgacctccacctcttgggctcaagtgattctcctgcctcagcctcccgagcaagctgggattacaggcatgcatcaccatgcctggtgaatttttgtattttttagtagagacagggtttcatgttggccaggctggtctccaactcttgacctcaagtgatccgcccacctcagcctcccaaagtgctgggaatcagagccatgagccaccactcctggctgcctttatttctttttcttggcctaactgttctggctagaacttaccatatttaatggaagtagcaagggtcttcttcctgacctcagaggaaaagctttcagcttttcaccattaagtatgatgtcagctgtgggcctgtcacacatagcctttattatgttgtggcatactgttctataccttacttgttgagaattttcattgtgaaaggatgttacattttgtcaaatgccttttttgcatcttttaagatgatc

SEQ ID NO: 202616 - DNA, 1000 bp, Homo Sapiens
ctgcctgcattacatactgttgtaaggaacagggagggaaataactccttcctgctctgccaacatttttctgtggctacaagcatacttaggaagccttatgtagcagcaatgggtgggcatgaatgccttggctctctgtgtgtcatacttacaaggatgccaagttattaaaacagagcagtccctctgctgtggcagagtcatcttctggaacctgtgtatctgaaagatgtggcttcaccctcaatgcttctaaaagctcatgtctgataagcctttgggggctgaattcaagaaagccgcaatgtacctggtaaggtccaaaagggacccagccctgcttctcaccgcagccgctgtctgagaggaggggacggcacaggatgggctccatagggttcttctgaacctgaaccacaacaattctaggaggtctgcttggcttagctggaagaaaggctctcacccaaggttctcagtgattgctgaagtctaaggatataagaggatgcttctagagtctccctatgaattattctgatgttttcctaaagaaaagttaagaagattttgaatacttttagttgagacgttagcccattaaatagttgctgaacaaagaaataaggttctctagatgacaccgaggttaaagaccaggctaaaattactaattactaaattcaatggtctcataacacttctcagctccagctagtctcactgtgttctttacaaatctggaaaacttaatctgaagatgatcttatagggcttctgatgcaacacctttatttctggtggatacaggttgtgaacagagatgaaaaatactcatctcataaacaacaatatattttcctttcaaatcctaacagaatgtatcttaattccagcattttcattctaagtgaaaatttgttttgtgacagtttcttaatttttaaaaaagttccccatggacagaaaaaaaaattaattcgcatcaaattagatc

SEQ ID NO: 202617 - DNA, 1000 bp, Homo Sapiens
tcgctgtgtggccccaggcaagccgctgcacctccctggagcttctgccctcgtctcctcctcctggctgggcccagcatccgaggggaccctgggtgtgaatggctctgcatcctgggaggtgcccttcatcaaacctgtgctgtggccactgctctgagcgacccacatctgttcaccgtgttgcagctttgacaagaagggggatgtgcactacctgatcaagtggaaagacctgccctacgaccagtgcacctgggagatcgatgacatcgacatcccctactacgacaacctcaagcaggcctactggggccacaggtgggtcgcagggatccggctgctaggcacaggctgccgggacctgctcctgggctgagccttgctcacctgcctccaatgccgtttcccagggagctgatgctgggagaagacaccaggctgcccaagaggctgctcaagaagggcaagaagctgagggacgacaagcaggagaagccgccggacacgcccattgtggacgtgagtggggagggtggggcagcagtgggtggggttgccagggcctgcccacctcagacttgaatgtgcagggggtgtgtgttctcaaaaggatgtttccttgggccctcatggcttatgcagacagtgtcatgcccatgtaggctaggacagctggaaggcccctcataacactgcagctgacatgctacttacacaccactctcacctgggaggagacccaggatgactcactcagcagagctccctgggtgtccactagcgcctggccctgggttggccctgaggagacgagggccagtgagccctgggtagctgtttcagaagacacactgtcttctaggggcccttggtgggtatccacagaacacggagggcctggcctgggactatcaggcgcctgtcagatgctggggaaaggcagatgggcctggtccattgggaggactgcatggggccagtgacctggagcaggatc

SEQ ID NO: 202618 - DNA, 1000 bp, Homo Sapiens
gactctgtctcaaaaagcaacaacaacaacaacaaaacaaacaaacagattccccagcccttctcctggaggttttgctgcagcagggctgggctggggcccagaaacctgtatttttagcaacaagtgccctgggtggctctgatgattcaggggcctcagaaacccacagctagagtgtaggtttgtctcaatggatccagcaaccgtgtccctatgtccagcaatctcccacccatgtccctggacctctccagagcattggacaccactgacctggccaccctgaggtcccctcacaggatttcaggccattatgctttccaaggccttcatcctcccacgctggtgggcgccagggtggctggggaatgggcctgggtgtctgaatgttgatcgcaccccgagtggttctgcgcacatcagggggaggaccctggggctctctggaggctctgcctcctcctctttcacctgcccctgagtgtgggtgtgcccctgaggtctgccctcaccctcttcccaccttttctcccgtgagctcacctgaccccacggcctcagctcccgcctccaagtggcaactgacagattttctaatatccagctcagttgttactcccaagctctggcagcctgtggcagcttcaccttggacctgctcttcctctggattccccacttgctgtccttgtcctaacttctgaaggtgacgtgtgaacggtgccctgaggctgtgacctgtggcagccctcacctaacctaaactctctgggcctttctctcctccccaccagtgagataatgcagggattacaaacagacgagataacacagggaaggcagcacatgggaggcatttaagaaagatcagttactttcataacttttattacatttactttattagttttattattacagacatagagaatgttctgctccatggggaactcaagcttttttctcatatccaggggagcgtttacaaaataggatc

SEQ ID NO: 202619 - DNA, 1000 bp, Homo Sapiens
cttgcagactccactcatttccaaagttacttaggtcaactaccctctccccttaccccttcagtgaggttgtttcatacatttgcaatagagttagactgtctgttttgtcacattctgcattctattctgggatcctttgatgtccttaattatttttgtttaaattgcatggactaaggtttactttttgtgctgtaaagtttcataggttttgacaatgccttgtgccatgtatttgccaatacatactaagatagtttgagctatttaattttatattattatattgtattattttatgttatttactagtacaatgcattgtcaaaacctataaagtaaggttttgaaatagtccaaactattttcaattatttaatatttgactttttttttttgtcttttgagacagggtctcactctttcacccaggctggagtgcagtggcttgatcacagttcactgcagccttgatttcctgagctcaagcaatccttccacctcagcctcccaaataactaggaccacagatgcacaccaacacaccgaactaattaaacaatttttttgtagagatgaggtctcattatatcacccaggttggtctcaaactcctgggctcaagtgatcctcctgccttggcttcccaaagtgctgggattacaggcatgagccactgtgcccagccttgaccactttttttggaccggcaattttgagtggttcaatccaatataagttgaaatttaagccaatctattatttacatgcagttacatgaaatagctaaaacttttgagtaagtattgttatcataaagatatctcataatcttaactacatagttatatatatatattttttctcctgcctcagcctcctgagtagttgggattataggcacgcactgccacaccaagctaatttttgtatttttagtagagatgggatttcaccatgtcggccaggatggtctccatctcctgacctcatgatc

SEQ ID NO: 202620 - DNA, 1000 bp, Homo Sapiens
tgactgaaagtaatgatctgttactcttggattccattaagttcactgataacaggttcagaatgaagcataagggatttaggataactaattaaaaacagtttttcaattcattaaacaaaaagccagtgccttcaaatgcaattgtaaacctccgtacaaagttaattttctaaaccaggggttttcatggggggtagtatcattctggggagcattctgggttctgctggagcacttcacccttctagtctaattatttcatttctcctttatggtacagctagaacataatattgatttagtcaaacaccctttctgtgatagaaccaatatatacaaaaatggataaagtataaaggaataacttagcaagctactgtaaaatgaactcctacccagcatctcagaagccctcatgtgccccttcctacaacccattcttttccttcataggtaacttggctacttttaatctttatactttatacattttagaataagctgattaaattccactaaaaacagttggggttatattgatttttttaaaaaagtttatgtgtgtgggcaggttatattttctataaattttatttcaggagagtaaggggcactggataatatttcttttaaaaagggaatattggtgctgatagggataagaaccaatgttctaaatgaaatgaagatgtagaatagggatccctgtagaacagggatctaacattctaagactatatcttctatgaaaaataaaactcaagataatcactgagaatatctccatttaaaaaactttctcagaggtcacgatttgcctccctaattattttacacagggttttctaggcactggtatattttgacgttctttatcaaaatccattaacccctttataaatcttctttttggccagatgcggtggctcacacttgtaatctcagcactttgggaggctgagacgggaggactgcttgaggcccggaagtcatgatc

SEQ ID NO: 202621 - DNA, 1000 bp, Homo Sapiens
gcctctgagagccacccagtgaggactactgggattttggactaggaaaattccattcaaaaggcaattacttacttgccttctactggacattgattgaaactgccctatgaccgaaggacataaactgatcttaaaacctgaaatattcagaatgtcttgggcaatgccagagaaacactctaatggagaaaagagtgctcagaaaagctccacagtaaaatggaattggtttatgcaggatcatggtaccaggggaatgcaaggaggagatacttgtgagcaaggagcctcttctcccctagcattcactttggaaccacccgaggagctgctgggccctataaccagttgagtgttaccctatgaacaacttttattgatcaacaaagagctacttggtttatggatggcggttccaatgtgagcagacagcatcctatttggaaggcgccattctgattgaacaaggtacaaacaaatcagctcagtgggctgagatgcatgccgtttgcccctctgtttgagtttttgccgactcatgggcagtagccaatggcctggccatagactaagccaggtggcaatggaaagctggcctcttaaagggatgcccatatggggcacagccttgtggaaattactaggagaatgtgagggctacattgaagtaggacatgtcagcacccatcagaacgcccttccaggatgagaaagtggttggaattggcaagtgggtatcctgtgcacttgcttgggtggccacctgggttcatggaaggagtggatgggggcagtggggatgctgcagtatagacatggctgaatccacatgtgttcctcttgtggtctctgaggcacacaataccagctgctcagtcagccagcaagagaagcagagactgcggatggtggtggggcagattctccagggcaaggccctgcacggagctgccaagttggtctgatgctgatggtccctggggtctacaaatggatc

SEQ ID NO: 202622 - DNA, 1000 bp, Homo Sapiens
tagaacaaacaagtgatcaaataacaacctgaaactctttttcttaacaaagcagatattggaacaaataagcctacaaacggtaaaagtcatagcctccagtttccttcttctgatgtagaatttctacccaaggagtttcaacaagacgaaagtaaaatagctcaggtaacttagcccccactttttccgagggcttttgtttatgtgtatgattactcttagtaacaatttatttcaacaaagtttatgtcgttagtattttttcgtttttttttaaactcagtgtgataaaatgtaaatgattatagaccatttagttttctgattttcatctctattaatagtagttatgcctattattcccaaatatagtaatttgtattactttacttaatccttatagaaagcaaatgaggtatttcctagttacacttctttttgtttggccaacaaatagttcactaaaaatggagaacttctgcttatttagaaaaattaacagtcgtcagttaacagactttccaatactatcataatttaatctgcaaacatcataatgacactgtgattttgattttgtttaaaagcgctattaaatgaaaaataaaaatttaaaaagcctacatgataaacctcagtaccaagtaagtagtttttacactgtctcgacccttgggagaactgtgaggctctatagccatatattctccctcaccttcttcagactacataggtttagccataggctccagaagttgcacagcattggggcccaggttgggatttccagcaccttccagccacacacgttgagctagtagttcagcaaaacttctgaggaaacccgttaggctagctcatctcttggggtgggaggatctaggggttcctcttaaaactacatgtataaagcagtgtcttcttccatggctgagatgggttgaattgtgggaggctgaggatatgcagaagcaatacatctaacatggtatggtca

SEQ ID NO: 202623 - DNA, 1000 bp, Homo Sapiens
atctaaagtaaagctataaatccagaatatataccagtatctctagaatttttcatattactacatttacttaaaaaaaaagctggcctctaactcttaagtcctgtatgactgatgggcagaaaaagagtgaggtatacactgtttcttaaaattgttctaccatgtttctatggtcttagatttcccaagaatttgaatttctccaattgcttatttccctgaaagacatgactatgacttttctctgtagttcctgcctcagtgatctcatacagtctttggcttaaaataccgtctctgtttaacagctgccagattcacatctccagcccagacctctcccgaactccagccttgttctaacctttgggccgtttcactagctgttgcagatgccctatacccttaccttctcatctttgctcaattgttgccttcttactgaagcctatcctgtccatactatttaatactgcagctgtctaccttccagatcgagaaatcccatacccctttcacctgctctatgtttttcatatcacctatcaccctagatacttcacatatttgtgtttattgtttactgttgtttcccctggctataatgtaagctccatgtgggcaggggcctttgtttttttcactgatatatcacaagtgcctaaaacagtgcctgacacgcagaagggactcagtaaatatgtattgaatggttttgatttgaactgaattgaactatgtatccatgatgcaagtaaagaaatgtaatccatatactttcctacctacattttatatgtgaggaaatattttttgtttcctttttcttttctgtgcaagtggaccaatatttgagaatcgtatacctttgagaatcatagctgatatactttaagataaaagggtatttctgtgttaatttggtttggttgtttttgtttgtttgttgagacaaagtctcactatgttgctcaggctggagtgcagcgtcatgatc

SEQ ID NO: 202624 - DNA, 1000 bp, Homo Sapiens
acggtggctcacgcctgtaatcccagaactttgggaggccgaggcaggcggatcacgaggtcaggagatcgagaccatcctggctaacacggtgaaaccccgtctctactaaaaatacaaaaaattagccgggcgtggtggcgggcccctgtatcccagctactcgggaggctgaggcaggagaatggcgtgaacccgggaggcggagcttgcagtgagccaagatcgcaccactgcactccagcctgggctacagagagagactccgtctcaaaaaagcaaaacaaaacaaacaaacaaaaacaaaaacaaaaacaaaaaacaaagatttctaaggcagtattgaagtcaaatgaagtgtaagtaggagaaaacaagctaaatcattcagctggtgaattaatatttacagcggtatgcttctggatagacaagtcccacaaattcataaataaatactttttttttaccctaattactggtcttttacatcagttaatttaacacttatttccagggctaaattgtcatttaaaaacacgaaatcaattactgagttccaaatatccaagcaaatccatcagccatttataaattaaattgtttttaggaaaaacttaagagaaatacatttgctttgctctatttgtcagaggttgccattgcagtccagaaggaaaaaaaaaatcagtgcaacatgaggaagtcttacgaatctttgtaaaatgtttgtagtagatgagaaagggaaatgaaagttaaaaagaaaggcaacaacaatgggtacttgaaaggtaacgttttacatttgcctaatggcatacttatttgaatgcattaaacacacagtacttaaaaagcagaggtataggttagaaagtcattagaaaccgtgacacatatccaatcctggaactttaccccgtccagagagaaaagaaacgctggcccgaaccccacgatcaggccccagccttttccaatctctcggaaacagatc

SEQ ID NO: 202625 - DNA, 1000 bp, Homo Sapiens
atctacatattaagcagcattatatttttaagtgtaactgatagttttatttttgttaacaaacaaaacagattttgctggagccaggtgtgatccaggatgtgctagcagcgggcagtcacctacagctgttggagcttctcaatttatgctcccactatctcatccaggtatgtgagcttgcatcctgctcatacacccttcacattcctttccccacagtcataagctggcccccaacaactggagctgaatgacaggtaaagtgggggtggggtgtgggctgtggtagtagagtttctccaggacacaagctgagaagttcctaggagggcggctgcagctcttgcatccaatcacagaagcaggagtcttcctccactgtcctgcccaccttaggtccccacgaccattgagcagccgatcaactcagtgaccatgcacagggttccctgcaggagccgggggaggtgtcgctaaaaggagtcctagtccgaagcaatattgtctggttatggaaataatcacaaatgcaagaaaagtctaatagtcattgaagatttcagtaacagtatctagtaaatcacaaagtcctatgtaattaattaccatgtgaacttcccaggcagtaaatgccggagaagggatgagtaatgtgcgtattcctccctgatttgctggtcaggaaaggccccatgagaaggagggagagaaaacccccgaacaccaagcactgactgtgtgttcacagttgtttcacattcagtcctcacaataactttgcccatttttatagatctaaaacatcagagactcaaaatatatccaacttgtctgaggcaatatggctggtaggacgttctgattccaaagaccatttcttggttggatgaaaacttcttgttaggtaggagtctgtggggcatcttaggcagacagcatggctatgagtctcttggactttatagagtgttactaactaatttgcaattttaggatc

SEQ ID NO: 202626 - DNA, 1000 bp, Homo Sapiens
agaaaggggctccgtccatgacatgcaagctcaactagtgggtggggcatgagagagagagattgggatgtgtgggatgaaggctttatgagggtccagggtggtacctacacatgttctatatgttcagggccatagcgatggctgaggccccctctctaagagctgaaagtgtgatagtggacactgagaggggagaaacctgtgttagttaagtgctgtgggactgctttaccaagaacgtgactctttttttttttgagacagtctcactctgttgcccaagctgtagtgcagtggcacaatctcgactcactgcagcctctgccttgaaggctcaagaaatcctcccacatcagcctccccagtaactgggactacaggctcacagcaccacactcagctaattttttaatttttggggggccagatgcgatgtctcacacctgtaaccccagcactttgggaggctgaggtgggtagattgcttgagtctaggagtttgagagcagcctgggcaacatggtgagaccttgtctctactaaaaattaaaaaaattagctgaatgtggtgaaatgcgcctgtgatcccagctacttcagaggctgagataggaggattacttgagcccagaggggttgaagccacagtgaaccatgattgcaccactgcgctcgagactgggcgacagagcaagaccctgtctcaaaaaaaaaaaagttcataaagacaaggtctcattatattgcccagggtggtctcaaactcctggattcaagctcatgagccaccgtgcctagtgtgaaggtaactcttaaatctgactcttgaactctgagtcttggaggagaacaaaccagaaagagaatgagggaagaacattctatacagatgaaagaaatggaacaaagacatgaaataaactgggcatggtttattaggaaaaccccattaggaatggttaaaggaagcaacggtgttaaacctagaaaaaagatc

SEQ ID NO: 202627 - DNA, 1000 bp, Homo Sapiens
ggaaattagcttatctttttcaaactataattttaaaaatatagaaagagcatgtgtcaaagatttacttagctcattaattagggaaccaacagggtgctaaagaagaagttaaaagactagtttaatatagtcaatgttaaaaaaagaatgctggaatagattgcaaagttagaaacaaaactggttaatatcccatagagcaataaaaccataacctcgggaggaatgtttttcctattggagaaatcatttgcatatctaccagctgtcatttactaaagccccattatatccagcatttgagagaaaggagatggttaaagagacagacattcctggttaaagagacagacatttagattcctagatcctaaagagggtcatcttgggtccgtatttggtttactaaactgttaagaggtgtccagaccatgccttgtaaacatggctgccatggccctgtgggtgggagggccagttgcagcaaaagggaaccattgtgattttggtagattctccacctgagcttgaagatcattgtatctgtgctaaggagtttggattccgtgctgagagcaagcagagagccattgaagatacaattggcatgcccagctatccagttctcagtgaaatcctggactccagatatatcttcagggtgtaatggttctggataagagtaggaaaggcagaaactcagtcaagacctctctaaagctctaatcttcaccctgttatataaccagcttcccctggagcttatgaaaatcttggggagggggtcctccagtctggttagatcctgtcttattgattgcaggggactgatgctgcctgggagggccgttgatgttctttgggttgagagaatctcagactctcttagcaggtgcacaggaagtgttgtctccggctataatgaatctttggggtcagcatatcgacttcacagtgttgtgctcagtggtagtgtgaatgtttcttttttaagatc

SEQ ID NO: 202628 - DNA, 1000 bp, Homo Sapiens
attgtggtaggaaaaaaggcccaaaccccttcattgaggaagtgatgctcttgcacgtgtgactttttttttttttttttactatgtctttcttggtacagatggcccccaacatttggtggtttgactcatgatttttcaacttcatgatggtgtgaaagtgatatacattcaatagaaatgacacttaaaattttgaattttgatttttttcctgggcttgtgataggcggaaggatacttttacacaatgctgggcagcagaagggagctaccattcccagtcaaccagctgatgatgagggtaaacagtaattccatctttcactttcagtaaagtattcaaaaaattacatgagatattcacactttagtataaaataggctttgtgttagatgattttgcccaactgtaggccaatgtaagtgctctgagcatgtttaaggtaggtcaggctaagctatgatgttagataggttaggtgcattcaatgcatttttgacttacgatattttccacttaggatagacttatcaggacataaccgcactgtaagttgaggagcatctgtatctgtggatctcactctgtgaattcatccactcttctggcttccatgagctgaggatcctcaacctatttttgaagcccaaatttctcttctgcaataatttatttccatctgtccttttgagatttctttttggatgtttttctgtttccccatagtctttatttcaagaatggaattctggtttcctccagcatgctccaaaagagttcaggtctcctgacttaactatttgtgtttgtgtcactgccattgtggtaggaaaagagaccaaaatctctgatgagatttattctcatcactcatgtggtcttccaactatgtctctcatctctgatctgatctactgaggccccttgattgttctttcatactagcatctgtgctgattcttttctgttttttattgatcccctcacacctggatc

SEQ ID NO: 202629 - DNA, 1000 bp, Homo Sapiens
catgtgccaccctccaggactttccacacgttcagctatccagaagctcctgaacctggtcattttgagtttttatgaaggcttcatcatgtaggcatgattgattaagtcatgagccattggtcagcccctgtttcttccctggaggtgaaggttgattggtgggactttaagtcccaaccgtctaatcatgccttggtctttctggtgaccagcccccatacggaagctacttaggggtccctaggcatcagtaatctccacagcatatcaaagacactcatcactttggagattcccaagggttttagaagctgtatgtcaagaaacaggagcaagcccaaatacatatttcataatatcataaccatgtgacaacttatcataaagaccaggtactcacttaccagactgaatgcctgtaagagttgatgaagtttacttgagcggagaaggaactgatggaagcctctcgtgccagacaggttgaagttcaggtttgccatactctagtagtatgattttggcaaagttacttaacttctctgtgcctcagtttcttgtgccaatgaaaggagattgagaaagtgaatggggcaaaatactaacatttgatgaatctgggtaaagggtatacaggcttctatctactatttttgtaacttttctataaatttgaaattatttcaaaataaaaagtaaaaaaaatactcttgtgacttggagactcaatttttccatttgcaagatagttgagttttcacatatagtcttaaagaatgatgctaacattttccgagtggcaaactgggacattttgtctgaggaatctctttaaattttttaaagataaaagtctttcaaagattataagttaaagcacattaataaacagactttttaaagaagactaaaatatatgacaagaaataaaaatgtaataaactacctttattggttaataaaagacttgaattttaaagtcagcagtatattgatc

SEQ ID NO: 202630 - DNA, 1000 bp, Homo Sapiens
ccacaacataacagtatcaaaacaacctgtgtgtgaggtttgatcctttcagcagttgttcttcagatatattgctttgtattacagagcaactcaatgagaatggtattttaaaacagaaacctacataaacaaaatacacatttttttctaaaatatagtgacaaaatcatagtactttggaagttaatttagaatatttcaaactaaaattgtgtgtgtgtgtgaagttggtttgtttgtttgtttgtttgttttgctttgttttgtttgagatggagtcttgctctgtcacccaggttggagtgcagtggtgcaatctcggctcactgcaacctctgcttccctgattcaagcgattctcctgcctcagcctcctgaatagctgggattacaggcgcctgccaccacgcctggctaatttttgtatttttagtagagacagggtttcaccatgttggttggtcagggctggtctcaaactcctgacctcatgatccacccgcctcggcctcccaaagtgctgggattacaggcgtgagccactgcgcctggctgtgtgaagctttttaaatgggcacatttactaatagatggtattgaattccatttgaggcagtgcagtgggaagggcacagaaatgagaaccagaaagaaatcacctccagatctggcactcccaagctttcagatttgcggagaattagcatttcctgggtctcagcttagctctaacaattggactccctgaaaagatgcaaaataaaagcaaatataagtaagatgtgatcaaatgtcctattcgacttgaactttagacattagaacatctgtgtgtctaaatgctttgcttaacttctcagtaaccttttcacaatcagcaaagaatagaagggcattcttcgctgtgtggggaagcccttcaagctgtgaactactgaagaggtcagagtggtggctgtggaagcccagtgtctcctacaatatgcagatactgatc

SEQ ID NO: 202631 - DNA, 1000 bp, Homo Sapiens
ccagcaactccaactagtgcaagcctgaggcttctcttctcatctgtttccaccaccatccctttagcccgggacccttgaagtatactatgtgattgagttgccttataaccttctcctcatccagggtggccagtgttgcaccattccaggggctgcaattcttgtcacattctctgcaaatgcaacatatctccatgcaacgtgacggaaactccaaggctgtgtgcacaaccagtgaattcaggtgtgcacttctacactttctacaacatcattctcacttccctgtacagcctatttcaactataccgccgcgccccgccccccatacaaaattaactattcacattccctgaatacgtccacactttttttgtctttgtgtcacaacgcctgctgatctgtgttttggaaaaatatcaccaaatgcccacctctcacaatgcctggtggtctgtcttctgttggtctctcccatgaagttttcagtagggcagagtgtaagcatgtgggtatcagatgaggatccaaaccccagctccactaacatgaactactcaagtagtcttttgtaaactacttgaactctccacacctagggcctccttttaaagcagggacaaaatttaacagttaggatgtgaggattaaatgaaatataatgcctattaagtacctggtactttttaagtgctcaatattttttagctgttattttaatatcctcactcccagtaacgatttcattctcctgtatcctctgctttggactgtggtaccatacgtttgttgttttcctgcctcccaaatatgattttagaagtcaggggcatgcactatcatatttaaatcacctcgggcacccagcacggtgccttacacatagtaggtgcttactaaatatgtggttatttttctgaagtcactctctcttgggccagaatttactggaggtcaaggaggcaaaagggtggaagaactacagagatgttagatc

SEQ ID NO: 202632 - DNA, 1000 bp, Homo Sapiens
tgtggggtccttccaggtcgaaaactcaaaaggccttttattaggtcccgggtctggggtgctctcatctgccaacaattcaatcacctaaccctgtgggacgctccagagggtgtgcagcgggagggccaggcctgggcccagcacgcactcggtgttgccatcttcctgctccaggcactttttccatcccaggctctccagtgacgggcaggaaacacccttctgtgtttctgtgtgaatttgggcacagcatttaagccaaaggaaaggtgacattccatctgtctgcccagccaaacatctgggttgctggatggcataccacagaagcccggagataggaacttccaggctgacctgaagggagtgaatttgactactctaggtacctccaagtggaatcacacaggatcaagggagagtttttcaggtgtttggcgcacagtaggtgctcaatgaaccagggcaacttttcccaaggtgtgctgattaagaaaagtttttttggtaacaaataagcttggtgttgccacagccacctttcccagggtttttaaattaaaaaaaaaaatacatatatatgtttagatatgggctctcaggctgttgcccatgctggagtgcagtggtgcaatcctagctcactgcagcctccaactctgggctcaagtgatcctcccgcctccacctcctgagtagctgggactatcaggcgtgtaccaccacccgctccccgcagcaattaaatttttttttttttttttgcatcacatgccacatgcagggtttgaaaagaaaaaaaaaatattttttcgtagagatgaggtctcaccatgttgcctggtctcgaactcctggactcaagggatcttcccaccttggcctcccaaagtgctggcattataagctcaagccaccgccctcagccttcagggttttaaacatgtgctgtgttgtgatgtgccagctgcctgcatcttccaaagcagctctgatc

SEQ ID NO: 202633 - DNA, 1000 bp, Homo Sapiens
tatgcctctacttcctctgaacctcaatttcctcatctgtaaaacaagatggctggactagaggatggttcccttccttcttccctttctccctctctctggtcctttccaccttatggcttgatgatttaggatctagactggggttttgaggacagagaggaaacactagcagaaacccactaaactttggagaaaaggagtgaggattatgtaaacaactagaatacagagaaaaagagaaagccaaaaacatttacaaaaataaatgagcaaataaagaagcataatggcccagtttagaagattatgagctttactatcaaaattagcttgaatagaagtttcagttattttgaaatcaaggaaggtagaaatgctggagatacagacttagaaattatctgtaacacataagagttgacaagtaacccaagagtctttccaagttccctcagtacatatggaaaagatgtcacacttcttggcttacctattcataactgtgccccgacatattcatccactaatttccaacaagctatccctctaaccaatttggcttcatcacttcaaacaaacctagagtatctccccttcattatcactcaatgttctatctgaaatgcattctcccttctctcaacttattaataataatttatcaagctctaacaatgtttgcggaaccattctaagtgttttacatgtattaactcatttaattctctcaacaatcctaggcgagagatcacgtcacttgcttaagatgacacagtagcagaactaggattcaaacacaagcagtctggctccaaggagactgtcaacttgctaattagtccttcaaagctgagatcaagttctgtcaccttcctgaagttctcatttgcttagcctcttgagcccttaagtaaaccactcctttgccacttaccattggatctaggttgttaattatcttttgtgcatatgttctgtcctttctgagagcaggatc

SEQ ID NO: 202634 - DNA, 1000 bp, Homo Sapiens
cactataatctaccttgctggattgttttggagtttaaataagataatatatataaagtaaaaatatctggtaactagtaatatttgagatactaattttttaaagtgtatgtaatgtatttctgcaaaggcatttttggaatctgtttttgttactagtagatgacgcttaatgaaacattattcagttagtctattcagagttttcttttatggggaggaaacttgaagtgattgttttcccaacagtggttaatttagtgagcttataaagctttgataaagggtaagactttggttcttgaaagtacattttcctatcctttaattttgcacatataaaataaaattagtttaaatgtagtaagaacatacttctttctttggaaataattccctttgcctcttccctgaaaggccaattgatgcaaactacattaagagtaaagctgaggccaggtgctggaattacaggcataatcccagcactttgggaggctgaggctggtggattacctgaggtcagggattcgagaccagcctggccaacatggcaaaaccccatctccactaaaaatacaaaaattagctggatgtggtggcatgtgcctataatcccagctactcgggaggctgaggcaggagaatcgcttgaacccaggaggcagaggttgcagtgagctgagattgtgccactgcactccagcctgggcaacagagtgagactcaaaaaaaaaaaaacaacaaaaaaaaggaaagctagccagtgtagtggctcacatttgtaatcccagaatttgggaggctggggctgaagattgcttgagcccaggaatttgggaccagcctgggcaatataatgcgatcccatctctagaaaaaataaaaaattagccaggcgtagtggatagtggtacatgcctgtatcccaaattctcaggaggctgaggtgggaggatagtttgagcccaggaggttgaggctgcagtgagcagtgatc

SEQ ID NO: 202635 - DNA, 1000 bp, Homo Sapiens
gcacaggctatctcagcctctgctagtgggcatgtgactaagtctagctgaatcagagcctggtactcctctggctacagttatagatttcatgagtacctgtaaccttgtacatttactcatggacaggatattgtatcttccctggcaatagtttcatggaagagtacatggtaacagctgtgagtctccagctatcattttacaaaatacggtcatgcctttctggccctagttgatctatctagagtagatctccaccaaatcaagccaatcatagctctttcccccatgaattagaaactaaggctaagagattccagtatcacctttgacatcactttaacaggagttgcaagttaggaagcttccacgttactgtgtgagaacagaaagttattctagagagggagaaaaagacaagaaagaagcagtcagacagagagaaatagagacgaaaactgaagacagaagtactgattctgatcctttaaaggccagcctacattcttaatccttggttccctaagggtacaaatttgaattttcatattaatttttttgaagctagctcctgttggattctcattgtcaatcaagagtctttactaattctgcattccctagagatagtagcagggaaggcgatgaatgtattaatccaggggtgggaatttgtagggcaggtagagtagaaagagaggaggggaaggcaactgaaggtatgggtgggaacacagttgaagcggctagaaatgaaggtcaagttggattgagaagaaagaaaatcagccaggcatggtgactcactcatgcctgtaatcccagcactttgggaggctgaggctcaagtgatttacttgaacccaggagttaaagacaagcctgggcaacacaggggaccctgactctataaaaaaaaattaaaaaattaaattagccgggtgtggtggcacacacctgtaattccagctacttgggaggctgaggcaggaggatc

SEQ ID NO: 202636 - DNA, 1000 bp, Homo Sapiens
aaatgactcaaaatgacaaaagctttgcacataactctcctgaaaacccacaggttgaaaaaaaaatcactggtgccttaatattccactgaaagaaaaagaaaaatactttggctgatcacagctaatttagttaataagggcccaatgaaagctaaaccttattttataaaatgctgagaatactgagtgattaccataagccaagacagcactgggtgattacacacattacctttatcagaattctacagaatgcttcttatacaaatttatatgttaaagccccaaattattcttctcaatgacagttttaatttccaggattgtccttcccttcagctaccaagtatcaatccaagagcagggcttagaaaacaaggccctaaaacatttaatttccttttggttctggttttacgtgggatcacaaatatttggcttagaattcatagcttctactgtgccttaaaagagtcaaattctaatgtgactctctgaaacgttttccaaagacttgaggctgtcagtataatattgactagataaagaaataaactttacacaagtataaatgtgcttttctccttttgctaaaaggtagttagttcaatgttactggggtgatagtaaataaaaatcaaagaaaaggaaaataaggaagaagtatttagttcaagaggaaaattcttaatgatatattgaatagaacatttacatctcaggtttaaccaataccgaatcaaatacatttaagatctcaagagatcaagattatcctggccaacatgatgaaaccccatctgtattaaaaatacaaaattagctgggtgcggtggtgggagccagtagtcccagctacttgggaggctgaggcaggagaatcgcttgaacctgggaggcggaggttgcagtgagccaagatcgcgccactgcactccagcctggtgacagagcgagactctgtctcaaaaaaaaaaaaaaaaatacacctcagatc

SEQ ID NO: 202637 - DNA, 1000 bp, Homo Sapiens
acacaagtattagctacaaaatagggagtatgtcctttcaatgattcctcagacaagttaaatgctttcatatatgcatttaaaactgccaaggcacattgtaaagatggacagaaaaaaaatcatgctaatgatttaaatttttaacttttatttacctagaagaagtttaaagaacaaacaaaaagcaccgagtcaggtcagcagaaagaccacaggaaagaggaataaattttatattttagtgcttttaatgtcactctttttttttctctgctcttttgataaggggccccacatttttaatttgtaccaggctccagaaatgatgtagctttcccaaatctttcttttgattcaactgggaggaattgtttaggttacatgtgtctatccaggtgctgaggcaataaggttttaaggaaagttttgatcagaatcgttgtctctgaggaattaataatatgactggagacgctggatttatacacagactagacaaatccaagactgcataaaatctaaagtaagctgaggatgcccataagtaacagaatagagaagagagagaagtattgcttgcttaaaaacagccaccatgaatgaaaaactattctgagataggccttatgagagaggaggcaggagtatcccctaactctactatgttggtattttctgaaccccaaatggggatactgagggtgacccatcactcagcaaaggaacagaatgttgaagcgtttggccattttctgagtaatgattctttgttttctagagctccttcctttctccactgcccatttcagatttggacctggtacttcttacttacaacacctgcttgtgttccccgacgcccacagggctgtgccttccttcttcagaagtcacagggctgtctagcgcctgagtcactgctgtaattagcgacacacacaccagccggtccctttgcctggttgggaaagggacagctttttggcaagaaaagatc

SEQ ID NO: 202638 - DNA, 1000 bp, Homo Sapiens
gcttcagcattgtcatttgtgggatggacattttctgtctgctttgtggatggggtgattaaatgggattaggaaggtaagggcctagcactgtgcctgactcgcagttgatgttcaataaatttgtgttccattcctctgcctcctgctcctcttccaagtagaataattgctcccaggaaactcctgtcttctgttgctctcacatccaccaaccccagggcacagcccccaggacctcaaagtcacaagtccccactcctgcctgtgtctcctctccatcctctgcttcatccggggctcaccctggccactccttttgcacatacctttttataaaatagactacacattcaacagcagacacaatcatacgtttccagaatatcctctttggaacagagaaaaataagtcatgctctccccagtcctggatctctaagagcatgggtggggaaggagagttgtgctgaatcctggctctgacattccccagtgtgcaaccttgggcaccataatatgcggaaaggtgaaacagtttacagatgctactgtttttattttgcaggatgttttctgatatgaatactgaggtcaggaggttttccttagcacttattacttttttctattaagtggaggacttgggtggtttccacccacggacctgactgttgaatgaatttaacagtctccatcagtccgcaagcaagtgcaccctggttttgccgtctgctcagctggtgtgaggctccagggtgagaggcaggcaaaggagatattcttgctagaaccttccctcaaggagccttctggaaggcaggccacagttctaatgctggatcctctgctggttggtggtgggacccaaagcacttggctgcctggccctgaccctcaccttcctcagggaggacgtcatgttgttatagacataatgctcacattaggggctcaatcagccgttggctattgctattactattcatataatgagatc

SEQ ID NO: 202639 - DNA, 1000 bp, Homo Sapiens
gctctgtggttaacagtttcagctctgaaattggatggagccaagctggaatttcacctctgccattgactcggctctcttttctgttccttgaacccactgccaggcttgttcccaccatagaatctttgcaggggccctgcccctgcctgggatgccctcctccttgatgttcatgtgaccatatcttttccatcactcaggtctcagcccaaatgtggccccttgcagggcagcctctgagcaccctgtacttgtgtctcttccgctccacacatccagtttcctctctgtttcagttgctatgcgaccttctaaatatcagaatatggatctagcttttggattcccactaagatgcaagcttcttggggcaggaaacttctccatcctgcatccactgtattttccatgcctaaaaacatgcctggctcaaaagagatcctccaccaagagccactgaatcaaagaatgcaacagtaccattgggatttgaacataggtccaaagtggataaaagtgaagttgggatttggacataggtctgcctgggacacagaccaaactcctaacccacctctgatggttctttgcccagctattcctaaccttgtcttctgatgtgatgagcagaaaaaaatacttcctcctgctcaaacccttttaggtgtctgtaaacagctcccaggccccattttaagccctctctgtaatgccccactgtgctcagctctgttttatacagaaagtcttccaaacctgcttcagggtccctgtgtgaccttctagttcctcagtgtctttcttctccaactgcactaggaccaggttcattccagggaagacacaggcaccttgatattgtacttctattaacaaaacccaggactgcattattatgatcttaaaagatttctgaaagggctttatagaacacggaaattgggtcacacacaaaaacaagaatcctgcttgatgaaactgaaaatgtgacacctct

SEQ ID NO: 202640 - DNA, 1000 bp, Homo Sapiens
ttaaagatgtgtggccaggtgcggtgcctcagggctgtaatctcagcactttgggaggctgaggtgggtggatcacctgcagtcaggagttcaacaccagcctggccaacatggtgaaactccagcctaggcaatgagagcgaaactctgtctcaaaaaaaaaagaggttatggggtctgggcacagtggctcatgcctgtaattgcaacactttgggagccaaggtgggtggatggcttgagtccaggagttcaagaccagcctgggcaacatggtgaaattctgtctctacaaaaaatacaaactaaattagctgggagtgctggcacacgcctgtagtcccagctactcaggaggctgaggtgggaagatcacctgagcccaggcggatcacctgagctgaggctgcagtgagctgtgatggtaccactgcactccagcttaggtcacagtgaggccctgtctccaaaaaaaaaaaaaagtttttaaggaattggaagaaagttaaaggaggaggagaggagcccaaaagactgcaggtccagctgccccacaggtggccttagcctccatcctgctgggctggacctattcccaaaaccttactacagaggcagactgaggaacagttgggaaggagggattctgaccagagcctgctgtcatcagataaagtgtgaggtgggacaagattctaggcaagttcaggatacctaagtgcccttcagcagctccctcctgctctccagggccacttagtgggcctctgggacactgctgagaagggaagctgagaagaaggccccaactgggccccactggttagagagtgagcaaacaggacacccaggacattcttctcagctgtggggaagttgggaggccagatgtacccagggctgccatactagctcctcagactgcccccagtgagacatcaggctggctgcaggccagggtagtgagctccactccttgtggccatgacgcatggagatc

SEQ ID NO: 202641 - DNA, 1000 bp, Homo Sapiens
ccagcctgggcaacagagcaagactccatctcaaaaataaataaataaataaataaaattccaggtttctgtctcaccttttcttttacagtgaacctaatcctagataaaatcaatttagaaaataaactccacaatatatgagctttttcctgatattcccacaggaaaaccagaaagtaacaaacggtactatagcacattcccattggatctctcctctcaacattcttcatccatatcatgactcttttttttttttttagttggagtttcactctgtcacccaggctggagtacagtggcgcgatcttggctcactgcagcctctgcctccagggttcaagtgattctcctgcctcagcctcctgagtagctgggattacaggcgcacaccaccacacccagctaatttttgtatttttagtagagatggggtttcaccatgttggccagactgctcttgaactcttgacctcaggtgatccgcccacctaggcctcccaaagtgctgggatcacagacaggcgtgagccactgcgcctggcccacaacatgactttcatcaattcttcccacttaggatcatagaatattagggctggaaggaattcctggagatcatgaatatgattccttcacttggaactgcctttgcaaaattataactaaggaaattatgacagtgaaagaaatcggacctaactgactccatcttacttctaacctgtaaattgtccttgttcatttctggtgggcccaactaactttgagaaggaattcagttcatggttagactctgaaacaagattagtaacagccctttcccgaaaagacccccttcttgcctggggaccaaccagtctgtctttctgggattaacaaattagctacaagattagaaattagagtttaagggtcatgtagcctctagctctaacagtctgaacctccccaaattgctctcgtggataacatcactattgtaaaacctaagatc

SEQ ID NO: 202642 - DNA, 1000 bp, Homo Sapiens
agagttaacatttctgctgcccttatctttaagatatctagttatttgatgggtcagttagtcaaccactctttttctctcctatccagtgtcctgcagtccaaatacaataatgtgtgcatattcaggagagttaaaaatggacttggatcaaataagcacatggtagccacaaagtacctctcggctcatccattactccagaaggcttcctaggaagtccagggaatagatacggacagtttctttctgttggagctgtgatttttaatgaaggagcctcttaaaatcatctgtaggggttttacaaactacaaatacttacctaggtctcacctgctaaagattctggttcattttagctggatagagattaagcgtctacatttttaaaaagcaaccaaagttaatctcatgaataatgcactaaagactgctagtctagtggccacttgagatggaaaggcatttctgacatccctagaagctttgagaggctttggaaagatggtaatggtttgcatggatcattctagactcctctagaatgtcttagaatcactttactgccctgcttaaaattctcctttgcccacacatgttcttagggtagagtccaaatgtgttaacatgtcttataaaaccctgcattatctcttgacattcttcccattatacctctggatcttagcacagatagttatcatttctctgtcatgggtttgcaaagcctgttatcctattgagatcacaatcacttattaaatcgttcacagattgactccctcagtaagtgatactaactttactccagaatagacctaatatttatatacccttgatctccctgcttctacttctcttgtcctcatagtctgattttcacacagcagccagagggatcctttcaaaacaggtcagttaatttttttgttaatggccagatatggtttttattgtaaccactcaactctgccattgtaatgcaaaaacagccata

SEQ ID NO: 202643 - DNA, 1000 bp, Homo Sapiens
taaccattataataactgatatttgtacagcaattaatggtttatagaaggacttcacaggtatgagcaagccaaggcaagtaatatgcaagtaatatcattactgttacttttactcttatgttacgtaaacaactttttaaaaaattacctgaagttgaacagtcacgatgcaacagatcaggaaactaacaaatctactgactgcaaatcttgtattcttcacattataccacgcggtggtttttattgttgtcttttgtttttttttttaatataacttcccctgaagtcagcctatgctagcccgcaaagattttattagtgtttggggaggaaagagtcttatacactcagtcacatcttaacaaacccagttatggccaaacttaagtaaccacccttggtttcaaacaacctgccatttatttagggaggaaccactacaactcccagatggtttaacatcagatgtgcttttcaggagaaaaaaaaaaaaagatatttcttaggggagtaattaataggaaagagattaggcaagttaatgtgatattgcaattgagttgatttgccttaattaggaaatatttattaaactaaattatggttatgcagaaatcaattagctccagctctgttaggaaaagagaattgtttcatgttgatgtaataacaaagtccaatataacttgggacccttttattttttgttctgcaacttaagacagctaatatatttccctgaaaccctctgaatatttgcaatggctggctactatttctcttttactagttagtcttacttccaaatcatgccataagtgagagcaggcaacatttaagaaaataaatttgtcacgcctgtaatcccagcacttcgggaggctgaggcggttggatcatgaggtcaggcgatcgagaccatcctggctaacacggtgaaaccccgtctctactaaaaatacaaaaaattagccgggcctggtggcgggcgtct

SEQ ID NO: 202644 - DNA, 1000 bp, Homo Sapiens
gggcatctaacagattggcccctgccctatgacacaggtgcagaagtgtcaggccctggtacaagacagcctagatcagtctgaattccaagccctcacgcttgcccagtgacaggctcatgacatttttccccacatcaatgtggtctgttttttgtctttgggctgacactaccattcaccagattatccccccccatgtacaatgggataactcacacctagcaatttcaagagctctgcttttaaaaaaggtcatgaggccaggcgcagtggctcacgcctataatcccagcactttgggaggccaaggcaggcggatcacctgaggtcaggagtttgagaccagcctggccaacatggtgaaaccctgtctctactaaaaatacaaaaattagccgagtgtggtggtgcacgtctgtaatcccagctgagacacgagaatcgcttgaactcaggaggcagaggtttcagtgagccaagattgcaccaacgcactacagcctggataacagagagagattctgtctcaataaataaataaataaataataaaataaaaatttaaaaggtcatgagaaacataaaaggagattccatttagactatttcagaggtcattcaagaagaccaattatagttatcctcttgctaagctgctgacttacactaagaagcttataaaagccttctgaactcattttgttctcagcctttcagaaggagtagaaattcaagaatcaggggcacaagacgagtctacagtgtgtccactcattcctgcaactgcgtctctttagtgctctagtccctaatgtggcatcaactttttttttcctcaagcagatacagctgagcctgagtgagtcacttcacagattaggctatgtctgccttttggaagccagccatggtaggagaggaggccacaacaagacaggacacaagagactcagccaggaaatcccatcctacttgagaaggagcccaactttggatc

SEQ ID NO: 202645 - DNA, 1000 bp, Homo Sapiens
atttaattgccaaattattttccaaagtgacttatcaaaagacaaaattacaacacatgtaatttaaaaatttttgttggcttttatttgtgattctagattgaggaacatctcattctatgaaatagagtgagtactatgatgagctgagcgaggggattagctttataggtagaaaagggctgaagagaatagaaacagagaacgaaaagtggattggtcatttcaaagttattttcctgctagggttaaaacagaggggactttcttattttgttgactcaggttgattggaatctcctttttttttttttttttttttaaggaaaactggcccatttcaaagttcagcttaattacgtggaacttagcacatgtgactccattctggtttggactggtctgttggggcctactgcaggagcctagtctaaaacaacagcctcccataaactttaacagactgtatcactttgcatttctgccagaaatgtatgagggttctagttcctctcatatccttgccaaaacttggtattgtcagtttttaaattttggtcaatctagtggatgtgtaaaggtatctcaatgtacttttaatttgcgtgttacaatatagtgatctaaacatgcattacaccaaagagatctgtccttttgtttaggtgtgactgcttggggcttgcaggtacaagtggccaatcccagttgcaagtccatcttagatgatgcctttatcacaaaaattgattttctgcctgtctttttctgtcaccttgtcttgatcttgtattgacgaacctctcttcacagaacatacagtattgtgcacgcgtcccttatgagtaatctgcttccagttttatccttccttagtgctgagtccaccatttgccattttcttatctcctagtggattggcattcacctttgttctgaacccaccccaggtgacactgggttttactacctttcatattcatgccacagtcacttgatc

SEQ ID NO: 202646 - DNA, 1000 bp, Homo Sapiens
taattacaactcttatttttaaaaagtgtaaatttatgacactgtccttcaaatattattcatacatcaggttttgggttatgctgcaaatcacttgccagtaagtctagggttcatggggcaggaatgacacgttaaccctgtctagccactgggggtcctggtttggaataatactgtgatgtactgtcaggaagtaagcttgggtactaggaagacattagccgattactcttttggggttttatacagtcttgctgtgattcacctcaacccgtgtttcaagtgtatgtcattaactcttcacagacaggaaaactcagtctcagaggtcaatgacttgcctttagttcaaattgaggtcagaatatctgataatttcccaactctaaatttaactcatgatacttatgccatgaacattaaaactgactgtacactgtgcatccagcctatttcaggacacatttaataatacactttaattttgctcataatacgccattaaagcaagagtcctagaggaattgaaatctgctatctttgcaccttgtaacatgaaggcacgttatccaaggcacagatgcactagatccaaatgctcctgccctaattactgcatctttatgtgcaggccaaagggcatctttttccctttgctacattccaactcattctcaaacacaaggccaatgaccccaggttctttccaaactgtctcttctttagttttaaagaaagtttattgcctccttctccaatcaagacatttttactgcacttcgaagacaccccttagatatcatgctcctgacagctctgcaggaaaacagttttaggtgacttgtcactttatgagggtggccagtgcctggcttcacagttttctaaatccctctgtcaagagaggccttgaaagagcagactggaactttccagcagtctcctggccagtgaatgtgcaccttgccttctgaaagtaacttccgaagtgatgatc

SEQ ID NO: 202647 - DNA, 1000 bp, Homo Sapiens
caataaccagtagcaagattgaatcagtaataaaaaaaactcccaagaacaacaacagcaacagcaacaacaaaggactagatggattcactgtaaaattttaccaaatgtagaaagaagagtaaatcaaaatcctcctcaaattattccaaaaaattgaagagaagggaattcgccccaatttattctacaaggccagcattaccctgataccaaaaccaagtaagtgtacaaaaacaacaaccaaaaaaaccccacaaaactacaatatcactgataaacataaatggaaaaatgtcaagaaaacactagccaaatgaatttgacagcacatcaaaaatataataaaacatgatgaagtggaatttatcccaaggagtcagggatggtttaacatacacacaaattagtaaatgtgatacatcacatcaacagaatgaaaaacagaaactgtatgatcatctcagtcacacaaaaaagtatttcataaagttcaacattcttacataataaaaactctcaacaaactagacatagaaggaatatacctcaaaataataaaaggccatatatgacaaacccacagctaacaacatattgcactgggaaaagttaaaagccttttcactaagaactggaacaagacaggacgcccactttcactacccctatttaatacagtactggaagttctagacagagcaatgcaagagaaagaaataaaaagcatccatattagaaaagagaaagtcaaactgtcccttttaacaaatactattttgtatttagaaaaaccaaaagactccaccaaataccttagagctgataaacaaattcagtaaagttacaagacacaaaatcaacatacaaaactcagcagtgtttctatacgccaataataaaatagctgaaaaagaaatcaagaagacaatcccattaaccatagctacaaagaaagaaagaaagctacagataaatttaaccaaagagatgaaagatc

SEQ ID NO: 202648 - DNA, 1000 bp, Homo Sapiens
ggacagagagagctccccacgatccttgtccccagccctagcggggacctggctcacccctcgtgagcccaggactccaggcgttcgtcggggacgccccccggccactcacctgcggagaactggccttgggccgatcccaggagaggccaaggagagaggagcaagagcgccacaaaagcaggcagcgccgccgccgcagtcgtatccatgccgagtttgggagaagtttcaagcagctttgcaaagagctgccggggggatcgccgcgaaatccacgacggaggagcgggccgggcctcgcggggtgaggacggtgagaggacagccgcccgcccgccctttttccttcttcgcggtcgccaaactacctcaggggcgaaagcgtcgccagcgtcgccggccggccgcggcggcagctctccatgctcggcggaggctgctcctgttagtcaagagttactttgctcggggagggacgggggcggagccgggggtgacgtcgccccgcgggctccgggcgcttctgaggaatgcgggctcgggcgcggcgccgccaccgcctcctgccggagagacgcgcgccagccccggccgcgcgccccgcgccgcctttgttcgcagcctgggccccgccgccagccgctgctcggagggagcgagcgagaaaggggagccggcgcagctcgctgccctgttccagaactcagaatttgagaggcgagagttcggtaagccgtgcgaccagacgaccgaggacgcgcgcagagaaacccccgccgtccgaggagaggcgtcctggggttccgtcccaaggtggaggtccccccgagcggttgctgattgaaaggggagtgtggaagcgccctgaggaaacacccgcctgccttgaaaactccccgttccttattcttgtaataaggaataagacaccccacccccatcgaaaacttgtcccttattcatagaataaataaaacttgaaccagaataaacgatc

SEQ ID NO: 202649 - DNA, 1000 bp, Homo Sapiens
gaaacataaagaaagtaattggtccaaaactttatttggaattgtagttcaatcaaaaatttacttttaacttctgcatttatgtaccagttaaaaggcactggccaatgatgcttcactatatacatttaattaccataaaaacttgatagaaaacattatttttcttccacactaacattgcattaaactttagccatttgaactgataaaagccatcaccctgcaatgaagaattaatcgtggaagtgcattcaaataagagaatattttttagatgacctctgttggattcttattagcaatgtttatgttccatgtaatgttttccatatgccgttactgtttgaaagtttggtcttgcatttattcttctcaccagctgtggaagtccagaccctaggcagcagcttctacccaaatgcctgcataatctggcattctggccaccagaactatttattttattttagtttagttttgtttttcatggaatgagggtttgggtcacatatttgtgaatataatcataagcttcagatgtcttttatctttatgatggggccatcttgtcatatgcttagctgacttccaatttgcggaatattggcatgtttcatagctctaaagataaaaccaaatattctagaaaattcacatgaaatgaattatactgtgactttttcaaaatagcttcattatttttataaaagggatgtatgctcaatgaatgaaaagaaagtcagttaataaaagtataaacaagctgggcatagtggctcacacctctaatcccagcactttgggaagccaaggcaggcagatcacctgaggtcacgagttcgagaccagcctggccaacatgacaaaactccgtttctacaaaaatacaaaaattagccaggcatgatggcacatgcctgtagtcctacctactctggaggctgaggcaagagaatcgcctgaacccaggaggcagagtttgtagtgaagtgagatc

SEQ ID NO: 202650 - DNA, 1000 bp, Homo Sapiens
agactgactggggctggtgcacatcagggaaagcccttctgaaaagatgacatttgagctgagccctcaacatgtcaggagacatccagatcaatagatgcggaaggctaaggatatttgactttcgtagcattcaagttttttagtacctttaaatgcccccaataattctagtatttgcaagttaatcataaagacagcaaatctgagagcccagccctaggtagattgctactgagtggtaaatcttgatttggctgtaagaatctagtggctctggtggcttgactgaggcaacagctcttggagttttctagtttggtatgagttgggggagaataagtagacatttaggtttagtttcctgaagcttcattacaaagagaggggtgttctgattctccaatttcacctgtgttgcccatcattcttgcattggctccttgcttagacataggtcctagaagaactcagaaattgccagacctaaatccccacgtgataaatgagaaacctgagagggttagtgacttgcctcagattacacagctagttaggtcagagccaggatttgaccccaggcttcctactccccagttcgattttctttctcccagttcactatgaccctgaagatacaggaggtgttttctgagagctctatttcaaacatgggtgaaatcaaagcttacatttatttttaaaagtaatagttccccaaatttctgaataatattaataaaagataaaatattttataacaaaatatattagtaaaatatattgttaagaacaattaacaagtaatacatattttattaaaaaaacagctgtgaaattacaagagaccaattaaccttatagttttgtggtgagagaaagtgagttatggaaagctgcagggaggaggtggtatttaaggaacctgggtcttacaggatgagtaagcagatctcaggtagtggggtaggaagtagaggggagacatcccggggagatc

SEQ ID NO: 202651 - DNA, 1000 bp, Homo Sapiens
tactttactgggatgagctactgcactgggcctaacctgcttttaaagtgtatgattggagacctataagttgtcactgctacctagagatcattaatggtaagccgggtggttattgggccaggatagttcagagatgggcagttaaagagaatctaactgacaaacaaaagggagtgtgtgtttgtgtccatgaaggacagttcgaggaggggctcataaaggaaggatgagggagaggaaatacccatgaacagtgccacggcatgtcagctgtttcattttgtggctttatgtacaatcttcacaaatatgtaaagacaggtggctcacaacagtactaccactaagctagctctgtggaagaaacatcttaacaaaaattgttctgtgagcaacataatccacctgttccaagagactgtcaggtgatatttttttcatttttttggtctcccacttttttttttttcagtttgagagcaggtactgtttattaactgaccagcttagaaaaataatcatggtagacaccttagttcattcttctaataagcctgttgatctggtcctccctgttgccagcatctccaccttctacaaaatgggtggtctttttcttcattctgcctcgtggagaagataatttgaagggccacaggaagttatttgcttctttgaagtgttttccaatggtatagatctcatgaatcagatcctccctgcagatgatgccatatttaccgagagattgagccatcaaagcctcatctgtcaaagcaattcgcttcttactgattttgccataaccacacttatggattagttcatttactgacttcagaattgggtacccccatgcagtgtatggctctacaatcctcagcatgttaactgaagccttgttgagcttcacaaaggttctgttgaagatttgacgaagggaagaagctgcaacacctttcagacctttgggctcacaccattgatacctctgatc

SEQ ID NO: 202652 - DNA, 1000 bp, Homo Sapiens
tgttatatttgttgagtgatgtcatacttaggcaaagcaggtagatacctcaattaacattgtcacataaaaagagaacatgtgagctaatgggaactagaaatggcatatttcaaagaagggacaagatgcatgtagagaacaatctagatacgatttggcctcgagaagtcacatgcaagtaaggacccgagatgccaaaggaagactaaaggaaatcaatgtcaaaagtttattcagggccagaccatgtcatagatatgaatgttctttaatttcaaaatatggaccagtgcttttcaatctttaatgaacatgcaaatcacctcagggttttagctaaaatgcagagtttgattcattaggatgtggtggtgcccaagattctgcatgtctaacaagcttcaggtaatgtgatgctgtgggtctttggactacattttgatgtggctattggttgctaaaattattttacttgattcagagagacttttccctctattagttaataaagagactttatctataattttagcagaatatacttttgaccttttatttttacttaagctgttgtagtgttaggactatcataatggatgtttgaaagtaatgtattaaaacataatggaatctagatgtgttatgttaaaatttataattgcagtgacatttctccatagttttttgcattaatttgccatgtcataggccatcatttatttctatgattataaaataacatgaattttaaaagatacactacacaattacattttaattattataataaacttgagatttagtttttaagtggaatttttaatgttatattcacttttctaaaattttaaatgatgtaaagaaatctttgaattcaaaatccatgtgatctttttaaacaaaacaattatgccatataaatagaaaggcaaaatttaagaaacattactttcaattgctaacttttatttccattctattttcaccaaaatagatc

SEQ ID NO: 202653 - DNA, 1000 bp, Homo Sapiens
agaaagcagggactcaaacaaatactggtacagtaatgttcatagtagcatttttgataatatcccaaaggtggtaatactcaaatgtccattaatagctgaacagatgtattagtccattttcacactgctataaagaactgcctgagacagggtaatctgtaaaggaaacaggtttaattaactcacagttctgcatggctggggaggcctcaggatacttacaatcatggcagaaggcaaagaagaagcaagccacgtctcacatggcagcaagagagagagagagagagagcaaaggaggggaagtgccacactttaaaatcatcatatctcataagaactcactattgtgagaacagcatgggagaaactgcccccatggtacaatcaccttccatcaggtccctcccttgacatatggggactacaatttgagatgagatttgagtggagacacagagccaaaccatgttattccatccctggaataacatcccctcccaaatgttatgtacttttcacatttcaaaaccaattataccttcccaacagcccctcaaagtcttaactcattccagcattaactcaaaagtccaagtccaaagtctcatctgagacaagacaagtgccttctgcttatgagcctgtgaaattaaaagcaagttagttacttccaagatacaatagggggtacacgcattgggtaaatgttcccattccaaatgggaaaaaattggcaaaaacgaaggggccacaggccccatacaagtctgaaacccagcaggacattcattaaatcttaaagttccaaaataatctcttttgactccatgacttagatccagggcatgctgatgcaaggggtgggcacccaaggccttgggcaactccactcctgtggctttgcagggtacagccctccttctgactgctcttacaggctggcattgagtgcctgtggcttttccaagcacacggtgcaggctactggtggatc

SEQ ID NO: 202654 - DNA, 1000 bp, Homo Sapiens
aaactctgctttatttcatttatcataaatttcagtcaaatgtaattaaggctacagtggtgaaaattaatcttttccaccattttttatagctttcaaacaagagcataaaattcgccaaattcatagattttgtcaaggacaatcatactcaaatttgtgagttttttttaaaccaactgtaaatgccaactttttcttggaagttaatttctttcatggctaaaaggaattgcttgttttgtaagatgcattttagtttcagataacattttccctaatttaggtaacgtttttattaaatgcacatggcaagtcttcggatgaaaaacatctagcaaaagtccaaaataatagtttagatgtgataaaaggaacctgatactaactagaacttgatgtgcctgtaaaggagttacaggcataggaatttctgaagcaagataaaagagttgggatctatcacataacggaatgttaacagcctgcagacaattaaaaaaaaaaaaatcacccttttccccctagtacaagctcctccgtaagcaccactaccaaaagctgtgaggatgatgcagcagcccctgtggtttctgaactttaacagatcccctcttccaacttctaaagatccttaaactattatcattttctcagatgccctaacccacaactcagtttagttttagtcactacgttccactcgggagcatctccaaacagaagcagctcattttacatgggaaatagggtctaatgtcactgggtaaaatcaagtgtgaccaaaattatccttcaaaatctcttaacctgtaagttacagtacccaaggctttatgtctataaacctacacattagtaagtataacacacattagtaagtataacacagtaatatacagtatataaagcacatatgcaaagttacagtactcttactgtattgctacagaaatacagtagttctaaaacacatatagatgaatatgcgtatctgatc

SEQ ID NO: 202655 - DNA, 1000 bp, Homo Sapiens
aatgcggaaggcggtgggaggagcaggtttggggatagagtgtatgctgattttgagatgcgtgttagacatccaaatggcaatatcaggtggacagttggatacacaagcttggagttcaggggaggggtttgagctggaaatatgaatttggaaggtgtcagcatgtagatgttatccagaggcccaagagtggatgaaatctaacaaatccatgttgaaagagaagggaaaggcccagggactgagtctcccaatatttagaggtcaaggtcataaggagacacaagcaaaaaagaccgagaaggagcagtgagagaagtggtgtcccgaaagccgtggagagaaagtgtttgaaggaggccctgttaaaactttctaataggctgagtaagcgatgacattgatgattgatgacattggttgatgacattgatgacatcgaatgatcgaccaagaatctggaatgcagaggtcaaaggtgactgcaagaaggggcttcacagggtggttgggaggagtaagtcagatagcagatataaataaagcagcataaaacctgcttaaaacccagagcagagtaggtgtccattaaatgttagtcccttttctcctaatcctcacccaccacacaacttgtccaactcacagctataggcctcttaccctgagcccctccatatccactaacgtcagccacacattcgtcattacacatggctgcgctattaatatactttatttatttatttatttatttatttatttatttatttgagatagagtttcgctcttgttgaccaggctggagtgcaatggcacgatctcggctcaccgcaacttcctcttcctgggttcaagcaattctcctgcctcagccttccgagtagctgggattacaggcacgcgacaccacgctcggctaattttgtatttttagtagagatggggtttccccgtgttggtcaggctggtctcgaactcccaacctcaggtgatc

SEQ ID NO: 202656 - DNA, 1000 bp, Homo Sapiens
agcttagctcccacatgtgaggaagaacatgcgatgtttggttttccattcctgagttctaagtgaagtcacttagaacagtagtcttcaattccacatcatgtatgtatgtatatcatggcatgtatatacaatattttccttagccactcattgattgatgggaaattgggctgcttccatatttttgcagttacaaattgtgctgctataaacatgcatgtgcaagtatatttttcatataatgacatcttttcctctgaatagatacctagtagtgggattgctggattaaatggtagatctactgttagttctttagggaatctccacactcttttccacagtggttgtactaatttacattcccactaacagcgtaaagatgttttgtttttagcacatccacgccaacaagtattaggttttttgttgttgttgtttgtttgtttgtttgtttattattgccattcttgcaggagtaggggttattgcattgtggttttgatttgcattttcctgaaaattaatgatggtgagcattttttcatacgtttattggcaaattgtatattttcttttgagaattgtctattcatgtcctcagcccacattttgttggaattatttgcttttttcttgatgaattgttcgtggttgtttttttttgtgaattctggatattagttctttgttaaatgtataggttctgaagattttctcccactccatgggttgtctgtttactctgctgattatttattttgctctgcagaagctttttagtttaattaagtcccatctacttatctttgttttttgtttctttgtttgtttttgcatttgctttagggttttgggtcatgaagtctttgcataagccaatgtctagaagggttgttccaatgttatattctagaatctttaagtttttaggacttagatttaagtctttgatccatcttgagttgatttttgtataaggtgagagataaggatc

SEQ ID NO: 202657 - DNA, 1000 bp, Homo Sapiens
gatgatgacgtcaagggtttggtgaactaaggaaatgtctacagtccaaaagaaaccacttccagcctgctctggtaggcagaaggtgaacagaagaaagaagacaggctttaagaggcctgcaaaagccaaactaacaaagtggctttgcaaagaaaggactagcatgaaaagaatggttgcgatgatgcagagatcaagtcctgacccaaacctccaggagaagaagacggaagtgagcacctagtagaaaggctgatgcaacaaaaaggggcaaaggtagcctcttctaaaagcacctctgaggccaggtgtgggggctcatgcctgtaatcccagcactttgggaggccgaggcaggcagatcacctgaggtcaggggttcgagaccagcctggctaacacggtgaaacccgtctctactaaaaataccaaaattagccgagcatggtggcgggtgcctgtagtcccagctgcacaggaggctggggcaggagaatcacttgaacccaggaggcagaggttgcagtgagctgagattatgccattgcactccagcctgggcaacaagagtgaaactacgtctcaaaaggaaaaaaaaaaaaaaaaaagaaagaaagaaaaagcacctctgcaggcacagccaagttcctgctaatgtctggaacagacagcgtaagaagtagcaaccatttgtctaccgggattaaaacaaaccacatgaaatactaagcgcccacctccaagcaagccaagaaagagcaccacgctctaggttaaggggtaaaaaaacatgttttccttttcctttccttacttaggcatctaggactgaatgtatgcaaaagttaaaaataaatgagatagcttaaaataattagatttaaaaagggttatcttagcctgtttgggctgctaaaacaaaataccaaagattgggtggcttctaaacaacagaaatttattgcttgcagttctggaggccaggaagtccaagatc

SEQ ID NO: 202658 - DNA, 1000 bp, Homo Sapiens
tcaagaatagcttgaatcttggcagggctttgtgagatatgctgtgaaggaaacttgaatatctgatcagtggtataatagatgacatttgagttccttccagtactaagcatctatatttctaagtaataacagatcaaatgccttataaatgggaaaacaaaacaaaacacagtagaataaacatgggtctttgaaatcaagcagacttggattccagactgaactctgccacttaccagcaatataaccttgggcaagttacttagcctctctgtaaatcaatagcaggctaagtgacaagtgtgctataaacaatatcacatttgatcttcacaacaatcctgtgagtttgttatctccattttaaagataatgaaactgaggttcagtgagtttaagtaaacttgctcaaggttatacatggttaatggtagaatctagattcaaaccataatctatatggttccaaaatctattcttaccattacttcaatcacactacagtcctttcagtctaacctaaacctgaactattatcttcattgtctctccggtcactaagaaataaagtttgggccacatagctaaccataacagaactgtataatcccactgacaatgaggaagccaataataacttagatgcctggtcaggaaatgcttagaaaccaaacatggaaacctcatttttttcacaccacatttgttaacactgtcaccatgataatatatgtaactgaagagaaataaatgttccaaccctaaggacaagaatgaaagttgtaacaagaatgcaaagggcagcatgagatacatatcttatacagtcaattttgatttgatttttctactagtgctgctaatgcattttttcttgcaaattagtgcaatattagtgatcataacattagatgatgcagtttagctgtgggcaacagaagcaggcagttcagcctggtgtggagcaatcagaaatgggatgctttgttttcaagaa

SEQ ID NO: 202659 - DNA, 1000 bp, Homo Sapiens
agagcaaggggcttggtgagtcaagttaagagaatctgaaggttgatagtagagtttagggatgtggccatcttgactaagtcatgaggatgttgttaggcggacatcttttgacagggcaacttaggcaactgcccttggggcagatgtgagggatgaaaggtacaggccttggggcacagatcctgactaaaattgaccttaagagggctgatcctgataccagctttgcaacaagggtggttaggtttcttttcttttcttttttttttttagatggagtctcagtcgcccaggctggagtgcagtgctacaatctcagctcactgtaacctccgcctcctgggttccggtgattctcctgccttaccctccagagtagctgggactgcaggtgcccgccaccacgcctggctaattttttgtatttttagtagagacagggtttcgccatgttggccaggctggtcttgaactcctgacctcaggtgatccatccggcccagtttatttttgtcctggctgtaagtcattgatgaggaaggagaggggtttcacctctcccttgtctgagttcaggaggatttttaaaaaatttttttagaataggccaataaggaagggacagcaaatttttagaaaaggccaataaggaagggacagcaaaacaaatcgttggcatagggcagagaaaagctaaggccctggcaagctctgctgctggagtctgcatagggcagagtggagggagttccacaagacatgatggctgcaccaaaaacactcatgtgggtctggctattttgatttgccaggaaagcgtagataaagagggaggatccctttctcagtgacatagacattcttgggaagaaaagaggggtcctccacagggctctgcttcatttatgatgcagttcatgaaatagaaaaaaatgggccgggtgcagtggctcactcctgtaaccccagcagtttgggaggccaaggcaggcagatc

SEQ ID NO: 202660 - DNA, 1000 bp, Homo Sapiens
ctcacttattctgcttcagctacactggcccctatgcatggtcttacctcatgtcatttgcacttgctgaatccacaacttaagacacattttctccaggtatccttatatataattctctttcttatggtagatttctactcaaatgtcatcttttatgagaggccttcccgtactctcctaacacaaactttacccctgtaattttatgcctcttacactgcttaatttttatagtatttgtcactaccttacctatgctatatttatttgtttattatctgtatcccatgtattagtctgtttttacattgctataaagcaatactcgagacagggtaattcataaaggaaagaggtttaattgactcacagttctgcatggctggggaggcctcagaaaacttacaatcatggtggaatgtgaatgggaagcgagtaacttcttcacatggtggccagagagaaagagtgtgtggaggaaaaaatgtcaaagacttataaagctatcagaccttgtgaggactcactatcatgagagcagcatgggggaaactgcccccataatccattcagctctgaccagattctgccctccacatgtggggattataaggattacaatttgagatgagatttaggtggaaacactgagccaaaccatatgatcctgcccctggtgcctcccaaatttcacatccattttacatttcaaaaccaatcatgccttcctgacagtcccccaaactgttatcttatttcagcattaactcaaaagtccaagtccaaagtctcatctgagacaaagcaagtcccttccacctaggagcctgtaaaatcaaaagcaagttagttacttcctagatacgatggagctacaggcactgggtaaattctcctgtttcaaatgagagtcattagccaaaacaaaggggctttaggccccaggcaggtccaaaatctgtgggcagtcaataaatcttaaagctccaaaatgatc

SEQ ID NO: 202661 - DNA, 1000 bp, Homo Sapiens
tgacccaactccttctttttggggtttgctggcaatgacaattgtttttcttagatttttttttattcctcacaatatatattctaaacatggaatcataatcaggtgtctttcctttcctttgaatatctgaacttcattgagatctccaggagagtagagaaccacacaaatttatagatagaggagtcttcagcaatgcagagattatttttctaactccctcattttacagtgatgaaactaagacttacatagattcgattttagccaattgtacacagccaattaataaagtttgaattacgatttcctagtccctaatgtaataatcttgtatattggtatgagattaacagatatggagattaaaactatgtttggaatttctcttcccttttgtttgcaacctagctacacatcatggtattcagtagcattcttacacaacacaggactgccacacccacttccagctccccctgtcacacaggcacatgtaatgtatcaagtaaaagaagctcagagaccaacatgagcatgctgttcatctgttaatatgggcaatgaccaaagaaaaaagagggcattttatttctaacacaattttctaaaatataagtgaaataaccatgatctatcccaaaagagttttctatgaaatttgaaaactgattctaaagtttatttgaaaaagaaaaaggccaaaaccccaaggtgtatctgaagtgaagaggacttgtcctatcagatatgaaacaatatttataatgctgtactaattaaaatagtgaggtgttagcataggtataaatatatagaccagtggaacaggataatagtctcagaaataaattcaaaaacaaatggaacttggtatgtggcagaggtggcaatgcagatcaataagggaagggatgataatccaattgatagaattgacatccaattgatatctaattgatttaattgataatatcaattatccttgaacaattga

SEQ ID NO: 202662 - DNA, 1000 bp, Homo Sapiens
ccaatattactccattcattcagctattgatcctcttctctgtgcaaggcactgctctgggtgctgggacacagcagcgtatacacagccacaacttcttggccttgtggagtttacattataaattaaggaaaatgtgtagtgtgagatgtgagagggaattttcttcaacttatataggtagtaaagaaatcgcacctatcaccccaagggaatggaaattaaattgccctttcatatagaattctacattggccacttcctgctgccacacagcagaattccatttaattccatttctcctgcagcagacaacaactcaggttccactttagaaccaattaagttttccctgtctgatgcttgcttcattatacaggaaactttttgtttttttttttttgagacagagtctcactgtattgcccaggctggaatacagtcacatgatcttggctcactgcaacttccgcttcctgggctcaagtgattctcctgcctcagccttccaagtagctgggactacaggtgcgcaccaccacgcctggctaatttttgtattttttgtactttcaccatgttggtcaggctggtcttgaactcctggcctcaagtgatctgcccacctcagcttcccaaagtgctgggattacaggtgcaagccactgtacctggccaggaaacttacttttatagtgagctttttggaaaaaaagtaaaatgtttactctacatctattatacctaactaaaattatattcagtacaatctatctgtttattgaggtcttggctcctcatttagaacagtagttgctgtccatcattcaccagtgaatgcatattgagggcctactgtgtgctagtagcttttctagactgttacagccataggtgtgaaattgggatttcacaattgggatttcgcattgagattttcacaggtttgggagtattagaccttttgactctgcaccagcttgctctgcatgaataagct

SEQ ID NO: 202663 - DNA, 1000 bp, Homo Sapiens
gtctccaaacattgccaagtgtcccctgggggacagaaagcccccagttcagcctgctctaggctgactgctcagaaaagagggacagagtgtcttgtcggagactctagcagggggaagaatgccaggcaggagatggggctggagtccccaaatcagccacgtgacccagtctttcctgtccatcatcccctgatgatcacccctgccctgctcacagggctgttgagaggtgcaggtcccggctctgacattacactcacatgaggattctgaccagggctgagctgactctcagctacttttaggtatttttctttcctctaagcattaataaggggaaaagagctgaatttctccctgccagatcttgtattatttaaagattatcgactgtgccacatattgaagcaaggagatgctggctgtgtaatccaatctggaaaccaatcattctgttcagctagaaaagttaatgtagtagttcctaatcagctggtgaggaaatgtaacggagggtcatcagctgggaaacggtgtttcaggcagtggctgggctgttatggagagagacttatctgctccacgatgaagacatttgctgcctggctggctggaccagaggagatcactgcgcctgccgtcagagacctcaatctctaactagtctgtggtacaatatcatccgtcttataaagaatggagactttttgttttttttgagacagtcttgctctgtcacccaggctggagtgaagtggcatgatctcagttcactgcaacctcccgctcccaggttcaagccattctagtgcctcagcctcctgagtagcagggactacaggcgcccaccaccatgcctggctaatttttgtatttttagtagacacgggtttcaccttgttggccagactggtctcgaacttctgagctcaggcaatccgcctgccttggcctcccgaaatgctgggattacaggcgtgagccactgtgcccgatc

SEQ ID NO: 202664 - DNA, 1000 bp, Homo Sapiens
cagaaaaatgtgaaaagcctagactggcttagcctcccagcctacatcttcctcccatgctgctggatgcttcctgccctcgaacatcagactccaagttcttcagctttgggactcggactggcttccttgctgctcagcttgtggacagcccattgtgggaccctgtgatcgtgtgagttaatactccttaataaacttccatatatatatatatatatatatatatatatatatatatatatacacacacacacacacacacacacacacacacacacatcctattagatctgtccctctagagaacgctgatgaatacaccaccctgtttaaaactgcaatctgcttatttcacattgcgtgcctttatcaaaacatctcatataccccataaatatttaatatatacatccattatgaacccacaaaattttttccaaaattgcaatctgcctgcacccccaccaccctgctcacttatctacttttccttatttttcccatagcacgtatcaccttctaacataccatatgacttatttattacattaattgcttttctccctctgctaaaatggaagctccatgagggcagggatcttttctattttgttcttggatggattccagaacctggaacagtgcctggtacacagaggtgctccgttaatatctgcaaaatggctgactgactaaacctgttcaaaaattccatctcattgggtgaccttggcaattccttttcttaacacctccattgtctgcctgtcaatgatgtgttgggtgaagagctctccaaggcttgatctaactctgagatgctgagcttctaggaattggtgcactgtaactttggaggcgaaggagggcacatctagatgcttccacactgcctggtccctcccagcacattgagctcaggatcccacttctaccccatcctacctcttctgcatgaagagcccccattaaggatcaagaacccccattaaggatc

SEQ ID NO: 202665 - DNA, 1000 bp, Homo Sapiens
tgcagcttttatacagagctggaaggaaggttgagtagtgctatcagagatgagttggggtccagaagagagaaaccagggcttggaatgactcccacataggcagtagtaattctctcactgactaaagtcttcagaagcgtatgttttaaaattattatgttcaacaaccctttattgagctttgactgtatactaggctgcaaaggtaaataaggtacaatctcttccttaagcatatttacatctggttggggcaagagacaattgaaccagtaattcaagtgcagtataagagatatcattgactcacagaagaagcatttgaaaatcagactgccaaggagagaaaggcttttatcttgtatcatctgctttgtgaaagccctttgaggtgctgagccttcttgtgtagggcctaacactggaaaaactgcctcttcctttcaaggccaacctgcccctgctgcagcgggaactgctgcactgcgctcgggcggccaagcagaccccatcccagtacctggctcagcacgaacaccttctgctcaacacaagcattgcatcgcctgctgactcgtcagagttgctcatggaggtgcacggaaatgggaagaggcccagtccagagaggtgagcagatgagctttgctgtccttgccttcctggaaccgcactggtcctcccctttgcttataaaagagagagaatttgattgctgtggttgtaatgtctcaaactttttttgagacaaggcctggctctgtcgcccagactggagcgcagtggtgcaatctttgctccctgcagcctccatctcctgggctcaagcgatcctctcacctcagcctcctgagtatctgggattacaggcacgtgccaccatgaccagctaatgtttgtttgtttgtttgtttgtttgtttgtttgtttgtttttggagagatgaggttttaccatgttgcccaggctggtctcaaacttgtgagctcaagagatc

SEQ ID NO: 202666 - DNA, 1000 bp, Homo Sapiens
acacacatacacacatgtacacacacatatgtacatatatacacatacacatatatgtacattatacacatatatgcgtatatatacgcatatatacgcatatatgcgtgtatatacgcatatatacgcatatatgcatatatacacacacacatacatatatatattttttgtggatatgaggtttcaccatgttgttcaggctggtctcaaactcctggactcaaacaaccctcctgccttggcccccaaagtgttgggattacaggcgtaagccaccacgcccagctcttcccctttttagagctttattgtttgagtattttgtggtttaaatctgattgatttgtaatttattggcatatatagtgagattgagatccagctttgttttctgatggcagattgttggtcctagctccatcttaaaaatcatccacctttttctcactggtataaactgccatcttcattatatagtaaattcccatatgtttcaggacaacttttggactctattctgttcccctgatgtactgatgtgccaatagcacacagttttaattactgtgtctttatagtaaggtttactgtctggttgggctgtttctccctcattagtcttctttttaggagttctctggctactcttattcatatgtttttacttacaaatttagaaattgacttgcctagttaaaaaaaacttgggtttttttttaattgggatcacattgaacttctagattgatttatgaataatttttttttttttttttagatagagtcttgctctgttgcccaggctggagtgcagtggcattatctcggctcactgcaacctctgcctcccaggttcaagcgattcttctgcctcagcctcccgagtagctaggactacaggtgcctgccaccacacactgctaatttttgtatttatagtagagacggggtttcaccatattggccaggctggtcttgaactcctgacctcatgatc

SEQ ID NO: 202667 - DNA, 1000 bp, Homo Sapiens
gcctctgagaggccctgagggcaggagtgcctttctcgtgcctggaatgccctgcatttccaaatcctctccttcctgccaggccctctgcctccaggctgtgtgctcacaggctagcatgcccctctttaggcctcagtttcctcatcagcaaaatgggactctggaccatgcctgcctccacgtgtcagagagatcaaaggaactaatgcatttggggcagcggttctcagccttggcaccgcggacatttggggcctgaggattctctgtggggggctgtcctgtgcatgggagggtgtttagcagcatcgctggcctctacccatcagatgccagtagcaccctactcccactgtgagaatcaaaattgcctccagacattgccacatgtctcctgggagcaaatttgctggaagactcactgatttaaagcatatcctctaaggcctgcgacacagtaggtgctttgtccctgaaggtagccaatgtttttttagctctctacaaacatcatctattattatcatacccatttcacagatgaagaaactgaagcacgaagaggttaagtaactggcccaaggtcacacagttggttaaaaagccaggactggggccaggcatggtggctcacgcctgtaatcctagcactttgggaggttaagggcaggggggtgggggtgaggggcagatcacctgaggtcaagagttcgagaccagactggccaacatggtgaaaccccgtttctactaaaaatacaaaaattagcctggcgtggtggcaggtgcctgtaatcccagctactcgggaggctgaggcagaattgcttaaacctgggaggcggaggttgcagtgagctgagatcgtgccactgcactccagcctgggcaacagagtgagactctgtctcagaaaaaaaccaaaaaaacaaaaaaacaaaaaaccagagttggaaccaagcagccgaacccaagctcctccctccactgcctgatc

SEQ ID NO: 202668 - DNA, 1000 bp, Homo Sapiens
tcccactggggaactggcaggtcatggagaacatccacaactgatgacctcaagcagggcaggggaggaggggcatctatccaccagctcctatctattgtctgtcgagggctgcttgggggtcccaaactcatagcatttccagtcggccccaccaaagccctcacacaaatggacgtcatggggtttgcatactcaggagagtggccgaggacgaggacgggcaccaacggtgcctgtgacaacacacaccagatcccacccagctgggccgctcaaagaggggtagacttgcacctgtgcccacccctaggcttcagctgaagctcccagcctgcagactccccgtgagtcttcttcccagcccctcattccacaggcgcggctgtgcggtgaggattcacatgcctcacgagggtcctctgggagtctcctgaggtaggtggctctggcagattctcctggagtttctccagttctgaacgaactcggaggtaggggagtgggagaggatgccctgcctctcatccagctacccagctttgacactccacctggaatggtcacaccctccgcgggtgtgctgtgtcaccccactgccagtctccccgatagctcttctttctattcagctcacatgtttcccttcctacccactgagccatgaagagcaagcgttttgactggtcccaaagcacccttgttctcttcagtgcatttcctccagtgctggctctgattttggacttgacaagtcctattggccctcccaccacttcccaggattagtgtggaggtcacgagtgcaagccctggctatgccacgtactgcctatgtgacccctaatattctgggcctcagtgtctccattgaggtagcacctacctcatgaagatgaagaagataaagtgtgtaacatgtttaatccagtgccccactcacaataggcacaaggaaatgttagctctcatattattttcatctcttctatgttggatc

SEQ ID NO: 202669 - DNA, 1000 bp, Homo Sapiens
tcacaacccttgtaaattgtatttctaggtattttattctctttgtagcaattgtgaatgggagtttactcatgatttgtctctctgcttgtctattattggatacagggaggggaacatcacacactggggcttgttgggggttgggggcaaggggagggtgagctttaggacaaattcctaatgcatgcaggacctaaaacttagatgatgggttgataggtgtggcaaaccaccatggcacatgtaagcttatctaacaaacctctgcacacgttctgcacatgtatcccagagcttaaagtaaaaaataaacaaaaaaaacaaaaaaaacaaaaaacacacacatatatgtggccagcaaacatgaaaaaacacatcactaatcatcagagaaatgcaaatcaaaaccacaatgagataccagtcagaatggctattactaaaaagtcaaaaaacaacatggccgttgaggctgtggagaaaagggaacgcttatacactgttgaggggaatgtaaattagttcagccactatgggaagcagtttggcgattttttaatgaaaacagaactatcatttgacctagcaatcccattactgggtatacatgcaagggaaaataaatcattctaccaagaagacacatgcacctgtatattggctgcagcacttttcataatagcaaagacatggaatcaacctagatgcccatcaatgatggattggataaaaaaaatgtggtgcacatacactgtggaatattgtgcagccataaaaagaatgaaaccatgtcctctgcagcaacatggatgcagatggaggccattattctaagtaaagtgatggagtaacagaaaaccaaatattacatgttctcacttataagtgggacctaatcacatgtggacatacagatgtcaacaaaagacactgggactccaaaagggggaagagaggtagggaagcaagagttgaaaaactattgggtactatgatc

SEQ ID NO: 202670 - DNA, 1000 bp, Homo Sapiens
gtgagaaaattgccctctgtgggtggtcccattaaaaaaattcatattcttctattttacgaattttcaatatttgaacaaagttaacttcccgaaaaagcatccctgtgcagattacataatccacttgagctacaatttgtgttgtgcaagttctgtcctcaaacgtgccaaggcagccagatgggaaaagaagaaatgaaattatctctagtcatagaacacatgattgtgaatggagcaaagtctaaggaatccacaaaaagcaaataggaaaagtgtgacctgggacttagtgcaggataaagtcacagctttgctgaaatatgagttccatctccttgggcatgtcacaaacttctccacttggatggggtgattttttttttttcctccaggggacattcagcaatgctggggacattcagcgattttggagacatattctgtcatcacaacttggagtagtgacatgctgctggcatctagatggtagaagccagggattctgctaaacatcccacaacgcccaggacagcccccacaacagggaattatgtgaccccaaacgtccaccttgctgaagtggagagccctgccctaaacatgtctattgggcctgcttcctggcttttgctatcacaagccacactgtcgtggtctgtagggcacacaactctgtggacgtgtgcgagtatttctgcaagatgtttttctgggggatggaattactatagcattcccgttcactcttagatgcgatagcctctcgaatgctgctgagatgccctttccagcttgtcccaggcactgcactaggaggttgggaatgcatctgtctgcacccaggggagctgtgagaagtgcttactgtgttctgcttaacacgttgtgtggattaattcattaggtcctcctgaaatcccctgaggtaggcgctgccatcacgcctgtgtcagagataaggaaccaggctgcgaggcagcacaggggctggatc

SEQ ID NO: 202671 - DNA, 1000 bp, Homo Sapiens
ttgcagtgagccaagatagtgcaactgcgctttagcctgggtgacacagtgagactctgtctcaaaaaaaacctagaaactaaaaaataaataaataaatattatttttaatttatgtaaaataaaattattcttgggtatgtagttttcagagttttaatcagtgcattgagtgttttgtaaccactatcgaaatcagcacatggaacagttccatcagctccttcctccccaacttcccttctgccacccctttgtagtactccttaccccttcacctttggcaaccagtgatctgttctccatcataacagtttttgctttgaaatgattagattttaaaactattttattaatgattatcagaactttttttttctatgtaaaggtgactggaaaacattagttatcagagttcttgggttacaaagtggattgatcatgtgctgtttgcttgtgctcttgttgttggaatgattccgtttaagacactgagcatccactgtgtatcaggcactaggccccataattacatatctgatctcatgtaatccttacaggagccatgaaatagaaactgttgttattatcccatttcagaggtaagaaaaccagagacttaaaggagttgaatagcctgtctcaggtcatacgaagagtcagaatttgaagggatgtgttttacaagaacctaaggacatgcatcaggtgtgggtgcctatgtctgtttctgactaggtattaaataaaaactagattcaggccggacatggtggggtcacacctgtaatcccagcactttgagagtctgaggcgagtggagtgcttgagctcaggacttagaaaacagcctgggcaatatggcgaaacctcatctctacaaaaaatacaaaaattagctgggcatggtggcttacacctgtagtcccagctactcggaaggctgaggcaggaggatcacttgaacctggggaggttgaggtttcagtgagccgtgatc

SEQ ID NO: 202672 - DNA, 1000 bp, Homo Sapiens
gagaatctgccattatctttattttcacaccctgagtttataaatacaacctttattgatcaatgtgctaatcgcaattatagggcaagacataaacacatagttctagttttaaaatctgaactcaaatcatacattggaattcagtttgattctattcagctcaattcagtttgccacttcactataccatttgcagagaacaaaagtggtatgtgagcaatgactatcaacaagggactcacaatctagttgcaaagacaggcctttataaacgtaagtagagaataatatgaaaacaataaaaataccttgaagtaacaatataaaacacaatcacagtacacctaataagcactctaaaacataaagtaaaagtaaaatcactgagttatgaatataaaatgaattgtaccttcttaggcagaaaatgtatattctcaatgcaatgaattaagataaacattattcaaaataagggcctccatttgaatgaaccgtaatttggtgtgaaaccaccctgtgacctcctcccattcaaatacccacacacgtgtgaaaattcactaaaagttgagatcaagttctgaatttaactaaaatacgtgtgtaaattcttctcagaaggaaggtggctatacattgttctatgctggaaaactggtacagttctgtcaatgtaataaccttggctcccagagtccctaacgggcacatgtgattaccgatgacagtgtcagacctgagaagctgaatttcttactagtctttaattatttaaagtttttatcactattcaagtccctgtgcccttacacagtctgtgatgttagcagaattagttacagatatcctgaagacaatcccagtgttagcaagttcacatcctttccctggagaaaacagttatacccaggtttccacgaacagcaccttggcttccacctcctcaaagcccttgagagcccatttccccacagtttactccttggatttgatc

SEQ ID NO: 202673 - DNA, 1000 bp, Homo Sapiens
ctctaggttttggataccatgagtatgtatgtttacctgtgcctaataaaggagaattatgaaataattttatttttctctgcaatttcttccatcctttccaacgatctcttaccagtttttcctgccttcaaaactggcccccatggtgaaaggccgtagagttgtgtcttaacctgggctgagtggtttgtgagaacagattacctggagcccagtgggtcttcctgcactccttctgtttcttctggcagcagcagtgtctctattagggtactttctgagtcaaaatggcttcaacaagatggaaatatgtttcacacaaaacaagaagtcagcagatagggtgggcttcagtgctggtccattcaactcccaaagctgcgcacagggaccccggctctccaggctccttctgtctcttggctgtattgtctcgagactgctggcccaatggctacagcaggtgtcacattaaagaggtccatgaccagaggaagaagccaggggtcattgtagtacctgagaactcagaactctggagtcaggctgcctggaattaaatcctggctccagcactcaatagctgtttgacccttggcaagtttcttaaccactctatgcctcagattcttcatctgtgaaatgggggacaatgatagtacctaacttatgagaactaaatgacttattttgtataaagcaattagaacaagcagcgcctggcataataagcccacaataaaagttactcccggctgggcacggtggctcacgcctgtaatcccagcactttgggaggccgaggtgggcagatcacaaggtcaggagttcaagaccaacctgaccaacatggtgaaaccccgtctctactaaaaatacaaaaatttttagtagagacggggcgtggtggtgcgtgcctgtagtcccagctactcgggaggctgaggcaggagaattgcttgaacccgggaggtggacgttgcagtgagccaagatc

SEQ ID NO: 202674 - DNA, 1000 bp, Homo Sapiens
tttcttctcaatatttccccctttttttttaaatctccccctttctccagtccttcataaaaaaacaaaaaagcaaaaaactttatttacctttctctacctacttcttttttgcacttttcctaggtaacccaagaaatccaagtctttgggtggagatgtgaatcagccatacaatgtttaactccaaataacacctccccttgtgaagctgagaagtaattgaggcataattgcttctcatctgtctcttgtgttttattggcatagacttttttttttttaacctcccacagtgctgggggtgtcattatcattttatttttcgtagttgtcaaaatgtcaattttaatgagaaatttctgcagataggtttgcccttgagtggtaggagccttcaggcaaagccagggctagatgagtcaggaatgttcatggatctgttttctcatgcatacaggtgtataggccacacagaggcagacacctacttttccccatccctacaggctcaatgctttgcaacatgtgcacacacacacacacacacaattgatgtgcatgtatgtcctctcttctatacacaaagtatctcccttacactttcaagccatctattcctcctcctcccgtatgtgcacacatttaccctcttacacccctgtcccactgtcttctacccagatacccagaattgtgtgtgctaccaaagtatctgcaagcctaactcagacaccacactgttcactcccttacatctgcgcacaagtcctcccctccacacatgcccacataatctctgcccgtgccagatgccacacaccgagtaccacagcatcctccacatttctttatacccaggtgctgtcaccaccaccccttaggtttctgtatcttcataacagacattttagtttcagactagttttgaaaggaaatgttctttgctgacagccaagctagcagactgttaggaagttggaaccatttatgatagatc

SEQ ID NO: 202675 - DNA, 1000 bp, Homo Sapiens
cagcaccgccccatttccaccagcaaatcctgtggcgcgcccttcaaaacaggcctagaatcggctcacttctcaccccaccatgggcaccattctggtccaggccaccagcctttctccctggttcacctggatcactgcagcagcctcctcccagcttccaccctcacccccaaccccagtctgtaacccacacagatctgtgctcacctctcaccactcacccccacacccagggctccagcccactccactggccttctcctggcgctactcaccaggcacttcctgccgcagggcctttgcacttgtccttttctcttcctggaatcctctcccaccagatccccacatggatgttctctcacctccagtgggtctctgctcccatgtctccttgggaacaggaggcctccccacacctatctcaagcagcagcccccagccctagccccattctctgctttatttttctatatatttaacatttacatttagggttcatggtctgtctccccacccccaaacatacaggctccgtggaagatgggattctgtttctttctctagcaccaagaacagatcaatgcacgttgtaggtgctcagaaatatttgtcaaaataaaactgggtcttatgaaactgtcacagaccagaggaggttaaggagacatgacagctaaatgtaacgtagtattgtggttggatcctgggacagaaaatttacattagggaaaaactagtgaaataaaaagaagtatgagttaatagtgacgtgcctggatgggttccttagtaacatcaaatgttaaccacaggggaaagtgggtaaggagtagacaggaactctctggactatctttgcaactttgtaactgtaaatctaaactgaccctacaataaaccatttgctgaaatgttaagaatgtattggatgtggccaggcgcggtggctcacacctgtaatcccagcactttgggaggccaaggcgggcggatc

SEQ ID NO: 202676 - DNA, 1000 bp, Homo Sapiens
caaaaaagagcagagaagtccagaattgcagcttggctttcaaatatgattattggttttttctgacaggtgaaacatttataaggaatcaaaatgctactcattatgcaaaatgcctgcagaaatatctctatcagaagcaactaaaacgtatacagttgacccagacggagaacaagggccccttctcaggtattagaaatggtctatatattgataggggttacatgggtctatgcatctgtcaaactcagcaaattatttaaggtctgtatgtgatttcactgtctatgaattatacctcaataaaaacgtataacgtttatcttatgaaatttgagtgcagctgatattagatacagcaatgtgggctgtcaagaatactttaatggagatgtgcatttggaaataaatgcccttcacctggtatatggagatatttttatgggagggaatagccattgagtaggctgggttccagtgacttcatggtcatgccagtcagcgttaccagcaatccagatggcagagggggctgtagcatagactctgaattattgattctgggttcaaatctgagcctagttcccagtgacccagcacatgtgatttgacctttctgtgccttagtttccctatttataaatggcaatgataaaaatatttccttcacaggaacgtttggaagaccaaatgatttaatatttgtgaagaacttagtatagttctggcacagagcaaacactatatacatatttatcagataaacaaagtgactccaataagctagctgcaaccaccgcaactgtcatctacaacttaaccagttttatttttttacagcacttatccttctttaagatgatcttattttgaataatttatttgcatgtcattgtcagttgcccacccacctacttcataagccccaagacataagggactgatctgttttgttcttccctgtactcctagaacagtgcctgacacacaatagatc

SEQ ID NO: 202677 - DNA, 1000 bp, Homo Sapiens
agatgcccccatccatcaaaagtagacaggattatacattcatgaggatagatactatcaaagcaacagaaaataacaggtgaggatgtggaggaattggaacccatgtgcatcgctggtgggaatgtaaaatgcgtggccgcatagtgggtgggaatgtaaaatgcgtggctgctgtggaaaacagcatggcggttccccagcaaattcaaagtaaaattgccatatgttccagcaagtccacttctgggtatatatcaaaatgactgaaaataggattatggagagatatttgcacactcatgtttacagaagtattatttgcagtttccaaaaagtggaagcagctttttggtatccattgacagataaatagataaacaaaatgtataatatatgcataatggaatattgttcagccttaaaaataaaggaaattctgacacaagctacaacatggatgaacctggaggacattatgctaagtgaaataatccagtcacagaaggacaaacactgaatgattccacttacataaggcacctagagtagtcaaattcacagagatagaaagtacaatggtggttgcagggattagggaagtggggagaattagcgtttaatggatacagagtttcagttacacaagatgaagagtcctggaggtggatggcacaacaacgtgagtgtatgaacactactgaactgcacacttaaaaatggttaagatggtaaattttttggtcatttttttaaaccacagataaaaactttttttttttttttgatggagtttcactcttgttgcctaggctgggaatgcagtggtgcaatcttggctcactgcaacctctgccttccgggttcaactgattctcctgcgtcagcctcccaagtagctgggattacaggcgcccgccaccacgcccagctattttttttttaattaaaaagtaaactttaatgtgaaaaatgcaaacttgaggagggcagaaagatc

SEQ ID NO: 202678 - DNA, 1000 bp, Homo Sapiens
gtcttgaaattttcaatgtttggcattacagcaactgctgaaaattcctgttagacaatattccctgactcttggatcagaaagaagggccagcatagcagggcatgtctactaggacatcatacagttcgtactccacagttcctgcttcaggatagcacaaaagcccccagacaaacaagcaaaagttctcaagattctttactgcctttatctaatataaccagctttctgtcataactagatgttgcccagtatgcaacagggagccatgttgtcagaccattcacaatttcctaaactatcacaaaattcccataggaaggagagggcatttcacatggttggaagtgccatccacgcaggggctcagggaggataatgattgcatttttaaggtagagaccaggcacccatccctcctccaaatctctctgcctccagccctctattcttcctctctctctccctcctctctctctctctccctcctctctctctctccctcctctctctctctccctcccttctctctctccctccctcccttctctctctctctctctctcatctctctttctctcaaggatgcgctcagctcctgctaaggaatttaaggaataacttttggtccatcctcagaggttacaggtgaagaacagaaatagcatgatatatggggaaagttggaggagacagtcttagtcctgaagaatcagggaatgctataatgtgccctgaggtacagtctacagagactaccttgacaaagaatttaaaataagagctaaagagaaattggccacttaataatttgatagtaacagctttgactttgtttttaaatataaggagggaagaaataacacctgaataaatttagtatgccaagatgttagcttcaactctgacaaaaggtttgtgcttatacaaagtgagattctctaataacctgaattttagttaattatttttgtacatttacagagggatgatgatc

SEQ ID NO: 202679 - DNA, 1000 bp, Homo Sapiens
aatgcgtggacgagaggggatgtgcatccctccccagcttcccctggagtgggtcaccatgctgttttttatcatcatgggaatcatttcattgactgtaaaattccccttagacagacggaggcagctaggactctggagtcaggtgtgaatctgccctcccattgattgtcacatgtggtttgctggtggcttcccactggggaagagaagctacaaaatatgttcgatggatagcattcactgggatgatgcttttctgtatggctgccgtcatatttccaataggattttacatcaatgaagtcagaggtcaaccttataaattacccaacaccacagtagttgggtcatcatatgtaccttttgtcttatcaatttctttacaatagtaggacttctatttgctgccaagtttatttgccaagctgataaatgtctaaattgcttgactctcacttatttttgaagggtgaggaggacaaaggcgagacatctgagcagccctcatgggaagatgctcacatgaaactgatgctgagaaggaaaaataaaaaaagttttgatttgctctcactatgcactttggacttaaagaagaaaaaaaaaaaaggaagagcctttttgttttatttttgagacagagtctcactctgtcacctaagctagaatgcagtggcgtgatctcagctcactgcaacctccgcctcccgggttctcctgcctcagcctcccgagtagctgggactacaggcacccaccaccacacccagctaattttttttttttctcttgagatggagtctcgttctgtcacccaggctggagtgcagtggcgtgatctcggctcactgcaacctccgcttcccaggttcaagtgattctcttgcctcagactcctgagtagctgggattacaggcgcctgccactgcgcccagctaatttttgtatttttagtagagacggagtttcaccatgttagccaggatggtctcgatc

SEQ ID NO: 202680 - DNA, 1000 bp, Homo Sapiens
atcattgcttcatagctaacctttttcagtgtttaggacgtgccaggtacaaaaagcacttacaggtattaacccacttaatcctcaaaacaaccctcggagagtgatattattccccatcccaccccattttctcagatgaaaaagtatgacacaaagaggttaagtgatttgtccaaggtcacacctctcctaattggtggaaccaggctttgaactcataataccaacctgggtccagatggttacaagtccaccccaggttttctttagcacccttttggcatccttttcgaaactgtgctgatcctccggccagcgccttgaggacagagaggaaattgcttctttgatcattaattattgttacctgccaggtatttcatatataggagaagcagtattgtgtagtgtttatggtttgaatctatgctcttatcccacattaaagaaagaattagaaacagtagtaataagatgaacaatctaacttaaaaggcatcgtacaggggaaaggctttagctcagatcagcttctggtaccatctacgtgctacctgactttgggcaaatcaagtcctctccaatgccctttcagctactctcagcactttgcttatttaataaacacttctctggtcatccttctgagcatgtgactaatattaagtttcatataatcttatcagataggaagttagtatatccccattccgtggaagggaaaactgacacacaaagaggtcagacaacttgcctaaggtcagacagctggtcaagggcagagccaggattcaaaccaagcagtctagccccatgctcagtcttcttaaacatatgaccctgtcctatcacatgcaccctatcacattgtatccacccatcgacccacagtgggtaaatagtatcaccgccattgtacacatgaggatgctgacgctcagggaggaaagccactcacccaagtgctctgacttgtaagtggcagtgccctaagatc

SEQ ID NO: 202681 - DNA, 1000 bp, Homo Sapiens
atgaaaggtcttttatggactaaatggactagcctcctctgacttatttccttgataacttcagttacttggcaggctatttattctatcccattagatatttctaacaactgttggaaagtctagaatggagatttgtctcctttgcaaatgagaagcagcccttgggcatcctgctaatcctagatactgtatactaatgacttctattgtgaaagggcacagagctaccctcctgcttagttcctgtctctagatgtgtccaattatatgaattgaacactttaaggtgtgttttcccggagagaagttaactagttgttcatgctagagaaaaaggagacagttaaactgcaggtttaataaaaatccattaaggggtgtattacttatctattgctgcacaacacattatcccaaaatttagcagcctaaaacaagaaaacattatctcacagtttctgaggatcaggaatctgggagtggctaagctggacagtggtggctcagggtctctcagaggttgccatcaagtcatcagcaaggctgtgataaggacaggaggcagagaaattctaggctgaaaaggacagggaccctggcaaagctccaccctcaagcctggaaacatggcccaaacttagaaaatccctgtattcccattcaaatgttgccctttccaaaaccacccctggcccacccaatccccatcctgtacccataaaaaccccaggctccactggcagagagcagagaaggggagaagagaagaagcagccggatgtcagagagaagcagcttgacttcagagggacggcttgacagtgggactttggagaaaagtccgattggagatggccagacttcaggggaagaccacctccccgctccatcccctttccagctttccttccatctgagagccgcttctggcagcaataaaatcccccgcatttactatccttcaatttgttcatgtgacctgatttttttctggatc

SEQ ID NO: 202682 - DNA, 1000 bp, Homo Sapiens
aactgctgtaagaattgctaacattgtgttggaaaataaatatactaagctaagaaacaatgggaaactgtcatatgtagggccaacagcctttttttttttaaacccttccaatttattaatatctagtctaataaaccctgatttataggacctctgcaccttttttgactttttattcatccattcttaatattctacactatgacaaaatccttaaaactccattattgatgaaatgggaacagacttttgtttttgtatgttggtgttctctgagtggtgaaggcccagggagaatgttttgtttggtggtcacttagcatttgaaaacatccacttccttgtgacttagctgggtatcttttaacatctggaagccacgtccctgattgaaatctctggagacaacttacctttcaccaacttgtctgccaaattgcaccatggaccaagattgcagtggctgcatcaagtctaggcctgccctgaagtctggatttgtaagtcccccatttcaaatggggcagaaggcagaggagcagaggagccactgtgcctttcgctgtcctggagccagttggccttctggttttggtgaaccctgcttttataagaggactccctggcatcttccagtttcccgctacttgttttatgtattattttatgtctgtgtttgtcctggagtgctgtaactcctttcactgtctgctgtaagttcaacttcttcaataaaagaaatgtttcaaattggatgaaaaatggttctgtgattatggtttgtgggacgggttctgatgcttcatttatgttcttcatacggaattctgtctcatttccctagttctaaatatgaccagcagacccagagttccatctcgacttcataaaggagctgtcttggactgggaacagctgccaatgtctttgttgagatgggagttggaaagtgttagcactttgccagactttgccagcaagattaactgaggagatc

SEQ ID NO: 202683 - DNA, 1000 bp, Homo Sapiens
tgtgtaaagtgagtgtctaagttaaacttgcatattatggactctgtgtggtcttttattcttccttcttcccttcccttccttcctgtccttttttctttttttgtttttgtttgtttgtttgtttgtttggaggatggtggggctaagaagcatactgtgcagttatcataaagcatgactgtgcagttgtcattctggtaccccacatggtgaccagcctgcctccttcctgctggttccagctgtataacaagctaacaagcaccacccagtcaaacagtgtaatcagagctggattatttctataggattaatttgtggtgtgaagtgctcatgtatttatgcaattgccactcgtttgccaacatccagaatgtgctaaatctgccactagtgatgaaatccaaataacttggaatcatatgtagggaatccagtaattttcatcaccattgttacaagagaggagtttaaactgggggaatccaaatggcaccgagaaatgatgatatccctgctttccagggatgattctactcagggaagcaccaatctcaaagagaaaacaggaaggacacaaggccaggatattgcatgattgtgttgccattggtgtaactgggtcctcactgagggccctcccaggcgaccacaccatcgtcttttgtgaggcttctctggcactgacagatcactcatagttaatgggtaactcagactcttcttgccaaatagttgctttgtttgttatctgtgctgtggtcgccttcattgtccccacagcccctcaggcctcagaaggatgtggtgtggagtggggtgtggtgacctctagcatgagcccacacacttcttcccctttcccttaagtcactcattgccggagctggctggttgcagaaacatcttgaagcactttaaaaattgatgttctagactgggtgcaggttctcacacctgtaatcctagcactttgggaggcctaggtgggaggatc

SEQ ID NO: 202684 - DNA, 1000 bp, Homo Sapiens
ggccaggtaaggaagcagacagacacaattaaatgtggctataatccttaaagtggaaaatgggaatggctggtgaggtggtggaggaatgcaatgtcttggcaacacttgacgcatctgaaaataagaaactgattcatcttcattataatcagaggactactggtgtaatttgaaacatggtgattaaggaaaattaagtaaagcccaaagggtttttaatatggggaaaaaaatcagtaaaataaatgtacattattacataatctgaattttaactcctcactgctatttatcatcattattggtttctcttttttctttatttttgtttagagactggctctgtcatccaggtgagaatgcagtggcttgatcacagctcactgcaacctggaaatcctgccttaagcaatctcccgcctcagccttcccagtagctggggttataggctcacaccaccacactgggctaacttttctatttttttgtaaagatagggtctcactatgttgcccaggagactcctgacctcaagtgatcctcccacctcagcctcccaaagtgctgggcttataggcataagctaccacacccggcaatcatcattgttgttattttaaagtttattgctaagcactgagctgtctgctttatatgcattctctcatttcatcttcaccgcaaccctaggagacgggtcccactcatcccattttcccggaagctgagaaaggctccatcactcccctgaggtcacacagagagtaaatgcctcaagccatgctcaaaccaggatctgctgacaatagcctgggcactgaaaccctacagggtcacttcaaaggttttataccttaacacagtatatttaaacaggaggaggggtttgctgatgattaattttgagagttaaaggtaatttttatcaggtgtcaggtaggagccaaccaaaaacagccaccctgattgactaggcacctcccacctgccaagatc

SEQ ID NO: 202685 - DNA, 1000 bp, Homo Sapiens
tcatcagaggtatggaggtgtgaaagaggtgtgggtactaggaatagcaagacgtgactctggagactaggcaggggccaggtcagaaagggcctagggaggggaaaaggcagagcaaaggccttgacaggacgtgatcttggcttgtgaagggcctcagggaaagggaggtatcaggagataagatcagtctagaagctttgtagaaggtgtttaaaaaaatgtcagagataagatcaggtgggtgaggtagactccaaaggaggcctctcatcagcccttcagcgggtgtgtggtgatccctttgctctgatctgtggaggtttgaactacagtagaatgtgggtgctccgtgatgtcaaatggaggcgggcttttgatatggctcagtgtcttgttggggagtttggttctggtccccatgtattattgatctgctctttcctctgtctctgccctcctacacctttggctctctgtctccatcaccttttctctctcctttttcacacccttcctctggcttcctacttccttctaaatgagccggtctccttgtcctttccctgcttgttcacagaaaatgatgaagaaggaagctctcctcctcatccctaatgtcctgaaggttttcttagaaaatgggcagatcaagtcattcacatttgatggtcggaccactgttaaggtacatacagtctcctccccctggtcagcattgccctctccagagtacatgcagttgtgtgtcctgtgttcctctgagtctgcacatagctgcttgccactggagtaaggtggcctttaagctctggatgcttgttagcacaaggctgcaaaaatgcacagtcccagatgagagtggtggtagaagtttgcatgcccaactgtgtgctagtaattgttaaaccgtgtgtgtgcacttatacttgtgaactgctctgtgtttgcgttacatggggtccttcaggacttttaagaactaaagaatatgaagatc

SEQ ID NO: 202686 - DNA, 1000 bp, Homo Sapiens
aactctcaataaactaagtattgatggaacagacctcaaaataataagggccatttatgacaaacccacagcccatatcatactgaatgagcaaaagctggaagcattccctttgaaaacgggcacaagacaaggatgccctctctcaccactcctattcaacacagcattggaagttctggccagggcaatcaggcaagagaaaaaaataaagcgtattcaaatagaaagagaggaagtcaaactgtctctgtttgcagatgacatgatcctattcctagaaaaccccatcgtctcagcccaaaaacttcttaacctaataagcaacttcagtaaactctcaggatataaaatcaatgtgcaaaaatcacaagcattcctatacagcaacaatagacaaactgagagccaaatcatgaatgaactcccatttacaattgccacaaaaagaataaaatacctaggaaaacagctaacaagggaagtgaaggacctcttcgaggagaactacaaaccactgcccaaggaaataagagaggaaacaaacaaatggtaaaacattccatgctcatggataggaagaatcaatatcatgaaaatggccatactgcccaaagtaatttgtagattcaatactattcccattaaactaccattgacattcttcatagaattagaaaaaaaaactttaaaattcatatgaaaccaaaaaagagcccatatagccaagacaatcctaagaaaaaagaacaaaactaggggcatcgcgctacccaacttcaaactatactacaaggctacagtaaccaaaacttcataggactggtgtaaaaacagatacatagaccaaggaaacagaatagagaactcagaaataagaccgcacatctacaaccatctgatcttcaacaaacctgacaaaaacaagcaatggggagaggattccctacttgataaatggtgctgggaaaactggctagccttgtgcagaaaactgaaa

SEQ ID NO: 202687 - DNA, 1000 bp, Homo Sapiens
gtctagagtttacataatggtattgtaccaatgttaatttcttcattttgataaatatatcatggttctgcaagatagaaaccttaggggaagctggatgaagggtgcattgtaagactgtctttgcaactttctgtaaatctaacattatttcaaaataaatttttgatttttaaaaagaacttattgttttgcttcctcctcatcaaaataaaaaatgaaaaaaaccctccccaccctaaaattattgttgatgctggtttatttcacaaagtcagcacttggagttatttccctttccccaacacagcaggctccccctgtcctctggagctgagctcctcctggccctcctagctgtgggcctccctcttagctgccttcctgttgaccccactatgccgccttttgaggccagccccaggctcacctcagtggctctctcacagtccgcactccctccgatggctctctgggcatttgttgtccacactacttattaggatctcaataaccagagagtatttttgcaggattaacccccaccttggaaacatccaccacacaccctgcatgctgcttgccccaccaacccctcaaatgttgctcacccccagccctgggctaaaacagagcaacagtgcctcctggtgaccaatgtggaaatctgtctaactcagcgtctcctccacattccctaagctcccttcagagcctgggcttccagacctctgtcccacactccttctcagcaatcacccctcatggctcagttaatttcaccctggacaatctcattcccacataaatatacatccttgtccgtgctggttttctcccccctctctctcctgtccaaacagcccaccatttctttattatttttgttacatgtgtgaacaaactaacacccttacctgagaccaataagagctggcctccttctatagcaaaaggggagcgggaggagcagccatgagttctgagcagaacttagatc

SEQ ID NO: 202688 - DNA, 1000 bp, Homo Sapiens
atttcagatcccacagccagaggtgcccaagacgtctacaccaggggctacaaacaccaatgccaacagaagccatgcaaggaaagtgactgagtgaagctggccaggagtagtacaaaagggaagggtggggactgtggcaaactggagagcagacatccatctaaagggtaagctgtgactgtgttccaatcaaatgtcgccaggcaaaagtacagccggatttctgtttccctacagaaattggaaagccatatttttgcaaaaaaaagtcctacttttaaaaccctgtgctacttaattctaatatgttcatggtaaggcaaagaaactagaatagccaaaacaattctgtaaaagaacagtgttggaggattcacattatccagttttaagaattattatggccaggcacagtggctcatgcctgtaatcccagcactttgggaggccaaggcgggcagatcacttgaggtgaggagttcaagatcagcctggccaaaaggatgaaatcccgtctctactaaaagtcaaaaatcaaaaaaaaaaaaaaaaaattagccaggcatggcacacgcctgtaatcctagctactccagaggctgaggtgggacaatcgcttgaacccaggaggtggaggttgcagtgagccaagatggtgccactgtactccagcctgggtgacagagtgagactccgtctctaaaaaaaaaaaggaactattataaagttacaataattatgatgatatggtactggtgaaaggggagacacacagatcaatggaacagaaaagagagtacaggaattgacccacacaaatatggccgtttgacttttcataaggatgcaaaggcaattccgtagagaaaggacagtcttttaaactgttgctttaaaccaatgatcttggaacaaccacacacgatatgcaaattaatgaacctcaacctaaactacacacttcatacaaaagtaaactcaaaatggatcacagatc

SEQ ID NO: 202689 - DNA, 1000 bp, Homo Sapiens
cgaacagcaaatcaagaaagtgggcctgtcatctgaaaggctggcaggtagcctaactggaacaggcaaaagccccaaaccaacctgaagtccacaaagccacagaaacatccaatttgctcaaacatattagcaacacttggcttttgccaagccctgtaacaattcagagcccccctctttaaacgtgttcatttagcctctccacaatccaccaattcaggaagctctccattttaactttcagagctatccacactcaagcccaaaagtgttacatggatacacacaaggcccaagcagcaccacagttagaatgccgggtcgtgtggctatgagacacaggcctgccacagaagccatgcctggcttcttgaacattctaggcgcacctttgtcaaccacataaaatgacagcatgagagcatgaacaccaagctataaaaacgtggcaggtctgcctgcacagaagtgacggttgtggtcacactgctcagctggggtgaacgcacggggaaaactgccaagcagcagctctcctgtggtcaaactgtaagctccaggagttgggccctgtctgtccttttcacaggtgtaggcccagtgtccagtacagctcctgaaacagagcaggctcccaagaaacatctactgaaggaagggaaaaatgactagctacattaaaccataaaggcaagagggatcatgaaaaaatgctcaaaatcataaaaatcatctaacaaaactcaggaagctgttgatggcagctgactgggaagaatcgtgggtagctaagtaaatctaaaaggtagaattgcaaaacataaattcttttaagaatgaccataatctttattaacagagccttgaagatttgtcatcaactaaatgaaacatgaggatcttgtttggagcctgactcaaaccaactggctgttttcaaaaaaaaaaaaaaaaaagaaagaaagaaagaaattgagacatcgaaggaaagttaaac

SEQ ID NO: 202690 - DNA, 1000 bp, Homo Sapiens
atccataacttactgaaaatagcgagtgtgtgtgtgtgtgtgtgtgtgtgtgtgtgtgcacatgcatatgtatacataaatatttttttaattggaataccatttacatatagtaaagtacataaatcttatgtgttacagtttggtgaatttttatatatgtgggtgtatacccacataaccactacctagatcaaaatatagaaaaacagaaatttgcatgaaagatttattgtgtgcatgggtgttttgggggccccattaggagctaaagcttcaaatgcatttgaggttttgccacttagaggtcaaaaaaatttagtcatccagaatgaccagtataattaggttatttttcatttctttttcttcttcatagcatccttcaaatttgtattcctttttaggtttatgcatttatatgtgaaatgaaatttatggagaaccttagataacagaaaattctaaaatgttaataaggcagtaaatgttatcagtaataactccatgactcataatttctgcctctgtttatcttatgattggcataatttattgactaaaagtacatttaactgctttcttgaagcttaaacagcttctttctcatgatctcttcaaagagtgaatatcatgaaagagtagaaataattattttcccttttttccaaaagagtgtttggaatagatatctttgtctgtgggccaatggctgcacactcagtagtgcaatgcagaggctattagagcagcacgcatgagctgagttaggaagataaagttacttaaaaagcaaatggaaatagttgactatggagaaagagaacattgtctacaaaacattaatagcctttacaatttttataaaaccaacctagaacaactttgaagttgaatgattttgcataactggcttattatggaatgaaactttcagaaacaaaatatagagtggagatgaactgtatacttttaagatgatcacgtgtgatttgagatc

SEQ ID NO: 202691 - DNA, 1000 bp, Homo Sapiens
cattgctgagtcttgagtaggtaaacaaagctgcccagaagctcgaactgggtggagcccaccacagctcaaggaggcctgcctgcctctgcagactccacctctggggagcagggcatagctgaacaaaaggcagcagaaacttctgcagacttaaacttccctgtctgacactttgaagagagtagtggttctctcagcacggagtttgagatctgaaaacacacagactgcctcctcaagtgggttcctaacccctgagtagtctaactgagagacacctcccagtaggggccgactgacacctcatacagacaggtgcccctctgagacgaagcttccagaggaaggatcaggcagcaacatttgctgtactgcaatatttgctgttcggcagcctccaatggagataccctggcaaacagggtctgcagtgaacctccagcaaactccaacagacctgcaggttagggtcctcagtgttagaaggcaaactaacaaacagaaaggacatccacaccaaaaccccatctatatgtcaccatcaccaaagaccaaaggtagataaaaccacaaagatgcggagacaccagagcagaaaagctgaaaattctaaaaatcagagtgcctcttctccaccaaaggaacgcagcttctcgccagcaatggaacacagctggatggagaatgactttgacaaatagacagaagtaggcttcagacgatcggtaataacaaacttctccaaactaaaggaggatgttcgaagaaaagaagctaaaaaccttgagaaaagattggacgagtggctaactagaataaacagtgtagagaagaccttaaatgacctgatggagctgaaaaccatggcatgagaactacgtgacacatacacaagcttcagcagccgactcaatcaagtggaagaaagggtatcagtgatggaagagcaaatgaatgaaatgaagcaagaagagaagtttagaggaaaaaaagtaaa

SEQ ID NO: 202692 - DNA, 1000 bp, Homo Sapiens
acagcacaagatcccacagggtgagggctcagtcccacaagacagtcaccacttttttttttttttttttgaggcagggtctggctctgttgcccaggctggagtacagtggcatgatcatggctcactgcaacctcgacctcctgggctcaagtgatcctcctagctcagcctcctgagtagctgggaccccaggcatatgccattacacccagctaattttttattttgtacagagggggtcttgccatattgcccaggctggtctcgaattcttagcctcaagtgattctctggcctcagtctcccatagtgttgggctctcaggcatgagccattgcatccagccacctgccaccacttctgatgccagtcacaagccccagctagttctgcctgtgcttctgactggctataaattgagattcttacccccctcaggtttgattagctggagtggctcacaaaactcagggcaacactgacattttctggatgattacaaagggtgttacaaaggcttctgatgaacaccagaggaagagactggtagggcaaggatggaggaggggcattaagcttccttgccctccccaggtgcaccaccctcaggaacctccatgtgtttagctatttggaagcttctccaactctgtcctttcttttttttttttgagactgagtctcactctgtcgaccaggctggagtgcagtggcgtgatctcggctcactgcaacctccacctcctgggttcaagcgattctcctgcctcagcctcccaagtagctgggattacagacatgcaccaccatacctggctaatttttgtatttttagtagtgacggggtttcaccatgttggccaggctgactcctccaactcctgacctcaagcgatccacccaccttggcctcccaaactgctgggattatagacgtgagccaccacgcctggccccccttttgggtttttatggagccttcattggctaagcacaa

SEQ ID NO: 202693 - DNA, 1000 bp, Homo Sapiens
ctgctgggctgtgtctagaatcttccacgctcccgacccaggagaagcagccacactgaggcatccatctggatctctgcttgggcaggattgagactgcgggtgagtcatgagggtctcgtctgttcatcgtggagaagcgccttctgtacatgtgccttgcgtggtggtggtttttgttttaaacctcatatttgccttatgaatgcaatgcaatcatgtcgattgttcttctgaaaattttcaaacaactctgaccgctcagagttagcaacatttggaactgttattggtgaatctcgactttttctttggtgaacgttactttttgcagaatgttttaagtatagtgcgaaagttctagcgcagttgcagaagtgtgtaaattcccagggacatttctctattttttcttcattctgctggtgattttgtttctcccaaactgccttgcacgagcaaatttaaatggaatctcactgggaatgaaatgactgccctgctaatcctgataatgctgaattctagatataaattatttggtcggggcggtggctcacatctgtagtcccagcactttgggaggccgaggcgggcggatcacctgaggtcaggagtttgagaccagcctggtcaacatggtgaaaccccgtctctactaaaaatacaaaaattagccgggcgtggtggcgggcacctgtagtcccagctactcaggaggctgaggcaggagaattgcttgaacccgggaggcggaggttgcagtgagcctagatcactccactgcactccagcctgggcaacagagcgagactctgtctaaaaaaataaaataaaataaaataaattattcatgtcattgctgcaatcttccacttcactttgctgctgaaaataagtgacaacccttaagtcatttatgggaacctttatgatcagtgcacttcttttagaaagaaaatgtgaagattccacggagtcttctgcttatattgagatc

SEQ ID NO: 202694 - DNA, 1000 bp, Homo Sapiens
gcgcgcgagcaagatggccaccaccaagcgcgtcttgtacgtgggtgagcaggaggggttgctaggcggagtctgagtgaacgcgacccccaagggtcggggcgtggggtgggacgcatctctgaaccaggaggacggcgagctgctgtcaaggccgggtctctggcggtagtgctggcgatagctctggctgtgcttaaactccttccaaggtttcccactgtcctcaggaaaaagtgcagacttcttagcagtacgcacttctccagcttctttgctttgcttcccgattcgctgggtctcccgaaaaatgacccacttgcccccaaggttcaggttatttcacacctttgggcctctgcttttgcgactcccttgcagtgaacagccttgccacacacctcaggtgcgtgaacccgagacggaatgattattctgacttcctagcccgctgagctccagcgggccccgaggagcggtaaaggagtattatggcccttcggatcctctcgttcatttgttttacaaacattcagtgcagcgacggctcagccccagcccctgccataaaggaaggagttcccagactagccagaaaaaaagtggaattacctcagtagcacacttttgataagcgctgtagtgaggatggatcatgataatatgggcctggctgcgggacaaatgacccatccatctggagaagcgagggcaaattctggatgcggcgatgccagagctgatgagcaggagttagctacgtaaccgaagcagaggcaaggccgttcactgcaagggagtcgcaaaggtgtgaaatagcctgacacttgggggcaagtgggtcattattcgggagacccaggaaattaggaagcaaagcaaaaaagctggagaggtgggtactgctaaggagtttgcactttatcctgaggacagtgggaagcctttgaaggagtgtaagcgaaaagttacgggttcaaatttgcattttcctaagatc

SEQ ID NO: 202695 - DNA, 1000 bp, Homo Sapiens
ccttggatgacaggcctgggagctgaggttctttggggctgccagcacttggggatcacatggacataagaggggagtgtggccgggcacagtggctcatgcctgtagtcccagtattttgggaggctgaggtggatggatcacctgaggtcgagagttcgagaccagcctgaccaacatggagaagccctgcctctactaaaaatacaaagttagctgggcgtggtggtgcatgcctgtaatcccagctactcgggaggctgaggcaggagaatcgcttgaacctgggaggcggaggttgcagtgagccgagatcccgccattgcactccaacccgggcaataagagcaaaactccatctcaaaaaaacaaaaaaaaaaaaaaagaaaaaaaatgcggagagtagaatacagaggggagaggaggggctgcaggggcatgaaggtctggctaggagccgggtgcggtggctcatgcctgtaatcccagcactttgggaggtggaggagggcagatcacttgaggtcaggagctcgagaccagcctggccaacatggtgaaaccccatctctactaaaaaaaaaaaaaaaatacaaaaattcgccaggtgtggtggcatgcgcttgtattctcagctactccagaggctgaggcacgagaatcgcttgaactcaggaggcagaagttgcagtgagtggagatcatgccactgcactccagcctgggcaacagagtgaaactccatctcaaaaaaaataaaaaaaacaaaaaacaaaaaatgtctggctggggaggtgacagtggtgagatgaaagtggcctgtttcccttccatctgcagtcacgtgacagggaaagtgcatttggcacagctttcagaaatgttgcagttttgccacattctgttttttgtttgtttgtttttgtttccttttttttttttaacttttttgagatggagtcttgctctgtcacccaagctggagtgtagtggtgcgatc

SEQ ID NO: 202696 - DNA, 1000 bp, Homo Sapiens
agaagaattaatagggaaattagaaaataatttgaactgagtaatggaagaaaatatacagatttataggatataactaatacagttctttgagggaaatgtatagctttacatgactatattagaaaagaagaaggtataaaatcagtgacgtctgtttcctccttaacaacctaaataaaggaacaaattagatacaaacctaaataaaggaacaaattagatacaaagtaactagaaggaaggaaatggtaaatacagttatgcatggttccttgacagtgccgacacattctgagaaatggtgttaggtgattttgtcattgtgcaaacatcataggatgtacttacgtaaacctagagggtagagcctgcctcacacctaggctccatggtatagcctgttgcttctaggctacaaacctgtatggcacattactgtactgaataccattggcaattgtaacacaacggtatatcaaacatagaaaaaacagtaaaaatataatattacaatcttaaggggccagtcatatatacagtctgttgctgatcgaaatgtcattatgttacacatgactgtatatgagcagaaatcaataaaggacaaataatagagaaaatcagcaaagctagaagttgattctctgaaaagattgataaaattgatcaagacaaaaaaaaaagaaaacacagactaccagtattaaaatgaaagaagcatcatgataacgtacgctacagaggttaaaaatacaatgttgaattttatcagatactaaaggaagaaataagacgaattctagacaaactcagaaaatagaggaggagggaacacttcccagctcattttttgaggccaccataattctgatacccagtcaagggcactacaaaaaaaagtacagacttgtatccctcatgaatattaacacagcagccctgaaaatattaagacagcaaagccagcaatatgtataaaagatggggtattaggatc

SEQ ID NO: 202697 - DNA, 1000 bp, Homo Sapiens
tgagtcaattactaccatactgattgctgaatttaccctcaccttttgtaagaaattaaactaatccctgtttgacacacctaaggaacacagatttttagagtaagaggaggaccttgaagcacatccaattcagattgatgtgcaaaatgagcattacagtatgcaacatagatgacagtggtcaggtccccagacaggcctccaaacctctgcctggaccacactaatcgtaccctaatctgcagtaatatgaatagctgccactgagcaaactctgtgtgcttggaaaagtgctaagttttgggtttgtctgtttaaaccactacatctgctttttttccttcatgccgcttttcacaatggtaataccatttcactaatgtgcttatttgttcactgtccacctcttcactggattgtaaactctttgagggcaaaaatcatgactgttttgctcattgctgtatccccaatcccttctccatagaccagaactcatcaagtatttgttaaattaatgaatatagcttttgattcttggagttctctccattttaacactaagggaaactgatagtgaataaggcatttcctcaaagctggtaaatgtcagagccaaggttcagacccagctccatttgaccacagaggccatgattattctactaagcttcctggccacccaattagtttgaaaataatctattaattaagcaatttcaaagtaatagcatgaattacatcccattcctgcttcctccctctgaggctagtaaaatgtgagtttcaaacctgagttttaattttctacaaaatgatactaatgctacctctgggcccttatgttcttataatgttttacatatgtatttatttacaaacactcactctttctttttttcctctcaacatctattttaagcttggggtacatgtgcaggatgcgcaggctttttacacaggtaaacgtgtgccatggtggtttgctgcaaagatc

SEQ ID NO: 202698 - DNA, 1000 bp, Homo Sapiens
cagataagaaggtaagaatatgatagctcttcttaaacatgaatgaaatatggcattaaaaataggcattctcaatctttttggagatggtacacccagttggttgatttctcatctctgtctcatgcctagcacttaactgcttcttagaacagctttctgatatttttcaagttaattttgttttgatagtactcttgatataataatatttttcagtatttattataattgttgaatatattctaaatagtttacaagattaaacctggatgcaatcagcccatgtctgtaccaatgctttccttatttaccaatgcttatttagtttaaggatctcagagacttctttagcctcagcactttgaattgtgagtattctgctcctttattagcaaaattatttcggcttgtatttcaagtgaagcgctgttctgtctttagaacatttatgccatactgcagagctttccttttcctttaaaatctggtggtactattttgatttttaacagcaatgataaattcatattattttttaaggccctaaaaataatatttgtggtattttcttgattctaagctacctcaatcatttaatggaaactttttggcaaccatacttctcaaatatatctcctaatttcagaaaagttaaattgtgggggaaaactatatcttatgagaaatacaggatagctactgacatagaaaaagttccatacatatatatatatatatatatatatatatatacacacacacacacacacatatatacacacatacatgctttgtcacccaggctggagtgcgatggcacgatcttggctcattgcaacctctgcctcccgggttcaagcgattctcctgcttcggtctcctgagtagctgggattacaggcgcgcatcaccacgccaggctaatttttatatttttagtagagacggggtttcaccatgttggtcagtctggtctcgaactcttgaccttatgatc

SEQ ID NO: 202699 - DNA, 1000 bp, Homo Sapiens
gttacattgtttaccccatatttgaaaaggctgagtaagttttggggggctcaatccatgatataaatttaatattttgcttcgttattgactttttctagaccttgtctagtgataagaattttccatctctaagactgaaaaaacctttcaacaggcttataaatctgaatctttaattaggcagtagttataataaattgtggggctaatgaactattctctaaaagcaatcatttctctcaactgttgatggtaaatagatttaatcttaaatgtcaactatgatctggaagaggctaccaggaagggtaaataaaggattctgagacttttatcagctcaaagaaacctttgctcaagtaactaggtctgccaagagttcagaaaatagaaccactatcatttcaagttcactgtagaaatctttttattcctcaataagaagaatcagcaacactcatactctggtagctacttctggatctctacctgaatctccataggtaccacatattagcatgtttaaagcttgaaatcacctttcctcccaaatctgctactcttccattgttcaccatctcactcagtggcaccaccatctccgtagctatccaagccagaaatccaagcctgaccattttcttcacaacccccatttaatctgccctaattctgctgtttctcccattttccaaatccagtccttccagtattttcatactacctctgaggtcctgtagtttccaatcttatataattttcctggataaatgtaaaagataaagctgacaaaccattcacctcccctcctttatctttctccacccatctccatctgacatatatataggattgctgtctatgttatctaacaagaatgttctatgagagcacagacttggttttgatacactgttgtatatcagtgcatggcatgtagaaggtactcaatcaaaatttgttggactaaatgaacaaggtaggtagggcgtggatc

SEQ ID NO: 202700 - DNA, 1000 bp, Homo Sapiens
aatggctgctgagactatgtttcctctctcaattctctgatctatttgctttcttgtcattccttgttttttgtgtgtattccttgacttacctcttctcctgtcttcattaattaggttaattttggggccccatggtgtttcacgtaaaaagatttggctgggcgtgatggctcatgcctataatcccagcactttgggaggccatagtggaggatctcttgagcccaggagttccagaccagcctgggcaacatagcaagactctatctacaaaaaataaaaaaaaattagccgggcctggtggcatgtgcctgtggtcctagctactcaggaggctgaggtaggaggatcacttgagcctgggaggtcgaggctgcagtgagccatgaacatgctactgcattccagcctgggcaacagagtgagaccctggctcaaaaacaaaaacaaaaactagtttgttttagtattcattaattacgtatatgagcactggtagtctagtgtttgttcttgtatacagtgttttcttaaatgagatgatgctatttaattctgttacttgttttttcaactaatggatcttttaaagttttttatttaaattttttgtgggtacatattaggtacatatacttatggggtacatgagatgtttttataaaggctcagctaatgtatcttgaatatcatgtattcataaagatgactgaaatagtttctggaacaaagtctgatagaaaaaatactcaattcctaatttaagtgttagagactttaatgtaagctatctaatctgaactagtttcattatttgtgtgtgggtacatgttatgtgctccgtaaggcatctttcaatttgaaaatttcataattgtaatttcactgcctttataaattgctttttttttggaggcagggtctctgtcacccaggctggagagcagtggcacagtcatagctcactgcagcctcgaacacctgggctgaagtgatc

SEQ ID NO: 202701 - DNA, 1000 bp, Homo Sapiens
attcacagagcacctggtagtcccttcttgctacatcccaggcactgtgctaggggctggtgagtcagagatcatggtccctgctatctgagggtccactccacagaagagacaggcatattatgcaatgggtagagaactgtctgatgtatactctgatgggagactgtgggaactcctaggaaaagacctgacccctttgacaggcaggatgcacatgtgtggtgtatgtgtgcgtgtgtgtgtgtgtgtgtgtgtgtgttggatgcaggatggagtaagttcacagggaggaggaagcttgattggggttatgtctgtatcaccttgaatagtgatgggtctccgggagtgtgaactaactgaattgatgtttagatgctgttctctagtgtcatgttcatggcttaaagttttgtctctgtttctcagaaactctcagcgtaggcatcgggaaccttcgtgccaaggagccatgctgccccgatgggaactggcactttacctacttgcctcactaggcttccacttctattccttctatgaagtttacaaagtctccagaggtaaggccccaagcttttcagacctcctatcaaacaaggaaactcctgtcaaaaaaaggagcagaggtggaagattcaagaagatgatccaatagtgtcaagatgatgtgggccttgatttgcttccccatgtcttggatagtttgaatcagtgacctgagtccattgagttttctaccctaaacctaggtcttttaggtgatgctgtggcttgtcttctataattggtgggtttgattcaaaagctattgaaggccgtggaggggatttgcgttcagaattcaaagtaaactcttaaatttctctttcatcattactcctctgagacatattagatctgggttcgttttgtcttcttctgtcatttttagtgttgcctttgtctgagtgttggagataaatcatcatcaggtcacattccagcccaaaggaag

SEQ ID NO: 202702 - DNA, 1000 bp, Homo Sapiens
ggccaggggggtttggaaagatgatctcttctgcccagccctttcatttacagatgaaacaatgcagccagatgggcagcttgacctggctgaggcattcaaggtggctgggactagactcaggtctcctggctccagatcccacatcatcctctccacactcccacccctcccagcagctccctgctccacttttagtttccttgcatctcacttactgttgctgcctctcctgcagggctgatgcgtgtatctgtgactgccatgtgggagtcctttcacctactgctcctgccaccttccttggttgccagtatctgattattctatttgccaccccccttgcctcctgggagctaatagcaacagctggaactgaggggaaggctcacaggctttggctaggcagcctggaatccactctcagcccttcacttaggagctgtgcgaccttgggcaagtccttcaacctttctgagccctggtttctcatctgggagataagatgattcggacttgataacctccagtgaccttgcagccctgcacaggtctgtggctggtgattttcatgaaagggagcaagagccacactgacctgttgttggaagctgttgggaagggcagatgacatggactggtgggaaagaccctgtgttaggaggctcaggcatgcatttccagctctgccttcaccagagaacagttgccttggctgtgggtgctggcgggcagttggggcaaggcaccaccctccttgttgcttctctgccacttcctttgcaccaatgctgggggcacagacattgctcttcctttttggtgaccatccagggtagagaagttgctggtgagtgtgtgagcagcaggcttctccagctgaccagcgtgttgcagggcaggagtgatagcccggcacaggcaaatgccaaatcctgtgtcacgtaagaggaactccagctctgttattgggcctgtgagatcctatgcacagtagatc

SEQ ID NO: 202703 - DNA, 1000 bp, Homo Sapiens
gagtaggggttgaaaagccctttgggctcagcaatgccttgggtcagcactaatgactgaggcagcatgattttggtggaatttctgtagcggaaggaagatctgccttagttaaggaggcaggggtggtggtgagaaaaatcatggtagtgaggatagataccttttaaagcatccttgaccatgagaggcaacagctaggggagctgataggcagaagaagggattttactttactttttgagacagggttttgctctgtcaccgaggctggagtgcagtggcatgatcatagctcactgcagctcgaacttctgggttaaactgattctctggcctcagcctcctgagcagctgggactacatgtatgcaccacggtgactggcttttttttttttttttttgagatggagtctcactctgtcacccaggctggagtgcagtgctacgatcttggctcactgcaagctctgcctcccgggttcaagccattctcctgcctcagcctcccaagtagctgggactacaggtgcctgccatgatgcctggctaatttttttgtatttttttagtagagatggggtttcaccatgttagccaggacggtcttgatctcctgaccttgtgatccacctgcctcggcctcccaaagtgtgtcagccaccgcgcctcgcccgcctggcaatttttaaaaaattattattagagaaagcgtctcactatgttacccaggttggtcttgaatttctggcctcaagcaatcttcctgctttagcttgttctcgcactgctataaagaaatacctgagactgggtaatttatgaagaaaagaggtttaattggcccatggttctgcaggctatacaggaagcatagtggcctctgcttctgagaagacctcaggaaacttacaatcatgacagaaggcaagcacgtcttacatggctggagcgggaggaagtggagggaggtactacacacctttaaacaaccagatc

SEQ ID NO: 202704 - DNA, 1000 bp, Homo Sapiens
ctgattttttttttaaagaacgaaaatgagcaaaggaaacacaacagagtatagtaaaaatagaaaattcagaaaagataatacaaaataatataacagggactaaacaaatccattgtatcaataaatgcaaatgagcttaaaagacctattagaagaaaacaaaaataaatgattgataagtggattaaaataaatggattaaacacacaactcaaaaaagaaaagaatggtgaagcaaattgaaaaaatacagaaggatgaaattgctaaatatgaaaacaggaaatattgatcagaaaacagaaaagtctacataataaaaagtatgctaatcaagcaattaaaaattaattctttgaaaaatatcaaagctatagaaaacaattatatagcataaacaaataagaaatgacaagcgggtgggatgcagtggctcatgcctataatcccagcactttgggaggcgaaggtgaggggactgcttgatctcaggagttcaaggccaacctaggcaacataatgagaccctgtctctacaaaacaaattaaaaattagctgggcatggtagcacatgcctctagtcccagctacttgggagactgaggcgggaggattgcttgagcccaggaggttgaggctgcagtgagttgtgaccgcaccattgcacagcctaggcaacagagtgagatcttgtttcaaaaacaaatcaacaacaacaacaacaataaaaaccaaataaatgacaagtgagaaataactattgaaaggagtaaatacaaagtaataagggttgggtgcagtggctcatgcctatagtcctggcactttgggaggctgaggtgggtaaatcggttgagcttaggagttcaagaccagcctgggcaacgtgtgaaaaccctgtctctacacaaatacaacaacaacaaaaaaattagctgggcctggttgcacggtgcctgtagtctcagctactcaggaggctgatgtgggaggatc

SEQ ID NO: 202705 - DNA, 1000 bp, Homo Sapiens
taacaattaatttccccagagttattatttattgttttggcaacatttctctgaaaagccttaatactcacctggcttcctgatggttgaggagaaccatgggttgagaagagaaattagttttacctgtttattcaacaatcatgaattgagcacctgtgtgtgccaggcactgcactggagcaagatacacccctgccttcagagagtccccagtttggtggggggcaagatagggaagggagcaggcataacaatacagtctaatacctatgatagaggggacaatgtagggggctgtgggagccaggggtggcacatagccaagattgaaggagtcagggaaggctacaagaggaagagtccttaatgatgacctagagctaacaagataaataaaaaatagggaaaggaaatactgtgagaagaaggaccagtatcttcaaagactcttagaagagaaagagcatccataaaattctggtgagatagtgtagtactgagaactttgtcactgctggtgggagtgtaaatttgtatagccatttgggtaaacagttggacgctatgtagtaaatttggagatatgcaagcccttcaacccagcaattccatttatgtctagagatacttctgtatgtatacaacattaggagacatatacataataatcagagcagcatggtctgtaataggcaatgactggaaacaaccaaaaacctatcaaaggcagaatgagtaattgtggtgtaatcatacaacagaatactatacagtagtgaaaatgaatgaaccacagtacacttcacaacatggataatttttatattgacacaaatacatacaacatgacttcatttatattaaattcaaagcagataaagctgaaatattgtcctgggatatttactaaggtggtagatatataaaagaaagcaacaaaatggttgaccatagtgttttatttcagggggaggaagggacatgattggggtggatc

SEQ ID NO: 202706 - DNA, 1000 bp, Homo Sapiens
atgggagggctaagtgaaacatgtataataaagtgctctgtaaaaaggaagacaaagtagaaatgtgaaggttcactacgactgtcatctttattattttttttttcttttactgtcagatgagggaatgggactctgttaggtttctatgcatgaatagggagccctggagggtacttccgctgtgagggcctgtgtcaggagactgtgggaattggctagatgggccccattagtgaaactccagggaacaactgaagagggcagcaaagttcaaagccagagaggcagcccaaggggggctgtggttgctgaaaggtgggggctctagtgagattctaggagggaccttcaatggttcaggccagaagctttgagagaggtgaaggtaacagacctttcttatataaatatgtttacacatatataccagaaagtaagcaacaaaacaagacccaaatgtacacaaaagaaataattccactatcataaaacaacgtctggtaacatgttttaaaatatttcctgtttgcttttttctaggcatgtacacatacatacatattttatagaaattggggccaggcacggtggctcacgcctataatcccagcactttgggaggctgacgtggacagatcacttgaggtcaggagttcgagaccagcctggccaacatggtgaaaccctgtctcttctaaaaatacaaaaattaaccaggcgtggtggcggggcacctgtaatcccaattactcgggaggctgaggtgggagaattgcttgaacccaggaggcggaggttgcagtgagccgagatcatgccactgcacttcagcctgggcaatagagcaaaaactccatctcaaaaaaaaaaaaaaagaaaagaaaaaagaacaaaaaacgtattttgtagaaattggatcatttgttacgtaccattttgtctctgcttttttacctgtattgtgttaagaacatgattatatagccacatatagatc

SEQ ID NO: 202707 - DNA, 1000 bp, Homo Sapiens
agggagcctggaccatgaagagttttagaaagtttaaacttccctatatacctctgtaagccagatgttgagtaaggttttagagatatagcgtcgttaccctcaagaaaatttcagcctggaggggaagactgatgagtaacctacagaacatagtgatgggtgtaagtttagggcattatcagagcctagagcagagccatttaactcacacttgggatggggtggggaaggagcagggcagtggtgtgttggaaaatgtttaacaatcagttctctgaaaaaaataaaagctctgatctgtagtgtttgttgacttccatggtgtaaatacttccatcatggccaatttctttttttttttttatttttttttgagatggagtctcgctctgtcgcccaggctggagtgcagtggtgtgatcttggctcactgcaagctccgcctcctgggttcacaccattctcctgcctcagcctcccgagtagctgggactataggtgcctgccaccacgcccagctatttgtttttgtatttttttttttttcagtagagatggggtttcaccatgttagccaggatggtctcgatctcctgacctcgtgatccgcccacctcggcctcccaaagtgctgggattacaggcatgagccactgcgcctggctcatcatggccaatttcaaggtactatcttgatgtcactgaacaaagaattgggaagagatgttcataattggctcttgtaagtcaggccaagctgactctaagcacaccattgaggtagtgaatccttcccaaagtaaatgtctttgtcaattcgggctgtcataacaaagtactatagactggatggcttgtaaacaacaagagtttattcctcacgtttctggagtctaagatcagggtgccagcatggttgggctctggtgagggccctcttcccagggttgcagacttctaacttttcactgtactctcacatggtagaaagagggca

SEQ ID NO: 202708 - DNA, 1000 bp, Homo Sapiens
agccttcagtattagaggaaatggtttttaaaaattcataatgttggtgcatctcttactttgtgctgcttttaactactaagttttcttacaagaaagagagtgcaatccagagatagccaaaaggaggcatgctatgcttgtagtttacaatctaattttacttgcggaacatgcagagatgaaaaaaaacaattactttcaatatgacaaaatgaaacagtgataatcaataagacagtattagaagttgagaaaattttggccccaagtatttttttaggagggtctatttaagagttctcttcctgatgatgggatctagcaaaaattaaagtaagggaattttcttaccactgaaacttattttagatgacttccaggtatccaccattaggttgagatagaaagagtaaggagaaacacagagactaatgaataaaatatcagagatcggattaaaaactaactctagaaaagatcattgtatgttcttactccctcatgagactgagaagaagtaatgagtctagaagcctataagtttttaaagatattgaattgccaaagaagctacgaaggttccgaaaacctgtgatacaatggcaccaaatcctgtgaaatattacatataaacctaataaaatatgtgcatgagctgtacattggaaactataaaagactgatgaaatgaagacctaaagaaatagaaaaatgttttatgttcacggattgaaagactcaatagtcttaatatgttgaaactccctaatcttatccatagattcaatgcattttcaataaaaatcttagcaagatcttttgtagatatcagcaagtcaatttctagaatttatacgggaagcaactaaattagaatagccaaaacaactttgaaaaatatttaagtaggagggctcacatcctgaattcaaaattcactataaatttatagtaatcaagacagtgtgatatttgtgaaagagcgtacgtatggatc

SEQ ID NO: 202709 - DNA, 1000 bp, Homo Sapiens
ttcgaacttgctcctttagctcggagtagttcgatcatctgaagccttctctcaactcgtcagagtcatttgctgtccatctttgttccattgctggtgaggagctgcgttaatctcattacttgttatgtgtcggttcaggttttggatttcttcctggttcaatcttggtaggttgtatgtgtctaaaatccgttcatttcttttagattttcaaatttattggcatattgttactcatattagccactaatgatcatttgcttttctgtgctatcagctgtaatgtctcctttttcatctcttattttatttatttgtgtcttcttttattttcttagtctggatacaggtttgtcaatttcatttaactttgcaaaaacccaagtttttgtttcggtgatcttttgtgttgttttcttcatttttatttcatttatatctgctctgatcttcatttattttcttctaatttggggtttgagatttattcttgcttttgtagttctttaagatgcatcattaagttgtttatttgaaggtttttacatttgatgtagacatttatacctataaacttccctctgagtactgcttttgctgtatcccataggttttagtgtttccattattatttgtttcaataactttttcaacttccttcttaatttctttcttttcatacaggtcattcaggaacataatgtttaatttccacatttttgcatagtttccaaaattcctcttgttattgatttttaatttcattccattgtggtcagagaagatgcttgatattattttagttttttgaatgttttcagacttgttttgtgacctgccatatggtctatccttgagaatgagccctgtgctgaggaaaagaatgtgtgttctacagccattgaataaaatattctgtaaatttctatttggtccatttgatccatagttttgattaagtccaaaatttctttgttaattttctgtctgggagatc

SEQ ID NO: 202710 - DNA, 1000 bp, Homo Sapiens
acaagcattccagttgtgggaaggacatagtcctttctgcaaatgaatacactgcacctggcttatagatcttcagtcaacagatagtccatcccgcagaatttgtttggctctgggtaccctgacaaaatggagttcctggagccacagccctaaggacctgcctcaatggtggtgatcctccccactttcttctaccatgagagtccactgggggcctgttggcttctctgggcatctgttttttgcccctccctacaactgaagagcctccagctcctctgtctaccacccgtccacttcgtcagctcaggtcccctccctgtctctacgaccacagtaacatttcacctggagcttcttcaggtccctcctgaacttattttcagccctttacccgtacatttcttgtatctcctgctagattctaaatttctggagggcaagaaaaacctattatgttgactttccctccctcaactcctgctcccctgtgtgtgttaaatggcccgaccccgttgtcccatgggacttcgcatgcagtccaccagaataggagctgtacctaccacaggagccagtgagtccatcagtcagtcagtcatctcagcaaataattccagttgtctactggctttctggaaacatgactggggactgttgatgcctttgacagttgattcaagcagcaggacctttcacaacagcctcctgtttttgtggatggggaataggcaagggttgggaagcgggaattcgccgctctttcttgtcattctcttcatagcccccaagctactgtggtctattgttttgatagttgctttcccgaaatgttaacaggatggagagtaaaggaggtaaaggaggactctgatgcctcagccatgcgcctgtgtgccgattcccattaagcctgcaccaatttgatttccaagactccagtcaatcctcagagctccaggaggggaggggcagcttttcctggtagctgctgatc

SEQ ID NO: 202711 - DNA, 1000 bp, Homo Sapiens
tcattcacaactcagttcattgtctccccacactgctccatacacactcctccattatgggaaatacttaaaatttgacctatagccatggcatggacaccagtatatagactatgtaaatatctgtatctttaaaagtctaattcacttttattatgtttgtgctctggtctcaatgtacggagagtagatccacagatagacaaagtgaaagtagacacttaaaatttattttctgaagtattaactatagagtgttaatgtgaaatattaacaggtggagtatgtcctgggaacgtgattatgcatgtttactctctcatatttgacaacccatatgagaagagccttactgtatttcagtgggtttgctcacctgaagaggcattgctctgaggaggatggaaggataaggggtgagtgttccctagaatgtcttcaatctgcacataaacacgtcgaaagagagtttacagcaaccatccactttcccactatttctcaaagtaaatattatattaaagatgttgttttggccaggtgcggtggctcacgcctgtaatcccagcactttgggacgccaaggcgggtggaacacgaggtcaggagttcaagaccagcctggccaagatgctgaaaccctgtctctactaaaaaatacaaaaattagctgggcgtggtggtgggcacctgtaattccagctactcaggaggctgaggcagagaattgcttgaacctgggaggcagaagttgcagtgagccgagatcacatcactgcactccagcctgggcgacagagctagactccatctcaaaacaacaacaataacaacaacaaaaagatgtttttccataaatgatgcctctaccatctgaccctatttctcctacataaggcccacagagggcctaaactctggcttgactggggttgtcatgcctggcccttcatatgtgctctcgtgttcctccctcttactccaccctctgaggatgatc

SEQ ID NO: 202712 - DNA, 1000 bp, Homo Sapiens
agtcggaggttgcagtgagccgagatcgcgccactgtactccagctggtgacagagtgagactccgtctcaaaaaaaaaaaatgtcttccacataataaaattttcagtatgagtggtatatgtttaagaaacatcttacagtataattaatataaactttataattctgaatacaagcaaggatgggtctctttggtggttaaactgttctatacagcaatggcatgtattgaacattttatgtaaaatatatatatttctacattctaaatgatacgggtgtgtgtttttgtaggtttgcctgaatccatcattgcagctgcatgttcaagaagtggccggagagttctgcatgttgattcgtaagtttatcaacgatagcatttaatatttcctaaatatctctatacaggattaaaatttacataaacacatatatgtctgtacgtatgtacatgtatgtgtatatcatacataaacttaagttagaagaaagatcggagttgtttaattttaaccactaatatgtgaaatatatagcatacaagttttactattttgtgaaatagtgatctttgagaataaaccaaatgcatcattttatttttctcatgagtgattttgtttaaaataacaagtaattctccaagaggcttggaaacctcatgcctgccccttttcctacatatgtgtgtgggtatatacaacctatatatgctattgtattttaggcttcatatttgatggttgtaaaagtcagccaatagattttgagcattattttcttaaacttcatcaaaatttaaacttaggaagtcttaactaggaaaaatatctacaattatgtttttccctttttttcttaaatgtgatgataagcaggaggttgatggaaaactcaagtttaagataaagcataggttaaatctctccatttctatatccgcccaaaacaaacccctaatctcccacctattaagtgcttttgactgttagatc

SEQ ID NO: 202713 - DNA, 1000 bp, Homo Sapiens
tttctgctgctaagagaagacacgataagcgtggaaagagtatgaccaaaccagttgtgtggggcacatgaattagttcccctgagcctccaattctggtgataataaatcccacatcccacagcagatgataatagatatagagtaatacaaaactgttaaaactattaagatatctgtgcaagggaccttgcacagatgatgcatgcaacatagtacatttatgcattctcctattatcaggtggcttttctgaggagcaacacaatggggcctaagtaattggttaggtgcagatgttgtattaataaacacattcatataatgtgggaggtattcagaaaagatcagcgaaagtgactcgttcaccttccccatccctattatccttctcattctaatgtagtcaaaaggcactgcatttggagtcacagagccctgggtttaactctcagctgtcccttttaagctgcataatcttaggcattaactcaatttctctgggctttagtttcttcatccataacataagggtaacaacatcaactacttgattcaaacagttgttggaggaatcagatgagatatgtacgaaaatgtttgtagttaacaaactgccatgcagacacgaagttgcctttactgccacaaatgctctttttgcagaactataaaccacaattgtccttggtcatttttacctgtgtccatttcccaggccccggtaagccttggcttggtcttgcatgcgattcagactctgcgcgacagataaatattgttcatagtatttgatagcttcctcatagtcacccagggcttcgtagcaatcccccaggttgccataggcccggcccctgtcgagcacagactcatttccacttagctgctgcagcatggccaattgctgctcaaagtagccaatggcttcttccatcacattcatgttcatctttgtgatgcccatgttgccatagacctgggcttccagactcggatc

SEQ ID NO: 202714 - DNA, 1000 bp, Homo Sapiens
ttggagctctgtacttgcttcttttcccttgctgcttttaggatcctctctttattcttgacttttgatcagtttattatatgccttgggggagtcttatttgagtcacatctgtttgatgctctctcatcttcctgtacctggatatttatctctttctcaaattttggaaagttttttttttttttaataaactttctacccctattcttgctcaactccttgaacaccaataattcttagatttgtttttttcaggtaattttctgtatcttatagacagtctttgttggttttcattcttttctcttttttgtcctctgattatgtattttcaaatagcctgtctttgagctcactgattctttcctctgcttgatccattctgctcttgagggcctccagtgaatttttcagtttatttgctacattttcagtagcaaatgtatttgtcagttccaagatagccacttgattttttaaattgttatttcaattattttgttaaatttatctgataaatttatgaattgctcttttgtgttatcttaaagatcactgagtagccgggcgcgatggcttacacctgtaatcacaacactttgggaggccaaggcgggcagatcatgaggtcaggagtttgagaccagcctggccaacatggtgaaaccccgtctctactaaagatacaaaaaattagccgggtgtggtggtacgtgcctgtaatcccagctactcaggaggctgaggcaggagaaccacttgaacctgggaggcagaggttgcagtgagctgagatcatgccattgtacttcagcctgggtgacagggcgagactctgtctcagaaataaaaaaaaaagatcactgagtttccttaaaactgctattttgaattcttgatcatagagctcacatattgccgtcttattagggtcagtcactggctccttgctttatcaatttgagaggaccatagttccatgtttcctgatgtttct

SEQ ID NO: 202715 - DNA, 1000 bp, Homo Sapiens
taaaggaatggcccatttctcattgtagtttgagaaatacatgtatgaagagataggggtcttgggcttcccagtgtcactttgaacacctgaataacatttaactcctgagaccttctcggtgtagaggccactgcttccccctgctggagatggcatttcattgaagggcctctcgtggctttccctgcccccggctgtctggcctgaagaaggagaaagaaccaaactgaactatgaaaagttaccactctgaggagacctctcttaattaacacttggggccatgtttgctgttgttgagaaggagtgttctcaaagatgagctggaatggaattgtatttagaaaggcccctgcaaagtatatagatggatgactctagttcatgacatacaaatcccataaggccaacgaccactcttctggaacaccaagagcagctctgagatcatgctggccctacgcgaattgagtttctgtggcctaattggatttggagaacgccttccctggccccttttcctcagacagatctgctctgataggaaccttttcaagaaagttactgttgtttcaatgccactccttacctgtatagaacatttccaatacattcgctcattgaacttaatccttgcaactgtgactggggggtagatggctctgtttgcatacgaagaaataaaggctccaggaggttaaatcgggcaactttttagaactaaatcagtctctgtaaggcctacattgctaagataccatttcagctctgaaaatctgcttcagggaagtgagtggatgaggccttcctgcctcagctactctgcccgtctgtacatcttttgtgtctgcctccgtaccttattcagttattttcacactaaagtaagtagaattaagactgtagttcagatgctttttctttttctgttggaaactgaacacactacagacagtgaaaaaaggtacatattccattttctcattgcctgaagatc

SEQ ID NO: 202716 - DNA, 1000 bp, Homo Sapiens
tcatggtggtggtagaagcacaagagaggaagtattcaggcatcttaaggtctaggcttggacttgtatgccatcattttttatttttttttattgtctaaaacaagtcacatgaccatctccagggtcagaggagaagggcactacaaagtcacatggtagaatgaaaagggcaggggaaaaagaccacaccacttgatgggagttgcagtcacatggcaaagatagtggacatagaaaggggtggagaattgaggccattaatgtaatcagtctagcactgggagacattttacaatatgcctcagttgaccccactgtgtacagggtccatgatgctctattccatgttgatttctgcttaggaaggatctttattgtgagattcctttatacttgattgaaatattataattctttcctcatcatgatccaaggctgacatcccaccccagaggaccaattcttcctccctttacacaccagctcgatgggaacacaaagttttagaggtggaaggggcctcacaatctgctttattttacagatggagaacctaaagtccagaggattttagcaacttgtctaatgtcatccagttactaggaagggatccaagactgggatccccattgtgctgaccatcaagctcaggtctctccactgttccctcccatctaatcttttctgcccagactcatcttacaggaggaaggggtgcccctctacatagtgcagtttgaaggaatattggacagaaccccgctgcctgtcactccattatctttttattcctttaacttggacagctttggttctttaagtcatttattataagacaatatactttaatgagtactctagcagggaatgggaataatggtgtatgtgtctgataaaagagtttgagattattggcaaaatagaagttaagggcaaaaaaagcttctagactgaagtgcttcgtgaactttaaagtatgcccagatctcctaggatc

SEQ ID NO: 202717 - DNA, 1000 bp, Homo Sapiens
ctcctgaggtctggagatcgagaccatcctgaccaatatggagaaaccccgtctctacaaaaaatataaaattatttgggtgtggtggcgcatgcggtaaatctcagctacttgggaggctgaggcaggagaatcgcttgaacccgggaggcggaggttgcagtgagctgagatcacgccgttgcactccagcctgggcaacaagagcgagaaactctgtcttaaaaaaaaaaaaaaaaaaaaaaaaaaaaaaaaacaagaaaaaagaaagaaatccgaggctggacgatcacttgaggccagaagttcaagaccagcctgggctacatagtgagagactccccgccaccccaccggtctgtacaaaaagttttaaaaattagccgggtgtggtggcatgcaccggtagtcccagctactcaggcagctaagtcaggagaatcacttgagccctggagttggaggctgcagtgagctatgatcacaccactgcactccaggcttggccacagagtgaaactctggttaaaaaaaaaaaaaaggaaataatcattcctgttcttgttataaatccaaggtagtgtcctgttccctctctgttccttaacacaagaaacaaacacacacacccccacacaggaaagctgccagatgcttgttttgttttctgttatttaggttgcagtcctacagggcaagaaccttttgttccttgtaccacagttgctgctgagtaaatgtcatattgggaagataccgcagtcactcctcgtgttttccagacactgttcaccaagcaggcaccatttggcccccaggggtgaggccaggatgcaaagctaaagactcagtcgattagtaacaaagccacttggctgctgggtccagacaaccacatggaagaccaacccattcattcattcattcagcaaatgtgtattgagcacctagtgtgtgccaggtgctgtggacatagtggtgaagaagtccaatatggatc

SEQ ID NO: 202718 - DNA, 1000 bp, Homo Sapiens
cttgctcttgaagccccagacccaaggtccccctcttttgtcccataaatactcagggccttggggctagcccctagaaccctggttcatttttgccttagacttttgcaaccctccatgccacggattagatgccttcagcatcagtgccaaaacccaaggtccagtccttcctttctgtttctttgtatttctcccgcattatggcatggtagtgagagcgaggtaggacatggggctgatgtggtctcatggttggatgggttttggtgcatgagctgaggctgggcgtgagtcccagcactctcacttactaactccatgcccttagtggaaatcgctaaaccttcctcaacttcactttcctcatgggtaaaactaaggcaagaacccctgtcttagggctctggcatgtgagtgaaggacctgggaccactcctagcaccacaaattatagctatgctgtgaccatcccattttagagatgagaagtcaggcccaggatagccagttgccagtggcaaggccaggccatctgagtcctaccaggctactcaagggaaggtgaagggggcaaaggaaacacaaacaacctaactaactgaagaccccaaggcttctcaagagctcctatcagagctaaagcccaggcctagggaagtcatgagtcaagccaatctagatggcaagctgaggattcaggatcccatgtggtgagggcagagaccaggctgcctggcctagatccatcattgacttggccatgcattgctagccagggacgttgctctggagccttgggtccattccaatgaagggagagaggagtttggggccctgaccagatgctctagtggatgggatgtgggcagcagcaaggagaagaccttcttcctttccccacagactatataccttttaccctcctgcccagctggtatggggtaaggaggtgcacccagactagagagctgatgggcaatactcatcaaattagatc

SEQ ID NO: 202719 - DNA, 1000 bp, Homo Sapiens
cattgtctcatatcaactggggacaatattcccatgactgatcgttgtatcaaaaagaatgtgtgttggctgggcacggtggctcatacctgtaatcccagcactttgggaggccaaggcaggtggattatttgaggttaggagttcgagaccagcctggccaacatggtgaaactctgtctgtactaaaaatacaaaaattagccgggcggtagtggtgcacctgtaatcccagttactcgggaggctgaggcaggagaatcacttgagcctgggaggcagaggttgcggtgagccaagagcacaccactaccctccaggataggcaggagagtgagaccctgtctcaaaaaataaaacaaaacaaaacaaacaacaacaacaaaaacacacacacaaaaaagaatgcatgatgataaaagtgtttgtaaatgcaaatctccacatacaaatagatattgttattatggaccagtgttattgcactgtggctggtgacactcaacaccagtcctttggaagatgcctcatttaagtgcatcagtgaactcttgctaagtagagagtatcctccaaacttagtaacttaaaacaataaatatttattcctttgcatgattctgtgggttggctcagtggttcttgtggtctggattagctcagctggggccagatgatctgggatggcctcatgtgtaagcctcaactggctgtgctgggacttctctccatgtgtctgtcatcacccaggaggctagcctgggcttattcacatggtagtggagggatccccaatagcaggagagggcaggccccagtgctcaattgctttctagtttctgcttacatcacatttgctaatatcccactggccccaagcaaatcacaaggccaagcccagcttcaagaggtagagcaatagactccttgaaatatggggcctggtgcaatggctcatgcctgtaatcctagccctttgggaggccaaggtgggaggatc

SEQ ID NO: 202720 - DNA, 1000 bp, Homo Sapiens
ctgattgaatgaggacccaccttaagctcttcattttaaggtaattatctctttaaaagccctgtttccaaatacagtcacattctgagattttaggagtgtccaatcttttggcttccttgggccacattggaagaagagtaactgtcctgggccacacataaaatatgctaacactgacgataactgatgagcttaaaaaacatcgcaaaaaattctcagaatgttttaaggaagtttatgaattagttttgggccacattcaaagccatcctgggctgcatgtggcccgcgggctgcaggttggacaagcttgctctagagcttaaggcttcaacatgtgaagtttgtgagggtcacagtccagcccagaaaaatctatatatttaatagagcttactgtgtgtcaggccctgttctaggtgtttcacagatttcaactcacttaatccccataacaaccccaggaggtgggtaatatcagcgatcctgtttaacagatgaggatcctgtttaacagaggaggaagcactggctctgggctctttcctgttctataaaagggtgataggttgggcacagtggctcacgcctgtaaccccaacactttgggaggctgaggcaggtggatcacttgaggtcaggagttcgagaccagcctggccaacatggtgaaaccctatctctactaaaaatacaaaaaattagctgggcatggtggtgggcacctgtaatcccagttatgtgggaggctgaggcaggagaatcacttgaacccaggaggcagaggttgcagtgagctgagattgtaccactgcactccagcctaggcaccagagcaagactctgtctcaaagagaaaaaaaaaaaaaaaggcagggggtgataacatgagtgcctacgtcccagggctgctgcgaggatcaatgagcaaatgcatgtaaggggcttagcacagtgcccggcacacagtacagaagtgttcatatacattgtgatc

SEQ ID NO: 202721 - DNA, 1000 bp, Homo Sapiens
ttctttagtctctaccaatgacattgtctcagaacagggggaaaatttaacagcttatatttattattttaaaattttagatgatcactccagagtgattttgcaacccgtagaggatgatccttcctcagattatattaatgccaactatattgatgtaagtatttttatagttaagtatgtctactttattggcttatatatatgaacctttttgcttattacctataaagtgattgctagctttttaaaatataaaagtacaaactgtacacttttccttgttctgcgtcctagtacttactgacattgttgtgctttctttcacacctgactttggtttgggctgtagatttggctgtacagggatgtaagtaccactatatgtaaataacagcaccctattataaatacaaacattcttaattacagttattactaacgctctgttactactagttatttctgcatgcttcacctaattagcttcatacaatatatctctgttcgtttttttgtaattctttcacatgcgtaaagatctattttaccaccttcccttttcttgtgtagaaaaacaggaccatttttagctttgacagtttattatgtactcgagttttatttgttgatgatttctgtttctggcttttattcttacccttccctaaacatatgtgagaagctggatagtatgatgtgtattagtgttactgaaattttactttttacatttgacttctgacgttaaaatgagtagggagactattttgtgatgtgttgtattggcttttaaagtaataaaattactcaggcaaaataattactaaatttcaattgtaaaatacacatatcacacatatatatcgaatcacagaaatgaaaaaggttgctttgatcatatatttcactgttaaattttgattacatacatatctacatggaaattctttatttaaaggaagtaattatcaaacaaaatatagaatattcttaaagg

SEQ ID NO: 202722 - DNA, 1000 bp, Homo Sapiens
ttagtagagacggagtttcaacatattggccaggctgatctcaaactcctgacctcaaatgatccacccacctcggcttcccacagtgttgggaatacaagcatgagccaccgcacccaggcatgtttaactaaataacttataaataactgttgtgttattagatcattgctgtagaaccaaagcaaaattaagtcctaacagtttttagcatcaaataagtggagaattttctgatacaaagtcaagaaaatgaaggaattaaggtggcatgaagggttacataaaactacttagattcctaatgcaatactttgaattattaaatatatttttaacaaaaccatattattactcaaggtcctgatttttataaatgtaaaacaaaaaatttacaaatacatttagaaatttcaggtaattatttttctttggatctgcttttgaattgaagcataattaaaactgtttgcttaaaaatcaaattattcaggttattgatttttccacatttatctaaaatgactatcatgtaacaggagttctattttcactttgattataatagaaaatgctctaaatggaatttactattattagaagaggaaataaaataatctcatataagatagaacataatgataaaaatgagtgtttgaaatagatagctgtatctgctattcagacataccaagtatactaaattatcagtgagtagaaatatactttgtttaagggaggcaataaacagctaagattttacaatcaaaacagatgtaaaaagcaccatccaagttttcactttcaaaaaaatagtggtagctgaggcttattttaagaaaagtcttgatttcttatgaatcataagtatttccataatcagggactgttaacggtctccattagcaagtattatttttgacattttcagatctctgatggtatcagatctggaaatatcttgccttttactgtcacatggacaataaaatgctagatc

SEQ ID NO: 202723 - DNA, 1000 bp, Homo Sapiens
caacagactttttttacggaaatggaaaagccagtcctaaaacccatattgaattacagggaaaccttagtagccaaacaatcttgaaaaagaacaaaattataggactcacacttcccaacttcaaagctacggtattcaaaactgtgtggtaagggataaggatagaaatatagatcaatggaatactacagagtctagaaataaatccatacatctatggtcaattaatttttgacatatgttcaagatcattcaataagggaagaatgatcttttcaataaatggtaatggaacaactagatacccacatgctaaagaattaagtcaaatcccacttcacaccatttacaaaaatttactccaaatagattatagacctaagtgtaagagctagaactcaagacaacataacagtaaaacattgtgactgtggattagacaatggtttcttatatatgacatcaaaagcacaaatggtgaaagaagaaaagataaattggatttcatcaaaatttaaaacttgtgcttcaaaggacaccatcaagaaagtgaatagataactcagagaatggatgaaaatgttatcaaagcatatatctaacaaagaatttattatccagaatatacaaagaattacaactcgacaataaaatgacaacctattttaaaaatgagtaaagggtttaaagagacatttctctaaagaatttaaacaaatagccaataaacacatggaaaatgttcaataacattagtcattaaggaattgcaaatcaaaactacttcatacccattaaggtggctaaaatttaaaaagacagacaataactagttattaaggatgaggagaaattggaacactcattcaagcaaataaagttaatgatttatgacatgacactggtcacatctggactccaggtcctaaaaatgagttgaagaccatacaatcacaatacagaaaaagacttgagaatccatctaatcccattgatc

SEQ ID NO: 202724 - DNA, 1000 bp, Homo Sapiens
tgtaaaaaccacccggagcccacgtggcactcaggtagcatgtgaatgtgctgggtgtcacctccacactcccaccagccatgctgaccagccccctggggcctcaacaagctcagcccgagccccaggtcctttacacggcaggccaggctgcacggcccgctgctgtccactttcagttccagcgtcccctgcagacccttggagaccagcatctgaagggcctctcccgtgaaccttgtcatctgttgattccctttccagcacctgtcctaacttaatcattgcttctatgcatttatttctttacagtctttctctcccttgatctagtgagcccatcattactgatgtcccagttcacaggtgaaaaacaggagagttgaggaaagtgcccaaggcggctgctctgccataaaacagtgattcagcctctggcaaaggaggtgtgtggttccactgtggcgccaagctctggtctgggtgcaggggcacagctgccacttcatgaagcttatgccatctgctctgaggaaaatgagaccccatgccaggaccagttcctctgagtttccccaaatgccatgacggtgagccctgggcccggggaaagggatgtctgttacttttatagcttcattgaaatataactgatatgcaaataaatggacatattcaaagcatacaatttggttcgggcatatatttataccaagaacctctcaccacaatcaagataatgagtatgtccatcacctcaaacgttcccttggggcaggttttttgagggttcccaggtaggataccgctcacctgcagcctgggtaggaacggccagagggtggtaatttcccatatggccactaggaggctctgtggcccctcaaaactgtcccgtcaggaccgctcctaccccttaaggaggtcttaactgcctcgtctcctgatttagcgaatggctctgatattcttcaagttgcaaagccagatccacaggatc

SEQ ID NO: 202725 - DNA, 1000 bp, Homo Sapiens
ctccacagagaaaataactatcataacatttatacagacccacaaagacccagaatagccaaagctattctaggcaaaaataacaaaactggaggaattacatcatctgccttcaaattatactacagagctatagtaaccaaaacagcatgatctggcataagaaatagacatgtagagcaatggaataaaatagataacccagaaacaaatccaatccacacacctgcagtaaactcattcccataaaggtgccaaaaacatacactggggaaaaagacagtttcttcaataaatggtgctgggaaaactggatattcatatgcagaagaataaaactagactcctatcttttgccatatacaaaaatcaaaacaaaatggccttaaacatttagtctataacctcagactattaaactactacaggaaaacactggaaacaacctttaggacattgggctgggcaaaaatttcttgcataataccacacgagcacagacaatcaaagcaaaaaaatgaacaactgggatcatgtcaagctaaaaatcttctgcacgacaaagaaaacaacaaaatgaaaagacaacccatagaaggagcaaatatttgcaaattgcccatctgacaagggattaataaccagaacatataaggagctcaagcaactttatagaaaaaaatctaataatccaattaaaaatgggcaaaagatttgaatagatatttttcagaagacatacaaatggcaaacagacatatgaaaaggtgctcaacatcactgatcctcagagaaatgcaaatcaaaactacaatgaggcattatcttacctcagctaaagtggcttgtatccaaaagataggtaataacaaattctggcgaggatgtggaaaaaggggaaccattgcacactgttggtggaaatgtaaattagtacaaacactatggagaacagtttggaggactgttagaaaactaaaaatataagtaccatatgatc

SEQ ID NO: 202726 - DNA, 1000 bp, Homo Sapiens
aaacacaagtatttcccaaagtagaatgtagactgtgtcacaacccaccaaaagtggaaatttttgcattcaaatttcctggctatgagctcagaccaccgccactaccaaacaaaatctggctagaatggactgcagggagtgaagttgatgctgattttctcaggaagccagggtttaaagttgggcttttcctggttccaattcgttgtctgccattgctccaggaagaatatagctcaattgttcctaattttgaaaaacatcagagctgaccatttgccacaagaagttaattttcagtgaaaagagaggcaaactctttttttttttttttttttttttttttttttgatacggagtctcgctctgtcgcccaggctggagtgcagtggtgggatcttggctcactgcaagctccggagaggcaaactcttacagttatttattgctgcataaaaaaccacctcaaaatgtagcagcttgaaacaatttattattaaactaaaacaagctattaaagctacaccatgtcagctgtggccacacctgtgttcatctgggtgggactagagcctcccagacagcttctgtcaggtatctgcacctgcatgtgctgctgggtgccctcttcctccacatattgactcatcccccagggcctcttcccatggcatcactctaccaggatagcatggatgttcttatagcacagcagcccacttccaggagggccaacacagaaactcccagatctctcaaccactaggcctggaattgacacagtgtcacttctgcttcattctactgatcaaagcaagtcacaggctcgcccagattcagggagcaggaaacagattccacctatcaacaggaagaatgataaaagcctatgtggagaggaggactgtaggcaccatctctaagacaagctaacacagaccttaacagaagagagaacaagataggcctcattattccactgtccatatggaggatc

SEQ ID NO: 202727 - DNA, 1000 bp, Homo Sapiens
aatatcattcaatgtatccatttgtgccagaaacaaaggcaagagtattacttatttctaagcgtcaatattttatgaggccttgcagagcccttaacaactgggaccctacacatatttactctacatcagaagatgagtcaagtgtagacttcgtttattagaaattgtctcaaaactcaaaatgttggttttgcttggggtgtggactcagtgaatgctcttggtgtttgctgaccctgacaacctcagagacatccatgctcaaaataaatctccagattgagcactttattgctttctgatcttttctgattaatagctgatgtcagtccatatatcaagtggggctggtgtttatcacgtggccttgaactgttttgggaacagaagtgtttgctaagtaggatgttatatatgagatagtgtagctttgagactcaaccactgtttacttggtttggtaagactaccatttccttgcctctctcctcctctgcactcacaaggggttcaccagctcctcttaccttcctgggctcgttctcacatttcccttgctgtctgtctgaccggttctggttaaggcactgcctttcttgtttgaagcccagaatctgtgtatataagttattatggcaggttctgccatgtttcctgtcatgaatttcctgctatggtgacctgatgtgtacccctgcacactcttaaacctggaaacccactctgctctttcacgatccctgccagatatttaagccctgccctgaaacccgaggataggcctttcaggtgccaaccacttctaagtctaacccacctcctattcctttctggtgggaaggtgcataaaatggtcaccacatgtgttcttttattctgggtccccacaatgaaatggctgcatttatgaaattcagcctaccctggggacagcttcagggagatactcctccttaagaagatgctttgtagatgactcagctccactcctcagatc

SEQ ID NO: 202728 - DNA, 1000 bp, Homo Sapiens
cctaacaacaacaataatgatccctatgagttcacagtgctactcaaaaaaaatgggaaggagaggaagaaaaagctcttttttttggagacagagtctcactctgttgcccaggctggagtgctgcagtgtaatggcacaatctcagctcactgtaacctccgcctcccaagttcaagtgattctcctgcctcagcgtcccaagtagctgggactataggcacacgccaccacacctggctaatttttgtatttttagtagagacagggtttcgccatgttgaccaggctggtcttgaactcctgacctaggtaatccgttatttatttttttgagacagagtctcgctctgtcacccaggctggagtgcagtggcgcaatctcagctcactgcaacctctgcctcccaggttcaagtgattctcctgcctcagcctcccaagtagctgggattacaggcatgcaccaccacacccggctaatttttgtatttttagtagagatggggttttgccatgttggcctggctggtctcaaactcctgacctcaagtgatctgcccgcctctgcctcccaaagtgcagggattacaggtgtgagccactgtgcctggccaaaaaagctcttctttctggaaaaatcccaggcaataaatatagataggatactacaattataaaatcattattttgtgactatcaatataatattcaggtgagaggcatcaaagggtgagaggctgagaaacagaatagtcacatggtctatcctggagatcatttcttctttacaaagggaacaagacacctttgagacccttgcggagaaatctgggagaggccacttaaccaagtgcccacactcagcatcaccacgaatgggacaaaccaacatgtgtcttgcccaaaccatttagcctgatgaagccgagtcatgaggaaacatacttccagtcagacaagtccagtcagacaaggccactctagaagacaactgatc

SEQ ID NO: 202729 - DNA, 1000 bp, Homo Sapiens
tccaaatgtgttaagtgtgtggccagaaccaagtctgacactacttaaaggaatgcaacaaaatgcagcctcaaacaatgtaaagttcacaatgttcagagtcctgtcaaactacagatcaattacctcataaacataaatgcaaaaattctaaacaaaatttttgcaaatcaagtccaacaacatataaaaagtataaaacaccatggctaagtggggtttatctcaggaacacaaagttggtttaatgtttgaaaatcaatcaaatttaattcactatattaacaaactaaaaagtgaaaaccatgtgatcattgcaatatatgcagaaaaaacatttggtaaatccagtatttattcctgataaacactctcagaaaactaggaatagaaagaaagttcctcaatctgataaagagcatctaaaaacaaacaaagaaacaaacaaacacaacaaaaggcatacaaagaaatagaaagtgtgaccacaaccaatggaaaaatcaatcagtagaaacagaccctgaaatgaagagatgaagaaattagcagaaaaggacattgaaagagatgacataaatatgactcatatattcaagaaggtagagaaaatcatgaatataataatgaaaatgtgatttccaggaacaaaaatatagcatctcaaataaataaaaaaatacagtatattaaataaaaaatacactggagtggataaaaagcaggttagatactataaaataaattattttgaagatatagcaataaaaaaatctaaataaaatacagagagaaaatgagggtggggggaataaacagagcatcagtaacattggaggtaatatcagacaatctaacacgtgtaattggagacccagatagggtgaggagataaaaaatgatatttgaagaaataatggttaagaattttctaaatttgccaggcacagtggctcgtgcccataatcccagtgctttggaaggcagaggtggacagatc

SEQ ID NO: 202730 - DNA, 1000 bp, Homo Sapiens
aattcaattagttgtgatgtggatatgttcaaagtgatggtaaagactgaatttgaacttaatgagacattcatgatttcatagatgactaagttaaaataactgaagggtcattaaacacacaggattgataactaaagcatcttgctgaatgattttctttggctctctttgagaatgggggaacataaattaccatcttttccaagttaagtagatgagagagaatatattcttcatagtttcttcaacaactaagtatacctttatgaattattctaacaattgaatcttttatcctgtgcttcctcaaacacttaatgtaccataatactttgcaagtgatttatgcctggtcacccaggttctgtaaatgtgtttggagtattacatatactattcagtgaactggttaataagctttttcagggcagtgatcagctctttaaatgttttactggggtgcatcagggagaggcataatgggagagaagggcaaggaggccaatattttagtaaaatatgtagagcaacatataagactgagaggtagtgaacataagaagttaggaaagccaaagagaatgatatcatgagtcaaaagaaagagatctagaatgagaggagaaccaaatactgcagagaggttgagaagcatggggttgacaaaaggctacttgtttttaagaaagtgatcattgacaattttactagactgatgagaaattaaagcagactatagagtgttgatgaatgaactggagatgagaatatggaggcaaaaagtatgtattatcttatttttctagaagcttgatgataaaggagtggaaaaagttggtgtggtgacttgaagggaaattaaaaccaaggacaggtagttttcagataaaatacttgagcatgtttagagatgaaacagaaggaataagaggttgggaatagattggggataagcaatagaggagacattatcagtcagtgctaatcatgtgtgatc

SEQ ID NO: 202731 - DNA, 1000 bp, Homo Sapiens
atggaggagaagagcataatctggacatccttcagcttttattataagggaaagttcccccgggatcccagcagaaagaacaaacttaaatgaacaaaatttagcaattctgttgacaaaagaatatttgaatagacttttaaaaaatatgagtttgtaagccaaaaacctgattacctttcataacaaaaaaataaatctctacccaagagaaagggaactaagtaacaaaaatatgccttgctttccacaggtcatcatctaaaaatgcgaacaacgcaacttcataggtctagttcagaccgatggggcttgaatcgtacagtgtgtggatgtccagtaaatgctgtgttatgggcccctttgatctgctgaattcagtcataagattgacttgtaaaaatcatcactgtcatcacattgttctgctgattagcctcttctgagtggtccaagcaccgaggagtcagacagaaaaatctcccaccctggatttggaaacttctcaataaggtacaactttttcaacatactacttccctcctcatttcaagaccctccatgtgggccagagagagcagtatggctggccccttacacagtatgatcgttctcatttctgaccacctgagactgctatctatgccttataattgggaaacctcaagtgccttttactcctgcctttacacacccaccattttcatgcccaccatagtagctcaattttttaagagacagggtcttgctatgttgctcaggctggattagaactcctgggttcaagcgatcctcctgcctcagcctctcaagtaccagatcaacttttactggaccccagagcctatgtgtttcttccttcttggagatcctttattagtactattttctccacagtactaatattttgatccttttccttcccatttaagggtcatgaccaacactcctatcacaaaaacaggttaacaagagaaaaacataacaaatttatttgatc

SEQ ID NO: 202732 - DNA, 1000 bp, Homo Sapiens
gtgacctcacctctccagcctgaaggttctccatgtattattaatcattaagtattgactagttactcaatgcctaatcctgtgcaaggtaagcctgtgggtaatacaaggtctcagatagggttttgtccccatcatgtagcttatattctgttgggggtgatgggggggtataaagttagcacatgtagggcaagtaagtgtgaagctatgtcatagcagtaaatgcaatagggtttaagaaaaagaagtcaggaaaagggtcatgaaagatgacatttaggctaagcttagaatgataggtgggattttgagaaccagaaaggggaggggagagcattcagcaaagcagatggctaaaaatacggaagtaagaacaaacctggtagaggagggagctaagaagaaaccagcctgattggaggaaatggaatatggagggagtagtatcaaagaaggttaaatataggccaagtgcagtggctcatgcttgtaaacccagcattttgggaggccgagataggtggatcacttgaggtcaggagttcgagaccagcctggcgaatatggtgaaacctcatctccaacaaaactacaaaaaattagccaggcatggtggcatgtgcctataatcccagctactcaggtggctgaagcaggagaatcacttgaacctgggaggtggaggttgcagtgagccgagagctgagatggcaccactgctctccagcctgggtgacaaagcaaggctctgtctcaaaaaaaaaaaaaaaaaaaagttaaatataaagagtgagaccaaattaggaaagactccatgatctagggacaatactaatgagaagcatgaaaattatctgtgatgaatgctgcatagtgagtaattcctgcattaaaagggaagttaggccaggtggtatctaatatcccttctatttctgattctttgtttctttgctttgcaagccatgtggaagagtttagctgttgtactaggatc

SEQ ID NO: 202733 - DNA, 1000 bp, Homo Sapiens
gtaaacatcaggacaaagcagcaaagttcacctgactatgaatgtgggagcttctagagatgcatcattggcaaaggcaccctctctccccagagatgtctctttgaacccctctgtggaatctgtgaaataactccctagtaacttgaacccactaggatttacagcatttcaaaatgtgtgtgattaataacaatctaataacgacactctaatttgtgtacaaataccataatattaacaaaaatactataatacaaacatattctaattcaattagtcttttgtggtgaacaggtatgagcaattggatctataacctcatagttaatgagattatataactatataccattgggcagaaaaaactgtgataatgctacctaccctgcttgcctaagagaaatgtctatcaaagtgtttttaaatatataaaaccctctaagaatgaaaggtgtgcttttctttctcgtccacttctgcagcacatacaggcgtgtgtgagtatgtgtaaacaacaaacactgaacctgatcccgtgcgactcaaagtccagtcctctgaccagtagcaccagcaacagctgggagcttgtcggaaatacagaccctcaggtcccgccccgaactgactgaatcagactctgctgtttaacaaaatccccgagtgattcatagagatactaaagtttgagaagccctgctctaaataatctcgtttggtaagttttattcactaaaatgggagtcctaaatatttttctcataattagctccataggaagcatcaggtgtgagcagtggttggcacagggagagaaagaaggcacttttacccagtatgtggtcctcctttgctgacaatccaccctccttccccagcaaaccagattatgaacctcaggagcagtgcctgacttagacatcagttgggttcaccttttatgactatgaaagatcaatggggctgccctgattgaggaagagtaagtactgtgatc

SEQ ID NO: 202734 - DNA, 1000 bp, Homo Sapiens
ttctagtggttcagccactaacgtgaaatactcttgaaactgtgaaataaccgataagtaactaataatgaaactaatattaaccactaaaaactatgctttcttttcaaaggtaataaaatggttgtccttatctgggtaatataaaatctgtatttgaataagaaaatgaagagagtttgattcagttcctgggtatccttcaatacattttctacacactttgcatctatggtgtgtgtgtatgtgtgtgcactgaaacacaagaaagataacattacccatactgaggtgccttttaaaaaaatcatacctctatctgtacatctaaatctaccctcactctccctaagggaagctcagctttccactgcgtggctgcctatagttcatctgatcagtcccctgctgacagacatttacattccggttttctgctgttacaaacaatgccgtaggaaacgttcttgcccagaaacctgcgttctgcgagcagatctgcaggaggaactcagaaccgctgggccttagagatatgcattgtaaatactcatatacattaccgaaccagccccgaaaagcttcatcactttatcctttccctcgctttgtatgacattgcctgtctgaccacacctgtatgacactagcttttaaactgttttcattctctgctagtttgatagaagaatcttaaaatgagcattttcccaagtatattaactattagtaccttcccccaccaaaggacagcctgtttatacactttacctatttttctgaattcttcatctttttcttacagattagcaagagtgtatgtatatgaatggaattagcctgtatccgtcataagtcagaagtatttttgctaatttaatattacttgtttacttaaatgtatcaattatatccttaatggccactagactttgtgctgtcagtctcagaaagggcttccataggccggatgcaattgggaggctgaagtgggcggatc

SEQ ID NO: 202735 - DNA, 1000 bp, Homo Sapiens
gatggcaccctgtacttttcctttgcagcatttacagcagtgtaaatctactggtgtgatttacatataatgcctgtaaatcttgctgaaatgaagctatgttcaagacaactccactgttcaaagtcctttaagggctcagtctctttaacatggcatttaaagctggccacatttagcagtggatgtcacaggagagcatgaggagcatacgctctaagaagattgaagagttactagctgttggatcttgggcaagttttagggcctttaagtttaaaaggaagccaccaacctgggatttaaagagggaaatgacaccagatttgtattttggaaactcgttacataattgatcattctgactgctgctctgcggagactggattggacacaaacaagaagtagagagatcaatgggaagctgttgcatactccaggcaagaaacagcgatgacttaagacaaatgatggcaatggggatggagagaggtgacagatacataatgtatgctgagtacttgtacaggtaaggattagagttaattaattgttggagcctctctgagggctgagatccttgttagatagaccaggtgaaatgcctcaagagcagagagccagtcaattttattccagacaatatccagctaactgctatacacaatagacatttgtgcaagtttctggatgatgatcatggtagtgaacctaaaagtcacccagagttagactctgaaccttatgctcaggagaaagtgcctgacttgaactgcaatgggatcccaataggagtcattaaaggcctggaaaagtggtgccattaggagaaaaagaaatgatttcttgagcttgctctcagttctcttttaggctgtcttgtactcagcagaatagtgagatcttcaaaggttggggtttgatagtgccttgaataatttttaactttatattgccagcggaagaagcattctctttttagatttaaaaaatgtagata

SEQ ID NO: 202736 - DNA, 1000 bp, Homo Sapiens
aaaaaaacaggctgagtttcaaaaattatttccagtaggaaaaatactttaatattacaaaaaacatgaacagctatacagacagcagtgagcttcaaataatagctgatacttattttttaaaaaacaaaacactaagtttggctctgctaaaatagaacctggttcaaagcaagaggaaaatttatttttgctatttttaccagctcccccttctccacctcactccttctcagaagctctgatgagttccagggagggaaacctcattcgtaaatgagatatctataacctatcacctgtaggaaaaggcaggttctcttttccaggtcacagtaccccagaaatcaccatgatccatgcaacactcctgccattgctgggtgtcaaaagctttcacaaagtgcagctccaggcttttctcaaacaggccccgctgctggagccgaccgtgaagaaccagcattacataactcagcattacatcatccagttactcccccatgtgcaagaaaacacacttgctgggagatctgggcagtcaggctttccctttatagtcagttcagtcaatagagagggtcagtgacatagctcacccttggtcaaaatccagcattcaccagggtgtttctgggacttggcaatcattagcatttattttcagaaccagaaaatgtcaggcatgaaagggaccttagagatacactgagcaatcctctttatccacaggaggaagctggcctatgagggttggctgccagccagtggggggtgggagcagaacctaggtctcctggctcgctgggccaacaatcagtgagtatttattgggcccccatggcctagctatctctgtgtgtaattccgaaatgcactcacttatcagtggagtggaatagtctaatgaaagaaaccccaaggatctcaacaaggcagttaaatttaggttgtaacaatagagccaattcctgaaaaaattcttgtgctataagggatc

SEQ ID NO: 202737 - DNA, 1000 bp, Homo Sapiens
ttgtctcgtggctgtgttgtttagggcttgtgaggcctgttacatgaggtgggaagtgaagggagattaaagttgggtgaacatcactccttgtctgtaacgttcacgtgcattatcttccagtacactcacagcaatcatgtattattctttcgtctttgtcgttcaagccactgaggcttagaggtggtgcgacaccccaggaagttaccccggctggaaagtgaaggagattggcactaagtctgtccgcctctgaaactttgcctgttatgcttttcacactgtactgcaacctggaacccactcatccttttttttttttctttcagacggagtcttgctctgtcacctaggctggagtgcagtggcgcgatctcggctcactgcaacctccgtctcccgggttcaagcaattctgtctccatctcccatgttcctgggattacaggcatgtgtcaccacacccggctaatttttgtatttttagtagagacgaggttttgccatgttggtcggattggtctcgaactcctgacctcaggtgatctgtctgcttcacctcggcctcccaaagtgctgggattacaggcatgagccactgcaccccgcctcatcctttaatcatttggtttctgggcaccttatatttaagagacggggtgttcctatgttgccctggctggaatgcagtggttactcacaggcgtgatgacaacgcactgcagcctctaactcttgggctcaagcaatccttacacctcagcctcctaagtagctgggactataggtggtctctgtcaccctgcctgacaagggtacctatatttgaattgtttccttgctgggtgcggtggctcacgcctgtaatcccagcactttgggaggccgaggcgggcagatcacgaggtcaggagatcgagaccatcctggctaacatggtgaaaccccatctctactaaaaatacaaaaaaattagccgggcgtggtggcaggcacc

SEQ ID NO: 202738 - DNA, 1000 bp, Homo Sapiens
acctggtacctgcagagctgcacaaaaaggctgaaggatatcagggcagagtcctcttcaggacagagtcatggcccctgccctcccatgcttggttgtttaggaattctgaggttctgggagctgccccagcatccagctactaaatccccacatgatgaagtcaccaagagtcaactgctattgcttgtttcaaacaatctcaacagaagcactgggtgaccatggccacaccagcaagagagaaaaggggcagcttagcataatgctgaaagcatcaactatggcagcagaatgtctgtgttcaactcctggctctgtcacttactaggtatgtgaccttaggtaagtcacttaaactctctgtgtctcagtttacccatcttcttccctttctaaagaccagaaccagatgacttcactggtgaattctatgaaatatttaaagaattagcaccaatccttctcaaactcttccaaaaaattgaagaggagatactttcaaattcattttatgaggccagcattaccctgatactaaagccagacaaagattactatagaaaagaaaactacagacaaatatctcatataaacaatgatacaaaactcttccacaaaatgctagcaaactgtatccagcagcatattaacagaatatactatgaccaatcaggacttaccctaggaaaggaagggtggttcaacatgcaacaattaatcactgtaatacatcacactactacaatgaaggaaaaaacacatctcaattgacgcagagcaagcatttgacaaaatccaacaccctttgatgatcaaacacttaaaactaggaatagaagggaacttaatggataaagagcatctgaaaacccacagctaacatcatattaatggtaaaagactgaagccttccccctaagatcaggaacaaaacaaggatgcccacttttcaccactgcaattcaacattgtaaacaaagttgttgccagagtgatc

SEQ ID NO: 202739 - DNA, 1000 bp, Homo Sapiens
aaatcacaaaaccctaaagctgccttccaagaaaccaaaggcagtgattcgggcagcagacatgctgtgggaaagccttgctggacggcaggcagggctgtgcagtgggaggtgggccaagggggccagggtccaagggggcccgcttcgggctgtcagtgttgttattcataataacaacaggtcaggtgtcctgggtttatgacacaccagctacttgctgggtgctttgtagagattaactctttaatccttgcaattaacctcctaggggtgggtccatatcagttcttgtttcatagttgaagaaataggtgcagggggtgaaagggcctgtgcacgtggaggagagagatttccactacaaatctgtccatctccagaaggttgtgtgtgtctcagctacaccagactgagatggggggatgctgccagctatgagggagtccatcatttttacctcaaagtatgacttagatcttttactttgaataagttttgaaagcagagcagagagagaacaggcagatattgactgcctgggaggcagcgaggaagaatcacttcctggaggggagactggggtctcataggagaccaacgcctgactcatcacagatctggttttggtggaaatttaccccaaccttgggccatctttcatccccctagaccttgaccaggggttgacattgacaaagtcccacctatgggctgcaccttgcctattttgccaataaagttttattggaacacagcacatccacatccacttttacttcttgtctgtggctgctttcatgctatggtgacagatgcatagttaccagagactgtgtggctctcaaagctggaaaatactcactctcttgccctttgcagaaaaagtttgctgatccagatcctagatgacataatcatccctttaagatttcagaatcctagaacatcagagccaaagcattcacacagaatatactgtccagctggggcacaggga

SEQ ID NO: 202740 - DNA, 1000 bp, Homo Sapiens
gaagataggtgacttgtttgtctccattttatggataaagaaactaaggctcatggaggtaacccagagttagtccactggttacaggattctaactcacaacagaacaaccctacatccattactttgtacttccaataaaatcagggctttctctgctccaggttcaaatgaagcagagcatggctctggggacaatcagaatgaaagtttgtcaccagctccctgttctcgagagttcagtcacagcttgctcataggagaaatgatttgggtcaattcaccaaaagcctggggtacaggtgctctagggtttcagctccactggctttcagggccagcttccgtccccaaggccagaggcaattcttggagtcattcataaagccctccatgtctcatggggagaaaagaaattaatatcagaagtggcagcatctaagcggcagcttcataacaggcttgaacctcgacatcttggctacaactgggaacggctcagccaagcacgtcattgactcccagagtcctgaacccgagatgtgcatgtgggcttgtaggtcacccagtccagcccccttattttatagatgaggaggttgtattccagcgaggggagagggctcacccaaggtgacacagtgggtagggggcaaaatcagggttggaaccaggtctcgtggttcagggctctttccagcattgggttctgcatcaggcatactctatcattggaagcttttatgagacccagtaaaacagaggctccatcaaaacaccaaatacgcaatgtgcaaccctgcacagatctgttaagccatcactgcaacagcaggagctctacctgggagggaggcccataccccatcaccattcaccccccttggccttgaacctcttgcctcaatccactgtgaatttcagccctcccttcctttcccagctgcagcctgatcttactcttaaggcttaatgctaagatgtgctgattttctggatc

SEQ ID NO: 202741 - DNA, 1000 bp, Homo Sapiens
ttgattcttctctctttttttctttattagtcttgatagtggtctatcaattttgttgatcctttcaaaaaaccagctcctggattcattgattttttgaagggttttttgtatctctatttccttcagttctgctctgattttagttatttcttgccttctgctagcttttgaatgtgtttgctcttgcttttcttgttcttttaattgtgatgttagggtgtcaattttggatctttcctgctttctcttgtgggcatttagtgctagaaatttccctctacacactgctttgaatgcgtcccagagattctggtatgtcgtgtctttgttctcgttggtttcaaagaacatctttatttctgccttcatttcgttatgtacccaagtagtcattcaggagcaggttgttcagtttccatgtcgttgagcggctttgagtgagattcttaatcctgagttctagtttgattgcactgtggtctgagagatagtttgttataatttctgttcttttacatttgctgaggagtgctttacttccaactatgtggtcaattttggaataggtgtgttgtggtgctgaaaaaaatgtatattctgttgatttggggtggagagttctgtagatgtctattaggtccgcttggtgcagagctgagttcaattcctgggtatccttgttgactttctgtccgttgatctgtctaatgttgacaggggggtgttaaagtctcccattattaatgtgtgggagtctaagtctctttgtaggtcactcaggacttgctttatgaatctgggtgctcctgtattgggtgcatatatatttaggatagttagctcttcttgttgaattgatccctttaccattatgtaatggccttctttgtctcttttgatctttgttggtttaaagtctgttttatcagagactaggattgcaacccctgcctttttttgttttccatttgcttggtagatcttcctccatcctttt

SEQ ID NO: 202742 - DNA, 1000 bp, Homo Sapiens
tgaagcaaaaataaggctgctcacacccctgttatgggtaggcactcattgaacattgtgtgtgccctgtagacctgcattctccagtggtcccagtccggttccacagaatcaacttttagaactgtaatcatcaatacagaccaacttactcaactccctctttcacagataaagaagctgaagtcacgaaggaaaaacaaatcctgtcacagtctcatgggacggggtaggaactagaaccaacgactcatccagagttcatattaactccgaactgttgccaccatttacagagactcataggagaagccgcttgctctacagtgtgaggattgcaagctgtgctaggattcaagctcagagtccctgagcctttgtctcctgttctttcctgtgtgcttatgtggtcagtccactttccttctccgacatgaaggcttggcccattccaagtctcctttggaagaaaatgggtaaactatgaatgccattgtttaacactgtcaattggaatattaaaatgtttctttcattagaaataaacttttgtcaatttaaacagtggaagagtaattcatcacaggggaagaggaatgagaacctttggaatttattttcaataaaagatcctgctagtagaagaaaactcctgaaaccctggttttactgatgcccattaacatgtatacttgaagcaagagtatgaagctcttaaaatctgccctttcaaaaactttaaaaagttatgtagggagttataagtacataagatgaaaatgaacaccttctcttagtaaatgtattttaggagcatagagaaattgtaaagagaaaggtgagagtaatagaacttcacctggtaattttctggggtaaaagaaaaggggataaaggtcccggggctatattactaaagaacaaatgagaaagaagggcaacacactgttaaataatgtatgcaacattctgccctgaaattcttattttgagtaagatc

SEQ ID NO: 202743 - DNA, 1000 bp, Homo Sapiens
aagcacttttcaacacattaataagacaattggttttaacttcatgaaaaaatgcaaatatacagaaaagtagagattaagaacgtcctcatgcctttcctttgattttaacattcaaccaaatttacttcaccgttttttaagagtagcgcattttaggagcaaactctaaggcattccaccacagatacctcagcaagtctccccccaaaactgcgacaatgcctttatcccagcgccaagccaacaggctgcctatcaccgtctgacacccagtcctagcagagatcttttgagctgccccaatgtttgcactaggacacttgcggtctgcacatgcccctctgctatgtctcccaaggggcagtctagaggagcagtctcagacagaccccggagtgacggacacattctcctccatgccgtctacacagagccactggctgcacgtggctcacgtgactggggtggggcgctattcacctcctcacttgactggaaacagccatgtgtggccagtggctaccagagtggagaggtggctctaggaagtccttagccactcttatgtgtttcttttttgacaacttgttcatcttttccaacaaatcgctcatccagcccagctttgtaaccctttaaaatgaaaacaaatggaaaattctgtttgcaaccctgggatttctgtgggtgcccacacatgacccacctgttgttgtgaggctggcggcaaatgcaatacagggcgttggggtcgtaaccctcacattcaggcttcggtcggcccaagtctccaggctcctcatctttgatgtcctgagccgcctttccctccaacttactctctctgtcatctttcccagcctgggacacaaccccctgatcgttctcgggctcctgcttactgggcaggacgccctccacagtgtcactggcctcggagcccacagtctcggcgggaccctcctcccggcgcttcttccgcaggcgactctggatc

SEQ ID NO: 202744 - DNA, 1000 bp, Homo Sapiens
cactccctaatctcaagtacccagggacacaaacactgcggaaggccgcagggtcctctgcctaggaaaaccagagacctttgttcacttgtttatctgctgaccttccctccactattgtcctgtgaccctgccaaatccccctctgcgagaaacacccaagaatgatcaattaaaaaaaaaaaaaaaagaaagaaaaatctacttctggagaaacaaattaccttcccatctcttttgtcaggaaactcttggatgatgtactgaccaaaacagggaataacctaacagagaggaagacagggattttaggaaaccggagatcacacaggaaggaggtaaagggaaatcccaggatgatggcaaagggaagtccccaaacaacagctgtgcaacaagaataaagaacaatcagaggacctcttgagcccagaggtcaaggctgcggtgagccaaggtcgtgccactacactgaagcctgggcaacagagtgagaccctgtctcaaaacagaaaaggacctatcagccccaagtggagcagaacagagggatttgggaggaatgtcctcagaaaaagatattaaaacacagttatctgatgagtttgaagatgtaaaaagttctactgaaagccattgtacatagtgataggaagacatgccatagattaaaaaaataataacctaagcaaatcaaaattaggtaacaaaagtccaggaaaaacaaaagcttatagatgggaaatgtagacagtatacatcacttaacttagaaatgagccaccatcgaaaataataaaaacactgattatgaatttaaaaacaaacaaacaaacaaacaaggctgggtgaggtggctcatgcctgtaatcccagcactctgggaggccgaggtgagtggatcacctgaggtcaggagttcaagaccagtctggccaacatggtgaaaccccatctctactaaaaatataaaaattagccgggtgtggtggcacatgcc

SEQ ID NO: 202745 - DNA, 1000 bp, Homo Sapiens
aaagcgaatttacattctgtgccctgagctggcagggctttgtgtgaaattgctttacgtgttttctgaaatacacggagcagagaggcccatctgctgggcagggagaaagccatagtggcttgggcagagctacctggagacatggctggagaggttctgttaagttctcacaggaccaggtgtgtgcctgtggacatctcctgtctcattgcagcctttttctccccactgggcagtgtggaaatacagcctggagaccgtcaccatgtgctgagccccggcaaacattgcctggttccgtctttataggacagagactgacaagtaaattgggctgtcagagcacaaaggggggcaccccgtaccgtgtggggtcagggaatgcttcctccttgaggagccatctaaacaggggccttggatgaggaggggttagccaagccactgaaggatggggaggggtgggctccagatatgcacctctcaaagtccgccccacatcagaatcactgggagacctcggaaagcctccatgcccaggccacatcctgacaaccaaatcagagtctccaggatgggaccaggacatcagtattttttttttttcctgaaatggcatctaactttgtcacccaagctggagtgcagtggtgcaatcttggctcactgcagcctcaacctcctgggtccaagcaatctgcccacctcaggcccccaagtagctgagactacaggcatgcaccagcatgcctggctaattgtttttgtagagatgggttttcaccatgttagtcaggctggtctccaactcctgagctcaagcgatcgtccggccttagcctctcaaagcactgagattatagacgtgagccaccgagcttggctgggcatcagtattttttaatacaactcccgggtaattctaacatacagtcaagtttgagatgctctgggcagaggtgacagtgtgcaaaagccaaaatgtcagagaaagatc

SEQ ID NO: 202746 - DNA, 1000 bp, Homo Sapiens
cccccaaagcaggaagagggcttgtttctggctggcaggccccggacatggttcttatatttacttattctctcagccactcggcaaatgtttatgggggcttgcaagtgccaggccctgtggtaggtgcttggcagacaatgctgggccacagtgacacgggcccaacactgacggagctctgggtcgagtgtggggttgtaaaattctctaaagggccaaggagtaaatatttcaggctttgggggccattcggttcccagactaccaactctgctgttgtagtataggagcaagctgtagcttgctttgttcaccctgtgtcaataaataggctggctgtgttgtcataaaactatttacaaacacaacccatgggccgcatttggcccatgggctgtggtttgcctgcacctggtttggcagaatgagattccctaaacagatacctggtgcgacgggagctgttagcaggcgtcagtggagaaaagatggcagggaaaagggaaggaggggatctttttgatgggtcgatctcaggaggtgcgggctgagcagatgcaggaaggaaccaggggaagtgggaggatctcgcggggagggtttccaggcagagggaacccaaggcgtctgaggcaggagctgcttaagtacggcgaagaggttggaggggttgttgctgactcagcttggggagaagtggggagtggtgggggtgggtggcaggccggggcacatgctgcgttagtgactttaggttccatctaaagtgtccagaagcctttatagtaggttttgagaatggacattttaaaggctgctgcgtgacaaacagactgacagagccacagaggaagtggggaggccagggaggagatgactgcagtagtccccatgggagaggacggcggcttggaccagggtggatgcgatggaatggggagacctgggaatctagtttctgttctgacagtggagcagtcagggctgatgatggatc

SEQ ID NO: 202747 - DNA, 1000 bp, Homo Sapiens
actgccagacctggcccacaccaggatgagatctcccaaggggttacgaaggaaggaagacctttcagacacgtggtggctctgacctgcgactctctggatcccagcctgagcagcccagaaggccagggacgctaagcagtttgcgagctacagtcataaagggctgacccagcccggagtcagttcaggagaagttacaggacagctagctgccccaatgcctatccccttccccaactgaggacactgtgacatatgggagttggatatttctcctatctaggtaccttaaaatgagggctgaatgtgtagagaaaagtttcgcctgtgccataatagtggtcactgaacttgaaaggatgagttgcatatgctccaaaaatctgtcaaaagaaaacagaaatgttacctacattcaaacctaaatccccaaagcaaggctttctggaatatttttgatacatcatgttctgagatctatttcagcaaagattattactaaattggcactcaaacttaaaaagaccaccaataaaagaataaacaaatatccccagctctaactggaacccaagtagccagacttcctggtgcacgcaaaattcatctgacaaagcttagacaacttgtttgtcaaaggccaacaatttgttccaattttaaaagatttccaaagttcactatggagacaaatttctgttattgaatatacataacataatagaaacattaagccacaagaagatacatcttgctcacagaaatgagtgcttgggacaacacagtcacatctcttatgtattttataagtggagtcatggctgggcatttccccagagaaaataaactttcctttcttttgatttgtaacaatgagttattaatatgcttattaaattaaaattatatccttaaaaatgactgacttactatagtttagttcaaagtgacttttaagaaacaaataaccccgtaatatcatggagttatttagatc

SEQ ID NO: 202748 - DNA, 1000 bp, Homo Sapiens
aatgtttaataaggctgttttagaagcaataatcagacaagtgtacaaagatgaatctatatgactttataacagtatttgtaataataaatcctagtaaagctttataaaaatctatatagccaataaaaatgctgatgtagctgtatattcattgatcatgcgaggtgtcattgggggattatagaataaaataacatggcatcaaacccagttatggtatgatctaattttgttgttaatattgtgcttatagacacagaaaaaaactagaagggtatttttgcagtaggatttttgtatgatgagctttttatgtaattattagtttctttttgctgtttatttttctctattgtttatgcttctcaataagaatgtaggacttttagaataaagaatattaaaaatcattttcagtttgaaaaacagagaaaaataaatccccataaggcaaagcccatcacagttgtcaagaagttaacagagataaatcagggacaaatatttcaggttcactgagatgcatcttacaaacccttactctttatgccccaccagaaagcgcccccttctgccttttctctgcagtgtatggaaagagagaattgcatccttttctctcctccttccctggtgtcagttccacagccttttgtgaaatttgccacacgaattggcagaatcctaagaggctgctgggaaagttaaccaggcttctttgcttatgaaaaagctgcgtgtggtggggagtagaggaaatcctatatagcagcctttggattcatttaggaataaagctgaagaatggaggagatgctctgtcttcagcatttttatttgattagcagctagaatgccacatctggacccaaacatgcatacccgaactatctgcatcctttccaaaagtcatgccatgataaatgcataaggtgtcatgcttcacatacagaactttcagtcagatacagtgatacgagggtcctagtatcagatc

SEQ ID NO: 202749 - DNA, 1000 bp, Homo Sapiens
ctcttttactttgggtgctgcttctctttttccttctgcttctcttttctttcttattatctattctcccttcttcaacttttgtagctgttttatttgcattgaaaatcatcctctactttgtggcctcttgaagcatttattttattttgttctcggttctgttgctctggttaagtccttccttgtcatctcacaaatagtctattgttagaaccttttagttgactttaattttattttttcttcctaaattcaatagtaaatcaggttcaggctaattaagtctcttctcacaatccttcagtagtttctctgtgaaaattcctgagcatgacttttgatttccttgtaatctggccccagataaaagaactaaaaagtattggaagctgggggaatgattgagcaccatttattcatgacattcatttccatactggataacagtattttaaatgaatctatacgctgtttgagaaattagttttttttgttttgttttagtattaccattggcttttcgtgtagtgatttacacataatagctgcccaataaatgttcactggatgaattaatgactaaagagagaacagataaaactgttcagtcacctgcctcccttggcacatgttgcctctatcaaggataaagggacaaggaccagctctgacatgcttgttgtcacactgtggattgtcctttgtgctctcagtttctcagtgtatccccaatacccattgagttatgcatcttatctgagcttcagctctcttggtggtgggatatagggaaagagtggtgccaacataaaccatgcttagggcatgacatgaggcctggattttcctctcttgccaggtggagtatttcatctctaggatcaagattgtgatcagaaagaaccagtgttctctaatttacagagccagtaacaatgtcattcattttaagtaaagtatgcatagaaaatttctatctcaataaaaaagagagatc

SEQ ID NO: 202750 - DNA, 1000 bp, Homo Sapiens
tgcccattagttgattcagtttcttcatagtgtcaatgttatttacaatttggtatgtttttgcagtggctggtactggtttttccttttcatatttaatgcttccttcaggagctcttgtaaggcaggtctgatgatgacacaatctctcagcatttgctgatctgtaaaggtttttatttgtttcacttatgaagcttagtttggctggatatgaaattctgggttgaaaattcttttctttaagaatgttgaatattggcccccactctcttatggtttgtagggtttctgcagagagacccactgttagtctgatgtgcttccctttgtgggtaacctgaactttccctctggctgcccttaacattttttccttcctttcaaccttggtgcatctgatgattatgtgtcttgtggttgctcttctcgaggaatatctctgtggcgttctctgtatttcctgaatttgaatgttggcctgccttgctagactggggaagttctcctggataatatcctgaagagtgttttccaacttgattccattctcctcgtcactttcaggtacaccaatcaaacacagatttggtcttttcacatagccccatatttcttggaggctttgttcattcctttttattcttttttctctaatcttgttttctccatttattttattaagttgatcttcaatcactgatatcttttcttctgcttgattgattcagctattgaaacttgtgtatgcttcacgaacttctcatgctgtgtttttcagctccatcaggtcatttatgttgttctctacactggttattctagttagcaattcatctaaccttttttcaaggttgctagcttctttgcattgggttagaacatgttcctttagcttggaggagttcattattacccaccttctgaagcctacttctgtcaactcgtcaaactcattctccatccagttttgttcccttgctggcgaggagttatgatc

SEQ ID NO: 202751 - DNA, 1000 bp, Homo Sapiens
aagttatgctaagtgaaagcagccagtcacaaaaggcgacatattatatgattccatttatatgaaatttctagaataggcaaatacataaagacaaaaagtagattactggtggcttaaaggtagggaaagttgtgggaggaaaaggatgggtttcttttagaaaagacaaaagcattctaaaatgaaattgtgttgatggtcacaaactttttgaatatacttttaagaacatgaaaatgcacacttttaattagtgagctgtaagcagtgtaaattgtatttccataatgacgttgttttaaattagtttttagccaggtatggtagctgacacctgtaataccagcactttgggaggccaaggtatgtggatggcttaagcacaggagttcgagatcagcctgggcaacatggtgaaacctcatctctacaacaacaacaacaacaaaaatacaaaaatataaaaattagccaggtgtagtggcacatttctgtagtcccagctactctggaggctgagatgggagaatcacctgaggccagggagtcaaagctgcagtgagccatgatcacgccactggactccagcctaggcaatgcagcaagaccctgtctcaaaaataaataaataaaagaaagaaattagttttaaaaaaactaatcttcaaaaccattttaaaaacaatatgtagacagtgttataagcattgaattatgctgaaaaggctgttaataaaccaagaacaaggggttaaaaaaaaactagtgcaataccactaaagcagtattcagagaaaaaattcagaggcttaaatatattcattaaaaaccaaaaagactaaaaataaatgagataaactttcaactcaagaaattaaagaacaacaaaataagcctccccccccaaaaaagcataacaaaggaacaaataaatagaaatgcagaaatcaataaatttgaaaacacaactaaaagaaaaattcaaaaattgttgatc

SEQ ID NO: 202752 - DNA, 1000 bp, Homo Sapiens
ctacatgaatggcaggctgaggtgtcagtagcctagtggtagagtacggcaggggcagccagcatgtcctggtagctgacccttgtggaaactggcacagctggcagttttcagaacacaagattgccctcccctgccaggtccttgcagaaaagtgattgggtcttctgaggaatactcaagctggaagtcaggaacgtgtcctctaattcagctatttccaatgtgtagcacagggtcatgcatacggtggacactcaatgatgatgcatatagccaggcagccacagatataagagcaagccccagcaagaacagtagagtccagctcagagtgaaatgagttactatatatcatcattctaagatgcattttctccccaaattttcacttttttttttttttttttttttgagatggagtctctctctgccacctaggctggaatgcagtggcacaatctcagcccactgcagcctctgcctcctgagttcaagtgattctgctgcctcagcctctggagtagctgggattacagtcacacaccaccacacctggctaatttttgtatttttagtagagatggggttttatcatgttgggcaggctggactcgaactcctgacttcaagtgatccacccgccttggcctcccagagtacagagattatagatgtgaattaccacgcctggcccattttcacatttctaaaatcaggatgcatcttaacattggtctctttgtttcaacaatttgtattgtcggagctataatggattcaactgcagttgaagaatgtctttacaaagattatgctctgattccatattgaaaaaatgttattttatgcatagaaagtaatggaaatagagaatcaatgtgtagtaacaaaggcatttgccattggaagaatatccataattccatattttcttacaagttaacatcaaagtgctttttggggcataagaaaaaaagtaaacaataagtagatgatc

SEQ ID NO: 202753 - DNA, 1000 bp, Homo Sapiens
agaaaagcaagagcaaacacattcaaaagttagcagaaggcaagaaataactaaaatcagagcagaactgaaggaaatagagacagaaaaaacccttcaaaaaattaatggctcagaaaactgagccaggagtaaaaggacatgaatgctagatacatcttcttcctttaatttatttatccaacaaatatttaataggcagctattacatatcagatatctgctagactttagctatatagcaacgtgaaaaaataggcatgggccttgttctcgtgaaacgtaagtacccaatgaaggataaatatgtcagcaatcttaaaaattcattcaacaaatacgtattcattcaacatatatataatatgtaccagacactgttctaggtacttgagataatgatgaaaaagtagacagagattcgccgccatatagggtttacattctagtaggataagacagaaaataaaacctctagacataaaaaataagttatgtatatatcttattagagggtgataaatattatggaaaagggggggaaagtagggtaagggtttttagtaatggaacagggattaagataggatttgggatgggttgtcattttaaacaggacagtcagtgtagtctcattgagaaggggacattaaagcaaaaatttataggagttgggggaattgactatgcaaatatccagggaatgtgtgttctcttagagagaatagccaatgtaaaaggtctaatatgggaatatccaggagtgttccaggtatagaaacaaggctcaattgtctggagctgggtcggcaaggggtgaaaaaacaggtataggagagtggttgtggattatgcagggccatgtgggccgttgtaaggactttggctttcactaagataaatggggagccattgtaggggtttgagcacagagcaatatgacctgacttacattttaacggaaggacttgtttcatattacaacctgtaactgtagatc

SEQ ID NO: 202754 - DNA, 1000 bp, Homo Sapiens
tatgtctatatgatatatatgcttatgtatacttatatataagggaaatgaataataatgatacaaatgacaaggtggaagaattaagattattttattataaggtactcatactatctacgaagttgtatagtgttatgtgaaagtggacttacattagttatacatttaaaaaactgcaaattctagggaaaccactaaattttttaaaaaataagtataactgatatgctaagaaaggagagaaaatggaatcatataagtcattcaattacaatcacgaaaggttataaacagtggaagacaaaaataaggacacagaacaaaggcaacaaatagaaaacagttaacaaatatggttagaaacccaactatgtcaataatcacttcgaacgtcaatagtctaaataccccaattaaaagagattgtcagtgtagatcagaaaacaaaacccaactatatatcatctaccagaaactcactttaaatataaaggcacataaagattaatagtaaatggatggaaacaatatactatgccaacactaatcaaaagaaagcaggcatagctatattaatttcagacagagcagatattacagcaagaaaacttaacaaggataaagaatggcattatataatgataaatgggtcaattttccaagaatacagccttaatgtgtatgtgcttaataacagagtgtcaagagacatgaggcaaaactggtaagagttgctaggagaaacagataaatctatatagttgaagactacacacctatctatcagaaatggacagatctagcaggcagaaaatcagtgaggacatagttgaactccaaaacaccatttaatcaactggatataattgacatctatagactactttatccaacaacagcagaatagagattcctcaagctcatatggaacattcaccaagacagatcaaattctgggcataaaacacatattaataaatttaaaagaatagagatc

SEQ ID NO: 202755 - DNA, 1000 bp, Homo Sapiens
catatagttccaacttatactcaaacacattaaaaaaaaaaaaaagctgggcatggtggctcatgtctataatctcagcattctgggaggccaatataggtggatcacttgagcccaggagtttgagactacctgaacaatacagtgagaccctgtctctacaaaaaaaaaaaaaaaatatatatatatagatatataaatacatacattgtgagaaacagtaaaatgatttttttaaaaagaaaatgaaaataacttatacttatcatattgcccaagtaaaacaagcatttagaaaaaaaaaagtatggtatatttaaaaatgttagatctattgttttatgacagtcagtttaacttaccttataattcatttataatttagaaactgagatgttgaataagaacacactgttcttgttttaatagtatatataatctgaagaaaaatgattctgaaaaaacaaagtatattaataacatactaacattcagagtaagagacatatagcaagattttataaattatctttaatcatataaaaggctgtttaaaaagatctaatggcagattaaaaagagaattatgaatattttaaaaacaaaggtaccacccaaagaaatacataaaatttatcagaggcaaacactgccaaacataagacaccacttaagcaagaatactgttcccttgaaggggtgaagaaggcttctattattagcagagataactgcctgaaattctttccttaataacaccatactaaaaataaaaaggttcatcatatttcaaaataaacacattgcttttcatacgcatttcaatcacttcaataacagataaaaataaaagcctgatttaaggtttacatttctcttatatttgtagttgataaatacactaggtagatttgctctcatttttataacatatttaatgctttaagggtcttgtgccagccacttactcattatttcttaaaggatttgagattagatc

SEQ ID NO: 202756 - DNA, 1000 bp, Homo Sapiens
ttgggtgaaaaacaaaatcaagatagaaatttaaaaattcttcaaactgaatgataataatgacagaaccttatcaaaatctctgggataaggctaaggcagtgctaagaggaaagtgcataaccctaaacacctacatcgaaaagtctgaaagagcacaaatagacaatctaaggtcacacctcaaggaactagagaaacaagaacaaaccaaacccaaacccagcagaagaaaggaaataaccaagatcagagtagaactaaatgaaattgaaacaaaaaaaagacacaaaagataagtgaaacaaaaagctggttctttgaaaagataaataaaatcgatagaccattagcaagattaaccaagaaaagagagaaaattcaaataacctcactgagaaacaaaacaggagtatcttcaaatactgaaatacgaaagatcattcaagactactatgaacacctttacacacataaactaggaaacctagaagagatggataaattcctggaaaaatacaaccctcctagcttaaatcaagaagaattagataccctgaacaaaccaataacaagcagagagattgaaatggtaatttaaaaattaccaacaaaaaaaagtccaggaccaggtggattcacagcagaattctgccagacattcaaagaagaattggtaccaatccttttgacactactccataagacagagcaagaaggaaccctccttaattcattctatgaagccagcatcaccctaacaccaaaaccaggaaaggccacaaccaaaaaaggaaactacagaccaatatctttgatgaacatagatgctaaaatcattaacaaaatactatctaactgaatccaacaacctatcaaaaagacaatccaccacgatcaagtaggtttcataccagggatgcaaggatggtttaacatatgtaagtcaataaatgtggtacaccacataaacagaattaaaaacaaaaatcacatgatc

SEQ ID NO: 202757 - DNA, 1000 bp, Homo Sapiens
attcctgttaaaaaaaaaaaaaagtagacaactgaattcaaaaaaagaagtgataaataatttgccctgttttttagatgcctctaattcattttccctgtgcagtcaaggacagcttgataggagtaatatcatacttatatattggtagcattcatgtagaatgaattaaaaatccagtggtattgaaaatactttaatatcccacatgcaggatgtaggctaagaccacaaagattattacagccactagacaaatacactgatgcttggaagcattgtgaaatgaaatccagaaaggccttttaaatgacctaatgttaagttacgttccaggtagttttactcttcaatgtcactgcttcttgtattccggcacctattgccaccattcttctgaaacttttattgaaaaaattaatatttgggccgggcgtagtggctcacgcctgtaatcccagcacttcgagaggccaagatgggcagatcacaaggtcaggagtttgagaccagcctggccaacatagtgaaaccccgtcaccattaaaaatgcaaaaaaattagctgggcgtggtggtgtgcacctgtaatcccagctactagggagattgaggcaggagaattgcttgaacctgggaggtggaggttgcagtgagtcgagatcgcaccactgcaccccagcctgggtaacggagcaagacttcgtctcagaaaaaaaaattaataattgtttttaaatcagtaacaagccaaagacccatctgggttctaaaactgacaactgttgggaataaaccagactgaacttcttcctcgttaccagaagttttattatatacatacagacatatgcacacatgttgaataaataaaatgtcagatatgtgttttatcacggccaaaaaactgggaacaaagcaatcaaaagaaatgtatgtggccgggcgtcatggctcacgcctgtaatcccagcactttgggaggctgaggcaggtggatc

SEQ ID NO: 202758 - DNA, 1000 bp, Homo Sapiens
tggagacgcggcctggagcccacgacctgggcttctcgccctgccctactgcttgctggttcgtggccgggccgcgcctcttctgggcagagggcaccgccgacggccaggccgcagagggggcttgcgaggatcggaagctggtcagcagctgttgggatgtgtacatcgtgaagcccacctggtggccgtggttaaattgtatccaaatgaaatgacactgatcactgcgtcccctgcagcagatgctgtctcagtcatggttagtgtttgcaagtttagttactgtagctgcgcaccccggtgtacacacctttcctctgtgaggagtcacggcagatcttaggggaggctcgctgtgcccagagccctggatgcagtttctttggattcgagttaaggccagacctctgatttgcaggtaccaattttttttttttaagaaaacattttattatgaagattcccacacatttagaaaagttggaggaatttcaccatgtgcttttatagacacttttcctggattctgcagttaacattttgctacgctggtatctctccttccttcccatctatcagtcctggatccactttaaaaaaacaacagggcggtatgtgaaaactaaggacaaagtggttccgattcaagtgtcaggaagatggaaagaactatgggataagatggctgggaacatttcaaagagggggtgagccttgaagatggataacacattggtaagtgaggaagacggaagttccggagaaggagcggggcatgaaaatggggaaacttgaagtgcggtcagacaactgggatcagtgcgaatctagtggctggtttctgccactgagcagtcaggaagaaatgggtgaaacaggaggggtttagacttgatcctgtggaaagaattttctgttgggccagtctggtagctacggtgacttgtgttgaactcactgttccctgcattgttctgagtgcccacgtaataatcca

SEQ ID NO: 202759 - DNA, 1000 bp, Homo Sapiens
ttactctgtcacccaggctggagcgcaatggcgaatggcatggtctcagcttactgcaacctccgcctcccaggttcaagcgattctcctgcctcagcctcctgagtagctgggactacaggcacccgccaccatatccagcacatttttgtatttttagtagggatggggtttcactactggtgaaatcctactggctggtctcgaaatcctgacctcgtgatccacccgcctcagcctcccaaagtgctgggattacaggcgtgagccaccatgcccggcctatagatacatatttttaaccagtgtagggttttggatggggaagtgacatgatctaagttattttttccccagacaggcaattttttattttttatcatgcgtatagaaaacaaaagtgtcacagatccccttgtgactggacaaagccacctcaggaatatttctctgcttaaaagaagcattgtcagttacagtgatgtcaattacaacctggcacaaaatcatcaagaccatcagggtcacagaattctttctggaggttatccttgcagaacacaggcacagcttccagtctgaagtccaacaaaaccagaactctgcttctaagtacaagattatggtaaaggccccaacaacctgataacaattgtgaatagtcacataagtttccaagtggcataaaaaatgtacactgacaatcttgcaaaagttctcaactaaaagcaacaagcaagcctttacagcataatgccccagtgggctgaaacacaggaggggatgcatagggtcttacttaaaagcagcagaagaaaagcttacattaactttctacatacacaaggtaggaccaagagagaaaacctctaaagttgcagtgttctgttattcttctagtttacaaaacatattggcgaatcaaaaatgttagcaagggctgggcgcggtggctcacacttgtaatcccagcactttgggaggccaaggtgggaggatc

SEQ ID NO: 202760 - DNA, 1000 bp, Homo Sapiens
tgtggaccatgaacatttgtggtcagcaggcttgtttgaaatgcacaaagcagttcaaagccaggttaagtgcacactctctagggcctggctgctatcattcaaagtccagctttgccattcactagcttgtgaccctagacacactgtgtaacctcaccgggcttcagttttctcatctataaaattggggtgataacagtacctacacttcatcaatttgtcaagaagactgagtaagtaacatacaaaaagtgcttaggacagcatctagcctagagtaaatgctatgcagacatattgctaccttatgtggtaggcaaactctaagtgggctcccgatgatcccaacctactaatattttgtgcccatctgtaatcccctccctctgacctagcaacttgcttctacccaatggaatacagcaaacgtaatgaggtgtcacttctgtgactggcctaagtaagcctgtcacttccatcttgccagcaggctctctccattgctggcttttgagacagtttcgctttgtagcccaggctggagtgcagtggcaagatctcggctcactgcaacctccacctcccaggttcaagcaagtctcgtgtaccagcctcctaagtagctgggactacaggcgcatgccatcatgccaggctgattttttgtattttggtagagatggggtttcacgatgttgcccaggctggtcctgaactcctgagctcatgcaatccacccacctcagcctcccaaagtgctgggattacaggtgtgagccaccatgcccagcctccattgctgattttgatgaagcaagctgccatgctggggaggcccacatggcagggaactgagggtggcccaggccacttgccctcaagaagtgaatcttgcctgccaccacctaaatgaccttgagagtggatcctttcccagttgagcctttgtgtgagtcccaaacccttgcagacaccatgactgcaactgcaagagatc

SEQ ID NO: 202761 - DNA, 1000 bp, Homo Sapiens
gggaagagcagccttggcagagggacctgcaagtgcaaaggccctgaggcaggagggttctcaagggggttggggagcagcacagaggcccatgtggctgcagcaggggagtgaggtggggagtggcaggggcggaggttgaagagaggatgaggggtcaggccatggagggccttgcaggccatgaggaatattttggcttttattctgcatgagagggtgggtccctagaggactctgagtgatggaatctgatgagctgacctaataggatgaaaggcccaccctggctgctgaatggagaacacaaggcagtggccggaggcggagccaggaacccaactaggagacttggacactagtccaggcaagagatgacaatggtgagatacagacaagtcaagatcctggcttgactgactccagcttcattcttctccctgtctcaccctccctccctctaccttcccaaagagttcccgacctcacgtactctggctatatctatcatttaaaaacatagccatgttagtcatctgtcacaccctgtgctcctgtgtcacccaagtcaggtgtcccaggaacaggtctggagagggtgctgtgggcatctgctactcagacttctcttgggtagaagtctccagactggcaaattaggtctaaaccttcaaagtatctgggaaatgccaagtccccccaaaacagtggtggtttggacctggtcctttacaatgctgagtgaactcatcatttccaaaaatgagtggccgcgagcagtgacgctagagcaggtgagataatattacatgccatgtgataaaggccctcttttatgtgacaaaggccctcttttacattctgtatttatttcaatatatattactaggttggtgcaaaagtaattatggtttttgccactgaaggtaacgacaaaaaccgcaatgactttagcaccaaccttattttaaaaaaaaatagaaaacaaggatatgagatc

SEQ ID NO: 202762 - DNA, 1000 bp, Homo Sapiens
atctagaaaggaatgcttaattaaagcagaaaattatttgtgtatagattcctggtaagccggggaataaaactaagagaaggaggatatttttattgctaaaattaaggaagcttgcaacaagccaaaccttttaaatcctgtggcagtttatgataattatgtggaaaactccacaaggaagaaataaaagaattccctagtgtcatgtggcacctccttctctcccttgccatcatttgaagaacatacatacgtttgcttattggattttcacctttgtggtgtttcaattcccttttagtgctgttgtgttttaatggaacttatattatttaattaaataatgaattaaaatattgggatttttagaaactggcaaattttaacaaagaatggtacttatccatgaggcaccaggcttttaatttagtaattgggcctctacttctgaatgattctatttatgtactgcaccattacctcaacacaaagttgatgtatgggtccagttggtacggattgaactccaacaacaacaccaaagtcccagacacttggcccaatgttcctaccatgtggcatcagtggcaacaggcagttctcttggccaatcagggtgactaacacatcaccaaatctttccatacattttgccaaacagtgcacttagaaattgcatccacttcaacataccgtgttgcaaaaggaacaaaaaagtatatagagtgtattttttcattttgagttctcatttgttattttgcattcttttagaatttcaacatattttggagtgtgcagcaggagagggaagggagaaaaagacgcagatacttcccgtagatactggagtccattattcctgagtcagctgaatgatgctgggagtcagtcaaacccatccccttacagtatgatcgagccaggactgagtttgaagaacctagaaagtggtaacagaagacccactgcagaccagaagggcttttctgagatc

SEQ ID NO: 202763 - DNA, 1000 bp, Homo Sapiens
agttcactgccttgcttcacagagaaaatttggtcttgaacccctgaacttctcatttccaaacttatgaaagaatggacctctcccacctatccttatgtctttacttctagggttagaggaagaggagcattctgttcaagattcatccctcagtccccttagggttatccttaaagctcttccaaattctaccttcaggccaggcccaacgactaatgcttataatcccagcaatttgggaggctgaggcaggaggatcacttgagtccaagagttcaagaccagcctgggcaacacagtgagacctcatctctacaaaaaaataaaaaattagctgggcgtggcagtgcacacctgtggtctcagctacccaggaggctgaggcaggagaactgcttaagtccagaaggtcgaggctgcattgagctgtgatgatgctactgcactcagcttgggtgacagggaagaccctgcttcaaaacgaaaaattctactttcgaattcctactggctatttccctgcaggttagaagcatagacccttctattttagtacaaaaacaaagaggaaacaaaccaactaaaactctccctctgattccgttacttccttaagcttcgttaaaagctaaactccttgaaaaacagcacacaactgcaatccatatatctgaatccttcagtcttcaaccgggtacaacaaagcttgtctccatgataaaactaaattggacttatggtaaccctggacttcaaatgatcaaattcagcagattcacttaggcctctatccttctatctttgtttctggggagccatcttctcttggttatcctgctatgtccagccattcctcatcagtgctatttgttagatccgctgagctcctcttcttccttcacgtcacataattacactgggcagaaacatttgttttcatcaattcatctgccttctaatgctgatgtttcttaaatctaaaacacatctcctgatc

SEQ ID NO: 202764 - DNA, 1000 bp, Homo Sapiens
tgaaagacaaaataaaacatctagaggtcaattaaggataacatcttcttgatattggggaaggcaaatatttcttttttttttttttttttgagacagagtctcactctgttgcacaggctggagtgcaatggcgcagtctcggctcactacaacctccgccccccaggttcaagcaattctcatgactcagcctcccaagtagctgggatcataggcatgcgccacacacccagctcattttctatttttctctttttttttttttttttttagacggggtcttgctctgtcaccaggctggagtgcagtggcgcgatctcagctcactgcaacctccgcctcctagattcaagcgagtctcctgcctcagcctccagcatagctgggactgcaggcgcacaccaccatgcccaactaatttttgtattttttgtacagacggagtttcaccatgttggccaggatgttctcgatctcttgacctcgtgatccgcccaccttggcctcccacagtgctgggattaaaggcgtgagtcaccatgcctggtcttctttgcatttttagtagagacagggtttccctatattggccaggctggtcatgaactcctggcctcaagtgatctgcccgcctcggcctcccaaagtcctgggattacaggcatgagccactgcactcagctgcaagtatttctttgatagaacacaaaaatagctaaccttaaaataaaagattaaaaaattgggctacactgagattaagaatttctataaattaagaactcctgttaatccaaaaaaaaaaaccattatcagagtgaacaactaagctatagaaaatatttgcaacatgtgtctgacaaataattcatacacagcataaaaaattatttcaaataaatttaaaaagaaaaataacctagttttaaacaatcggccaggtgtggtggctcacgcctgtaatcccagcactttgggaggccaaggagggcagatc

SEQ ID NO: 202765 - DNA, 1000 bp, Homo Sapiens
aagtctcagtgctaggggtacaatggggcaggcagaaatagtggggaaaggggggagggagtggtctcagtgaccacccaccaacatgccagtccccttcattccccactacccactctggccctctgtccagtggttttacaaggcggagaccttgacaacattgctggctatggaaggaatgttcgtgttggggcctgggctggcagggggtggccgactttccccctctggggttagcgctgggggagtggggatgctgatgatggctgtggtgatctgggatgttttgcagtttggtctcagtccgtcgtctgctttcaaattaaggctggagcgactgggatagaaaagagtgagttgatgatggttcctgctggccagcgtcccaaagcttccttgaccccctacatttcttgctcgtggtaactaggaggatattttgttgtgcctctatctctgccttttgtaatcaacttgtaattatccattctaattattattcccaaactaccagaaattaccaagttgtatatagtaggctttgaattgcagaatgtacatcacccccaccagtgattgtatatctatcatttgtggcatttggcatttgcattccctgaattctctgcaacgcatttggaggtagtgggaagtggcctaaatataagcagagggggagggaaaagtcagtctctgggattcaaatcagcctaggataagccatgagtaacacagatacgaaaactgtttcttgagaaaatggttggtccattccttgtaccagatcaggtcatttttgtgtatctagagacacattattttatatgtatatatataattatttttaaagtttttttttttccctgttacctattttcagcctaaactgctatagtacctactccaacagcatatgaagggcctttgggtttccttgcaaggaaaggaggaaggtagaggggctcatgcattagataaggggagcggctagaggatc

SEQ ID NO: 202766 - DNA, 1000 bp, Homo Sapiens
ccagaagagtgactgaagagtctcaaagagcctaaaagagatcaaagagcaggttagttaattctttaagaagagcaagaaaagagagagaaaatgtaaggtgatctgcttaacgaaggggctgccagatctgtgacagataaactggtgatctcacatattttgggctcttccctaacacagactgaccatccatgtccatttgtttgtttgtttccacttctatgtcttatgctttgcttttctacctgaaataccattccctcttctcagtgtatgcatagcctaaaatttttcaaggcttatttcaagagctatttcctctaccaaactttgtcttttgtcttcagaccatgttatttttttaccattctaattatgcagaggcaatacatgcagtggttaagaatatggtgcttgaggccaggagtggtggctcacgcttgtaatcccagcactttgggaggccgaggcgggtggatcacaaggtcaggagatcgagaccatcctggctaatacggtgaaaccccgtctctactaaaaatacaaaaaattagccgggcatggtggcgggcgcctgtagtcccagctactcgggaggctgaggcaggagaatggtgcttgggttagattgcactgggttaggatctcagttctggcatttgctggctgagtgaacatgagaacaaattaccatttctgatacttcttttgtggctctcacaggacccagataactctaaactgcatggaggagcttgaggattctcaaattaacactttatacagataattgttaatgatatattaaccaactgttattgaggcttttgagaactcaactattattgagaacttataagcatgttaggtacttttacatacatacattatcattatgatccttgtaaaattttattgttactgatgacgaaacagagattcagagactgaatgacttgcccaaggacaccttactagtatgttttgagccagatct

SEQ ID NO: 202767 - DNA, 1000 bp, Homo Sapiens
ctcaattcacaaagtaaagtgccagagtttgaaccagagcccaggtcttctctctcaacgtagctctttttctccttcattatatcaggcatagtagcaacgtattcttttactagctttttatcttgaatatccttttagcgacttgcctttggtgttagtgtgcctataacattgtcgttgaatatcttaatacatttagtggtcttggcaagcagttttgtcttcagaaggacactgaaatctgtggaaaggactgcagaagattgggtgggcagacacctatcactttcggggctggtagactttctattgaagcaatttgcaaggctactttgtattgtctaaaagcactacttcagaaaagggttgtgatgtcaaaataggcactttgagtgaagaaagggctgtaagcatgggtggaaaatgtggtagatgattgtcttgagttattttctttaatgtcaaacaggcagtccttggaatgctacttcaaaaagtgttgtataatgttgaagatacagttacagatttccaacacgaaactcataaatatgcaattccctgtcctcctaggcacatgaaggaaaatttatgagcttcaggtttctatgcagctattaaagcatatttaatctgctttgagctcaagctcactctcgttggctctcttcgtttcttcctcttacatgagcaaactgcctttctttttgtttaaaaatagtaagtaggtttgttttcctccaggtgtcatgaatgcaaacattgtaatttctcatctgttcagcctttttgcacaacaaaatggcagcacccaggaggttgaaagggttaaattgttccttctctgagtagtaccataagttgttagtctgctactctttctcccagttggcacatgaccctaacatccaatcgctagtggtgtggccattttttggtcttattttggcctttcctcagccaccactcatcagttctcatgcgtatttgtcagatc

SEQ ID NO: 202768 - DNA, 1000 bp, Homo Sapiens
ggactcccctggactggaatctcttgcttaccccacccctgtctccttgctggacttgaattctggaaggaaggggcaactcatgccatgaagcccagtgccctgtgtgtgggtgcccatccctctcacttaccatccagctccaacttcactctcaagaccaagtttaactctcccctctttactgaaacttgtcctcctccttctgcccaagtggagccagcctctctctgtgccaacacagtgcctcgcgtttaggatttgtaatacacatctcattatcctgcagtccaatgcctgtggtctgtctccccataagatggtgcattcccaaggcagggatacggctttgttcatagctatatattttaggcttaatacttacagatgctgagatttactcaaagaatgaataaaaaaagaatactgacagtttcacctttctttgacccctctctctgtacctctggccccaaatatcctttggtcatccctcctttatgtcccacaggggctccaaactcaagccacctcactcacagcaagccctcctgagtgcctcttttttttttttttcttaagacgggagtctcactctgttgtctaggctggagcacagcggctcaatctccactcactgcaacctctgcctcccgggttcaagcgattctcctgcctcagcctcccaagcagctgggattacaggtgcatgccaccacatccagctaatttctgtatttttgtagagacagggtttcaccatgttggccaggctggtctcgaactcctgacctcaagtaatccacctgcctcagcttcccaaagtgctgggattacaggagtgaaccaccatatctggccagcgcctcctttgtagcagaccttatcctgttcttccacacctagcccaagctttgaattcttccttactctcttccccagcacttaaccagttatttcataaaaacaataagggttgggaggtcgaggctggcggatc

SEQ ID NO: 202769 - DNA, 1000 bp, Homo Sapiens
gtgtatatggcttaggtgatgtacgcaccaaaatctcacaaatcaccactaaaaaatttactcatgtcaccaaataccacctgtaccacaacaacttatgtaaaaataaaatttaagaaacaaaaacaataaaataatagccattttgactggtgtgagatggtatctcattgtggtttgatttgcatttaatgatcagttttatttattttataactagcagctaaaatttttaagtctaagcattacaatatgtaaccttctatattggatagggggatgggaaggtgtaacgtgatgaaaagctatttgtaaaattgtcttttgtatgaatttgcatggtggtatttgtctggtattatgcactttataaaaattattatttttaattgaaaatattatttccgatacctctggtcaccctgagtggcctgtgcttggaagtatcaatctttttacctttttttggaggacattttagagtctgtagcctgaaggagtttcttaaggtggtagaacacacctaggtacttgtgactgtttgctcaggaaggcatttgtttgggagcagtcactctattcattgtagcagataggtgcccaccccaggaaaatttttcttggtgactgaatgaataaatttcatgattcatggtttctttgaggcttttcatatctatattatttaaaataaactagttgaagggaagtctgcactattacagtgtgaagaatgcgcaatggtaaaatagtaaaatttcatttcttaaagctggattaatttggtatgcaaataaagtgtaatgaattattaaatcactatcttgcatgcacataaaatgggttaaagttatccaaatttcaattgtgcttctctttttttgtcagttgaatatatacgattagcactgcttacttagcttttaaatatgtgtgagatccattgtaaacaaagattatcttcacagtggtgatggagttacatttaccctagttgatc

SEQ ID NO: 202770 - DNA, 1000 bp, Homo Sapiens
atcccttctccccactccaacccctccccctgagtccccagagtccccgaatggacatttctccaaataaaatatacaaatggccaacaagtacatgaaaagatataagcttaaactgattaaaatatagtatgtgcatatatataactgtataggcatagagaaaatcttgtgggatgtacagcaaggagttattaattttggctatatatggtggtggtggtgtgtgtgctttttattgtcttctttttgtttatatgtgttttaaaaattttttataaaatgaacactgtttttgtaatttttcaaaaagttactgtcttactagtaatgtgtgatcttcatttttttagggatcagaaaccattgttctagtctgtttaagcctcattccaacctgttctatcctgtgttagctgactgccctgtgcttggcatcttgcctatctactctctaatttctctttaatacttctcagtatagcaggctacacttttatgtcaagtcattctaccacatagctcttgttcattgaattgatccaccaaaggaggtataggagcagggacatgactgatgcagtgacaactccccagcctagacgagccctaatttctattctaactctgcagttaagttgatcagaagattagtctttttttctaagcacactttcaaaaaactgtgtaattgtgactagtaactaatggaggcattgtggaaacttgcatatgccaagagtcaagaacaaagatgagagctaaatgcccaacatctttgtttctggttaagactgacttatggaatgcaatatatgtagtagcagcagttgctctctaacccagcaaacttctgttcatgttatttttatgagggccaattatgaaattttattattggatctgctcacccttaaacagttctactcaaatctttggatatagcatgctggtctgcaaccaacatttagttatttttctcctttttttgtatttaatg

SEQ ID NO: 202771 - DNA, 1000 bp, Homo Sapiens
tctgtttgttttttggttttgtttttttttttgagacaggatctcactctgtctcccaggctggagtgcagtggaacagtctccactcactgcagcctcaaactcccatgctcaagtcatctgcccacctttgcctcccgagtagctgggactataggtgcacaccaccacaccagctaagttttctatttaatttttgtttgcttttctgtagagaccaggtttctccatgttgcccaggctggtctcaaactccccctagcctcaagcaattctcccaccttggcctcccaaagtgctggatttacaggcatgtgcctataatgcctggccaaaaccagtttgataatgacaaaatttagcagtgtccaccttggcaccattggatcaaagtgaacattgcagttgtagcccacagaaagcatatccgatcccagagacaggaacttccctggtgggagacagaggcatcaggctcttccaaacctgagccactaattctaattctcctttatcattcagttacgtgacaaatttttattgagcacctactatgtcagctactgtgctggtgaaatcatcctatccccacagagttgacaagaattgcatgctgggttctagacagaaatatagttaaaattaagcattaatcaggcagcattttggcccacttccttgttgctaaaagtcatatagcgctagatgctagccatttgcatccccattttccccatggataggatttccaaagttttaggacattggaagtcttattattggaagaattgatttgcaacccatcattcccatagacaggatctctgacataggaatcataaggctcttgtttaaggattccttaaaaggttttttagaccctgaattccagcaaccagtttgaagactcccacagaggaactggatcagcatgagaatacagcgtctttacctccctgtcccatgacttcaccctgcactcttcaaccagtcaatgatc

SEQ ID NO: 202772 - DNA, 1000 bp, Homo Sapiens
tgcaatagtaatcagcaaacagcaggcagtcccgtttcctatctgcctccgccttcccttctttctctcttcccaaaggcaaaaatatttcccaagtccctccttggagaacttcttaacatataattagcaaagtcttaaggggtcgtttatggaatttttgtttggagacctagtgtttccacctaagtcactgcatttcccacagatgggaaattcaaatcaattaccttggatagaaattctaattatcaggagtatatgcacttagaacaagacgaatatgaatctttcaggatgcacttattccacccaggaaccacaggctgcacagctggctgttctgtgtaatacacggcatgtccagtgtggctcttctgctttcctctccaattgtgtatctcctcttccctctcccagcatctggtgcatgtgagtgagaatggcattagacatccctattaatttcatctgggatgtagataagcaatcccacccacccagaacacagcagaatgtaaggacgtctttcttcctggcacccagtgaaatggcagagttgtcagtgtagaagccagaaccctgaaacagtggaaaatgcaggccagctcatgagctgggttcagtaaagcatgaagaattccaggcccctccgcaaacagctgccccgacagacactccccacaccaccaagctggccacatgtgggaagtgacgtggtgtggcatctggggctgttttggagctgcagtttcttggcagtgatggggggtcccctcttgcctctgggacccaggacactcaatcctctgattaagcccagccctctgtgagttcaagctgtgagccccatctccgccacaggcttccctctcactgttgggttaagctctgaaaccacgtccagggggccacagtatccctgttgcactgaagaagtaactaaagcccagagaggttctgtgccagggcccctctcatgagcactgcaaggccgatc

SEQ ID NO: 202773 - DNA, 1000 bp, Homo Sapiens
agtgggcttcatccctgggatgcaaggctggttcaatatacgcaaatcaataaatgtaatccagcatataaacagagccaaagacaaaaaccacatgattatctcaatagatgcagaaaaagcctttgacaaaattcaacaacccttcatgctaaaaactctcaataaattaggtattgatgggacgtatttcaaaataataagagctatctatgacaaacccacagccaatatcatactgaatgggcaaaaactggaagcattccctttgaaaactggcacaagacagggatgccctctctcaccgctcctattcaacatagtgttggaagttctggccagggcaatcaggcaggagaaggaaataaagggtattcaattaggaaaagaggaagtcaaattgtccctgtttgcagacgacatgattgtttatctagaaaaccccatcatctcagcccaaaatctccttaagctgataagcaacttcagcaaagtctcaggatacaaaatcaatgtacaaaaatcacaagcattcttatacaccaacaacagacagagagccaaatcatgggtgaactcccattcacaattgcttcaaagagaataaaatacctaggaatccaacttacaagggatgtgaaggacctcttcaaggagaactacaaaccactgctcaaggaaataaaagaggacacaaacaaatggaagaacattccatgctcatgggtaggaagaatcaatatcgtgaaaatggccatactgcccaaggtaatttacagattcaatgccatccccatcaagctaccaatgactttcttcacagaattggaaaaaactactttaaagttcatatggaaccaaaaaagagcccgcattgccaagtcaatcctaagccaaaagaacaaagctggaggcatcacactacctgacttcaaactatactacaaggctacagtaaccaaaacagcatggtactggtaccaaaacagagatatagatc

SEQ ID NO: 202774 - DNA, 1000 bp, Homo Sapiens
aatgatctctaacaacgtttcccgggacatgtgattctgatctgagttttgtcaccatttatccctatagggttttggatcacctcaaagggtttctgacaactcaaaaataattagggacaacaccagctgctttagccccagattcatcactcagttttttcaacgttgacacctgataattataacaatagttaacatttattgagcggttattatgtgccaaacactgtcctgtgtgttaatacattatattttgcaataaccctatggaactggtaatattctttttttttttctctctcgagacagagtcttgctctgttgcccaggctggagtgcagtggtgcgatctcagctcactgcaacctctgcctcccaggttcaagtggttcttctgtctcagcctcccgagagctgggattataggcacacgccaccatacccagctaatttttttgtattcttagtagagatggggtttcaccatgttggccaggctggtctcgaactcttggcctcgtgatccgcctgccttagcctcccaaagtgctgggatcacaggcctgagccactgctcccagcaggaactggtaatattcttattcccatgttataggcaagatgattgagaggttaaggaatttacctaaggtaaattattagtagatgatgagcctgggagacaaacccaaatctgtctgaccccaatctcctactcctaatcactagctccccaacccccgccatgtagcaaattcataaattcaccatggatgtctgaaattacctgccgtgtaagcccgcagtaaaaagtcttcttaggaacaagcactgagagatgggagatcacagggcctggttcccaacaaatcagtgcaagagggaatatgttcattgtaagatccacaaggaactgtgttgcttttgcttcctgttatttttccatgacaaagttcagtggctggtacatagtacatgctcaataaatatttattga

SEQ ID NO: 202775 - DNA, 1000 bp, Homo Sapiens
cctggccaacatgtagtgaaaccctgtctctactaaaaatacaaaaagtagctgagtgtggtggtgcacacttgtagtcccagctacttgggaaggtgaggcaggagaattgcttgaactcgggagatggaggtttgcagggagctgagatggttccactgagctccagcctgagcgacagggcaagactcttgtctctcaaaaaaaaaaaaaaactaccttaaacattatatagatccactttctcactttagaagcaaagaaaggaaggctcagaacttgctgccattagtaaggatttcgtgagtggggttgaaaacaggccccctccctcctggtctgttgttgccagcactgcctctgaaccctacgcctgttctcctttagcagacaggtgataactcagaaaaaccaagtcccttgtccaacggccgctagtgactcagtggcagagtaggcacgggaaccggcactcctgacagctccagggctctgaccactgtgcccagtttcccctttccagctctcaatcagctagagacagataaattccaggcaactagtgaatgtgccacctgactttcagatgggaagaggggagcattattaaaaacagacttaaaaaaaaagacacaacttgacactagacaggagtaaacttcagccagaattcccatcaccagaaaaatactgggatatgacatttgggaagcaagggaacaatttcaggcactgttttcctctaatttgggagacatctttgttgttgttgttgttgttgtttgtctcactctgtcacccaggctggagtgcagtggcacaatctcggctcactgaaacctccacctcccaggttcaggtgattctcctgtcccagcttcctgagtagctgggatcacaggtgtgtgccaccacgcctggctaatttttgtatttttagtagacctggggtttcaccatgttggccaggctgatctcgaactcctgacctcaggtgatc

SEQ ID NO: 202776 - DNA, 1000 bp, Homo Sapiens
atttattcccaggatataaggggctgtagaaagagtgaaataaagatttttttttttccagatgctgtaatcatttggctgaattgttaagtgttctttcatatggaaactaggtaactacagtcaattgcaacattgcaacctcatttaaaattctgctgatggcaagaccaggggttctcccttgaccctctaggacagctaacgctgatgggaacaaacttgcctttgttgactttgttgactcagcaacctcctgttccttttactctttctggtttcacacgcaggattctatgatgtgttaataaaccctgtagctagtgggctgcttaacattatgactgtggatagatttcttttctgctattaccacagtagatttccttccggactaagaagccataaacccagatgtaatttggggcttatccattcatccaccctcacatccacccacccacctatccatccatccatccatccatccgtccatccgtccatccatccacatctatccatccacctacctacccatctgtccatccgtccatccatccatccacccacctacctatccatccatccatccatccatccatccatccatccatccaccgaggcttccatcatttaccgaatgcctactatgtgccaggcaccatggaagatgatgaacatccacagtgaacaaaacagattatggcccctcctctcctagagattacatcctaatgagagagacagataattaacatggtaatttcagagtgataagtgctattaagctgtgacaaacggggactaggatgggagacaactttagataggatgatcagggaaggcctctctggggaggtgacaattcagctgagtcctaagtggagccagtcacacattgatctgggcacagagcatttcaggcccagggagtggcacattcagggactccactcagctactgctaaaaaattcatacatttgtcacccctgtattgtc

SEQ ID NO: 202777 - DNA, 1000 bp, Homo Sapiens
ctatcagtccatccacagccaggctacaattcccagggactgcatgcctcaggagtagttgaagaataaataccttatcttccatgccccttgggttgcaaagttctgatgtgtgttctctgctttctcccagagttcctcggtgagactgagccctaactgcccacagctgtaacctgcctgatacccttctccttcttagctgcctttccttcttgtctcacttctcttctctactgttgtttcatagggtcaactcccaaaaaaggtgcttgcactcaaatccttgtctcagatcctgtttttggaagaacccaaactaagacaagcacttttctataaatggccttaagggaatcaaaagtgaaagatgggtaaggtcagagttgctgagcattgagagaaaaaaaaatggaaagaggctgtgcctcatcattcctgccaacctatcacgttattgtcttcgttgtttccaatcacgaagccctggccagtggcctccaatcatagatttccagtctacaaaggacttagccatttagcttagtcaaactgtcagtttattagaagaggcagtttgcagaaatggcaatgttgggaccaagaccatgttttctttgtcccgctactccagacatccacctaggcactccaacaggacttgcttagaaaaaagttgcaacacagaccatttagaagttagtgatcgatgtctatagcagtggtttccaagctggtcctagacatagcaccctttgtttgtttcttctaacaaagtctcgtgagaaaggccaatgtgtagggaaaagctttaaaggtgctgtcttggtggaatagaggggagcctggagtacaggtgatggtggctgttgccctatcactctttctcctcctgacctaccccattctctgcagggatgtctgcccaaacccagggatattcaggatactcagtttaaaaaccactcctctgaaggaaatactgactagtttaaagatc

SEQ ID NO: 202778 - DNA, 1000 bp, Homo Sapiens
tgcagctctgctcggagcccatggtaactgtgtgactcagtccccaaatcgcagaagggtttcccaaatagacccacagcaaatgccaaacgtattggcatctcctcccaccaggccatcagattcaacagtgaatgtgcctcccagaaatcttgcccgtggggtgtttctgaggatgaaataaagaaaaacacaatttaccctcttcatgagctggacagatttctcctcattagaagggaagagaatgtaagcttggtggggaagagctttgggctgtttcattcactgctgtttgcacagcatctagggcagagcctggcacacagtggggtctcagtgagtgcctgctgcataaagaagagacttggccaccctgagggggaagcgttctctggaggcagaaggcaaggtccagccctgtgcctgggcaagtcactcaaattgtcagttccctcatctgtggaaccaaagggctggatcagctttggaaacacaagagctgtagagccgcaagctggggatgccttctgtcccatcatttccaagccgtggagcctcgagcgactgccatgacatctccaagcctcaactcatgtgatctggagaaggggtgacatcagttcatgaaagggtggctgctcagccaccaccacacctgactgttgctctaagaatggataatgtaattattgagttattgtcacacactaggggatgaaggaagcccacgctgtactcaccacgcacagacagctcggtgcctgctccagacttaaactccacgtggtcggggctccctttccggaacttcacacagtagtaggtgccggcatctgctggggtgatgttactgatgcggatggaaaagtccatgttgtttctctttgtgaggtctgaaacagttgttacccgtgggaagtggccttctttctgattgtagattaattcccggcctggtccagctcctctgaaccactggatgggccccacagggatc

SEQ ID NO: 202779 - DNA, 1000 bp, Homo Sapiens
cccagaaagcttccctgtgctgcccctttataatcaaatcctcccccctacccctaatctctggaaaccactgatctgttccctgtttctctgtctttacagtttcttcttttccagaatgttatacaaatgaaaccagacagtatgtagccttttgagactggcttctttcacttagcataatccctttgcgatccatccaaattattgcacgtgtcaatagtccattcctttttattgctgaatcatattcagttgtattgatctatcactatttgtttattcattcacagttacaggacatttgggttgtttcagtttttggtaattacaaatgaggttgctataaacgttcacaaacaggcttttgtgtgatcacaagttttcgcttctccaggtaaatacctccccaatcctagaggagtttctgcatcgaatctactttctgtctctataaatttgtttagtctagacaattcatataaatagaattatacaatttatggccttttgtgactggcttctttcacttagcataaatgttttcaaggttcatccctgttgtatcatgcatcggttcatcattccttttcatagccaaataatattcctatatatattcatatatatatatatataatttatccattcatcagttgatggacatttgggttgtttccactttttggctattatgaatacttctgctatatgtgttcattctcttggtatatacttaggagtggaattgctgggtcatttttctctatgttaatctttggaggaactaccaaattttttttttacacagcagctgcatcattttacattcccacaagcagtgcaatatggtatcagtttcttcacatcctcaccaacacctgtttttatctgtttttgtttttttttttcgagacaggatctcactctgtcgcccaggctggagtgcagtggtgcagtcacagctcactgcagcctcgacctctgggctcaagtgatc

SEQ ID NO: 202780 - DNA, 1000 bp, Homo Sapiens
tgtttgtgggagagtgctgaccaagcaagatttctctcaataagaactagaaccaaatacaaaactgaggatgtgccctggctcccatggtaatgatattgtaagattattttatgtgccgttgagattgatgatctcctgtttgccaggcaatggtcctcctgttaccctagctggatgacagcattaagccagagtgaaagtgtatcaaccattgacctgtaacatacagatctgtcatgcatcttcatttcagatgacaaatgtgagtatgacatgtgggtaaatctttaccagagaatagaccaccacaaaggcaggtgatcatatgtttagtttgctgacagtaattgagtgagcctttcccttcttgcaaggaaaggagaacttgcagtcaaaaggggaaagatcctctcttatcttgtccatctttatggccagaacaaaaatatacctcacttcctgtctatctcttatctctgatcacacctggttatcctcaagcagagagtacatttttcagtgaagtagttcaatcatgatctggccaacaaattattgtttgttaaataacttttaatctgattattaaaaatatgcataatctcttacagaaaacttatgaaatatagaaatatacacagaaaacataaaaatcactgatacccatagcctgacatcattctttatgatgaaagactgaaagcgtttttcctaagatcaggatggccattcagggtactcgagggtatgatagagactgtggaagaaacaaagcacactcacaccaaccactagaaatgaggatgcctgcttttgctggtttgctcaacataccactggaaatcctaatcagagcaattaggcaagaaaaataaataaaaggtattggaaaggaagtagtaaaattatatctgtcataggcaacatgatcttatatgtagaaaacaaactgttgttactaataaagaaatttagcccagttgctgcatacaggatc

SEQ ID NO: 202781 - DNA, 1000 bp, Homo Sapiens
ccttcagtcatttacttttcatttgtaaccaatgatgtttcttttggggtatatttgtattcactctcacatcttttacgattacaactgtggttattcttctgtaaaaataaaactttggtttttctttattgaaaaaggtaatatatgtatatattaaaaacacaaatcatctcccaaagttatacagtagaaataagcatccttctccctccaaatccctcatctcctagttctacttcaaggccagcattgttacaaatgtcttagtgattatcttgtaatcataatttggccctggacttaacgctgccatttcaccacaaaattacgttttatttctctctgtgtctgaaacagtcaagcagactttgcaatctccttcctatcctcaaggattactggcatcctagaaaacctcccaaggccccacccctctatgctctggctcaaagcatcccttcagttttaaacatttgataatgagctcactgaccttttatttagactaactcttcctctattcccacttggataactcaaatcagacccctacagcatccagtctccaaattcctggaagagaactaccaagagtagagtactaatgtggaacttgggcaaccaaaaagagtaaagcccattaaattagcttatccatgaaaaaaaaaaaaagttgcttatactgaatttgaaaataaagaaatatgaataaatcttgtttgatgtgtttggatataatttagaaggtaagagaaagagcagagggaatggggcaaatgaaaaacagggtttgggcagggttacattaaagtgatttcattgatgagatttaaaaacttaaagtaataattaattacttttatttattttattttagcattttataaataaatacaatttttatttataaataaataaaaataaatatttatttaaagtattgagttaaaatttaaggtaaattttattgatgagaaattctgactgaggcaggatc

SEQ ID NO: 202782 - DNA, 1000 bp, Homo Sapiens
agcaagcatagataggaaactagggcagcagcacccacccacttagccagcactgaatcctcacccagttaagacaaaggcatctgctctcttctgtcctctttgcctccctcttagcctaacagtgctctcagcattggttgcacactagagaccacctgggagctttaaaaagtcccagtgccaaaaccacatcccgtagagactatgattcaattagtcaggggtggaatctggcctgctgtggtagattaaaaatggccataatgccttacaacttcccaccccttgaatctggattgggctcatgaattgctttgaccaatagaatgtggcagaagtgacatggtgcacattctgagccaggcctctagaaacctcacagcttcatctctcaccttctgggaatgttgctgctattcagaaaagcatgggctggcctgttgggacatgagaggccgagtgggaacacagacccagccatctcagcagtcccacgtgacagacatatgtgagatcccagccagcaccacctggagaagatgaaccatcccagctgagcacagcccaaattgttgacccacagaattgaccaaataagtaattattgtttaagatatataactgaaacagctccctggataattcaaatgtgcaacaaggggctaggtgcagtggctcatgcctgtaatcccagcactttgggaggctgaggtgagtagatcacctgaggtcaggagttcaagggcagcctggccaacatggtgaaaccccgtctctactaaaaatacaaaaattagctgggcatggtggcgggcacctgtaatcccagctacttgggagggtgaggcaggagaattgcttgaacccaggaggcggaggttgcagtgagctgagatcacattattgcgctccagtctgggcaacaagagtgagattctgtctcaaagaaaaaaaaaaaagtgcaaccagagctgtaaaatatgatgctagagagcag

SEQ ID NO: 202783 - DNA, 1000 bp, Homo Sapiens
acctctctttttctcctagcattttgctccccacctccctactctagcagtgagtcctggggttctcttcctcagtggagtggtgtgattacaagaaatggccagctggtctctctttgaagtttcttttttgtttgttttgtttttgcttttttgctttgttttgttgttgttgttgttgttttgatggagtctcgctctgttgccaggttggagtgcagtggtgcgaactgggctcactacaatctccacctcccaggttcaagcgattctcctgcctcagcctcctgagtagttgggattacaggtgcatgccaccacacctggctaatttttgtatttttagtagggatggggtttaagcatgttggccaggacggtattgatctcttgaccttgtgatccacctgccttggcctcccaaagtactgggattacaggtgtgagccaccgtgcccggccctctctttgagttattatgtatatttgtggttgtatttgccactgattgatggaagataatagagagaaaatggccctgagaagaaatacccgagatttaaaagaagaagggatttctcttgaagacaaggaaaagattcctttaagcaggaggaggtgggaaaagaaaatatggcttgagaaggaagatggcaacacccctggtgggaggggctgggggtggctgagtgatatgttttaggtaggcagggtcatagagcgccacagatagcccagctgaatgtctggtgccctccaggcctgaaggggccagccagacatcttagaaatacctgtgtgcacagatcactggaacttcaggaagaccaccttccagggcgtggcagtacatgagtcttctgaaacttacactagaacctttaaccttgactgagacaagatctcagtgacatgggagtttgacacagaaattcagtctcattttaggaaaataaagaggtatttcttgtgctcttgaaattcaaacccactgcatgta

SEQ ID NO: 202784 - DNA, 1000 bp, Homo Sapiens
actctagtgaccacatgaatgacaagacagcaaaatagccttgttgctaatatagaggaagtttgagtggtctggatagaagatcaaaccagctgcaacactcccttaagcctaagcctaatccacagcaagaccccaactctcttcagttctatgaaggctgaggaatgtgaggaaactgtagaaaaaaagtttgaagctagtagaggttggttcatggactttatggaagcaatccatcttcataacacaaaagtgcagggtgaagcagcaagtgctaatgtagaagcatcagcaagttctccaggagatctagctaagatcattgattaatgtggctatactaaacaacagattttcaatgcacatgaaacagccttctattggaagaagatgccatccaggattttcatagctagagaagagaagtcagtgcctggcttcaaagcttcaaaggataggttgactctcttggggtctggtgacttgaagttgaagccaatgctcatttactattccaaaaattctaaggcccaggctgggtgcagtggctcacgactgtaatctcagcactttgggaggccgaggcaggtggatcacgaggtcaggagatcgagatcatcctggccaacacggtaaaaccctgtctctactaacaatacaaaaattagctggatgtggtggtgcgtgcttgtaatcccagatactcagaaggctgaggcaggagaatggcttgaaccagggagtcggagactgtagtgagctgagattgcaccactgcactccagcctggggacagagcaagactctgtctacaaaaaaacaaaaacaaaaacaaaaacaaaaaccttctagggcccttaagaattatgctatgtctactctgcttgtgctttctatatggaacaacaaagcctagaggacagcataactgtttacagcatggtttactgaatattttaagcccactactgatacctactgctcagaagaaaagatc

SEQ ID NO: 202785 - DNA, 1000 bp, Homo Sapiens
agatttggaaagttatacagaatattataattttgtatttagcaaataaaatgcattaaaatgttttaaactaaatacagcgctaccctcttgactagaagacagtatgtatcttctgctatcaatgtgttttgaaacagttcatatcatatgagaatctgaggtatgagatctgtatatatttcaaaatccagaatgggtaaaaaaaaaaagatattttctaaagaattgtggtttatatcacttgagacctatgaaaactgtttctatgtccttcaaatgttaccaacacagttcagaaaaccaagttaaattcctcatgagggtcagctgaataaaaaagaaagaaaacaatgttcaaaatgatgaacattactttaaaaaattaacaggtaggttctttgtccagcaaggatgtgcttctgaaattacaataactaaagacattggcattctcaactagtgcctgagtgatggccagtcaatggtcagacacagagaacagagcagggtctggagggcagggagggggctctaccacactgaggtggtcccttgcttgattttcactctcaatgaactgggacacactgtagtttatgtagtttatgtgcgcccagttaagtggctttatgggttacattatgctccacggcagattcttcacaaggctttatttaattaatttatttatttttggagacggggtctcactctgtcctctaggctggaatgcagtggcactgcagtctcagctcactgcagccctgacttctgggcttaagcgatcctcctacctcagcctccaagtagctgggactatagatgtgcttcaccatgctcagttcattttgttttttaaatattttttgtagagacagggtttcaccatgttgcccaggctggtcttgaattcctgggctcaagtgatctgcccgcctgggccttccaaagtgttgggattacaggcgtgagccactgtgccacatgctttatgatc

SEQ ID NO: 202786 - DNA, 1000 bp, Homo Sapiens
tcagttgttacactggagattataacttgtatccttgattataacctaaccagaacattacacttcataataatcctagaacaacagaatattttaactccatgtaagaccccctagcttttgtgtttttattgtcttacatttcaattccatatatttaacttaaacttcactaaacttaaactttcacagaaaattatgactactgtttcggataatcaatactaagctatagtgtatgctctcctccatattttcttttagaatcattttccttctgccaaagggagctcccttgcagtaccttcttttagtgagagcctgctagtgataaattctctcaatatctgtttgcctaaactatttttatttcatcttaatttttaaaagatattttcactgaatatagaattgtaggctagcacagtcagcaatttaagatgttatgccattgtgcatacaggtgtggttttctttgaatataatcttaaaagttaacaaagcttgtgtaatgatgttctgaaatcttcatgagaatttttttttagatactgttagagattttctctctcttctttttctggaattcaaattgtatataagacagatcttttgaccagatcccaaatgtgttttatcctcttttctgacttgtgcttcaatttggacattttctattaactagccttccagttcattattgctatcatctactgagtccgatatgttataagcctattcattgagttcttattgtcagatatatatttctctgatggctccacaaagtttacttgatccatatacatacatgtacacacacacacacacacacacacacaaactttctagggtaattctccaccctcttacctcttttgttccttattttctctatgttcctaagcataacaatcaagatgttcttgtctgctaactccaatatctggatcagctgtgcttctgctttttattgtttctttcccctttgttattgatc

SEQ ID NO: 202787 - DNA, 1000 bp, Homo Sapiens
gctgagattgcaccactgcactccagcctgggcaacagagcgagaccctgtctcaaaataaagaaaaataaacctctgggattaaaaacatgttactaagctacatagtactctgaaaaatttttgaaatgttttcttgccaacttacttcaaagagatgctgtagaggattggactgcagtttttcctcatagccaaacagctggaagccagttcccagaagacctaccatgataatccgtaaatgaaaaattataaagttgaacaacagagaataggcatgacagggaataggtataattctataaaaagaccaacctgtcatattatgtatcctgagaagtattacaaaacacacttttaccttctatgaccccataatctgacacaagtcaaattcaatatatttaatcataaattcaacatactgaatagatcactgaaattaagctcacagaaaccaataggttatgagctcatcaaaggtaaagtctaggactaatttatctttgtactaacagtgctgaacaccaccctagcagacattaaaaaataaacatttattaagcatctactctgttgaagtgacatcatgaagctagacactaggcactcaaaatttattaaaaaaactgatggaaactgttttcaaactttctttttaaacttgtaggcattaatgcgaagacagcaatggttttgttgttatattagttcttaaacaaaattggaggaaaacagcaaggtaaaacttggaacatccttgattatttctcaggttcaaggtagccaagcaacaaaaatctttaatttgactgtgtataattttttagtctttgatgataaattcagagttcagggatagtgttaatttgaacctaaaaaaaaaaagaaaaaaaaaaacccaaacaccaaaaactgaggttggtaaactacatatcaaaattcctagtacagtctgggagtatgtagactcaagatattctgcataaagatgatc

SEQ ID NO: 202788 - DNA, 1000 bp, Homo Sapiens
ctttaaaatcaaatagccttcctcttactaagatgggtttcttagatataaaatttaaagatattctttttagacactgtccatgcatcagaaacaacagccacacacacacacacacacacacacacacacacacccctttatgaaatctgccctaggtaaataccaatttgtcattgttggtagagtaactattttactaaagttatcttggaaaaaaaaattttagggattaaaataatttaaaattgtccatacactaaatttggtttctgaatactcatctttgtccatgtgaaccatttttatgtaaacatatacatattttacaaccttaagttttaataatttaagagaaataaatgttatgagagttacttttaaaaaaataaatggctaaaaatgttaagtcagccaacagaagactacttgaagatgcattagaaagtacaaagatttgaagctaaaaatgcacattaataatgtgtgctggtgtgaccagttttctcacctgggcttaactctactaaatagggcagcttctccggaggaagggtggagccatagccagacccgtcagctctctcctttcccttgggtgtcttgccttccaagtgtttcttggttttctttgggatgtggtctggtggcctcctcttcaactgaaagactaaaatccctagaacagcagcatgggaaatcatcaggcagactcaggttggtcaggatggcccgctgactggcagtcaactgtgcaaaactttctcaaaaagatgcatgtaatttaggaacatctgccaaggaatcactgtgtacagcttacccaattcatactttcactcaacagaggaaatattagcctcttggtgtgtttgaaaagctctagcaagcaatttccaaagactactctaaattaacagctaccgaaagacatcataagcttgaaaaaaaaacaccaggttaagaataaatgcttacattagtaaacaactctatgatc

SEQ ID NO: 202789 - DNA, 1000 bp, Homo Sapiens
ccttggcagcttaatacaagtactgtcttatacacactgtgtatattcagtgtttattgttactgttcttagagttcagacatgttgctgtagtcgaacttgaaaaggtatttgggtatgctgtggttagagtgtcctttatatctattttataaattcatttaaaagccagaatttttcctagaactagattgtgaaaggctactggaaaatgcttataatttaccagttatcttgagagttcatagctttcagttcagataccaggaacttactattttgaaatttgtagcatgtaatttttgcatttgcttgcagaaccagcaaccctgccagtttcaggatgggatatattattttcttccttttctttcctaggcccagcagtgagaaactttcacaatctgtaatagatggtgtgactgttctaggaggtcaattccatggtatgtagttatcctgagttggaaattaaactaatatttaaaaaactttaatttacaaaagtaatgtatatttatttagaaaagtttgaaaatacagatgaacaaaaaatgtttaaaaaatgaactcctagatacaaaatactaactttaaaaatcatcttccaggtcgtttctgggcaggcatgttttgtcttacctatggtagtactataggagattatagctgggaaattctgaactaatacaacttcctttactttggtaaggctgaatttcctcaaataaaaacctttttaagtacttgaagatgatcattctggggagcttttatcaatattattaggtcttccctaatagctggttccctgtgaaatcagctgttacctgtcaagtagtgatgggaaatatttttgacaggtagttctttatgttatatcaaatgacagagaattaagtgaaacaaaacagactaggatccccttctcacactgtgtctgttgtgaaggcactgcctccaccatgttttgaggtgaatattttcctggtgtgagatc

SEQ ID NO: 202790 - DNA, 1000 bp, Homo Sapiens
aaacaagtaatgaaattatttttttcctacaaccctgagttttggaaatgtagcattgtcttttctaaatcaaattaagacataaatcctcaatctataggtggtgaggcccagggtgagacagttcaggtggagggttttcatacagctgacatggatgttctttccctatgcacccatggtttggttgaaggagagctattctgttaactcaaggccaagggtgggcacagagatccctctcaggcttctaagaccataactcttagagttcaattccttccacctggcacactattaacatgtagtcctctgccagcacacaccatgggagccggaaacacttaagaaaactgtttcttccattgacttgaaagctatgtcactctaccttctgcccactccacccctaaattatctccatatgctttggaatatccctcaataagtctttagaaacacaattttggcctctctttcatagagatgggggtagggatggaataagcaaagggaattatcttttttttcccactcactctgatggtgtgtaattgagtgtgtgggcacaaatacacaacagagggactattatgagtgtgctatgagtgctcatgtgtgagtgatgtgggtggctctgaaataccatctgagggtgctggtatgaatgatggcctgatagacatatgtgtcatcaggagtgtgataaaggagatgagatgggagcatggagaaaaggagatggaagggagatggatgctgtgaaaagggtgctggcagggctggaatccctgaggaggatcttcctccagctctgcccagcctccatttggtggtcagtaggggtgggcataagaccctaacctgttccccattcttcccacagggtgtggttcacacagttgggggctacatgctctatgtagccacaaccttcaagtatgtgtttgacttccatgcagaggatgtgttctggtgcacggcagacattggttggatc

SEQ ID NO: 202791 - DNA, 1000 bp, Homo Sapiens
aaaagtttttgtttgaacacctgttttcaattctttggggcatatagcttggagtagaaatgctgggtcaaatgctaattctatgtttaacttattaaggaaccaccaaacggatttccccaacagatagaacactttacattcttaccagcaatgtacagtataagggttctaatttctccacaactttgccaacagttgttattttccattaaaaaagtatttttatcatagccattctagtgggtgtgaagtggtattttattatggttttagtttgtgtttctctaattattagtgacagtaagcatttttttggtgtgttcttgctggctgttttgtatgcagttatttcttcaaaatgtttatttgagtcctttgctcattttaaaattgggttgttagtctttttgttattgagtcatagaaatcttaatatattctggacattagaccattatcagatatatgatttgcaaatattttctctcattcttatgggttgccttgtcactcttccagtagtgtcctttggcgcacaaagttttaaattttgataaattccaatttcttttttgagacagggtctcactctgtcatccaggctggagtgcagtggtacaatcatggctcactgcagcttggaactcccaggctcaagctatcctcccagctcagcctcccaagtagctgggactacagatgcctgccaccacacccagctatttttgaggggattttttttttttttttttttggtagagaaatggtctatgttgcctagtctggtcttgacctcctgagctcaaatgatcctcctgccttggcctcccaaagtgctgggattacaggggtgagccactgcgactggcccaatttatttttccatttgttgcttctgcttttggtgtcacatctaagaaacaatttttcagatgcaaggtaatgaaaattaacccttatgctttcttctaagagttttagcttttatatttagatc

SEQ ID NO: 202792 - DNA, 1000 bp, Homo Sapiens
aaaaaaaaaaaaaactaaaaaatagtcttttttatagtagagaaaatcaactttaaggtggctaattcttgttctgcattattaattcacaacaaaggctaatgtaaaggaagaaattataatgaattttagaggagtatatattttgaaacaagttacacaccaaaaaaaattataacatattaatcaaatgtcataacacacaagtttactatcttttaaattttccctaataagcatatctgttaagagcaaatagtagacatactgtgaaatatgcttgatatctatgaagatggtgctaacatgaccttcttaaaaggcagcccagtagatcaagattaattagctggtatactagattagcttttaaaagcaagtttggaactttcaactcctatgccttattaaaacacaacttacgagtcttagaaacaattctaatcattaccatgttagaggatcagatttgagtcaaaaacttgctgtttaaaaaaaagtaatacaaaggtattaacaaatagcaaaagaccatctctaagttttgggtttcttgaggagttggagtttctggcataggcacagttctacttaattcccatccttccgaagggttcacacttttactttgacatcattccaccagtcccttgtggctctggccaaatcaaactctgacttgaagtagtttaatgtctaaagttttagtgagaatagtaccagctgctttaccagagtaatgttcatcttgcagttttgctcaacctgagaaatgttttaaaacgttaagccatctaatttaagcagatccaagcaaaagtattttagcttatccacatatttgtgtttgcttcactgggtcagacaaatctggtctcaagttacttaaacaggatcagtgatcacacagtaatgagaatgatggcattaggccatatgaaaatttcattattttatgtttagttacaccccataaatgcctacatgcctagcaacatag

SEQ ID NO: 202793 - DNA, 1000 bp, Homo Sapiens
aggcaagcccaagaggtggggacagtaagcccatttcatggtctcagccaactgaggccttgagagggaaaatgctctccgcaagtcacacagccaggaagcagcagagcaaggccttgaacctgggaccctgtgaggccagaatgcatgcactggcccctactgtcaactgcccctgccatccaggggcttgcagtgtcctgggggtgataaacccacctgctaggcactctctcctgacacccactttcctgcccacctgcacataacgctacccatttcccttcattttgcaggatcaccgaccctcatggcttccctcaacagcaggttccaccctaggtttctgaggtctgccactgccctcccagcctcctgagacattaggttggcttttttccttcctgggcatccatcctgctgctcctccttgtttttgtcatcatcaggccctgggccaagggtgttttgcccactacctcatgacacccttaaagctagattgaggtactactgtacaccctccttgtacacttgaggaaacagactcggagaagggaagtgacttgcctgagatctctgacccagctctgccactgcctccactaatgaccttggcccgggctcttctctctctggtcctcagtgttcccatttcacaggacaggattggactagatgtactctgagggtgccccagccctgatgttctgtgggtctgcattctcagtcacatcatctctctgggccttgttccagcattcacctaagtaatggggtgggtgggggggtgagaacatctgtccagtgctgccctgtctggctcccaggacaggtagcctgtgtgtaaaaagcactccacacatgtctgagacgggaagtcctctggcatgtacctgggatcaatgtctatccctcacactctgagccccatgaccttgtgccagtcacttcacctttctgggtctcccatttcctcatctggacaatgggagttaca

SEQ ID NO: 202794 - DNA, 1000 bp, Homo Sapiens
gctgtctgtcctaggcagactccagttctccagccagtctcagcctcatgacctcagacaatctcacccagccttggtctgctgagtcacagaatggaaacaggtgctcactcccctggccagggtagcatgagaatcagtgaggtagggtggaaaagggctctctaggtggctaacaattgggaactctaggacaggtcagaacttgagtttgcagaccagccctctacaggacactggtggacacagagtgttaaatcctgggcttgaggactgctttgggcagcccttttcttgtacctgttgccgattctggtggcttaagctttcttcttggagtgaatacctactcattgtctcaggcaatacaggccaacaactttcctctttcagcaagtctgcagggtgtctcctgtcccagcttcatacctctccctccccactcttcccattcccactctctccatggctctggctgctatgcactcagaatactgaagagctatttgctggggtggggtagagaaaactaaattcccattgcttgatgttggctgagcaggtggcactgttggagactcgcctcctattcctctttctcctcctcattttttttcattatcctacagtgatcaattgagcattgttaggtactggaccaatcatctttttaaaaatgaatcatcttaacagccatgcacctgtagtcccagctagtggtgaggctgagacaggaggattgcttgaagccaggaggattgcttgaagccaggagttcaagaccagcctgggtaacatagtgatactctgtctttacttttaaaatttaaaaattagctaggttgatggtgtgcacctgtagtctcagctactagggaggctgagggggaggatcacttgagcccaggagttcaaggatgcagtgaactgtagtcaagccactgtactccagcctgggtgacagagcaagaccctatctctcaaaataaaataaaagatc

SEQ ID NO: 202795 - DNA, 1000 bp, Homo Sapiens
aacattattaactttttatatcagatttcaaatctaaatgatttaaatttgaataaaataagattatgacatatttaatattcaacgaattgaaatggaaacatcatagcctactaagtatttgatattcattttctcatctaatcttgcaaacaaccgtaggcggaaggaactattatcatcatttttacagataaggaaaatgagcattggagttctaattctctcatggttacacattcagtcaacagaaggagctgagagctgaaccagcgcaacctgatttacaggctcacactccctaaacacaatatagcctttttaaaaaaataaaaacactttaaaattttcagtttttccttacaatattttacaaagttggccaggatacttttcattatgccattgcatagtatctcaaaaaacaagaactacaatccatgttagaacatcaaccagatttgttagcacttaaagtacttttgttttaattttcttggagacagggtctcccaatgttgcccaggctggtctcaaactcctgggctcaagagatttacaggcctaagcttcccaggttgctgggattacaggtgcatgccaccatgcctagctaagcattttgaaaatgtttctaatggggccgggtgcaatggctcacgcctgtaatcccagcactttgggaggccaaggcgggtggatcacctgaggtcaggagttcgagaccagcctggccaacgtggtgaaaccccatctctactaaaaatagaaagaaattagccaggtgtggtggcaggcgcctgtaattccagctacttggaggctgaggcaggagaatcgcttgaacccggggggcagagattgcagtgagctgaaaccacgccatcacactctagcatgggcaacaagaatgaaactctgtctcaaaaataaataaatcaatgaataaaaatgtttacgatggagttcctgatgggttaaaacttggtggaattagatc

SEQ ID NO: 202796 - DNA, 1000 bp, Homo Sapiens
ttatgaatggggccagggacaaaacagaagagaaaggagatgtgacaaaagctaagacacagagaaaaggagacacagagaaaaccatccggaaggacagaggcatgttctggatgattctgaggcggaggaaggcagcgcaaggccagagaacatctgggtgttgggggtggcacatctaccgtctactccattccagctaggaatggggggcgaggctgcaggcaggggcggggcacacaagctgagggctggggtggacagatgacagcctccaactagccaaggctcgacaaaactcaatggctttggttgctacttttagaaaaacaggtatcaatgtttgaaattttgggataaaaacctatgcaagagaaagaaaaatgtaaactagttctttctatcgtcaaagggacttgaaaaaaaaataaagtgaaagcaagtttattgagaaagtaaaggaataaagaaaggctactgcacacgcagagcagccaaagggacttttttttttttttttgagacagagtctccctctgtcaccaggctggagtgcagtggcgtgatctcagctcactgcaacttccacctcctgggttcaagtgattctcctccctcagcctcctgagtagctggaactacaggtgcccgccaccacgccctgctaatttttgtacttttagtagagatggggtttcatcatgttggccaggatggtctcaatctcctgacctcgtgatccgcctgcctcagcctcccaaagtgctgggattacaggcgtgagccaccgcgcccggcaaggacttttaagtctccagcagacacttccccagggttgggagaagtactgttagtggttaagagcttgggctttgagctctaccaccaatgtatggttctgatcctcagttaccaaatctgtaaaatgtgttggtaggatcaaatttaaagaatgccctgtaattccagcactttgggaggccaaggtgggtggatcacc

SEQ ID NO: 202797 - DNA, 1000 bp, Homo Sapiens
actggacacagaaggaggctcatgagatttttctttctgctctttcagaaatggctgagcgacacaacaccaagcaagtcctgaagctggcgcgggacctcgtgtacaaggtgcagactctgattgagaacaagtgaggggcacctcaccccggcagcctcagccaagctgcccctgccccgctcctctgcttacttttcctcctggctggatgggcaccccgggagcggggtcctggtgtctgttcacaagcgtggagttcagtgcgcaaagaaactaccctgacttttacttctgggcagatggggtggagggagtaccccttcaattcagccttacattttcctgtttgaccaaagattgcccaagtctggcgttcctcccttgcaggaggtggaggttgttggtggaggaggagccatctttgtttgctggtgcccggaatggtctcctcttcttctttccctatccctccaaactgtcttgtaagatgagacctggggaggaaacttctttttggaaattggtgtagaagaggtgtgtggggctacctctatgctcctctgcaaggggcctttggcgatgttctggacatggctgaagattgacttagagattgaccctccacctcgacattactgacatttggggccaggtgattctttttgaggggactgtcccctgcattgtaggatgctgagcagcatcccgggcctcaccagatgccagtagtgccatcccccaaccatacccctggttgtgacagcccccaaaaatgtctctagacattgcgaaatgttccctgcagggcaaaattgcccccatttgagaaccactggcttggagaagggactacaaatgtacttcctcccccattcttttgacgctaagccaccctggtcctgacgcctcccctcacttagaaaaggcatacaggaggccgggcatggtggctcacacctgtaatcccagcactttgggaggctaaggtgggcggatc

SEQ ID NO: 202798 - DNA, 1000 bp, Homo Sapiens
cttagttacttaaagaaacgagggagggtgactattcctggaagtaaccaggagtgatgagtagccttcccttaaggataacaaagtatgtcaattgccccctcaccctcccgccacaccacactgggttttgcagcagtggcttcctgcctggccagtgagcctggtgtggtaagcagcctgttcaggctgaagacaacgggcaaaacgcagcttctctgaggccatgaaactgaccttatccccttcattcagacgataggtactgggttacttgaaagagccatcgtattgaccaataatataatgacagagacttccacagaatatctttgatatggttgggctctgtgtccccatccaaatctcatttgaattgtactctcataatttccacatgttgtgggagggacctggtgggagataattgaatcgtggtggcaggtctttgcagtgctgttctcatgatagtgaataaatctcacagccggggaccgtggctcacgcctgtaatcccaacactttggaaggccaaagcaggcagatcacttgaggtcaggagttcgagtccagctggtcaacatggtggaaccacgtctccactaaaaatacaaaaattagctgggcatggtggcgcatacctgtaatcccagctactcaggaggctgaggcaggaaaatggcttgaacctgggaggcggaggtttgcagtgagccgagattgtgccatcgtgttccagcctgagcaacagagtgagactccatctcaaaaaaaaaaaaaaaaaaaatcctcacaagatccgacggcttcctaaggcagagtttccctgcacaaactctttgcctgctgccatccacgtgagatgtgacttgctccttcttgccttctgccatgattgtgaagcttccccagccacgtggaacctctttcttttgcaaattgctcactctcaggtatgtctttatcagcagtgtgaaaatggactaatacaatcttctac

SEQ ID NO: 202799 - DNA, 1000 bp, Homo Sapiens
tgtttgtttttgagagggattctcgctctgtcacccaggctggagtgcagtggcacatctcggctcactgcaacctccacctcccacattcaagcgattctcttgcctcagcctcccaagtagctgggattacaggtgtgtaccaccacgcttggctaatttttgtatttttagtagagacagggtttcaccatgttggccaagctggtcttgaactcctgacctcaactgatccacctgcctcggcctcccaaagtgctgggactacaggtgtaggccactgtggcctgtgacattggaaggttttgagcagaggtatgtgttgtgacctgactcaggttttaccagaatccccctgagagatgttctggccaccactgaagaagactggagggtagagcaggcaagggctgatgcagggagcccagtgaggaggctggtcaatgagcacagcagtttggccaacgatctggggtgctaaatatcaacagaaacaaaaatatttattgcatgctttctgtgggtcacaaactattctaagtggttgcttgacatggaatgcttttaatcttcagtacagattttaggtagatcatatttttgtacatttatgtctatttgtctctggactgatttttttttaattgagatgaaattcacataatataaatcaaccatttgaaagtatacatctcagcggcatttagtatattcacgacattgtacagccacacttctgtctagttccaaaatattttcaacaccccccccaaagaaactttgtacccatcaaagatagatgatatttttatcctaattttacagatgaacaagcagaggcgtggacaagcagagtcacgtgccccaggtcacacagccaggaaatggaacaagctggccacaggtgttgggaggaacatgttgacaagctgcccaggatggcctggaggccccttcggggtcccccaggtaatagcaccaaactgccttttatttttat

SEQ ID NO: 202800 - DNA, 1000 bp, Homo Sapiens
cagtgtgatatactcatccctgtgtggtgctgctatgtgctcaacattaagggaagatggaatatcatttgaggagcacgtctagtattaaaaaaactattgggtattatgtatgtagcatactacatagcaatatgtactacatactatctggtaatttttctgttttctgtgttctaatactagtttgttttcctctactagactgtttccatgtcctcatcaccttgtatggtggttggcgtatacctagagtttatatgttattgaatgaatgagggtgagaaacacaaaagaatagacccacaagattaactgataagtatattattggagcaaaagaaaatgctgtcaggttttttttcctttacctctaagaatagtatcacaggtaaccttcgaagagtttgtgttaaataatatgcattgtgagatttatttacatctgatttttaaaatttttagcttattcaacaaagattgaagattcttttaattttgtaaggcccagtgaatcagagcaatatggcatttggtccactcccaaggtgttcacagccttaaggattaatgttaaaagttatcttgtagtctttggattcatgccagaagataaaaaggtgtataagaaggtaagggaaatttggtacagaaaattacagatagtacagattgagttcctagttgattataagtgaagctgtgatgtctaagaaaaatcaagaataattgtgattattaatatttcttgagcacttactatgccatgttactaaactaagactattttttgaatgatctatttaaatccatattgcagaaagcctaaaaggaagagatttaagtaatttgctcaaagttacttagcttttaagtggtagaaatggcatttgaattattgatccagagcctgagtgcctaactcaactacatgggtttcctagtggccagtattttccaaacttaaatcattcacaatttctgcttcgtcccaaaccat

SEQ ID NO: 202801 - DNA, 1000 bp, Homo Sapiens
tagaactggatttagcacatactagacacccaatatatatttgatgaacaaaccatgatgaataaatggcttgtgggaaagggtatatactttttctttattgtccaagcgaactaggccaggatcacaatatatttacttatcctaaagtatacaaaaagtcactttggaattgctaactcatacgtttgcagggggagaaaacatatgtactaagtttcatctttgtttctagttgctttaagaaggtagatttaatatcaataaaaataaatattctttttattttttaaaataaatattcagctgggagcagtggctaatacctgtaatcctagcactttggaaggtcgaggcagaagaatctcttgaggccaggggtttgaaaccagcctgggcaacacagaaagacccccatctgtacaaaaaataaaaaaaaattagctgggtgtggtggcatccctgtagtcctagctactggggaggccgaggcagggggatctcttgagcccaggagttggaggctgcagtgaactatgactgcaccactgtactccagtgcccggatgacagagcaagaccctatctcaacaacaacaaaaaaaaaaaaaaaaaaaaagaaaaggaaaaaaaataaccttgaaggtttctcagtatatagtgaactataacctacctggatcttgtgccaatcatagagtttcagccaatcacaggcagccaactgttcaaataaggtaaacaagtggtaactaatctggctgtttctgtacctcacttctgacttctatatgtcactttcctttttctgtccataaatattctaccatgtgacagctccagagtcactctgaccttctggttctgagggctgcccaatttgcgaattgttctttgcttgatcaaactctgttaggccaggcatggtggctcacgcctgtaatcccaacactttaggaggctgacgcaggtggatcaccttaggtcaggagttcgagat

SEQ ID NO: 202802 - DNA, 1000 bp, Homo Sapiens
cctaaagtcaaactaaaatttgtgaacatgtttccttgaactaagtttcttttttttctttttctttttttttttctggagatggagtcttgctctgttgcccaggctggagctcagtggtgtgatctcagctcactgcaacatccgccacccgggttcaagccattcttgtgcctcagcctcctgagtagctgggattacaggcacacaccaccacgccaggctaatttttgtatttttagtagagacggggtttcatcatgttggccagactgatctcgaactcctgacctcaggtgatctgcctgcctcagcctcccaaattgctgggattacaggcgtgagccaccgtgcccggcccaaaatttcatttatcacgtctttctcttactttggcaacatccatatctccccgtttgtcaccttgttacacctgcaagctcattaacatggattttaaagtccccaatgattggtctccattcaacttcattcattcacccattcattcaactttgattgagtgcctactatgtgacaggtactgtgctagtccttgggttatggcaaggaacaaaaaagacagaaatacttggtcctcattgagtggacagtctagtgggaggagagagacaaaaaacaaataacatgttggagcctaagtgccatggagaagataaagcagggaagggggtaggggtgccctgagaaggtgacatttgaactaagatctggaggaggagatctgggggaagagtgtgcctggaagagggaaacagcaagtgcaaaagttctggggcagggcatgcctagtgtgttcaaggatcagcaagaaggcgggtatagtttgagtgcagggagagagtaggaaatgaggttgaaaagataacaaggtaggaggtagatcctgtggggcctgtaggctgtgttgaggagttgcgcactttctctcatgaggtgggagtcatggtagggtttttagcagaggagtgacatgatc

SEQ ID NO: 202803 - DNA, 1000 bp, Homo Sapiens
gcaggacatttgattagacactacttaccctataataaaaccggggaatggtcttatagaattcatttgtgttttttctacctcctttccattcggagtaatattttgtaaataaatccatttcttcatcttttaattcttgttcactttttttttctggtaacaaaacagattaaggggagcacttttaaaatcaagcagtacttttactcaggtcatcctatatattatattaatagtttaattaaaatagttgcagtgccaaaaaggccttcacaattgtgcttagacactgagcatattaacttttctgaaataccaagaatcactaccctctactgaagcagcctcctctacatcttcaaccatttctcatgctccctctacttctgtttatcgctaaagctagtctcttcctcaaattacctctcctacagaactctgtagagtgctcctaattcattcaatgaaaagaatttactgagcacctactatgtacagagaacgctgtagtagacacggaatgaggggtgagcaagacagccccagcccctgacctcatggagtttcagcctcataatcactgtttctctacctaatgtagagaaaacaaacaaaaaaactcatcctctgtctgaagctcaaaactcagggctctattaccctgcaactcgcctgctattggcacgtggctgtctcattcagccaattcctccccacttatttgtggactatggtgactggtacacagtgttcttcacaaggtcctgcaatcatttaggatgaataaacatttatgtgggtgaccatgggtcctgcaactccaaagactttcacctctagttcattctgccatttggttctatgacaagatcacagattttacttgatccctttctgaaatcttaagctcaaatatactctcagatcatcctttctggtaattcaaaacctcactgccataccatttccacttcagcctcactgagctcttgaattc

SEQ ID NO: 202804 - DNA, 1000 bp, Homo Sapiens
tactgatctttcatcttttgtcatcccagacagatttcattgcttattctgttttaaacctgaacaggcaagacactgccctaatgagatatttttaaatgtatatgacagttcagtaaaacattggaaccaggccaggcaaggtggctcacaccggtaatctcagcactttgggaggctgaggtgggtggatcacctgtggtcacgagttcgagaccaacctggccaacataatgaaaccccatctctactaaaaatacaaaaattagccaagtgcggtggcaggcgcctgtagtcccagctactcgggaggctgaggcaggagaatcgcttgaacctgggaggcggaggttgcagtgagcctagatcatgccactgcactccagcctgggtgacagagcaagactctgtctccaaaacaaacaaacaaacaaacaaacaaacaaacaaacaaatcagaaccagaacagagctagcagctttcgtaaaaagccttaatctcacctccacctccttatcttagtttaaaataaaataatattcgagaaaaccataatagctaatactatctgaagcatatttttaatacagaaagtgaatcagacagtcttaaaaaaggaacttcatacaaatttatttttaactatatgctaaaaacaggactttaggaattcataagcctttctttgaagttaggaatttagacggtaactggctagatctcaaattaaaggagaaaaagaaaaggaagggatcacttaagtttctccatcgtatatgtgctaatacaatatgtaaacactatagcataacagtcaaaggaaggaaaacccaaggaaagacttaaaacggtacatttgactcctacatcaccagtggttactagcatcaccaggaggaacttcattgaaaatcaaggatggagaactgtggttgccagggaacaaggaggggttgttgtataaatacaaagaggtagcaccaaggagtgagggaattc

SEQ ID NO: 202805 - DNA, 1000 bp, Homo Sapiens
ctcacctcattcatctgcctcacagcggtgtttccagcacaaagtatatgaaaggagtctgaaatcatacgtctctataagagattattaatactattattggttgaatcacaaatctattgtcactgaaaatctttccagtgcagacaaccagaagtaaaaatgaggaaaaaagggaggtgctacgagggaatgagaggcaggaggcctggaaagggggaattgggcccctcctttacaatctgatccgggtgtgggatcacctgcaaactgcctgatatggtttggctgtatccccacccaaatctcatcttgaattgtagcccccataagccccacgtgttgtgggagggacccagtgagaggtaaatgaatcatgggggtgggtttttcccatgctgttctcgtgatagtgagtaagtctcacgatatctgatggttttataaagggcagttcccctgcacacgctctcttgtctgctgccacgcaagacgtgactttgctcctccttccccttctgccatgattgtgaggcctccccagtcatgtggaactcttgagtccattaaacctctttttctttataaattacccagtctcagatatttcttcatagcagtgtgaaaatggactaatatactgccccctgtgacctcagcataggccttccccagcacgggaccccggcaatgtctaatgcaaaaagcatggtctggcatcatataactagtgttcaagttccagctcagccacctactggctgggtgacctgaggtaagttacccaacctctctgtgctcatgattctcatcactaaagtgggaccaatgccaacctctcaagcccgttgtgagaaatgaataagatcacacatgtatacatgagccctgacatgtagtaagtgcttggtgaatatgggttccagggaattctgcaggctcctggaagaaagatacggaaatgattcaggtgcatgatgtcatctggagcattgaattc

SEQ ID NO: 202806 - DNA, 1000 bp, Homo Sapiens
cccagcacattgggaggccagggcaggaggatcgcttgaggccaggagtttgagaatagattggggaaaatagagagacttcctttatacaaaaaaaaaaaaattagcagactgtagtggcaatgcctgtagtcacagctcctagggatgctgagactggaggatcacttgaggccagaagttctagaccagcctgggcaacacaatgagactctctctacaaaacaaaacaaaaaaagcataaagaattcagctcaccttttttgtagtttttttttttttagtagaaattaaaatgatctacttttttttttttttaaagaaattggccagccttcttggaggctctgaaagttagtcatttcagggaatttgaacatacaacggaacattggcccaagaatattttaaaaattgtttctcattatatcaataataatcagctgcaaactgatcccttacaacgtatatgggtttcattttctggcactgagggtgaccatatcccaatgagtcattctaaaactaaagaataacataattgacatagccaaagaattaaatgtctcattattgactgaggtatagacgtctccaaaatcagcttggaagtctacaaagagttcttgaccatttacacagttatttggagtttccgtgtaactgtttattagctaggatacaaaataaaaggcatttatttgcaacttattgtgaaatatcggtgtgccatcttacctttctcagcatacctgaagttctactatttcttcctctggaatcatcaaatataatttgaagtaacctcaccaagccactctaatatatgttattttttcaggagaaagtgatcaagtggtttccttgatattttaaccatactgttccctctgcatgaaaggtctttccttactttatctggcaacctccttctcattttagcaaatgcttgtgcaattattactttaccaaaaaaaattacatttcctcctttctgatc

SEQ ID NO: 202807 - DNA, 1000 bp, Homo Sapiens
tgtgctacagtggggcggacaccttcccctaggactgtggatgtggcctggggtagaccgggcaagaggaaacctctggacccagactcccacttaggaggcagaagtgctcaatcaggggcatatacagagcccaaaggagagctagataccaaaattgaagagaggaagcattctgaccaggtcccccacactgaagaacccaggtaggtgtggaagcccgggtgagaggcaaggactctgggcaccctaggcactgaggagagaagcaggaggggcaggcttggtgtcatggggagccaggtctcctggtagcgatgtggggatgggcctgagcagaggcacacaggtggaagactgtggcagcaattcaggaagagagtggtgatagccgcagcagagatgtgactgtgagaggcaggagatggaggccacagatatcacaagggtagactctgtagggcttggtgcctgggctggggtgggagaggggagggaggtctcagatcatgcccatgttcctagcttggctgatgcgatgaatggcggtgtcagagactgggacatggaggaagggttgggtctatggagaaagaggatgaaggaggcctaagaatggctgaatgggaggggcctatgggacatccatattccagaaacatcatcacaggaaggaatgagaagagatgggccccctggaagtgtgggaggattgagaagcgcagacacacagacccaggcagcagcgtggggtgttctggtggaggagggcaggggctgtgatgagtcaaatctgctgtggcaagcaggagacaggggcctgtctggaaatgacagcagccttcagttctgccttaagatttccagtggtggacaagaaataaatgtgggctttcaacagcactttccggatctatgtgtgatcaggtggaggggtgtgtgaggtccaaggtagtccatccttgacaagtggagtcatggagggtgacagagctggatc

SEQ ID NO: 202808 - DNA, 1000 bp, Homo Sapiens
tttcaagaaaggtagtaagaaaagaagcaaaaagagatagattggaatcataaaagagtgctgacaggtgctagggtgaccaggctccaccactaactagcagatgtgagtctagctcccctaccagaaaaccgcagggttctccaggtgatgtccgaagctccttccaaggtaaggacctcagttctgctcaacaagagatcacatcttttttcttaagtcaaagaccagcataggtacctgttacatctgcagtattgtacgagattgctgctccaaatggggcagtctgagactctaacatagtcagggcagttttatcactcattatatctcactgtatctctttgaaaattggcattctatcaaatataaatatagtaacttaaatcagaataacatcatttcccaaatattcttgactaataataccctatacattatgctaaaaaccatgaagaattgattactgtacttgcaggtaggttcatccatgcaattgagctttaaggtgttgcctcattagtgcttggtgtgtatcaattcttagcataatcacataaatcttactgtaaggttatgggtcctaaagcaaacatgcagagtcaagtaggactggctatagcaaaatcacttttcaattacagatcttcaggttaactccctggaaggtttgttcatcagatcttgggtgaggcttgagaaagtctctgttcctaagctttaaatacatcgttctccaagctgactatacactgggatctcctggagagctttaaaaaatgctgctcaatcccattactgggtatatgcccaaaggaatataaaccattctaccataaagacacatgcatgcatatgttcattgcagcactactcacagtagcaaagacatggaatcaactaaatgtccacgtatggtaaactggataaagaaaatgtggtacatacggaatgtggtaccatggaatactatacagccataaaaaaggatgagatc

SEQ ID NO: 202809 - DNA, 1000 bp, Homo Sapiens
cattttttatttacatcaactgtatcacccattacatatttgataaagaggttatgcctcagtaattctgaagctgaaggcttaaaatctcagcccagtgactctggagaatcacgtgttagttaaagggaaagcggcggcctcacatgctgcgtaagtttcattctcaggcatcctttctgagggacctacttttactggagatcattctgctaaataaggtaacatctagcctcaatggcagtcatgttagttaaccccctaaaccttcaaaaatatgtttaaaattatgttaagctaaataaagaaaaaaggaaaaaaaacttaagaattctgtctgtaataatttctctatattgcaaataataacctaggtatgcataaataaagtaaattattgttccaagaaatctttattgagaactgagaaaagattttgtacaataaccctagtattgcaaatattgtaaatatttttacaaatacagagatataaataagaaagggaagagatacagttggcccgcctagggctaaaagtgttacctgtccagattatgtaatccacggagtaggcttcaggtgttcagaaacggcaactcttgatattttagtgtcaggtaaaagcaggtacatagaaacccaagaactagagtatcaatataaaacacatgagcatataaatacatgggcataaaaataaatgtatatgtttatccataaatcccaaagctttggttgacccttagtttatctaaaaaaaaaaaacaaaaaaaaacaaaaaacacacgagcttatagcccacaccactggttcccgtgactggaaatctaccttatatttttcagcaagcaccgtgtggttgctcatcctccagatgctgtagcattttaacgaagacaccctttagccattcttgttttgacaaggaaaagtaggagtccatttaatgttttgggctctataatatcacatgtaaaaattttaattcactatgatc

SEQ ID NO: 202810 - DNA, 1000 bp, Homo Sapiens
tacactgtcttttctctataaagtagtatgcaatgattttctgaaaggaagaaagctgaagaggggtttgggcctgttttaatttacatttaattttagcctcagagactcttaaaggcagtggttatgtctgcatgtgaatagggatatttaatcagtccgggctgtcaggttgatagtagtgcttatcaagaaattagagaaaaatgtgctccctagtccatcctcctgccacataaggagtaacaattcagataaggaaagtcaaacactatgattaaaaagctcatattccctagggagtctttcatatatttaatattcaacttgggtgtactactgtgcagacagccttttctgtgtcttagcagttttaattgcaatgcctcctccattgaaaaggcagaggttttttttttttaattccttttaagtaacactactgcttagtaatattttaaaactattgaagggcacagacacagaagtgttggaggaaatttttggtgatttttcaaacaagtgtcttttactacgcacgtggtgaagtgtcacctagaatatctataaaatgttgatatttcactgtgccaccatatatgaatgttctcctttcaaaatgaattttgctattaaaggtatagctatgaacagtaacaactgtgatttacgatactttacaaggatgagtattttcagattctctgaatagtagaaaagcagtttttacttgccctgactctatgatttttgtttgtttgttttgtttattttgagatggagcttcgctcttgtcgcccaggctggagtgcaatggcgtgatcttggctcactgcaacctccgcctccagggctcaagtaattctcctgcctcagcctcccgagtagctgggattacaagcgcagccaccacacccagctaatttttgtgtttttttagtagagacagggtttcaccatgttggccaggcaggtcttgaactactgacctcgggtgatc

SEQ ID NO: 202811 - DNA, 1000 bp, Homo Sapiens
agccccacattcagggttatgaggctgcttctggctcactatgaggagttggtagacagattctttggctgaaggttgtttggagatcaaaaagtgcagatagaaaatggaggcgcagataaggaagccacctacaaggcaggtctcttcacctccaggccagagctgagatccctgtgctgatagggaattctccaacttccagacagcctggggctgccctttgcgtacatgggagggtctcttcctctgcgcttgcacatggaggccctccctggtccaggtggaggggctgctgtcccgcagtgtggccccagcctccacccctgctgctggaccagctttccccaggcccctccctgggggtgcagcacgtgaactccagagaggcgcatccttgggcccatggggaggtggaaccactctgccgggctgtgcctgtggatggggcgggcgcaggatctgcttttaatgacacggtttgggcagctggactctgtctattccagcaggtaaattacaggcttagcaagtcagaaatcaaataaacactccaactcccagtggctgctccaaggagaacagcagtttccgagaacagcagaggctgagacaaacctctccacccaactcagcctaattactacttgtcactccctgaaaaggaccttttctttgactcacaggcccaagacacaggacagggctgctgggcatccagggtgacactgactttggtgatcagcctgtttttgatggcccctggcctcgccccagacccggtcacaggctgcccatgttgccgatacatgctcgggcagggatggactgctcctcagcatggcagaagatggcaaccaggtttcactttacatcatatctgttggcagtggctgtgctgatcatttgaaaattccactcagatttggaagaaaaacattccagattgattactgatgtctgccattcagaggggaaagggaaatgatggcatctgtgc

SEQ ID NO: 202812 - DNA, 1000 bp, Homo Sapiens
gtcttctagggtggcacccctccctaaggctgaaattcccagaaccactgaaacttagagctgagctgggagtggtggctcacgcctgtaatcccgtactttgggaggctgaggcgagtggatcacaaggtcaggagttcaagaccagcctggccaacatggtgaaaccgcatctctactaaaatataaaaattagctagacatggtagcacatgcctataatcccagctacttgggaggctgaggcaggagaacccaggaggcagaggttgcagtgagctgagattgtgccactgcactccagcctgggcggcagagtgagacaccgtctcaaaaaaaaaaaaaaaaaaagttagagctggaagaatccttgaaatcacagagaactgcattaccttggcctctggggccatgtggctcaagtgtgtggaataaatgaaaaggaagcatcccgggtttgagggtgctctgtctgggtatgcctgctgtgggggtgactagcaaagcccaaaagagggacccaccttcgtgccaatgtcacggctcttggcccgcagcttgttgacctgggactcggcgatgtccgcccgctcctctgcctcatccagctcgtgctgcaccttgcggaacttggacaggttggtgttggcttgctcctcctgcgggaggtgggagcatgaggtgagagggggcctgggttctcagactcctggcttgggggacgagctctcctatgcctcccctgggcctagtccccagcagggtcactcaccgcctcctcggcctggcgcttgtaggccttgacctttagctgcagcttgtctaccaggtcctgcagccgcagcaggtttttcctgtcctcctccgtctgggggccagagggtaggcagggggtgaagatggcacagtcatagaaggtagcatcccctccgccctgccctgcttcatctgatatcctgacccaattctactttctgatcctcactaaacacttgaattc

SEQ ID NO: 202813 - DNA, 1000 bp, Homo Sapiens
aagctcgtccattgtgtgtggggccccggccggggcgcagggcgagacgccgacagctgggggaagggccggagagggtggccccgcgctggctgcggggcggaggccggccgggagaggggcggggaaggggtcgttgctgtgtgcctgccgtgggtcagagcagggagctgccggctgccgccattacaatccctcctccatctgcccgtctcactcactcactttaggggaagggggggccttggcgggaggggtggggggagagttgggaaggggataggcggagggccgtcactagcgcacagcatgctgggtagcgaacgcagcctcacgcttaatcgccaaatagagtccggcctcaccctacgccggcgcactgagaacgcagcccgggtcgccgttagagggcggggaaagagctcgggctccgcccctaggcccgccctcagacccgatccggtgtctggccgcagctaccggacacctgggctccgactctgacttttggaagcgaggcggccttaggcttcctggttatcagtttccttttagcaggccgtccccgggcgctgtttccttcccaggggtctctcacccgtgtcccggctttctgagctggttgttaacctggctggtcgctctggccgaccgcatcccgtctcggattcctgacgtttctttttcattctttgagtgtttcaggcagtcccaagggtgggccctctttcccttcctgtcactcgctctgcctctggtttcttagaaccagtcagttctctgctggcaaatagccaagatcctccggctgtggttactgattcctcgtctccgtcttgagcctgggctttggtcccatttctatgcgctcggtcgcccgtcgtaacttattccactttgcgtcccctcttctttccttttctggaatgggttgtgggggggttgggagagggggaggagcgattttttttttcttgggagaagaagaggtagtgaattc

SEQ ID NO: 202814 - DNA, 1000 bp, Homo Sapiens
aatacaggattttgctctgttgccccagctgaagtgcagtgacacaatcatggctcactaccacctcaatctcctgggttcaagcgatcctccccacctcagccttccaagaagctgagactacaggcatgtgccatcatacctggctaattttaaatttatttttgtagagacagggtctcactgtgttgcccaggctggtatttgaactcctgggcacaagcaatcctcctgcctcggcctccaaacgtgctgggattccaggcatgagccaccatccctggccagtttgtgttgtgattcactgacaatctgtttttcaattggtatatacagaccattagtgtttaaaattattttgacaccattgaattaatatatatcatacttgatactctattctgtttgttgcccttgttctttgttgttgtcttatactttttttgcctttcgtagttttaactgagcattttacattattctatttactgtcttagtgtattagttatactttttaatatttttagtggtttacctagagtttgcaaagtacatttacagataatccaagttcattttcaactaacactatcatcccactttacaatcagtgcaagtaccttgtaatacaaaattaacttctccttcttgttctttgtatcattgctgttattcatttcacttgtacataagcatacaaacacacacagacaaggggactttaaaaacttcgtggaaaattgaattaaaagattaaaaaatactgtttctcaacaaaaactccatcaagctcaagacactttcctaactgatgataccagccatttagttcatccagaaagaactgagcatcctgggaatttaaccagatcaatgcaatcctttgtaccttattaactgaagaataaaatgggaaaacatttaaagattttttaagattagagaacaaaaagtcagaaggagccaagtcagaactgtatggtgaacgcgtaatgaattc

SEQ ID NO: 202815 - DNA, 1000 bp, Homo Sapiens
gcatataaacaactacaacacaagatagtaagtagtaacacaaattggtataaagtaccataggttaaaaaaaagtagccagtgtggtggctcatgcctgtaatcccagcactttgggaagccgaggtgggaggatcacaaggtcagagttcgagaccagcctggccaatatagtgaaaccctgtctctactaaaaatacaaaaaattagccgggtgtggtagcaggttcctgtaatcctagctactcaggagcctgaggcagaagaatcgcttgaatctgggaggcggaggttgcaatgagcagagattgtgccattgcactccagcctgggtgacagtagtaagacttcgtctcaaaaaaacaaaacaaaacaaaaatcaaaaagaagggcagtttaggaggaggggaaaaataatgcaaaagcatagagttaaaaaaagcaccaagtgcattttgagtatattgtctctcaccagcaagcatccacttgcttacttatagaggagtaatatgaggctaagaaggaccagtggaaagatgttgctgtctgacagattagtatttttcaatttgtggtctctggaccagaaacatatgcatcatacaggaatttgttggaaaggcaaaatgtcccataccacccttatcccctcctctctgttgctgatatattggataaaaaactatgagggtggggtccagtaatctgtatcttaacaagttctctagttgactctcatccatggaaaagtttgagaactgctgtgataaactgtgcttgagttttggtactactatttactattagtgtaatcctgtcttcattactaaacttctttaatccttagtttccataacctgagttgttaaaagggttaacataatctttgaaatataaggtacagtataatctagtacataataggcattaaataaatatttggtccatctttccttaaaaagtacattagaattaagacagtagaagtcatgaattc

SEQ ID NO: 202816 - DNA, 1000 bp, Homo Sapiens
actgttagccttagtagaagtaaaagaactgtaaaggaatactacaaaaaactatatgccaataaattagacacattggataaaattgaaatttttctaaaaagatgcagactaacaaaatagactacagaagaaatagaaaatctgactagacctataacaagttaggagatttaattagtcatgaaaaaatgtcaccaacaaggaaaagccaagacttaggtgacttcactggtgaattccaccaaacatttaaagaattagtgccaattcttcacaaactctttagaaaaatagaagaggagagaaaactacctaattcattctatgaaattaatattcccctgataaccagaaaaatacatcacaagataaacaactacagacccctatatcttgtgactacagatgcaaaatccctccacaaaatactaacaaacaaaattcatcacctaaaaaaaggatcccaccataaccaagtgggatttaccacaggaatgcaaggttgatttaattaattaattaagaaattaattgatataaaacaccatatcaatagaatttttaataacacaaaaactacagtattatctcaatagatgcaggaagactgtttgacaaaaatccagcaccctttcatgattaaaaaaacacacacacacacacttaacaaactaggaatagaagagaacgtttcatagatactctttgaggggtcctcaatctgacaagcatctatgaaagcatctatgaaaaacccaactcatactattggctaatatcacactgaatggtgaaaggctggatgcttttccctaagatcagaaatgagacaagaatattcactcttgtcacttctgtttaacatagcacaggacattgtagccagggaaactaggtaagaaaaataaataaaaggcatccagattagaaaggaagaagtaaaacaatctctatttgcagatgacatgatctcatatgtagaaaatctaaggaattc

SEQ ID NO: 202817 - DNA, 1000 bp, Homo Sapiens
tagcatcgtctgtctgtgcaagtccttcgagttaggtaagtaatacgggcaagtgtcccgcggccgtcagctgtccgagtccaaatcgcttttaccttcctcttccctcttctccggtgacgccttcgacgacgacgtcttgttccacttctccgcgttctccgactcctctgatgaggaccgcttctgccgcctccatttggcgcggcggttcttaaaccagacctgttgcgcaacggaggacaaaacagttcagatcaaaggcgcgcttcccccagtcccggggcacccggggagcttggtgtggcggcgggacaccccgcgcaggccaacaaaaggaggggagccgctcgctcccgcttccgcgttttcattcaacttcctgggcctaaagcgccctccagcagcctgcgggccgccatcgggatgtttttaaagtgcggggagagccaagcagggctgggcaaacccgactggggccccacctcgcggggaaggaccgctaggcgcccacggcaggccccggcgcctacctccactttctcctcgcggaggtgcactttccgggccagctgctcgcgcgtgcccacgtccgggtacttggtctcctggaagaggttctcgagagcttcgagctgctcgtcagtgaagatggtgcggtgccgccgcttccgccgacagtgcagctggttgagaagctgcagctcggtgcgcgacagcgtgcccacgttcatgtagggcagcatctggtgcggtaccggggacaccagcaccgaaccggggccctcgtagcctgcgacagagtggggcgcacggtcagccgcccgccctcgccaccgcacgcatgcacgcccgccagcccccgaccctcttccacttagaagtcgtctgcaaggggatgctgagaattgggggtgcacgggaatcaggggtgcagggaaaaggaggaggcgtgttagagcatccatccgcacacccgccaaagccagtaagagaattc

SEQ ID NO: 202818 - DNA, 1000 bp, Homo Sapiens
cgtgttggccaggatagtctcgatctcctgacctcgtgatctgcccgcctcagcttcacaaagtgctgggattacaggtgtgagccaccgcgcccggcaaggtatagtcttaacatttacctcaacacctatgtctctattttaacttaattgcataatactgaaaaaaatcttgatgcacacaagtaagtggctacagtggtaacggtttgctttgcaatctcagggaaattttcacttaaacagaaacagcatgagaaactttgttctaacatctatataaagacaaactaatgtgctgacctgaaccgtgttaatatttaaatcagacaacagttaaaatgggccccttttactgtctctaattatccctcaaaaaagttgattaaaaattaatacctatgtgcatactgccctaccatttaaaaaataagaaaagtcggtggtttatgcctgtaatcccagcactttgggaggccgaggcgggcagatcacgaggtcaggagttagagaccagcctggccaacatggtgaaaccctgtctctactaaaaataaaaaaattagccaggtgtggtggcgcacacctgtaatcccagctcctcaggaggctgaggcaggagaattgcttgaaccaggaggcagaggttgcagtgagccgagatagcgtgactgcactccagcctgggcgagagagcaagattcttgtctcgggggggaaaaagtgtactttgaaaagaaaatcaaaagttggtcgagtttagcattctgccttctcagaaccttagagttgtggggttggaggccaaggccttcctctgaagactctgaggcagcctcagctgcccacccagtgaattcactcattttatctaagactccatctgaagagggggctgcctccatgcacaaagtgagtctaggaaccactgcactggataatttaaaactcaaactgttttggtagatcacccgtggccaacgcaccctgggatgaattc

SEQ ID NO: 202819 - DNA, 1000 bp, Homo Sapiens
cgagatcatgccattgcactccagcctaggcgacagagcaagactctctcaattaaaaaaaaaaaaaaagtaaataataatagagtggttcattactactactactactactactactactgctactgctactactactactgctactactactacgatggttcattactaatgtcccattaaaacaggaagtagctggccacagtggctcctgtctatagttccagctacttgtgaggctgaggttgaggactgcttgagctcaggatttcgaggccagcctgggcaacacagcaaggccttgactcgtaaaaacaaacgaaaaccccaaaaaccaaaaccaaaacaaaaaccaggggagttattcaggcatttctacttctaaaagataacaaaagaagcacatatttcaaagttacaaacagaaaagaaaaataaaagaccttaggttctcagctttatcaccttatgctaagaaattgttgctaacctttcaaagtaattttcaacattaaataccagacattatttggtatttagtcttggtatatatttcttgtacttaacacttaccctaaaaaattatatatatttttttgagacagagttttgctttgtcacccaggctggagtgcagtggcataatcttggctcactgcaatctcctcctccagggttcaagtaatcctcccacctcagcctcctaagtagctaggattacaggtgtgtgccaccacgcttggctaattttttacctatatttagtagagacagggtttcaccaagttgtctaggctgatcttgaagtcttgacctcaagtgatctgcctgcctcggcctcccaaagtgctgggattacaggtgtgcgccactgtgcctggcctttcttaatttttatgcctacaattcactttgctttaaaaagcattaccactatcagccgggcacagtggctcacgcctgtaatctgagcactttgggaggctgaggtgggcggatc

SEQ ID NO: 202820 - DNA, 1000 bp, Homo Sapiens
caggggctgggacaggcatttgagtcaaacttgcaaggggaacacttgagaacccagagagcatctgagagtcaacaccatgaggcagcctcttataactcagctaatataatccagagactaacattcattgactaaatggttaaaatatgtatcatttcaccaagaaacatgaaaggagaggagatgatttttaaactaacaaaacagagtatactatcttcatcacatgacaaagttacctattatcattgcttgcatgaaacattcatgtattagaagtcatggataatacgatacagtaagacaataaactaatgaaaggcataaaattggaatggaataattatttatttgcagaggaatgtcgatatagaaaatcccaaagaatccacacacaagattagaaagcctggcaaggtgtttgattataaaaatcaaactacacaaacagctgcatttctaaatatccacaaacagaaatatagtttaaataccatcatattagccagaaaataaagacaggtaactagtgcccagccaaagggaaagagacaatatgcaagactggaatcatggacaggatatattcaaagatgtgtttcctcaggaatgaatggacagaatacaattacattgctctataatgacatatgcatgaaaacagataaatagaagtgaaaatcattactaaaacttgaggtggtggttgtctaggcagtgaccatctcttgcttgggagatcaagaaaggtgtcacagagaagtaaaagttgaagctagcgtagaagtttacaacgtgttcaagagggaggtggtctatttcaggccaagggaatgaatccaaccacctggagaataagtggttcagtaagactggaatacaggtgcagatgtgggcaaaggagaaaacaggctagagagatggagaatcgtgaagggtccactctacaaggggaaggtgggcttttttgtcataaattgtttttagcagattgatc

SEQ ID NO: 202821 - DNA, 1000 bp, Homo Sapiens
ggactccccaacccgcccagctcatccaggtctttctcgacttgaagcgcaggaatgtaacgtgctgtcagttggctccacctcccagtccctgcccaatcagacttcaattaagcctggctgagcaggcaaccacagctaatcactgagcccgcttcggctttgaccaatccccagaagctctgcccggtgatcttgatccaccaaattaagggatgtccagcctgggcaaaagcactgaccctacccccccagctcaggaggcagggcctcacctctcttggttccatcctggcggacccaggcccagacagcaccctgcgcaccacagccccagaccatctgtccccataaaacgacagtccatctggtcccttgtcctgcggctctgggccccctggggggctccggccagacacccgaatagccagagacctgagaagggagaaaggagatgagaattggagtccaatcagtacttggattcagttcagcattcttggaaaaccacagtgatttcatttcccaagtatgccatgactcccacccccaggcctctccatcttctgtgccctcttccttgccttctccacctgggaaatgctgatcatccttcaaatctcaagtcacaagcagcctctcccctggacctgggcacacggtgcagtggagcctgcgtgccacagagcactccaactttgccttgccacggccctttcgtttcctccatcagaacgaacaccttcaggaccaaacttctatactgttccgctctgtagccctggcaccaaacccagtgtctggcacatagcagatgactaataaaagcttgttatatagccaagcacggtggctcacgcctgtaatcccagcactttgggaggccgaggcaggcggatcatgaggtcaggagttcgagaccagcctggccaacatagtgaaaccccatctctactaaaaatacaaaaaaattagccgggcgtggtggtgggcgcctgta

SEQ ID NO: 202822 - DNA, 1000 bp, Homo Sapiens
ttcccagcggcttgcccggcacacagtaggtgctcacacgaggcagctggcaacgactgctaaccaccaagttggttctggaaaagcaagccacggccagacacgtggccattcacacacccaccgggagcttctgttccattagggtttgtcacaaacactgctggtatctgtaacggcaaaacgacgggccaccggttctagatgagagaactgagtcctgctttctttatagtattgtttccaggcatcatactcccagcattctaaccatgtgcccgaggctatacaaggatggattctgccccaaaagcagcagcaaagttgctctcatcagccacgccagatgtgggggaagctggccttgtagcacccctgtgcaccccaatctccagaacaccccttccttccccttcaatcggctctgctccttttaaatggaggaaataaaatgtgcctggcagatggccgccccatgacctcctgagcattttgcaaatgtctctcttttgggggagaacatgttgcgataatttagccaggctagggtcactctggccagatgataagttttgtaacttaaacattttctgcccattgcacaaggaatgggtgctcattcaacaaagttctggaaaattgagagagagagaacgtggcagcaaatactgacaaccctgtgccaggcctggctcgcaggggctcccgtgtgcgtgtggacgtgggccgcctccacctgcccacagaggcttctcccattgtgaacggccacacgagagtccggcaggtcatgttatcacaactcctcaattcaaacgcccaaccccaggagcacggctggtgcgtcgagctttccacatttaaagaggcactgcatgaacatctctgcaataaatctctcctctgtcctccaggtgggatcccaggttgaagcccaggaatgtttttatgcctgaggcagccaattccacacctgaaccctcagaaccctctagagatc

SEQ ID NO: 202823 - DNA, 1000 bp, Homo Sapiens
taattgagaactatatagctctcatgaatgtttcttttgttaattcagtcttcctggcttagagcagatactattactaaaactggctgtacatttttatacagtgtcactgaccattgaggaaggtggaacataggccaacttgaggagccatagagagagaccagggatagaaatgccttaaaagcaagagtccagagataacgcacatgtgcactctctctcttctctctcttcttctctctctctgtctcttcctccctcctcctcctcttcctcctcctcttttcctcctcctcctcccttcttcttcttcttcttcttcctcttcccccctctctctctctctctgtctctctctctctctctctgcctgcctgcctgcctgcctgtctctctggcccaactcccttctgagggactgggatggtcttccttttgattatttatttactggatccaaaggactgctcccttaatctgcttcatacacttgaattaaaagccctgctaatcagaagtggtctgatatacagtcgtttcagaaattatgaaattaagattttattatttaaaaataaagacatctaataagcattatattttattctttcatactaattggttcttgttgaaaacatatattctatttatcactttattaaccagttaacatttcatgtagcaagatgatactggttttttcctactttttgaagcggtaatgtagtgtttctttttcccagaagaagtgatttcctctgaagatattggagctagcattttcaatggacagaagaaggtgctgtattatgctgatgcccttacagaaattgcttttgtggttccttctcctgtggagtccttaagtaagatgatttttgcatggtcctgttttaggatctatttttatattcctgggttgtgtgatattactgcattggaagagattttgaagtgatctaaggcattctttagcttctaaggcattataacaata

SEQ ID NO: 202824 - DNA, 1000 bp, Homo Sapiens
aggctcctatggttaagactgatgtgtgttgagagcacatctaacttgataagatcaattgtattgggagtaattaaaacaaatgtatgttctttggggtcagaactttgtctaatcttaaacttttttctaccaattcacttaagcaactattgaaatttgtactgccctcaaaaatatcatctcattggaagaacacaagtattaacattgattttttgtattttaggctagttaagatatatttcctagccttcttcaattcaaattctattgttcttattaagataatttttctcctctatattcttccctgtttgcctactcattattattatttttttaatttaatttttttttaagatggagtttcacccttgttgcccaggctggagtgcaatggcgtgatctcggctcactgcaatctctgctgcctgggttcaagcgattctcctgccttagcctcccaagtagcttgggattacaggcatgcaccaccatacccagctaattttgtgtttttagcagagacagggtttcactatcttggtcaggctggtctggaactcctgacctcaggtcatgcaccagcctcggcctcccatagtgctgggattacaggtgtgagccaccgtgccaggcccactcattattctttgacacaggaaatccttgtatatagctaaagggtggaggtagagttgtacatggttggttggataagacagcaagtgcctcagggcagagtttggataaatggtaagagtttgctagcagctgattggccgtgatagacaacactcatttaaagcagaaatatatctgttcgttgagagttaagaaaatagtggttaactgtatttctattcttatagttccttttaatattagaaattcaaagcaaatgctctttccttgttccttaaaacattcattctgtttaggaagtgggaaaatatcaacttcattttatagaaaaaaaatcccaaaagctgaattc

SEQ ID NO: 202825 - DNA, 1000 bp, Homo Sapiens
actgcagaacatttttagggagctccttgagggtaagtgcaatgtcttttttttttttttttttttcttttgagacagagtcttgctgtgccactaggctagagtgcagtggtgtgatctcggctcactacaacctccacctcttgggttcaagcgattctcctgcctcagcctctcgagtagctgggattacaggtgcccaccaccacgcccaactaattttttgtattttttagtagagacggggtttcaccatgttggccaggcttgtcttgaactcctgacctcaggtgatccgcctgactcggcctcccaaagtgctgggattacaggcgagagccaatgcgcccagccatgccatgtcttatttgtcctggtagataatgggaattcagtaatgtctgataaatgagtgactgagagaataccaagtgaaataaaatatgaaaagtaatctatttacatattaatttaaaaatatgtttaatttaataaagtaaaatttttctattgtaatttatgtcatttctctctgatgaccttgggataaggactcacttgtgaaggaataatattacaaaaataatgtagcaatagacattttagagcatttttttctgcccgttgagcctgaaggtttcagcttagttcatattagaacttattaatataaccatgcaaaaaaaaataatctgactaaaatgaagcagattgcatctgtgagtctttccagtacaggaaaagttttaaatagttctcatcaaaatgtttattctcacactcctaatgttgcataggaacaacagtgttcagtgtttatggactgtgttcatatattctacatagattttaagctttaagaagagtagttacgaaatacagcatattattattattattattattattttgaaacagagtcatgctctgtcgctcaggctggagtgcagtggcatgatcttagctcactgcaacctctgcctctgggttcaaggaattc

SEQ ID NO: 202826 - DNA, 1000 bp, Homo Sapiens
caagcacacgccaccacacccagctatttttgtatttttagtagagacagggtttcaccttgttggccaggctggtctcaatctcctgaccttgtgatccacccgcctgggcctcccaaagtactgggattacaggcatgagccaccacgcccagccggctataggttttaaaaagtgtgtgtgtatagatatatcactaaatccataaaaaaaaacacatatatattagaagagtgcttttcataccaggtctctgagatgttccagaaaaccacacaattcctaaataaaactgcctcaaaaatccagatgtatattctacccataagtgcttttcttaaaactagtctactatatacatctgataatttggctgctgtgggtgctactttagaaaaattatattcaacttgctacctgcaatgtcagaaatcatatctaccaaaataagttctccctgggcatttaaactgaaggttccatagatgtcagacttctagggtcatgggcttgccgcttgtagaaaaaacaaaatgcaaacctgtttatttcaatctgtctgacaaaaaaagggaaatttctgaaaattcactatctgccctccaaggtagccaacaaagaagcaagtgagccaggtaccagcaaagacagaaattgagtgcaaggtagtgggcacacatgaacaggcaccaagagcagcaaggcacaaataggaaacgccaagtgctgggcctactctggcctctgatttcagccctgcagtagccattacctgttagcagtggcacggtaaagcactagatggaaatgctggtggatgaggaagagtccaggagggcagtacaagggaaacataaacaaagatatctgcagagataggtcgctcaggagaggttccgaaagtactctggatacaactcacagtgttagaaaaagaatgaaagacccacagataaaagaatcttgcgagtacatatatatataaccaccaaagaattc

SEQ ID NO: 202827 - DNA, 1000 bp, Homo Sapiens
tcacacctgtaatcccagcactttgggagaccgaggtgggcagaccacctgaggtcaggagttcaagaccagcctggccaacatagtgaagcccatctctactaaaaatacaaaaattagccaggcgtggtggcggagcctgtgatcccagctacttgggaggctgaggtgggagaatcgctcagaccaggaggtggaggttgcagtgagccaagattgcgcctttgcaccccagcctgggtgacagaatgagattctgtctcaaaaaaaaaaaaagaaagaaaagaaaagaaatagaaaagaaaaaagatttctgctgagaaattcattgttaatctaatgggatttcccttatatgtgacttaatacttttgtcttgctgcttttaaaattcttttgttgtctttgacttgtgacaatttgattataatttgcctcagagagaacctgttggttgaatctatttgggattctttgcacttcctcaacctgaatatccatctctctccccagacttgggagattttctgctattatttcattaaatatatcttcctcacctttcccttctcttcttctggaatgtccataagatgagtatttgtttgcttaatggtgtcccataaatccagcaggctttcttcattattttcctccctccttccctccctccctccctccattccttccttccttccttccccctttccttccttccttccttctttccttccttccttctttcctcccttccttctttccttccttccccctttccttccttccttccttccttctttccttccttccccttttccttcctttcttccccttccttccttccctctttccttccttcactctttccctctttccttcctttcctttcctttttttttatttcaaaagagctgtcttcaagtccagaaattctttcttctgcttgttctagtctgatgttgaagcccttggctgtatttttatttcattcactgaattc

SEQ ID NO: 202828 - DNA, 1000 bp, Homo Sapiens
gagagagaagataaagatgacggagttttcagaggaattcatgctgggaatttctatttaaaatgagtgagaaatattaaaggacaaaatagtcaaacagcaaggatttggtgactcaagcctggaactaaggtgagacatgagaaagaatacaactggagaatcactgggaatgaggtgaaaaaagatgaaattatagagtataactttaagaagcttaaaacagtagaaattctgtcataaagccctgggaaatgaccacactttggaaatgggagaaagaagagtggaaaaaagaggtagttacaccaaaacagttctaggagataaatataatttttcccttttcacaaatggaagctgaagttcagtgaaggaaagaatgaaagtgctcaaatagaaggggtgtgtctgaagaagatgaggacttggattcctagagtaactttaaagagcagaaatgcagatttatctttctggaaggaaaaatatgagtgagtgtaatgacaaattcgctggattacagagagtcggtaatggagctcttcccagctggatcttcgaagcaaagggtgagtttatttggctaagagtcaagatggagctgtgcgtggagtgttgaatccatgaaacataaataaaaagatcggctagccgcagctgcagtgaagttaggcaagagatagtgtcagtgaatgtgggaaagcactaggaaaaaaataaaacgcactttgggaggccaagacgtatgggtcacctgaggtcaggagtttgagacagcctaggtcaacatggtgaaacccagattctactaaaaatacaaaattagctgggcgtggtggctcgtgcctgtaattccagctacttgggaggttgaggcaggagaatcacttggacctgggaggcggaggttccagtgggccgagatcacgccattgcaccccatcctgggcaacaagagcgacaaaactccgtccccacccgccaaaaaagaaaaaaa

SEQ ID NO: 202829 - DNA, 1000 bp, Homo Sapiens
gggagaagccaaaaagacaggagttcagtggcatgaccagggctcactgcaaccttgatctgggctcaagtgatcctcctacctcagcttcctgagtagctaggaccacaggtgtgcaccaaccaaacccgactaatttttgtagagatgagatcccactatgttacccaggctggtcttgaactcctgggctcaggtgatcatcctgccttggcttcccaaagtactgggattataggcttgagccaccgtgcctggcctgtgatcagaattctcatttttttagtcactaaaaatgctgggggggcactccattctccattatgtgattagttcacattgcatgcttgtatcaaaacatcatatataccccacaaatatatacaaaaaactttaaaattttaagtattaattgctcaggaaaaaattaaaatgctggggtgctgaaatctcaagggccccattacaaaactccttaggaacctcgccctctctctgctgtaaggactggttccagaatgagagaatttaaaagacattccccgcccaaaatgttcataatgtcaccccggaaacctgcgaatatgttatattacatgaccagggagaagtaaggttgcagatggcagtaaggttgctaatgggctgaccttaagataaggagatgatcctggattatctgggtggacccaatgtaatcacaagggtccttaactgtggaatagtgaggtggctgagtcagaggcagagtgatgcaatgactgaaagacttaaccagccatcaccggctttgaatacggaagacggtcatgagccagggaatgcaggcaggctctgggagctgaaaaaagcaagaaaatggattctcccctggagcctccagaagggatgcggtcctgccaaccccttgtcagtgagccatttcagatttctgacttccaggactgtaagaaaataaacttgtcttgttttcagccacgaaaaaaaaaaaaaaaaaaaa

SEQ ID NO: 202830 - DNA, 1000 bp, Homo Sapiens
aaacatttatatatatatatatagatttgtgtatgttatttgccaaagacagatataaattacctggtttaatattagtgaagaataaataagtgcacacatttcaactgtttcatttatttgccctaagttgagctgaaaaatgatatgaggcaaagaatcgaaataggtgtggcaatgcagcagatgtttagggctgtctacatcccaggtactgtgctaagcactaaacatgtatttgatcctcacagcaacctatttttccgataagaaatctgaggcttgattgataagctgacttgactaagttcacacagtttgtaaaagctagagtctgtgccttaattcacataatctctattcagagcctgtactgttaaccactcaaggattctggaacagaagctaacagttttctgcaacgagtctttgacttaaacatctgaaataacattggaaatagattataagaggagtcagtgtgtttttctatagtttcaaaatacttttaacatcttattgtcaaaaagattggataactgactttctttgctcataataactctaaattctagttcctgagtacattaacacatcttctttacctaactaccaatgtcccccatcatcgacttatcagcttgtttgagacaatgagaaagactgattttattttcaagaatatagactcttggttcaaaacattttcaggaaaaatattttaaaaccctacagttgaacaggtgtgtttccgtgttgatgatgtgctcaggatacaaaggtgaaataaacattttttctgccttcaggaagccctcaatctagaagagtagaggtccaaaggtgccatatgttcacactgtgagcctgcaagatctccacgttaacaaaggaaaactcttcctatgaatcttcatgatgataggccatgtctcttcttatttttgttttaaataaacatccaccttatcatgaaaaaaaaaaaaaaaaagggcggccg

SEQ ID NO: 202831 - DNA, 1000 bp, Homo Sapiens
ccagaaagcgggttctgcaccttgtcatccccctccctaacgtcatctactccatccctcatgttcctccaacttgcttctcccatccctccttcaaaaacaaaacaaaacaaaacaaaagccttaggtttctcctttttgaaatgtggccttaacattatttttgggaagctgaccatccatcctttccctcccatctccaccaacatcagagaagacagcatcgtgaagcttctgtggcagcctcctaaggaaggggctgccaatctgtagttggcagatgctataggaattgcttacaaatgtcgtctttaagaaaaatgttcttatatttttcctatgggcaaaatgaaggcttgggtgctcatctaaagctcagccaactcctgaagcactctctcagagcatactgctgctgtaatgggctggcttaattatcggcagagtgcttgaaaaggctttgcagacctcccctgcccccaagactgggtgactttatatgtacttcattcaagggtaaatcaggagacgttctccatttatctcttcgtccttcctgcctggaaagtgatagcactaaatattcccagcagatgggtagtgttctcaaaggaatcaccctttccctaccttcagactctattctttacccttccattgctccagtgctgatggaggccaaagacaaccccagggttttcataggaaattcactggaattgtgcgcaattgtctttgtagtccttttgccttttttttttttaaatattatgttgtcaatagcatttgtttgggtatttgttttagaggcctcactctaagttattaccgtccccttcattgttttcaaagacatgtggtgatatagtttttaaaaataactattttgttatagatcataatatgcataaaactgtacagaaatattttgtaatgtgttgattttaaaaaaagaatctgtaaataaagttttaaaaaaagaaaaaaaaaaaaaaaaagg

SEQ ID NO: 202832 - DNA, 1000 bp, Homo Sapiens
gggtaatttattttttaaaagtttatttggcttatagttctgatgtctggaaaagttcaagattagggatatgcatctggcaatggccacaggttacttccattcatagcagaaggtgaaagggagccagcatgtgcagagaccacatggaaagggaggaagcaagagagagatgggaagtgccaggctctttttaacaaccagttcttgtggtaactaatatagaaagaaatcactcagcccctacctcctagggagagcattaatctatgtagttatatgcctccatgatacaaacacctcctattaagccctatctctaatattggggatcaaatctcaatatgaaatttggaggagtcaagaactaggacttccaatatgatgctgaataggagtggtaagagcaaatatccttgctttgttactgatctagtttgtcaccactatgtatgatgttaactgtagggtttttttagatccacttttatcaatttaacaaaattctcctctattttctagtttgctgacagcttttattaagagtgattgagatgggaattgaacaattagaacacatggacacaggaaggggaacatcacactctggggactgttgtggggtggggggagggggagggatagcattaggagatatacctaatgctaaatgatgagttaatgggtgcagcacaccagcatggcacatgtatacatatgtaactaacctgcacattgcgcacatgtaccctaaaacttaaagtataataataataataataataaaagagtgattgttgaaaattagctgggtgtggtgcacacacatgtaatcccagctacctgagaccctgaggtgggtggatagcttgagccccagaagtaaaggctgcagtgagctatagtcatgccactgcacttcagcctgtaccctgcctcagaaaaaaaaaaaaaaaaagaaagaaagggtgtagaaattttctcacatacttccaggatc

SEQ ID NO: 202833 - DNA, 1000 bp, Homo Sapiens
taaaaataacctgatgatagaaatgcaaaacaaaatcacaatgtgatgaccactctcattagtctaactataattttaaaaacagaaaaattggagaaatttgaaccctcatacatcgtggctgggaatatgaaatgttgcagttgctatggcaaactgtctgacagttcctcacttccgcaactcagtatatacccaaagtatctgaaaacaagtgataaagaaatcctcctacatgaatgttcatagcaacactattcataatagccaaaagtggaaataacctaagtgtccattaccagatgaatggataaacaaaatgtggtatatccacacaatggaatgttatttggccacaaataggaatgaaggactgatgcatgctaccagaaggttgaaccttgaaaacattatgttaagtgaaagaactctgtcacaaaaggccacatattgtatgattccatttatatgaaacgttcagagtagccaaatctacagagacagaaggtagattagtggttgccaggggatgggaagaggggataagggcgaatgactgcttaatgggtacagagtctcctttagggggtgatgaaaatgttttggaattagatagtggtgatgattgcatgatttttgaaataccataacccagtcactgaattgtacactttaaatagatgaattgggtaatatgtgaattacatcccaataaagctgttatgtattttttaaaaagtctaaagagacatgacaatcaaaaacagcctgactagtgatgggattagctatcccaagctttctgagtttctccttagccagagatttttctcagtagtgttactaagttgaatttcaagagtaaattcatttccacactgtaactgacttaatgtattatgaaaagtactctgaaagagtatgatattccaacctaatcccacaacccaattatatagtctgcctgaacacatttggaaggaaaatgacaaaaaagatc

SEQ ID NO: 202834 - DNA, 1000 bp, Homo Sapiens
tagacaacaggcttcagagaagaccccctccgccaggcacagccgaggtgggaactgctcagaacggggcttgggccagggagtttgactcacacaaagcactctgggcaaactctcaaaccagtcctgatctttatcactccgggatgcttcctgtccctgctgaggcctgggcattgtccaagttaaagccaccggacagtcccagcaggctgggaggtggcccctgtaaaatgagctcaccaagaacccttccacctcccccgctgacttcagcagtggcttctggaggacaggctcgagacaccaggggagaaggacaaggtcggcccactacctccaagaaggtctgaaagccatgatgtcacctggacactgcaggatcccagaaggccagagagaggaaagggctgggggagccatagggcagggcaggtcatggagcctggttttcagaggggagtttggggttggagacatctgtagggaagtgaagctgtgctgtactagttctgtgaccttgaaccaatacattatacaacctgggccatccttggtttccgtctctataaaatgaggctaatggtagggcttacctaatagggtagatgtgcctttatcatgtaaaggctcctagcacagccaggcacatcgtcagtgcctcttcctccttctcatcatcatcatcatctagtacaggggtccaatctttcggcttccctgggccacactggaagaagaaaaattgtcttgggccacacataaagtacactaacactatcaatagttgatgagctaaaaaaaaaaacaaaacaaaactcataacattttaagaaagtttatgaatttgtgttgggctcatttaaagctgtcctgcagcccgagggccatggtttagacaagcttgatctagtatatttataacagcaccaacaatgcagactgagccagaccctgtgctaagcacttgctatgcactatctcactcaatcatcgtaat

SEQ ID NO: 202835 - DNA, 1000 bp, Homo Sapiens
tctgcaataaaaagagagacaaggaaggaatgagaagatacaagacaatgaactacaaaagttgagatcttggagtctaatacgtgaattgctatagatacatatacttgaaggtgtcctgttggaggccattatgcattatcagatttgtagcttcataaagttacacattttaataagacaaatcttttgatatggaaagactgaatggagagacacatttatcaccagtcatccagcagtctgaatatacttcaattagcacaattctcagcctggtgacttcaacaggacgctgattatggtacagcaatatactaagccaggagaaatgcgttctcttcttggctcagtataaatctgttgtgtgatctcatgttagtcaaaaagcctcccaaaacattacttttttcatcagtaaagtaagagttagactgaatatttttcaaaaaaccctttccagttccaacattccatggttctaagattcctttaactctagcttataccaatgttctgattttctaacacgactctgacaatatcaggaagtaccccactgagagctttattcagatcattggctaactgtactaaagggcagaggctacctcaaatccttcagcaaatacgactgtaccaagtagtgtagtgaaaccacttacacagcaggtgctacaataacattatttccttcaatgccattttgttaatgagtaaaaataattggctgcttcaaacattgtttctctaaaagtcacagtttccaagaaccctatagacaatgttaaataaggacttactatatatgagataatataaatatatgagacatttgtaatggccgggcatggtggctcacacctgtaatcccaccactttgggaggcggaggtgggcagatcatttgaggtcaggagtttgagaccacctggccaacatggtgaaaccccgtctctacaaaaaataccaaaattagccaggtgtgatggcgcatgcct

SEQ ID NO: 202836 - DNA, 1000 bp, Homo Sapiens
ctgtgtggattctttcttcaattttactccccttttcgtttgctgttttgtttccaatatgtcatgtttccatataacaaaacacgcatacagacttgataccatttaatatttaattcaaataataaaatacttaccatatcagataaaatgtttacatgtatgaatgtttatattccctcaggagtgtgttttggaggatgggtgaaactctgatagcacacagtggcattttaagtggtacacagataaacttcctaacaatttaattgtaatgtatttattttaaggtgtaatacttgtgtaaaatgaggaccacatcaatttggtaattttgtagctattatcgctagattgccaatgtcagttgtgatagaaaatacactgttcaaattcatttacttaagaagtgagtttatgtaaagcctggatagtagtgcaggagatagttctataacggcaacattggtgaaagaagtacatctatgctgagcattataaaacacagtcccttgaaagggattgtgtagtcatcagccacttctctaggtttgtatgccgctcccggttttcactggatgtgggttgcctgctgagcttccagcaaagctacagattcaagttgctttgctgaaaatatagcttaaataatttgtaagatttacctactacttaaatccttcatttatattctgattttgctcattaaaatttgcaatatgattgtattttatatgcaaagccatactatttcttggtagatccatttattcccttaccttagatttttgaagatgcaaaagtatcacgacttcctgtccaaaaggaaatgaggcactgttgatgccaatgcagcatttatacttaatgtagagaaagcactccattatagtgtacttcagaaattcagagagtgtgctaaaaacccgtgcttctggtcagcctcagtggctcacgcctgtaatcccagtactttgggaggcagagagattggaggatc

SEQ ID NO: 202837 - DNA, 1000 bp, Homo Sapiens
cttcctctggctcccacatctcacaggccaacctgtgctaggatgagctgtctgcccctcttgagggcaggacctgggttcgattctcccccatccccagctttgctcagcgcagagccgtgcacaaaggggagttcttgtgggaggagaaagcaggaagctctgcaaggcgggcctggggtgggaactcacccatgggagactttggccacgtggacgctggggatgttatactctctgcctgagacttcagacagcaccgtccaccagtctccatccctggagagagaaaggagtgggggcacctctttcagatgagccaaggccccgacaaccacacattcagggcttgcaaggaccctctcaggctggatcctgtggccacctgtcctgcctgtttcccaggcttccctgcactagcctgtccaggtacctcctgagtcagggctggggctggtggtagatgcacaattccaggctccctgctacagggcgctgcccacccactgcttctccctgtgggggtgtccagccgcctgaaattccaccacagggtttctgtgagcgcttcagcaaaggcttgtgcttttctacctgggggaagggccccttctcccgggacagtatctctaattccttccttcttttatttttttgagacagagttttgctcgtcgcccaggctggagtgcaatggcgtgatctcagctcactgcaacctcctcctcccaggttcaagtgattctcctgcctcagcctcccaagtagctgggattacaggcgtctgccaccaagcccggctaatttttgtatttttagtagagacggtttcaccgtgttggccaggctggtctcgaattcctgacctcaggtgatctgcccacctcagcctcccaaagtgctgggattacaggtgtgagctaccacgcctggcccattcatttattttagagatgacagggtcttgctgtcacccaagctggagtgcactggcttgatc

SEQ ID NO: 202838 - DNA, 1000 bp, Homo Sapiens
tgccaccatgcccggctaatttttgtattttcagtagagacggggtttcaccgtgctggctaggctggtcttgaactcccgacctcaggcaatccgcctgcctcagcctcccaaagtgctgggattaccggcgtgagccaccatggccagctgcacaaaccaacatcatatatttggagggggcaccatgttgaaattcagtaagggtaaggagagagaattagaaacctggccattttttaagatctgtatgaaataggatggcagcttgaaaattgatacatatgctggatcttcaacaataagaagacatgtttttaaatggaaagtgaggtttctgaaattaaaagggtgcttatgttgcacataaaatttgtttatgtccatatttgttcccatttcaaatagttgacgcttatcttcaacaattgttttcccttcccaaaacatactgtcttgttttttaatagtacatactgtgatacacattacaaatccatactgctaaaagaaatgacacatttcttctcaatagggtggtgtttctttattataatgaactatagctatagactgtatcataaaagagacaaattattcgctatttaaagttttcattcccaaagaatcagctgttctatcttactggcaaaactctgatacaatgtgtgggaaagctagtaccagctgagcaggctggcatccatgctgttcatgtaggaatctctaattagcaagcttccttaggacccttaacaaagagtgtgttctccccacttttgatttacatctaatttgaggggaacacatgcataaaatcaagtactgcttcaaagagttgtattcacttcaaccgacttttcatatgtggtttataatttgttgttttggataaaatgatactaatcccaatgcaggtaaatttagatagataccatctctctgtcttctttagtttaatgtgtatttgtaaacagtaaaaacagtacaaaataagatc

SEQ ID NO: 202839 - DNA, 1000 bp, Homo Sapiens
tgaagaactatttagaatggattctgtgttttgaaacaatgcatagatagttgatacttttattgttatgtgcattaaggttttacagcttgagtactgaaaattctgatgccttttgggtgtgaatgggtctgcctctagaagcagagagaagccacaaataggacttcacagaaaccacaaataggattcaaaggactctgatttagtaagtagcatctatcatcattaaattagctgctcaacgtttcctctgttgttcattttgaggtagaatttgggaaaggtccagggttttcagtgactcataccaagtttttctggcagtgaatcatctttgggagactttagaaatccatataggttaattaagaataaaacgccacaactgctcttcttggataactgatctactgagttctggccaatagcttcagggatggtcagagtaaggggctgtttcagaagcgttagtggttagttttctgagaggaataataactaataattcaagttacttctaaattacacaaacttcactcatgatcaccacttttatggtctttattataaatagaatccctcagagagattaataatatttatatttactcctgtttaacaagtgcagcattaactggccaataccatctagtaaaaaagaaaatagaataggctgattagtgaagtggaaacacttggattgcaatgaagtaccatctgatttatgaaatccatagatttctaaaacaatattttgagtaaagatatgtgttctcaaaacacttaaggataaatgatatggaatatcaaaggaagatgtttttaatatgagcaaaagattgcttcagggagagcacagactggcataatatcaaagatcaagaaaaagattcaaggatttgtcacaatttattgaaagggctgaacttggtaggagtcagccaataagtagcttgattttcccctgtgattcccctttggagatgtctgtgagatc

SEQ ID NO: 202840 - DNA, 1000 bp, Homo Sapiens
tttaaaaatgtgacaggttgatttgaaaaataccatatttcattcatcatcataaatagaaatatttatatttattgaatatttactacataatagatactgtgttaaatgcttttcatatattatttaattgcctcacccctccattacataggtagtattcaccctgttgtgaagattaagaaatcccagagatatcaggtgacttgcctaaagttacatgactaataagtaatggagtatggatataaacccagtttattggcttcaaagctctttgtactatgccatgttgcttttctgatttcttgaaatctttgacagtaaccggggaactcaagggttactgccacctattttctaataacttcgttttcttggatctgtatcattagtgcctagcacctagaagattcttaggcagtgttggctgcattgattgaatgattccacactgatggctagcttaaacagccatggaaactttaattataatatattaatctaaacaggacatatggtttttaggagttaagtgccctcaggggaagcatttactaaatgtggggcacattttaaaagtaatatctcctgctactgctgatatttctaaattaacagtatttctagattctcagacttggggttcagagatttcacttgctgattaattaattcaaggatataagagctctagcaaataaatattttattaatttgtactgttctacactcaggagcaattattgaaaatcaaggtttgttatcaggaaatacatgaagtcttatttggaaataattccttaaaactcatcctgagaagagacaatctgcatccttcccacttagtatatcatctacccatttgtggtctctcataattggaaatatttccctaattccaaaagcagaaaggaatcctcttaactgctaacttctctcccaaagggagaaactttttccagccaacctcagtgaaattgttgattgaatgctgatc

SEQ ID NO: 202841 - DNA, 1000 bp, Homo Sapiens
aggaacaggcctctgaccttctcctgcccttcttccatagtttccgcacctttctgactctgggtcttaagaccctcccacgagagagtcccaccctataccctgcgggaaggaatgctgatgtcctgaagcttccataaaaatccaagaggacagagttcatgagcttccagataggtgaacacatggaaattcctggagggtggcacacacagggagggcatggaaactccacgtcccttccctcatacctcaccctacgcgtctcttcatctgtatcctttgcaatatcctttttaataaaccagtaggccaggcgcagtggctcacgtctgtaatcccagcactttgggaggccgaggcaggcggatcacctgatgtcgggagttcgagaccagcctcaccaccatggagaaactccgtctctactaaaaatacaaaattagccaggcatggtggcaaaagcctgtaatcccagctactcgggaggctgaggcaggagaatcgcttgaatccgggaggcagaggttgcaatgagcagagatcatgccattgctctccagcctgggcaacaagagcaaaactctgtctcaaaaaacaaaaacaaaaacaaaaacaaaacaaaaaaacagtaaatataattatttcctgagttctttgagccactccagcaaattaatagaactcaaagagggagtcatgggaaccccaacttgaagccaatcagtcaggagttccggaggtctgaacttctgactggtgtagggggatgtcagaggtatttgaaccatagtgactccatcttgaataggggctgggtaaaatgaggctgagatctgttgggctgcatccccagaaggttaggcaagaatagtcacaggatgagataggagactggcacaagatacaggaagaacctgctgataaaacaggatgcagagtcggggaaaagcggctcacgcttgtaatcccagggatgggaggccgaggcaggcagatc

SEQ ID NO: 202842 - DNA, 1000 bp, Homo Sapiens
cttatatttagagaaacttaaagactccaccaaaaaactatttgaactgataaaacaattcagtaaagttgcaggatataaaataaacatacaaaataagtagcatttctgtatgccaacaacaaacaatctgaaaaagaaactaaaaagtaattccatttacaatagctacaaataaaattaagtacctaggcaataactcaataaaagaagtgaaagatctctacaattaaatttatgaatcattgatgaaagatattgcagaggacacaaaaaatgaaaagatattccacattcatggactggaaatcaatattgttaaaatctctattctatccaaagcaatctaaagatttaatgtaattcctatcaaaataccaatgacattattcacataaatagaaaaaattaatctaaaatttatgtggaaccacaaaagaataagaatatccaaaaccaccctgagcaaaaactggagtaatcacattactggatttcaaattatactacagagttatagtaaccaaaacaatatggtcttagcattaaaaacagacacatagaacaatggaacaaaacacagaatccagacataaatttatgcatctactgtgaactaatttttgacaaaagtatcaagaacatgcattgggggaaacgtttcttcaatgaatggtgctaggaaaactggatatccacatgcagaagaatgacactagacctccatctctcgttatgtataaaaataaaatgaaaagagatgaaagacttaaatctaatatcccacactatgaaactactaaaagaaaacattgggaaaactctacagggcattggcctggttgaatatttctggagtaataccctgacagcacaatcaaagcaaaaatggacaaatgggatcacctcaaattaaaaagcttccaagtagcagaggaaacaatcaataaagtgaagacagcccacagaataggagaaaatatttgcaacctattcatct

SEQ ID NO: 202843 - DNA, 1000 bp, Homo Sapiens
tcactgcagcctctgcctcccaggttcaagcaattctcctgcctcagcttcctgtgtagctgcgactacaggtgccggccaccatgcacagctaaatttttttgtatttttagtagatatggggtttcaccatgttggtcaggctggtctcaaactcccgaccttaggtgatccacccgcctcagcctcccaaagttttgggattacaggcgtgagccaccgcgctcagtttataattagtcttaatcccatgtgaacccagttgcattgtagagaaatagatggcaagctctgagtgtgtgtgtgtctgtgtgtatgtgtgtgtagcacagtttaatactggtagtatttgggtatttctcacaatgttaaggaacgctgtagcatcacaaatggacaagcacttctcacaagaggatccatgaataatgtccatgtgttcttcaggtagtttcacttttctggaatttatgtttatgcttttgcttatcaagtgaaataatagtaaaagttaagaaccactgtgttaggccaggcgcagtggctcacgcctgtaatcccaacactttgggaggctgaggcagttggatcacctgaggttgggagttcgagaccagcctagtcaacatggtgaaacccccgactgtaccaaaaatacaaaaattagctggggatgggggcggccgcctgtaatcccagctactcagggggctgaggcaggagaatcgcttgaacccgggagggagaggttgcagtgagccgaaattgtgccactgcactccagcctgggtgacagagtgagaccccgtctcaaaaacaaaaaaaaaagaaccactgtgttgatttttcaacaaaagtcacttgtcagatggaggtttgctttgtctgtacgtgtgtgtggtggtgggaaggtggggatgcgtggggtcacttcagttggtgatgagtaagatggttcacagatccaaaatgccataaaaccagagctctgggctggatc

SEQ ID NO: 202844 - DNA, 1000 bp, Homo Sapiens
ccaagctgagccctgctttccagctgtccccaccaaggcactagccatttgactaaagccattttaaaccttccagaccaaccgcatcaccagctaaatacctccaaaagcccgaattgacaccaaatggagagaaagaatcgcccagccaaaccttgcctgaattcctgatccacagaatagtgaggtattaaaaaatatttttaagtttttattttgaactaattatagattcataggaagtttcaaaaatagtacagaaaggtgctaaagaccttttatccaatttgtctcagtgatagcatctttcataactgtagagcaattataaaaccaggaaactgacaatacaatccacagactacattcagatgtcaccagtgttacatgcattcatatgtgatcgcatgcatgtacagttctaagcaattttatcacatgtgacattagcgtagccaccaccacaatcaaggcacaaaactattccatttctgcaaagatcccccatgctacctttttctggtggcatctctttctcctccacttgccccttaaaccttggtgacagtactttgtttctatctctataattttgtccactacgaaaatattacagagatggaactgtacagtacacatctttttgagatcggcttttttctttttttctttttttttgagacggagtctcactctgttgcccaggctagagtgcagtggtgcggtctcggctcactgcaagctccgcctcctgggttcacaccattctcctgcctcagcctcctgagtagctgggactacagacacccgccaccatgcccagctaaattttttttgcatttttagtagagacagggtttcaccgtgttagccaggttggtcttgatctcctgacctcatgatctgcccacctcggcctcccaaagtgctgggattacaggcatgagccaccgtgcctggccgagatcggcttttttcattcaccatacttcccttgaga

SEQ ID NO: 202845 - DNA, 1000 bp, Homo Sapiens
caataatagcaaattcctaccatatgctaagcattttcatatgcattagctagttttgtcctgcaaaaatgtctgccaagtattaatattattcccatttagcaaattgggggactgaggctcacagttttggtgacttgcccaagcacgtggaggtggtggtgaccgagctgagattcagacccaggtgtgcctgatggcccagtccctgccccttgcgatgccccacggtgtctgggagcaagggttttgacaaaccagccaggggcagtgggtgaggagagaagagaggttgagtgggtgggaggggtggccaacaaaaataagccaacttccagaaaggatggaaggaaagactcctggccacaaatagctgtccagctgcccccatccaagtgtacggtaccatcctccccagctgaaattcccactctgttttcagtctcttccaaatgcaagtcagatgatgtcactgctctcactgaaaaccttcagtggctccccattgctctcaggataaagaagaaaaacccaaaacctgtgctttaaagataaatcagccctctgggggctagggcagaggaaggggggaaaaggccccaaagtatagcagttgctgttttttgtgatgtgaagatactcactgtgacaagttacaaacagttaaccgccggttcataaaattcctgaaaatgtcacaacctgctccagcatgccagttcaagtcataatccccctgacagcacaccacgtgctctgtgccctgctcatatgcccagccccgctgggcaccgcattccccctggcctgccccgctctgtcctggccaacctactgcgggctctggcacaaaaataatccaggcatggtggcacacacctgtggtcccagctacttgagaggctgggaatctcaggacttgttaaaactcaaggtgttaaaactcaaagctccttctacctgccacgctgtctcccacccactcttgtgacctcagatc

SEQ ID NO: 202846 - DNA, 1000 bp, Homo Sapiens
tctcccaagtagttaggaccacaggcacaagccactacgcccagctaattttttattcttttagagatgggtgtggggctgggtcttgctatgttgctcagctggtcttgaactcttggcctcaagggatcctcctgcctaagcctcccaagcagctgggattataggcatgagcctatatcccaactatcttcacccattctatcagcctctgtcaactaagcaaaaaagataaaaataaaaaataaaaaaaaacgggacaggggagcttttaaagaattaaagttagttttatttagaagtcttactgaggactgttacctaggagagtcttttagagaatttttgttagactgtttcaaagtagggttttagacacagtttataaattggtggtggcagttttgtatgtgcttgtaagttatagtagagcaaaatctcattaaagtttgggtgtaagggcatatctggttatatattacggaggcataatcactaatcttgttggacattatcttacgtgcagaaagaggcaacgactagaatcactgaacttgccttttctaaaaatgcagtgatttaagctggagatgtgggaaactgtgttctatcttatttattgtctttagggctttttgttgttgttgttgttgttgtttttagaggactgtgctcagtcactgagtcagggcctttgtgaaattttgttggcaagggattttgtgaaattctggcaagtagaacaagcaaacatcaaacattctcattttcttaaatttgctgctttgtctcacacctctaatatctttgcttactagaattctattcactcttctgggctacgctacaatgtcactttctccacctatgttgctcatggtgagagcagctgctctctccttccttaaatttattcaaatattccaatgctcaggcaatatataaatacatacaccatgtaccagtcattgtcttaggcattagggacacaaattggatc

SEQ ID NO: 202847 - DNA, 1000 bp, Homo Sapiens
ctccaaatcagaagccctctctaggagagcggagtctctctaactctggtctgtcatcttctgccccttcccatcatcctcagggctcccagagccctgcatctgagcaggccccacgccctgccggcctcccgtcttctggaggaggctttcttctctccatgatgataggagggtttggccaggcttctggctcacccctgccactggcctgctgggtgactcactctgacccctcagagtccccactgtgtgaaggaaacaagctaagagctcttcacaggtctatgaatgacactgctggaagtttccagaagtgagtaggcagtcagcaagccttaaggatcaatctctggaatatcccagccctcccctttcaagaaaagtcaaaggccttcctccaagacacctgggttccaggaacctccatgctccaacctcaaacatccaagttactgccccacagagcacccaggcctggcctgaaaggggtccagagtgctcccgtgagtaaaggcacaaagtcccctcttgtccttaccatggttgctggtgaccgggactcctctgttgcaggtcgcctcctttgcactccaccacccaaagatgacctggcctgctctagcccccgggatttgtaggggcaccctcccctcccacctccctgctccccagcactggagaccctgcccaatcagatcctggggtcagcgagtcccacccctcccacagtctgaacccattacctaatttagccaagggcccttgcagagaaatttaagcctccaagcaggtggcaggccttgacgtcctagattcttgtgaggaaggcctgccctgttccactgccttggagtccccccgaccgaggaagcacactggctccaagatggtaaggatgatcagagtagtaaagggtgaggcagcatggtaaaatggggagagtacaagccttgaagtccaaaacccaagatccaaggccagcctctgcgagttgtgt

SEQ ID NO: 202848 - DNA, 1000 bp, Homo Sapiens
tgagatcctgtctcaaaacaaacaaacaaacaaacaaaaacaaactggaaaaaataaaaataaaagttgtttttatctcaaagcgttgtgatgaataaaatgatgtttataaagctcttagcatggtgacctactcagtaaatgttcaataaatattatttactaactattaaattttagtctgggagtctagactatcccatacagaagtctcagaataccaactctgtgctacttccagcactgctgagttatccattcactgaacagatgtgtgttgagtggctgatgctgtctcagaccctgtgctcaatgctttactcacttagttgaaatcctctcatcatgatgggctttataagagattgtgagctctgtgaggctagagtctctactctgatgttgatggctatataaccatgtaatgtacggggactggcacagtgcctaccaaacaggagatgctaacaagttttatggaatgaataaatgagcaaaggatgaatgaatacgacacaaggaagattaactccttgacctaggggaactcatgttctagttgggagttggaattagctccctaaaagacaatggaagcaaaaagtgttagagagggaattttagagcccaccatgctagtgggctcaccattagtaaaatatcaacaatttctgttacagttatgctaatgtaattcagtgataagagcaaaagaatgcataatccaagttgacgattctagaagacctcaacttctaacgaaaaacagaagcatcttttttactacttatcataggaaaataaattctagtcgtttttatatctgaagtcaaaagatagaaagaaatatgtggtcgcatatctttctatgttaagtcaagcccagtcctgcctcagtgtcctcaccctatttgctggtggttaggggtgtcaatcaccacctcccacctcttctctaccttatggctaattaggaagagacaaatgacaaatagggatc

SEQ ID NO: 202849 - DNA, 1000 bp, Homo Sapiens
cagcaggcccatttgacaaccagtggccctcttagtttctttttttttttttttttttttttttgaaatggagtctcgctgtgtcacctaggctggagtgcactggcacaatcttggcttactgcaccctctgcctctgggctcaagcgattctcctgcctcagcctcctgagtagctgggattataggtgcacaccaccacgctcagctaacttttgtatttttagtagagacggggttttgtcatgttagccaggctagtctcgaactcctgactttgtgattcgcccaccttgtcctcccaacgtgctgagattataggcgtgagccaccgtgcctggtgctatacataattttctattttgctcgtaatattttgggttttattttttatttttatttttattttgagacagagtctcactctgtcacccaggctggagtgcagtggcacaatctcagctcactgcaacctccacctcctgggttcgagcaatttttgtgcctcagcctcccgagtagctgggacaataggcacgcaccaccacgcccggataaatttttggatttttagtagagatagagtttcaccatgttggccaggctggtcttcaactcctgacctcaagtgatctgcccatctcagcctcctagagtgctgagattacacgcatgagccactgtgcttggccatattttgagttttatttcgcatagttataccatgcatattctgtttcttaattaattaattaattattttaaaattatttttgagacagggtctcactctgttgcttaggctggagtctcagtggtgcaatctcgtctcactgcaacctctgtccccaggttcaagtgattctctcaccttagcctcccaagtagctgggactagaagcatgcaccaccatgcctggctaatttttgtattttttggtagagacagggtttcctcatgttgtccaggctggtcttgaactcctgacctcaagtgatc

SEQ ID NO: 202850 - DNA, 1000 bp, Homo Sapiens
accatcttggccaggctggtcttgaactcctgacctcgtgatccacccacctcagcctcctaaagtgctgggattacaggcgtgagccactgtgctgggccatttctattgttttaagccacctaatttgtggtaatttgttacagcaatgctaggaaatcacaaacttagcttcaagtgactctaggagctgtcatttctgcttcctggcctctgctgtataagaacgctactatttagaaagaacttggactgatgctgagtgctgagtgctaatctatcgtgtctaccacttggaaattggaagttacatggatcgggatggaacaaagatttcttccgagcatatctgtttggtcatagctaaaatcaaaccagtttgtttacatttataaaaccacagatttagccttgatgtttatcccttaaatgaactgcctccaaccacgcacacataaagtacaataccaataacagtgccctcctcttttaaaaatgttgtataaagatgggccaagtctaaattggctgaatttatcttgatatttgaagtgtcaaaaagcatcttattttttccaaaaaaaaaaaggggcattatttccactgctacttgcacagcaagcttcaacggtaatgacagagtgtctcccgaagttaaatgtgaggccttaaataacagctgatgaaaataccttctgtttaacacatgcaatcatatgtcatgcttttggcaccatataagtttggttaaatagtgtttataatgttacaaaataaaagaatcattttctcaggttgtcccagtaaaatgcggttaagtaggccattacataacaaattattatctcatgtaaccatcgatagtgttaaaggtaggattttgtttctttttttcctttttttttttttttttttttttgagacaaagcattgctctgtcacccagactggaatgcagcagcacgatatcggctcactgcaacctctgcctcccaggatc

SEQ ID NO: 202851 - DNA, 1000 bp, Homo Sapiens
tttattttttattattattattttttgagacaaggtcttgctctgtcactgcagccttgacctcccaagctcaagcaatcctcccacctcagcctcccgagtagcaaggactacagccacatggcaccacacaaggctaatttttgtattttgtagagacaaggtctcactatgttgcctaggctagtatcaaacccctgggctcaatcgatcctcccaccttggcctcccaaagagctgggactacaggcgtgagcccctgtgttggtcctcatttcatccttatttctataacagaattcagacttctcaaatatctgttaggctcctactctgctcccagatttggttgcagccatttacaagggggaaaacaaacaaacaaaaaaggagtcctattctcaaataaaccacagtatagttaaacagacagaagctatgtaaagctaggcacgtatactagatggtgtgaaacagacctagcaccatggcaatgggaatggcctcatgaagacagaaaagaaactgggactggaaatgcaggagttgaactaaacaagagggtacaattatagacagaacatcagtaaagaaaagcaaagaaacaaaaatgagcttaatccatgtaaaggataataaagacaccagtctaacacataatgctgaacattaagtgataatactgagcagaaatggttcggtccatagaagatatgaataccagttcaagaggcttagcttttagctaactgccaacaaggatccactgaaaacattttagaaagattagtctaatactgaacatgatatactgataaagaaaacacagaaagcagtgagatgtttgtgattacaaatatcactgagacatgagatgagggcctagtttaagggagtaacaatgagaagagtctcagagacactctagtagtaaagacacttcaggccgggcacggtggctcacaatcccagcaatttgggaggctgaagtgggtagatc

SEQ ID NO: 202852 - DNA, 1000 bp, Homo Sapiens
ttctgagaatttagtgttttaaacagaataataagtcaccttgaaaattcatttcagaaggaacaagaaaattgtcaagttctctgatttcttttgtttctccaattctttctcactcttcctcttcctcataaatcaactttcccagaagcctaaagttaatacaatcccaggagagggcatgaggtagtggcagctctggtcagataagagacagaagaggaacagaacctctctttcaggctcacatggactgtggggtggagggaagacctgtgtccatgacaagaaggctgcatagagtgtgggggaggatgagaggtgagggcttgtggctctgcttcctgctgggggctgcagcagtggccaggcaggagcacagtggcttcaggtagagaatgcctgggcacagctcccagaacctcctttaggggcctggggaggggcagggaggtcgctggaaaggggcaggcctggtgctggctactgagcaaacggagcctaccatcagagcctacggggcagacctgcgtgcccaggaattgaatgggaatggcggccagatcttcagaggctacacagccctaagcaaagagagaactttcccttttcaaagaagttagcagccagagcaggtggtgacagggagaccactactgcagcagctggtgaggaatagagggcagccccccatctgcaaacagcctggggacccctcctctcactcaccatgaggacccagtcaccaccttggaaaggaggtgcgaggagttggagacggggggcctaacaggtaccaaaagcgctcgttacaccagcagatactgagataggcggcatacacgtggtaaggcatcctctctggggagaaaaacagagggtggcttaagcggaaggtgagatcagatattgaggaaattaagaagtgacttttttttctacaatggaatgtgatgtgtgaatttgtcacttggtaacatactaggagtgagtgtgggtg

SEQ ID NO: 202853 - DNA, 1000 bp, Homo Sapiens
aaataattcatgttaaagatggaacaaaataattaactttacatgtttggtgatacagatgcaaatgtttttgatatatggagatgttgagtcttttgactttactaaaggtgctgaatagcattaaattcactattttccttttctgttttacttgtgaaaataaaaatgcactaaggttgggtagaagttctgtttgcactcactaattgtgacagacagaggtttttgtaagtatttattgtacaattgatgcatgtttatttttagcgttgttattgcctctggtgttaataaatgaacaaatggctatctggaggaacagctacaacccttgtaatcctttgcttattctctgaatactagaggtatatatattttatttataacatagaccagcctaattatataacttgtagcctttgtatttttatatcttttgtatatattattatagttaaaataattttgattgctattgataattatttactttttagaaagtactcaaaatttttataaactaatatcccaagtgcattataactagaaaatgtaaatatattaattagccaccacatatttttgccaagcacattttttatattcctatatcttggctctgagtttgaaatgtgcatattcaaagtttggataattttcaggtttatcaaaggactcaatcatataaatagtatttgagtggaaattgctcttatcatagttgattgattagtttttggttattttaatacagttctaaaagcacatctgtgttcatggtttaaaatctaacaaatttaacttacttgatttatctgggaaaccaccacacactattcacctccaaattcagattgtgggagatggggtacagttatgggggagagaggaaacaatgatctgaaatggtattattgactcttactttagagaatgaatctcattgaagtataccagtaagagttcttggttgcaaacaacaaaaaaaattatgatc

SEQ ID NO: 202854 - DNA, 1000 bp, Homo Sapiens
ttcatcccacagacattaccaatggagagagaaaacatcaggtttccttatccttgccccttgaattcaagattagatgaacatctgaagattaggacactgtggaatgtttggtacgcaaagcccagcagatttggcgagggctaaataattgctaagttagatgagcttttaactaatttttagaaaagctgaaccttagaaagataggcctttggtagctcatggtgtgagggtcctggaggtacaatgcactgtgttgtcagggctccctgggttgctgctccctttctggagtatggacaatgctggtgtgccctgctcagagggagatgctgctgctagtttggggtatcactggatgggctcttcaagtcattgtgaaaagtttaagaatagactgtagcaatcaaagtgtgacctgagagggtggaacaggatttttctctggtcaaaattgatcagaacttgaatggataatgaaattgtggtatacatacacaatggaatactactcagccacaagaaagaatgaaattctgtcatttacaccagcatggatgaacctggaggatattatgttatgtgaaataaggcaggcacagaaagataaacaccacacattctcacttacacatagaagctaaaaagttgatctcattgaagtagagagtagactagtggttattagaagataaagagggtaggggaaaggagatagggtgcagttggttaacagatacagctagatgggtggaataagttctagtgttctatagcactgtagggggactatagttaataatttattgcatatgttcaaaaagctagaagagagaattttgaatgttcctgacacaaagaaatgataaatgtgtaggatgattgatttgctagtttgatcattacacattttatgccatcaaaatatcactctgtaccccataaatatgaacaattatgtgtcaattaaaaatataataaaataatcaataaaaaa

SEQ ID NO: 202855 - DNA, 1000 bp, Homo Sapiens
tttttctcagccttccttttcttatctgtaaaatagagataaaactccctacctcattgggcttttgtgaggataggctaatatttgtgaagtacatagcatggtgcctggttccttagtcaacttagtagttcctgttagaagaaagctgtttaaagcttgtcataagtttttgaaaagtaaaattcagtttaaaaaatttgacaatatttgtgtgttagattattatagtaggagagagatttcaaagactacttaaaatatttttaatatgtaattgtacatggtataaaattcaaaatgtacaaatgagaacataataaaaagtatttgtgtgtgtgtgtatgtacccttgtacacatattttctgcatatacttgttacattttaaatactgtatctttagccttctctctaatctcttgcaaataggactaactatagctctagatcaatattgtctagtactttctgtgatgctggaagtattctgtattgtgtgttgtccaatagagtaaccactaggacatgagtctagaaatgtatttcttacaagtgaataattttaagttcaattttaactaaatgtagtaactatcggtgactggctggtggctaccacattgagcaatgccatacaaggtatttacgtctttttcaaaagtgtgcatttttcaaaaacacatggatcccaaattttaaaattaagaacagagtcatatataactgtgaatttaatactaattaaagcagtctgtagttcagtacattttaaattatgtgtggctaatatgtagaaagctgaaactggatcccttccttacaccttatacaaaaattaattcaaggtggattaaagacttaaatgtcagacctaaaaccataaaaaccctagaagaaaacctaggcaatgccattcaggacagaggcatgggcaaggacttcatgtctaaaacaccaaaagcaatggcaacaaaagccaaaattgacaaatgggatc

SEQ ID NO: 202856 - DNA, 1000 bp, Homo Sapiens
ctttttggcttgtgcctctctaccctggaggatgctaaatttttaacagcagaatatcacagtaggaggaatattggtttggcttctgttttcaccaattcccaagtgaccttggacatattatttaacttctccaagcctaattttcctcatttgacagatgaggataatagtagttcctatcttataggcttgtgggattaaaaggaataatacatgaaaagtagttggcattgaagaatcatgcagtaaatgcctggccattccaaaaagtgcagtcatggacaaagtttcacgtgctgcctatctcatatattctctacccactgataaatgcctatgagagagggagattaagcagcaatgcctatgagagagggagaactcaactcgaggacaagcaagtgtctggatctgaggtctccacgtggaggttataaggtgtctgcgtcactagaattagaattgcttctgatccctgtaaatactgccctggaaaatggacttaggtgagtactttgcaactcccatggaaatgaaggtgatagacaacaggcagcctacttctctggaaccatttcaaatctggtttaagtttgcttggaaaagtaaacaatgttttacagcagtcctgtgaataaaacctatgtaatactttacccaaaatcacacttgaccttttaaacttgctttcagaaagaggtgaagatgtcattctatttcaacagaactactatatgaaattttttattttatgtaaaatcattataggtatgatttatcactttgcaacaggattcagtatagaattgatttaaatagcacatctttgtttgaactttattattatatatatttattattgtacatagttatataactattatttgtctgaactttattactttttttatatttatgtatattttattttccccagtcccctccacctttcctggcctctggtaaccacaaatctactccctatcttcatgagatc

SEQ ID NO: 202857 - DNA, 1000 bp, Homo Sapiens
agtcacccaggacctggtcgcctcttcttgtgggttgagaagatcttgcctctcaaagggagtaaaactgaagcaccctcctcactggaataccaggtgagaaaggccagtgagacagatgccagggccctggcaaggcgggtgcgaggccccccccccagttcaggaggagccaaaggaagcgcgttgggctggggcctggtgtccgtcgcccatcgggggcttgcacagcgctgcggctcggcggcgggaacctcggtgccgttcactccttgcggtgggggaacggagccctcgttccacaggccctcggccttccccactggtgaactcgagctgagctgtgggggcagagggggcagcagcccctccgtggaagctcagcatccacagggcacctgcagcaagggaggcagagctgggcaatatccacgcagcgtgaaggcatttagcaatcagtcggaaactaaactcaatacgatgcctcagaagactggtgattcgccccgattagacggaccagtccttacaaattgccttttcatgttgtgctgtaaataaccaacgtatgtaataacattatcataccccagatagaagattccagggggagagactcaaagctgcaggttgacagttgcccagagcccgaggggaggtgaccagttttgctcccagctgtcactgggctggtccctccctgcgcacggaagacgagaggaggcgaagctgcgggagcacctcctgagaaggcgccacatggctcccgtggcttctccggccccagctcacctctaacccaaccctgtgcggccagggcaggggcgtcctctccccccgcagccccgagggtccctgtcgctggccgggcaccagagaggctttgtgatcgtccccagccagcgttccctccctgggccatgaactctctgaagaaaagggtggtctgcttccctctgtccctctgaggcggttcctgaggcagtaggtcccagtgatc

SEQ ID NO: 202858 - DNA, 1000 bp, Homo Sapiens
gcagtgtaacgctatttgtggatggggcctttggaaggtgatgaggtcatgaaccctcacgaataggattagtgaccttggaataagagacacaagataaatgattcccttctgccactgaggacacaacgagaaggcgccatctccaagccaggaagggggccctcagcagacaccgagtcagcaccgtgatgatcctgggcttcccagacaccacacctgagagaaataaatgcctagtgtttcagcccccagtctatggtaattagtgattgcagctcaaactaagacacccttcgccttgacataaccatagcgacactttggataaaacttccttcattttggatgtgactctggacacttcctggtcttcgtacactgcagacatgaagtgtcatccagcggcatgtgctggactggggcacccttggtgttgccttcatacactgcagacatgaagtgtcatccagctgcatgtgctgggctggggcacccttggtgttgtcttcatacactgcagacatgaagtgtcatccagctgcatgtgctgggctggggcacccttggtgttgtctgctgtcacactgggagcctggaccctgcgggcagggctcacagaggttgcagggccatcctctcgtggaaaatgtctctagactgctttacttttttgatccttaataaaataaaatacactttcttagctccctattcttgcatactttttcctggggaacccaaggacccagcaggttagaaacacagggtggtcagcttgatgctccaggaggcagcctccaggggggctgctgtgggcagttcctccacagctcacactctgcagaagccgggtgagtgtccctcctaaatactccggagcagggtgctcctggccctgaccatggcatcatggccctaggattgggtgagtgctcctcgtcaacgctccagaatagggcgctcctgcccctgactatggcatcatggccctaggatc

SEQ ID NO: 202859 - DNA, 1000 bp, Homo Sapiens
ttcattagctacttctcctatataaactcaaattcctccagttctaaaaaaatataaaagtcaaatctccatatacacaaacacctccatgttaggtactctttcaactccaagacccagaaatatgactcaagctagttaacatgttaccagttcctgcaactgagcagctcaagaaggtcctggcaaagacatggccaaactcaggactcatgggcttcctctcactctccacctctctattgtcattccctctgagagtaggattcaatttaaggcacatgctccccacatggtgggaaaaacaaatgccagcagcccagactatatcttcagggcttgcaatccaaaggaagggagctctctctctcccagcatctatgtttcaaatctcagaggagaatgggattctcagacactaaatgggaagagataggatgtggctcctcttctgcttaaaacccttcactggagtcccaacatctacttacgccacaggataaaagccattgtgcacttaactccatggtgctacacaccattacctttgcacaagctcctctctctacagaaccctcatccccaacttgtccatctggtaaaatcctttatccattattcaaaacctacctcagacctaagctccctaaagaagcactggctggtgtctccaggaggctttgctgctgttcctcctctgcacctgtgcccacctctatggttccaccacactcctctgtgccactcaaaaccctcacggtaaatttcattgtttacatggctatttctcctaccaaaccataaatcctgggcttgtgccttattaacatccaaacacagacttacttatatcaggcatgcactcacacagtctttaaaacaatgtttgtgacttgatttttgttgttgttgatacagggtcttgctctgtcacctaagctggagtgcagtggcatgatcaaggttcactgtagccttgaccttctgggcccaagtgatc

SEQ ID NO: 202860 - DNA, 1000 bp, Homo Sapiens
aataaaacaatttttaacagaaatttcatttgttttctctttcccctcccccaaatttggacagatacactttcactaaaaggaaaaaagctggatttttttggaagaggtgacacatatgtaagcctgatagataccattcctgaactcagccgattcacagcatgcattgatctggtattcatggatgacaactcaaggtattggatggccttctcttatattactaataacgccctcctgggcagagaagacatagaccttggacttgcaggagaccatcagcagctaatactatacagattgggaaagaccttttctatccgtcaccacctggcttcatttcaatggcatacaatatgcttgatatgggatggtgtgaagggcaaattagaactcttcctgaataaagaaaggatactggaagtaacggatcaaccacacaacctgacacctcatgggactctgttcctagggcactttctcaagaatgagagcagcgaggttaaaagcatgatgcgtagctttcctggcagcttgtactactttcaactctgggaccacatcctggaaaacgaagagtttatgaagtgtttagatggaaatatagttagttgggaagaagacgtctggcttgtcaacaagatcatcccaactgttgacaggacactgcgctgctgtgagtaacttaacaacttttttccttagcaagggtagtgttgacacagtacttctctgctagcagtggccccaggttgctagttttgtcatcactttttaatgaggagcacatactgttttcttttatctttattttgatatgatttcaaacttatagaaagattggaagaataggatagaagaacacacacacacacacacacacacacacacacacacaccacttatttgtttctaagtcatttgagagtaagttgcaggcataattctttgctacccctaaatatctcagtgtgtatttcctaagaatgaggaattc

SEQ ID NO: 202861 - DNA, 1000 bp, Homo Sapiens
gcaatcctggaggaggctattgctggcacaaagtctggagtttgtactgcattaaagccagtagcttgtttttccatctgggctaggcacagagtttgcaaactttttttctgagttattcattccctggtaaattccagtcttgggctgctgtaggacatagacaaagctttatcccaaaagttgcaaatggaatatggcccttgtttaaaagtgttttgctactggaagtacaactagttccactgaggtttgtgttggccacctcaggcttgtgggctcagttcaaagttttagtttagttctgcaaggtttatgacttggctacctgagggactggccctcatgctgttccttcctcccagctgggaagatctgctagagcacttggctaaaactttccagatattactttggaatagtcatgatgatggctcaagtgttcttggaggatgttcacatttggaacttccttatgtggtctgacgtggctccagctgttttcttttcctgttagcggaggtgtttaattactctgccttgtttgttgcactaaactgatttaatcaaagatctccctaagtttggagactgtatgttagtttcctgttgctggtgcaacaaatcccacaattaaaacaacacaaatttattttcttactgttcagaacgccaaatgaatcataaaaggctaaaatcaaggaaggtgtcagcaaggctggatctttctggaagctacctggcagaatctattccttaccttggccacttctggaggccaccagcagtccttggctgctcgctgcatgactccaatctctgctttcatgctcacactgctttctcctctgctgtaatcaaattccctctgcctctctcttaggtccctgtgattatacttagggtcctccgaggcaatccagtataatctttccatctcaggatcgttaatcatatctgcaaaatcacttttgccatataaggtaacatttacaagctt

SEQ ID NO: 202862 - DNA, 1000 bp, Homo Sapiens
tttttattttcagtggaattgtggcttatgaatgactttttaagttggaaacttcatccaggaacagttgccaagtttcacatattggttcaaaagctgttcaatttgtcagtaaccttttttagtaaagagaagcataaaaagaaatacaggttaagtatccctaaatcgaaatccaaaatgctccaaaatctgtaactttttgagtgcagacatgatgctcgagcattttcaatttctggactagggttgttcaaccagtaagtatatataacacagatattccaaaattcggaaacgtttgaacttcaaaacacttctggccgcaggcatttcagataaggaatactcaacctgtattttcttcccactgaaacgatgaagatcttttcttcctttctttatttggacttccccccactagctttttggcaagaaaaagatttgcgtagtagttaggggtagatggtaaaacttgaaacctgaattttaagttatctttttaaacaacacttacaaacacttaaaatgatataatctatatccaatgtgggttttttttttcttttttttgagacgaggtctcacttgtcacccaggctggagtgcagtggtgcaatctcagctcactctggcctctgcctcccaggttcaagtgattctcctgcctcagcctcctgagtagctgggatcacaggtgtgtgtcaccacgcccagctaatttttgtatttttagtagaaacagggtttcactgtgtcagccaggctggtctcgaactcctgacatcaggtgatcgacgcacctcagcctcccaaagtgctgggattatgggcgttgagccaccgtgcctggcccagtgtgttttggtaattgaaattctaactctttttactcagaattgaagttcattgctcccacctgaaatctgagatccccttttgcttttgcatccagaatgtagagtacaacaaaataaagagtaatccagaatgtagagta

SEQ ID NO: 202863 - DNA, 1000 bp, Homo Sapiens
gagccccgtgagactttcaaatgctcctgggagatgaggcttcctgcagagaaaaggaaaccgagagaataggacatgattggatcggttccgtttactatgatgtagcatgaaaaaatgctgccttatgtctctttttaaattctcctatagctgcataagctcatgttcagtaagtcattcaacctaggtctgctcgtctcagcaattcccgctgtgttaagtgggacctaattgcagaggatagctgcctcctaacgcggagtccttatttcattagcattacagattgggttcttgggaaggacattctttggtaatttgtttacagatgaagtcttgcagattctcacttccttaatctaacaatctgctaattcttaaaattggaaaaaagaaagaaaaaccagcctgtcagtctacttgtcaggaaagacttagatgtcaggagctctaatgaggtgcgatattaattcctgcctgcttttttcccccagacaaccgtgaacagtttccccccaaaaactagtatattatgcaatttctcatgattaattaaaacaataactataataaaagaagcccattttgtgattctgacctaattgctttttaattgcactgcttttcatgtttattttcaaaattcacttctctgaagtagtcacgagggaaaacgagtgtctgttgagcactttctctgaaggtgcggccattgctgtgaaattgctggtcattgtttggcagctgctagaccatccactttagttcttaactccttaaatgtttttagcgatggctgagttccaaatatatatatttttaatctatctccttcgtccactgatttcccatctgagatattatctctaattttgggggcagataattcatggctctggcaaacaatattaagagctacagtgggcttatattagggccaggcacagtggctcacgcctgtaatcccaacactttgggaggccaaggcaggcagatc

SEQ ID NO: 202864 - DNA, 1000 bp, Homo Sapiens
caccgaagacctggttcctatcgaggacatccctgacgtccatcctgacctgcagaagcagctgcgggcacacggcatctcgtcctactttccagtccaggcagctgtgattcctgccctcctggagagcgcagcctgtgggtttctggtgggcagaggtggctaccggcctagcgacctctgtgtttctgccccaacaggcagtgggaagacactggccttcgtcatccctgtggtgcaggccctgctttcgagagtggtctgccacatccgtgccctggttgtgctgcccaccaaggagctggcccggcaggtatgtggaccctagacctggagcgtggcaccgcccgcctcagcttccctgctgagtgcacagcgatcagcccctgggggacccagattagatctggggtcctttttgctgcagtaggtggacaccagctacctccaggccagtgacagacttctcctgcaggtgagcaaagttttcaacatctacacagatgccacacctctgagagtctccctggttacgggacagaagtctctggccaaggagcaggagagcctcgtccagaaaacgtaggttgtgtcagggtgcgggtttttcagggggtccctgctcagccctgcaggtggcctgaggcaccgtgggagcagaggaggggccaccatctttaaccacctgttcccgtgaagaggaggagctcccaccggcccccttcccatgtggggtggagtcggggctgtggggtgaggcagcgtcttgctatccggaagcccttgagaaagcttccttctctcgagctgctctctggtctgtagagctgatgggtaccgctgcttggctgacatcgtggtagccacccccggccgcctggtggaccacatcgaccagaccccaggattcagcctccagcagctccgcttcctgattatcgacgaggctgaccggatgattgacagcatgcatcagtcctggctgccgcgggtggtggcg

SEQ ID NO: 202865 - DNA, 1000 bp, Homo Sapiens
ctcccagaggacatcccacatatgaaccatattccataaaatcctggagttcaacaatgaaaaaaatataaggaaaagatcacattcgtataagccagtattgtcaaaaacttcaatagaaaagttggtcataacaggttgcacagagatgtgtcagaggaaatggatttactcctccacctgccttagcactcttctttatttcctacctctcagataaggctatttggaactctcaagccctccctgtatatatctgtctcttacaaatgcattaattttgcgtgattttgaattttacaggcatggatcctattgcaggtattcttcagtaatttggcatttttgctcaatactatgtaagattcacctccactagggcacataactgtattttactatgattgccatttagtattctcttataaactataaacatgtcaaataaattacttatctgtcctattttcctgttaatggataattgaattgtttccacttaatggtttttgtgctcacaccatgctgcctacgaacattcttttagatttgagataccatgttttacatatgagattagcaaaaatgaaaacaccatgaataggcaaaaagatgagtcaatagatactctcacacctaatagtaggaatataagtatattgggatgctgttatggaaagtaatttggcagtactatcaaaatattgaatgcatataccttcctgtaacttcacatctctatctagacaaagaagcatgtgcgaagattttcaaaacagtgttgtttgccttagtgaaaaactaggaaaaaaaacctcagtttccattaataataaggtaatagtgttatcaattattgcaaaatttcaacatcccacctgcaaggtttttaaaataaggtaaaatctttataaatgacctcaggtcatattaaatgacagcagaacagaacactcaagcagaaatggctagctacacagaaggctcaggcaggaggatc

SEQ ID NO: 202866 - DNA, 1000 bp, Homo Sapiens
caataagttttggggtcatgctgggtgctgtacactttttttcttttatgtgcgatgctttgccacgttgccttacttttttttttaagagtccttggagttctgattgcttagtgatgcttcattccatttggcatcttgtcacacgcacagccacagctctacatttaataccgatttaacaatcttgactcacaccatttgatctgcattgctgggccattgcctgaaaccaagaggagggcagatggtgtggctgagcttgcataggaaactgccagattgcattgtcctttgaagcagcaggaggtgccgccttcctaatacagtgtgtggtttccctgggctcaccagatgaagccctgaccctcggcgtgatagtcactgtccttcacagccaggtcctgcctctcttttccctatcactcatcttcttccagccttgacccttcttctaacaaacttgccttactccccctttgcaagccacatgtgtttcattcctcactccagatcttcctgccatcccctcagccagaaggacccctcctcattgctgctgaaatcctatctgggtaggcttaatcccagggtcatctcagcatggacctgtatggatttcctgcaacgatctggaggaactgtccttcttctggatgcctttttgtgtatttcatttggccatgcaccccatcagctgggtattcgtccttctctctccgttagatcaatacctccctcctccccaccggaacatagggccatgtcttctcaatgtagtgtcctctagagtgctgggcctagggccttatacttgaaagactctcaaacttcagtgaagcttttttttttgagacggagtctagctttgtcgccagtctggagtgcagtggcgtgatctcagctcactgcaacctccgcctcccgtgttcaagcaattcttctgcctcagcctccggagtaggtgggattacaggctctcgctgccacgcccggctaa

SEQ ID NO: 202867 - DNA, 1000 bp, Homo Sapiens
caaaaggaaagcacttgggtctgacctgcgtctgggacgatggacgagcctgcatcccagctgaagcccagtaaatggtcctgcaaggcaggtcaccctggagcacccattattctaggtgtgagtcctgacctcctccctcgtccccctcatgaagatgaggcctcccggttcccagaggacctgtttccattctggcactgagcccctcacccccacctcggttctgtggctctcacccccaccttggttttgtggctctcacgtggttctttatctttaaaccctcagcttcgacctttgtagcaggcagaattctaagaatggtgcccaataacctccctagaataatcccctcctctctgggtgttggtggaacttctgagcatgttgagctatcactcctgtgattttgttacattaatggcaaaaaggagattatcggctgggcaaggtggctcatgcctgcaatctcagcactttgggagaccagagggattccttgaacccaggggtttgagaccagcctgggcaacatgatgaaacttcatctctacaaaaaaacacaaaaatttagccaggcatggcagtgcacacttgttgtcccaactactcaggaggcagaggtgggaggatcacttgagcccaggaggttgaggctgcagtgagccacaattgtgccactgcactccagcctgggcaaacagagtgcaaccctgtcttaaaaaaaaaaaaaaaaaaaaaagaaaagaaattatccaggtgactctgatccaattacatgaaccctttgaaagcagagagttttgtctgctcacagcagaaaaggaagtcagagatttgaagcatgcaggggatttgatgtctgtctctggctttgtggatagggatgccatgagccagggaacgcaggtggctattaagtgctaaaagctgtctccagctgccagcccacaagaaaatggggcccttagtcctacaatggcaaataactgaattc

SEQ ID NO: 202868 - DNA, 1000 bp, Homo Sapiens
acttatcagattagtggcctgctctgtgccacatgtgtccttcacgagagcattcacttcaggccacttccttgaaggggctgtgactgtgctcctctctctcagaagatgcgaaccaggaaaatatttgctcctctctctctatagagttggcttattttaaagttgacttgattgagttgcagagactgctatagagcatttaaaaatgatttgcaacaattactgaaagtcagttaatctgtacaaatttccacagaggatcatagactacattttgttgataaagtaacaagccagtaatcttaactggagccagcttaaggtctcagtttgtgaattattacactggtctcttgatcttaggatatatttgcatataagtaatttaagaattaacatgggatagatctgtagtgataccaaatgatatataaatatatggactattacagtatttaggaaaatttgatcaaattatcaaatcaactataaagatatgcatattgacgtataacagattggctaattttgaggacatagttacctctggatactaggagctaattattcatcttgtatagatagtatctgggtttaattttagtttttgttctttttccttcctgctgccagatttctgcttatattattgctgaaaagtggggattagacaagaaagaagaaaatgtatagctcaaatctattcattttatcttgtcaaaatctttcaaaacaacggattataggtagatttcaatcatatgacttatttgcatatgtgagcaggtaccatgcagggataaacatagcgaaggcaacaccaccaatgctagccagacctcttatggaagtgaggtgctaatatagaatatctctggtatgtattcagaaaattgtatctcaacagtaataatgatcatatcactaacaattcctattggatgcttactatcaggcactgggttagttgttttgtatatattatctcattgaattc

SEQ ID NO: 202869 - DNA, 1000 bp, Homo Sapiens
catctgtttctaccaacacaatacttgtggcaccaaatgtgtaggatttttcctcatatcagcaaccagttctccaactctctggacaccaactgggtaacctacaatttaatgaaattctgacactaactatctggagttagtatcagatcctgcaagctaaggactccgttccacatgactgccttcacttcagatgccagctgcaagtcctggaccactgaaacttttgaccaactagcaataaatgcaggggtttcctgcaatctctttcttacgcttgataatttgcagcataaggaactcaggaagacactttatttactattactggtttataaagcatacaaatgaagagccctttgaagaggttcataaagagaagtccaaaagtgagcctctgtcctgctaacttagggtacaccaccctttcaacatatggaagcatcacctgtctggaagttctccaaacctcattactaaatctcagctcctcttctcttccaagaagttgtggggagtggtattaaaaggttgttgattggagtggggggattgaaagtagacttcgggctgggcacagtatctcacgcctgtaatcccagcactttgggaggccaagacaggcaggtcacttgaggccaggagttcgagaccagcctggccaacatgatgaaaaccctgtctctactaaaaatacaaaaattagttgagcatggcagcacatgcttgtaatcccagttgaggcatgagaattgcttgaacccaggaggtggaggttgcagtgagcagagatcttgccactaccctccagcctgggtgacagagcaacacccagtctgaaaaaaaataaaataaaataaaataaaataaataaataaataaagtaggcctcaaataaagcttcatctttctggaaaccaaaagctatccttctcaccaagacccatctcactagaataagagggattgctattacccagaaaattccaaggaattc

SEQ ID NO: 202870 - DNA, 1000 bp, Homo Sapiens
ggagtgcagtggtgctatcttggctcactgcaacctcctcctccagggttgcaagcaattttcctgcctcagcccccccgagtagctgggattacaggtacccgccaccacgcctggctaatttttgtatttttagtggagatggggttttgccatgttggccaggctgctctcaaacccctgacctcaagtgatcctcctaccttggcctcccaaggtgctgggattacaggcgtgagccaccgcacccagccggccgtggctctttcttacctacttccggctctggctatgcctccctcccgtcttttgccttctccctgcctgtgtccctctgtgctactgtcctcttcagtaagacctcaggcttcatggttagccctcctccagccgccttcttcaatctccatctactcttggcctccttacccatccccttcctctcctcatcaacatttatgtttgttttctcgtgaggggttaggaaagcaagcatctttaactcattcatcaccgatagcctccccaggagtgtatgtatatatgcaacacacacatgtatacatatatgtgtgacatttcaggcaatatcagagaaggatctggggggcttcgcactactggctgtgcccagagcaaaaggagagaactcatggttccaacacatttctctctgatgaaagagttggctatcactcttcatgtcccttgtcccactagctttcgtgctgggccgtgagacagagactggcatttttcattagtgaaggccaggcaccctctctccagaaagattagttctgcccacccaccccctgactctcttcgagccaaatatgattcagtcttcttggctcctaacagctgggcttaggctcagatgtctggagggagagaatgatcctgtgacacacagatcagatcatgattatatctttttgaagaactctttaaagaggcttctattccctttagctgatccaagaaatgcctggaattc

SEQ ID NO: 202871 - DNA, 1000 bp, Homo Sapiens
cacgtctttatcttggctttgaatgagaacttggaagtattttttaaaacttttatttgtcagtaggaaaataaaagaagccaaaccataggaaatttacgtaattaaattataaaatagtgaaatgctgttctcagagtatgaattatcacagatttcctgattttcttggttaatcttggcatcttgaatgggaaaaacatatatacttttatacatatataacatctctgtatcttcctataagcattttcctttgtatagcaggataaaatgagcaccaaaatgtggtgcaaatataaaaacgcagtggatgagcttcaaaatgcaaacaaagggatgggaaaatgaaaaaaagaaaattcagcagtgagaaagtcactgaaaaaggaattaaattctttccaagtctatggaactatgttatgacccaagcagtttgtagagtctgagtttgtaacctctgaggataaatccatgaaaatatttctaagcctggctactatctaggacatttgaagatggatgttatgaataccagtagtgccattaatatagtaggcaatcagaggtatgtttgtttttcttaatcaggaagtggtttcttttaaaagtataaggaacacacactgtgtgtgtgtgtgtgtgtgtgtgtgtgtgtgtgtgtgtattttctattccgttgcaggaagaattatggtttttccacattttacagtggggttttctagagtttggcactatgatatcctacacttgattacaggatccaatcagagttgatgtactcagaaattcattgacatgattaatggtctcctaatcatacttttatttcctagattagccctatttcctgtagtttcacaatttttgagtcatatgttaaattatcctttattgggggcctgaaattcttatgagtatttttagtctataatttgcatgattatttcttttctttgttttttttttaattgaagaaaatgaaattttgatc

SEQ ID NO: 202872 - DNA, 1000 bp, Homo Sapiens
aggctggagcgcagtggtgcgatctctgctcaccgcaacctctgcctcctgggttcaagcgattctcctgcctcagcctcctgagtagctgagattacaggtgcgtgccaccacgcctggctcatttttgtatttttagtagagacggggttttacaattttggacaggatggtctcgaactcctgacctcaggtaatctgcctgccttggcctcccaaagtgctgggattacaggcgtaagccaccgtgcccggcccaattttatttttagttaaacagtttcataatttgtaactaagaactctgactggtgtacactttttgttctacttcttttgctttatctcagtcaatactttcccacattaaagaaccagctgtggctgggcgcggtggctcacacctgtaatgccagcgctttgggaggccgaggcagatggatcatctgagatcaggagttccagaccagcctggctgacatggtgaaaccccgtctctagtaaaaatacaaaaaaattagctgggcatggtggtgggcgcctgtaatcccagctactcaggaggctgaggcaggagaatcgcttgaactcaggaggcggaggttgcagtgagccgagatcgtgccattgcattacagcctgggctacaagagcaaaactctgtccacccccctccaaaaaaaaaaaaaaaaaaaaaaaagaaccacctttaccctttacctctctttcctcctttccacactaagctgcagattttgtttctgcagaagtgtggacagatgttcctggcatcttgtgtttttataatgaaaataatgttaaatggccaagtcagttttttggtgttcaatattagtccaggtatgagttaaataatgacaagtctgggcaacataatgggaccctgtctctacaaaaattaaaaaaattactcaggtgtggccgggcggtgtctcacgcctgtaatcccagcactttcggaggctgaggcaggcggatc

SEQ ID NO: 202873 - DNA, 1000 bp, Homo Sapiens
actgtgtcctcatttggtggaaagggtaaggggactctctgggacctttttaaatctttttataagggtactaatctcattcatgaagcctccacctttatgatccgatcaccttcctaaggccccaccccctagtgccatcaccttagcagttagactttcagcttaggaattttagggggacacaaatattcagaccatgaatatatgcattttctttctccatcattatgagtaaggatttcacgtacatattcaatgcagctttcatcaccccctaagcagaaaagctgcactgccacttcaaacctacaactaaatataatgtaatgagatccatgattgaaaacatacagaatcaaatctaggcctgctaaaggttatgagactagaaattcagagagccctattaataaagtaactttcgtggaaaccatcttccataggtacctgcttatttgtgaatattgtcatgaggttatatagtacttttccttctactttattgatgtgtgtggaggtagaaccatttctggagcaaagtttcacatacgtgacagtgaacttgtgggtttggtggtgggtcgtgctgatatgacatccttgtcatcacataaagacatgtatatttgtgtgcacacatcgaatatactgcaatggcatgtttctaagatgcacattctttcatatattttatttctaaagtcaggacatgtcttagaattgataatgtgttatagtgcatctggcagcattttcttctaatactacataaaataatagtgcaaagaacaactgatggtatcttggacgcaatgaaatgcattatgtagaaacatatcagaaggtgcattaataatgttaaagcaactccccaagaatattgaaattacaaagataacttatttgctaaagacacagattttggtgataaaacagatacagtctggtgagtaatttttcaaatgcttttcgcccatcttatgtgactcattagatc

SEQ ID NO: 202874 - DNA, 1000 bp, Homo Sapiens
aatgtctttatttctccttcatgtttgaatgatatttttgctgagtacactgttttaggataaaagtttttctccttcagtactttaaatatgtcatgcgactctctcctggcctgtgaggtttcttctgagaagtcttctgccagacctattggaactcctttgaatgttgtttctttctttatcctagaccttcggaagtttgattattaaatgtgttcaggtagtcttctttgggttgaatctgcttggtgttctatagccttcttgtacttgaatattgatatctttctgtaggtttggaaagttcagttattatcactttgaataaattttctacccccaccccttaaaacttgtaactcttagattttcccttttgaggctgttttctagatcttgtaggtgtgcttcattcttttttgaattattttcttgtttgtttcctttgattgtatactttcaaatagccagttttcaagctcacttaattcttctgcttgatcagttctgctgttaagagactctgatgcattcttcagtatgtcagttgcacttttcaactacagaatttctgcttgattctttttatttcagtctcttcattaaatttatctggtagaattctgaattccttctgttttatcttggatttcgttgagcttcctcaaagcagccattttgaattctctgtctgaaaggtcacctatctctgtctctccaggattggtctctggtgtcttatttagtttgttttgtgagtattgggggaacccacccccaatatttcaatgtaggttctttctattttccataagtgtcggccagctgagaaataaacagagacagtacaaagagaggaattttacagttgggccaccagaggtgacagcacatatcagtaggaccgtgatgcccacctgagtctcagaccagcaagtttttattaagggtttcaaaaggggagggggtgtaagaacatggagtaggtataaagatc

SEQ ID NO: 202875 - DNA, 1000 bp, Homo Sapiens
tggcacatgcctgtagtcccagctacttgggagctaaggtggaaagactgcttgagcctgggagttgaagtccagcctggacaacatagccagacctggtctctaaaaaattatttaatataataataataaaggcaaaaaaaaaattaatgtggttgttcctcagactcctcaggggattggttctaggatccccctcagataccaaaatcctctgatgctcagtgctcaagtgccttgtataaaatggcatagtatttgcatatgacctatgaacatcctgccgttttctttgaatcacctctaggtattacttataatacctaatacaatgtaagttctatgtgaacagttactatattgtatttttaaatttgtattattttttactgtattttttattgagttttttcccaaatatttttaatacagatataggaaggccaatttactccaaaaatattattaagggtggaggatgaaaaaaaatcagcaaaatgataattaccaaagagggatgatggatacatgaggtttcatttttctattctcactgctttgggtatgtctgcaaatttccataataaaaaaaaaatttgagagtactgccccagagaagctaacagtatggtaaaaattgaaaacatctggttctaagggtttcagataagggactatgaagctgtagttactgctaaggattagaaaaggtttcaagcttctgtgtgtttcaagaactttatatttccatgaagcctacagcattagcccacagcctcaccaattatcaactgataactgaatcagttgtcaactgtaattgataaattaacaattatatcagctaattcaaagattactttttttttttttaaagaccaggtctcactatgtcacccaggctgggatttttttttaaaaccaagacagctttgaaaagaaacctgagtctaacctttgccacatcacaaatgtttactactggtcacaaatattgatc

SEQ ID NO: 202876 - DNA, 939 bp, Homo Sapiens
gggttcccactggtgatgcctgtctgacacgttttggtatttagtaggaaatgaagtgtttcgaagcttcgagagaagcttcaaaattgtcacaattgctgaaaacagaatgaatcgtgaacattatctcaatattttgtataatagacaagaccacagtgttttggttccctgacctgtttttgtgtttatgttaggatctgaatcatgttctgggtaaggggacgaggagcgaacactgcactaagatttggtttgccaaatcagattctttggtcaagagtcagtttggagccaccgtgcccagcctgattgacaatggcctcttgaaggctgggttttcccagccggacagtgcccgccccacatgctccactcccacgctttcatctgcaggcctgccttcctctcagccacctcactgctgagctctgtggtagagaatttcctttacccatcagggtatggtctggctggtaatactgactccaacccagctccttcattttatagaaggaggcatttctgaatcatgtttgttcaccatggcgagactcactgcagaatttttaaccaccttattttaagtcattcattctaggaacagtcaagcccctactacaaaggggccagatccgttcaagtgaggaagcacttgcagtttctgaattttgctgtatatttgtcctatgtcacccaacaggccctttgctatagctgggacattaccagaccccaataccttagggtctcacagcctgaaggacacagagcattgaattattaaaagacctgaaaatattataatgtttttcaattgtcacctgttttcaaaactcaaatgctatagacttttctgcaggaatgacgtgtatattcctcactggcatttaccaaaaataaatgatggtttccagggaaaaaaaaaaaaaaaaaaac

SEQ ID NO: 202877 - DNA, 1000 bp, Homo Sapiens
tctaacctcatgacaaattttttaagagttgtaaatattgcactgattattgcttattactccatttatttcaaaggatgatagttcttgaagtttccatgcaaaattggaaattgaattatatagactgtgaatttattagacaattagcagaatattgttacttttttggttcttagatcattgcgtattcacttttcttttgcgtattcacttttcttccctcagggactgtcttacatcgctgccctgtccttccctcttcaattcttccccatatccactcactaatgtaaatgcttggatagaaaattatggttttgagatacttctttctgctgcttttttctcattatctacattgccacttcatctctgacacacatgtctctgggttgcttgtctccagtcagaatgcttttcccaccataggccaactctgctgcagttttcaactcagaactgacttctcagttgatagaatcctgagacatctcggtctgacaagaactgtctccctagaacatgacacactgggctctccttatactgtccatcactttacattattttagagggttgcagttagcatcccaaatgtttcaaatattcctcagttgcagtctgatcaacttcagatttattattactctcaagagagctatgctgcatctgtgcagggtgtttgtttctgaaaggtcatttcctggtgtgaattccaaccaaaggagatcaagccagagtacagccttctttctgttatgtacttactcattttacttggaagagaaatgaagacttatttcaaatgtgcgtacaacacacaaaattagatgatgtgacatattaatgattgacagaaataggtgaaaagaataatatttaagctcatctaagctttgacatgtgtctaggtttcataatggattaaacagagaatttttttctgagtttgaattgttcattcttctcttcatgtttataatactttccacaaagc

SEQ ID NO: 202878 - DNA, 1000 bp, Homo Sapiens
attgcagatttatgagtccttgtggcccaaaccaaagtttaaaaataagatgagagaattatagacccagaacaacctgtagcttccttgtgagaggttggttatgtatataataaaaatccaaattctcatctaatagttgaatccttattaatagaactttttttaagggtttagaagcttctactttgataccgatattaatatatatcggtatccaatagttctcagccatgttgatgaactgagaagttccatgagtcacagccgttttataaagtactgtacttgacggatggctggttcatcgtggcctctgatagacaaggaaggacagaatgagagaggaaccagtggatctgcttgattttattctttataaaatcaaggatacttccagaaaatactgacttctcattaagagatttcttatgacaagccttaggataaagatagggaatgccagtttatctcattagaatctagcgattcaaaacagccactctctgggacatcattatatttattgtctccttttctgtacctttgaaactttctctggtgagaaggtaaaaacaagccagtctttcttattttctttcactcatttctgtataaatgtgagctcctctgaagcagacatctttgaaatccccacacactgccagataatgatagttatcaatgaaatagttgctggttctttgatgtacaatcagccaaccagtatttacaagtcttaattctcctgttcttaagcataattaagggaggtgaaatgggcagagcaaatgaaagcaccatgaataaatataagccaagaaataggtggctaattctgctatcctgttgcttaccttacattctgattgtatcgttggcagactctgcgtgtgtctcacctacttcccttttttttctgcccagctttcccagccagctgtaagcattgaaggacaggtatcaaatcctccatctactagtagcacagaagtgaatt

SEQ ID NO: 202879 - DNA, 1000 bp, Homo Sapiens
gagagatggggtgcggtggcgtgcgatggcgaaggacggcgagggacggcgaaggactgaggccacacgacaaggaagctacgctcgtttcgcgccggcggaaatacagacgagagcgcgagctgcggcctagagcggtaggaaccgacgcgagcagtcctgcagcgtcccctggcggagcggaggctcaacgccagactctggaggacttgggataattttcgaaaactatctggaagtttagaagtaaacttctcccacttgctttgcttttctgtttgttctgaagatgttccttggtcactgattcattattaatctgtaggaatggccaattttccatgataggagctgttactacgatgaggggactgtgcttagtttggacttctttctgcaagggtccaaaggcatctgtctttgattcaccactgtactcagtacctagttcagtgactagcacagttgaatgaatgaattctacccccgccccattcctttttttctgaacaatgtcagaccgagatgactgagtcatggcctgagactggaatgtgagcgtgagaagatgagccaagagagatgcacagcgggtaactgctttgctaaactccagcctcaaagtacacgggatggagggtggaaagagtctctgaagcagaagagacctgaccagactggcatctgaggaacctgatcagatttgcacagtgacagagactatagacagatgtcccatgttccctgcaacatactggagacaatcttgggaggggactcatggcccacaaatcctcataagcattggcactgcctgcaccctgggcagggtgtgcctcttcggcctgagacagccctgctactgactctgcccatgttctggagtgcaagcagcccacccttgggcctgatgaggagcccacgccccaccctccgccccgctccagtcagattcttggtactcaataggtcagaaggacaagaaaatccagtcctgatc

SEQ ID NO: 202880 - DNA, 1000 bp, Homo Sapiens
ttagttcaccacctcctatccccagtggattttatttctaatgtgtggcttaaagcaaagctatccaataaatatagagtgggctctaaaattacaaagaaaaactgtcatggtagttgttctttatcatttctgaaaagcaaatctgtgttgttctgccaagttttttttagcagttgtactttgtgggtggctctattccaatatctagatgtataaacatcctgtacacgcactgttaagccttcagagcactctcctgtagatggtatagacttcctggaagaaacaccataagcatgatgtgagaaggtaaaagcaaaagcagcagcaagcggcaataagattatgataaaaatcactgaagaatggcaggtggagtcaaaaggaatgcggtgtttggttcttctgacaccctcattcgctcaaatacaatacgttatggtacagtaacactaaatacttcacaaatgtcaggtacacattagtaaaaacagtgaatgtcttcatttttgaaagcgttgaatgttcactttatgaaagaggaaaaatcttgtaaaaaaatatgtcagtattccaaatggcaatctctcttgttcaaatttacccaaaatcataaaatgttctttctcagtctctccctctcctttgaccttgaaatcccattactatggcaggtctttaacatggctcctcaattttcttttttttccttttttattttttgagacagagtctctctctgtcgcccaggctggagtgcagtggcatgatcttggctcactgcaacctctgcctcccaggctggagtgcagtggcatgatcttggctcactgcaacctctgcctcccaggatcaagtgattctcctgcctcagcctcctgagtagctgagattataggcgcccacccccacactcggctaatttttgtatttttagtagagatggggtttcaccctgttggccaggctggtctcgaactcctggcctcaagtgatc

SEQ ID NO: 202881 - DNA, 1000 bp, Homo Sapiens
atagaaaaatatagaaaagatttggaaagatgtaataagattttttttttagacagggtctctctgtcatccaggctggagtgcagtagtgccattactgctcactgcagccttgacctcccaggcttaagtgatgctccttactcagtctctagagtagctgggactatagacgcatgccaccacacctggctaatttttttgttttgttttgttttgttttttgagacagagtcttgtacgtcgcccaggctggactgcagtggcgcaatcttggctcactgcaacctccgcctcccaggcccaagcaattctcatgcctcagcctcccaagtatctgggattataggcgtgcaccaccacgcctggttaattgtcatatttttagtagagacaggggtttcaccatgttgcccaggctggtctcgaactcccgacctccagtgatctgcctgcctcagcctcccgaagtgctgggattacaggcgtgagtcaccgagccagcctaatttttgtatttttaacagaaacgggggttcgccatattacacaggctggtctcaaattcctgagctcaagcgatccacctgcctcggcctcccaaagtgctaggattacaggcatgagccaccgcacccagtcagtaagatcttaacatgattatcttcgggtgtagtgttgtgtttttttccccttcgtttggcaaggctgcattttcaaaggatcagcaatgaatatatattaggtctaattttaactttttcattgcacaagtaatgcatgaaggcagactcatggtgaaatattcaaacaaaacacagaaggtcagcttcacctttaaccacccgctgcccaccccagtacctgtccctcctcatgtgtgaccactgtcccaagtttaatgtcattcctctcagtccttcttctgtgcatctcgctcactgccccctgctcactccaggccaagcaccctggccccccttcctattccgcatagatc

SEQ ID NO: 202882 - DNA, 1000 bp, Homo Sapiens
atgatgaacacactaacatcagtatatatacttaagagagccttgtaactttgacttaagtgctaaactaaatatggtatcttatcacatttctgtactggtgagccaacaccacagaaaagcaaactgaaatgaatgagattctttgattaattttctagtaaaagtttaaatatcacacttcaaagtaatttaaattatagcagatggaaatggcagcatccttaaatagattcctgcacactcttccaggattcagaagtcttctatttaggtatcacagcctatcttaatatgatttacatgttggtgtctgcaacttctatcaagctgccgggttagagggcaggggctgccctatctccctactctcactgtcaaacttctgatcagatgcatttataatgactaaagatagagcctttttttttttcacttgagcttctttgctgcctagacttaccttccttgtgttcattagtcaaaccagaaaggcctttctggactgttaggctgctaagagaggttgctcagtcctctcagcctctatcctatggaattactctgaaactgaggaccataaaccctactgaatccttcccaatttcctttggctcctagggactatttttatttcagttcccacctccttccctgttcttagccatgtcttgggagatttgtgggattctgtggtggacagaataatgatcccccaaagattttcacgctctaatctccagaatctgtgaatgttttattacatggcaaaagagactttgactctgtcaaaaaaaaaaaaagaaaaaagaaaacaaatactgattctgttaccaggaatgaggtactgctataacaaatacctaaccatgtggaaatagcttataatcaggtggtgggtggtgatactaaaaacgtttaggagcatggtagaaaaagcctagattaccttgaataggttattagtagaaatgtggacttgaaggatgctctggtgatc

SEQ ID NO: 202883 - DNA, 1000 bp, Homo Sapiens
atgactacaaaaaaatgattcagagatcatcagggcttcatcctatgttgcaaagggtggaggaagaattgcctgattttcaacaagttagattacctccaatcaaaggcatgggggtaggactgggaggagctgtggaggtttggtgcctgcccagcagaaccctgggattgagatcccaatttggcagaggtgcagagcaatatctcaactctactgggtctggaaaatgggacctctgcccccagtgggcctggagtgcacagcatcaagcaccagaggattattctccagccctgagatatggagtttgacttgctaggttctggacttacttaaaagctatcactcttttcttctttcctattcctttgcttctgaaatggggatatctattctacatctgtcccactactgtagtttggaagcacataacttattaggttggtgcaaaagtaattgtggttttttgccattaaaagtagcaaaaatcgcaattacttttgcaccaacctaatatttggttttacatgttcatagctggagaggagttctgtctctgaatgaatgataccttaagaatcactcatatctgatttagatgatagttagataagactttggacttcagacttgagaaccaatgctagaacaagttaagacttttgaggctactgggatggaaataatgtattctgcatgtgaagacatgaattgtggagggccaggagcagaatgttaaatactgaatgtgtgtgtcctcctcaaacacatatgttgaaatctaatctcagggtgatattaagaggtggggcctatggacggggtcattagacaatgacggtggaggcctcatgaatgagattagtgcccttaaaaaagggacccccagattactctcctgctctctttccatcctgtggggataaaacgagatatcagtagtctgcagcctaaaagagggccctcaccagaacccaaccatactggcaccttgatc

SEQ ID NO: 202884 - DNA, 1000 bp, Homo Sapiens
gattaggagggaaatgtaaaaatctagaagagctatcttgatttctgcttctggcagtatagtaaactctccattctccgtcctggtctgagtgggaaaaaaaaatagtctctcctgaaaattgaaaatcagatgtggtgttcttacactaccctaaccatgagggtatcctgaccagacccaagagattgaaataacacaattgcagttaaattaaagtaaagaatttctagattggtagcattctctggcacccagctttggaaaacaccaatcttctacagagaaaaacattctcaatccaatctcctaagaatttccacagatcaaactaagctaagtgggaactcaaaataaaaatttatcggtcagtggagaaaataaacataggatttagattccttccccacaagacttcaaatattgtaattattaaatacagtatataaaattggtatgaaaagtttgaagttataaaccatgaagttaaaaaatcagcaagactgaaagtactaccaaaattgaacaatcaagaaatgttttgttgatttatttattttttatagagacagggtctcgctatgttacccaggtggtcttgaactcctagactcaagcaatcctcctgcctcagcctctcaaggtgctgggactatgggcatgagccaccattcccagcccaatcaagattttttttaagtaacagtcatggtttaaaaatagaactcttgggcaaaacaaaataatcactaaagtaaaaatctcattgtctaggtcaacggcagctaaagatggaaatcatgagcaagaagacagagctgaagaagatgctcagactgcagcacaggagagcagtgaggtggaaaatataagaaggagataacaaggaagactgaagaagatctaacttgtgtctaatcagagctcctaatggagataatagagcacacagagaaaatgtttgctctgataatggtaagcatttttcagaattaaggaa

SEQ ID NO: 202885 - DNA, 1000 bp, Homo Sapiens
ttttttttttttcagatggagtctcgctccatcgcccaggctggagtgcactggtgcgaactcagctcacctcaacctccacctcccaggttcaagcgattctcctgcctcagcttcccaagtaactgggattacaagcatgtgacatcatgcagagttaatttttgtatttttagtacagaaggggtttcaccatgttggccaggctggtcttgaactcctgacctcaagtgatctgcctacctcggcctcccaaagtgctggaattacaggtgtgagccattgcgccctggccttgaaacactttttaatgttttaagaaaaacatgttagcaaaaactcattttccattgtctattttaaaggaaattttgatggaatattacatgttagttgttaaaccacagaattttcacaactcaaataatatacgtatatatgtactcacaagtatatatttagatgttcaaacacacgtatcttttcaccattgatagagaaggaatataattagccaacctatcataatatattcctttctctttcagaaaaaatatttctcaatatagattgtcagctgcgcttggtggctcatgaatgtgatcccagcttcggcttgggaggccagcctgagcaatatagtgagacctcatctctacaaaaaatttttttaaattagccaggcatggtgctgcacacctgtagtcccagatacttgggaggctgagcattatagtaagacctcacctctacaaaaatttttaaaaactagccaggcatggtgttgcacacctatagtcctagattcttgggaggctaaggtgggaggatcacttgagcccagaaggcggcggtcgtagtaagctgagattgtgccactgacctccggtctgggcaacagcgtgagaccttgtctcaacaacaacaaaatgtgaattgtcctcttcattcatacaatttaacacacattgaagtatcaaatttaaaaatgtttatgatc

SEQ ID NO: 202886 - DNA, 1000 bp, Homo Sapiens
aggctggaatacaaactcttctccaagcccaaatcttgacctcttcctctatgttcataattctttacctcagcagatacaagaatcccctttgagaagctgatggaagctgtggcccactcccctgaaaacagagaatgtgccccttatggggaacaggcttcacttgcaagtgtcatcatggtgtggctttgtcctcacttcctactgttcctttgcatggactcagccatgctatttgtcctctgtgacttttcaagtgactcccaggcaatatacacagtctcaatccagttattgaaatgctagtttttggagatggtcaaaactttgaacgtgctttaaagttgcgcttctccctcctggaggcttgcatttggggaggagtgcttgcttctttctctttttccctatgcacaccacatctcctctgcctcttccatctcaccagccatggtttttagggcccctctgtgtcagaacgagcagagaaggaagatgtagaggactggaaaattcctacttggctgcagctgctgtgctcccaagccttggcagaattttaaaactggctgttctggggtcccttcctgcctctgcccagcctccatcgctagcagcccctcccctgcagctcccctggcagctgtgctcatttcctgtggctgctgtaactagttactaacaacagtggtttaaagcaacacccttttattatcttgcaattttggaggttaccagccctacaatcaaggtactggcagggtcgcattccctctggatggcctaagggagaacctatttttttcagctgccagcattgcttggcttctggccccttcctgcatcatcaaagccagcatggagtctcttcagtctctctactctctggcctctggttctccccagcatgtctccttctctgactctccatctccctcttctaaggacgtgattaattacatggggccccttcagataatctcaccatcctaagatc

SEQ ID NO: 202887 - DNA, 1000 bp, Homo Sapiens
cctctatgtaaatattctttacaagtagagaaaaaatctcttgtactagttttacatactcttcttacttattaactagcccattaatcaatcatcagcacttttcaaatcagaagattccaaaacactttgtatcctatcatcagcacttttcaaatcagaagattccaaaacactgtgtatcctatcacaaacagtaacaaatttttcccatgcattaaaggaaaacaacaaaacctgagtctcaggttatataatttttttctctcagaatgctgatgttttctgacaaatcagctttctgtatgtctgtaaagcactagccagactacctgtggtgacactgcagaaaaatggcccacaaagctaccatcaaccatttgcctaactcccaaagaggctatgtccatatcctgactcccacatgtggctacctgaagcaaagagtaagaaaaccttagcaaccagtccttattagcatggaggcctgcaggaataagatcacttacaaaagctgttagaactggagggaaacaggctctctggaatacctagtcaaatgtatgtatcaatcacaatttgaggcaagatttgttttaataaaaagtttgacatttaacataactatatattgagagcatttgattgaaaacacaccatcattggctaaatgctgtagccagtcatactccttctcggtcggctcagccaatctgtatctttcagcccatcggaacagatcacgaagggtgatgaagccctgctttccagcaaacactgaagaacttctgcgataggactgttgaagtatcaaaacaaatgaaaaggggcatcagctgcaatgcatggtaagtttttagtacaatgcatataaaattcataacaaatttatgctcccatttaaatgatttcattccactgaataagattaattttttggccgggcgtggtggctcaagcctgtaatcccagcactttggaaggccaaggcgggcggatc

SEQ ID NO: 202888 - DNA, 1000 bp, Homo Sapiens
ctcatgtgctaaatctgggaataagaagtgagcaggcatagatcttgctttgagaactggatttcgcttttccctcctggaattcaggaaaaatgatacaacatcccaggactggaaagaagctcagaagtgatttcgcctgacctctttttctttcggatgaggaaactgagagacccagagagggcagaccatttgtccaaggtcacttcccataaccaaggtgtcttggcttccggtccagtatgcacttcactctgccactgctgggcagtagggcttgtttttcaaccacctctggatattatcattattgatatttattcattaagccatccctgtcttccaggctatatcatgtcatctcaggagaacaagaagttttcaaggtaaagatgatgcatatttaaaaggcatttatagacctccaggttatatttgtgaattgaatacacactgtaattttaattccttccaaccctccactaacattacagaaaatatatacagtcatgcattgtttaatgacagggatacattctgagaaatgtgtcattaggcaaattcctcactgcatgaacagcatagagtgtacttacacaaacctagatggtacagcctactacacacctaggttggatgatagaggctattgctcctaggctacaaacctgtatccatgttcctgtactgaatactgtaggtaactgtaacacaatagtatttgtgtgtctaaacatagaaaaggtatggtagaaagatggtataggccaggcatggtggctcatgcctgtaatcccagcactttgggaggctgaggtgagaggatttcttgagctcaggagttcaagactggcctgggcaacatagtgagacctcatccctactaaaattaaaaaaaaaaaaaaatggtaggccaggcgtggtggctcacacctgtaatcccagcactttggcaggctgaggcggaaggatcacctgaggtcgggagttcaagatc

SEQ ID NO: 202889 - DNA, 1000 bp, Homo Sapiens
tcaatatggactctctctctctctatatatatatgtgtgtgtgtgtgtgtgtgtgtgtgtgttgtgtgtgtgtgtgtgtatatatatatatatatttttttttttttaccataaatgcatttctggtctggcgcgatggctcccagcactttgggaggcagaggcaggtggatcacccgaggtcaggagttcgagactagcctggccaacatggtgaaatcccgtctctactaaacatacaaaaaaattagccgggcatggtggtggtgggcacctgtaatcccagctacctgggaggctgagcacgagaatcacttgaatccaggaagcagaggttgcagtgagctgagattgtgccaactgcacttcagcctgggcgacagggtgagaccctgtctcaaaaaaaaaaaaaaaaaaaaaaaaagcattagaagcagtgacagtaatatagcatttagtatccccagtgcccaagttgtggtcttaactatttcccactaataggaaccagggctttttagagaaatggctgattataggtccggggcaggaaatagacaagatacacctaggactaaggaacttaacaaaagctaatggaattgtgtcagaaggactcaggaaccaatttggaagggttcccagggcttaagatagaaaagtttgagcatcaaaaaacaataagctaggcatagtggtgcctgtagtcccagctactcaggaagctgaggcaggaggatcacttgagcccagtagattgaaaacatcaaatacataaaaattcatgcatttgaaataattttcaaagaaagtggaactcatcggtcatgattttgggttgttaggggagttaactaaattctttaaaaattaaagcattttaattctttaaaaattaaaggcaaaaaattaagcatttatcccacctttcctatataaactgttaactccaagaaaccagagggttaatgagagagaagccttctttatagaagaattc

SEQ ID NO: 202890 - DNA, 1000 bp, Homo Sapiens
tattgattgatgtcttatgtctccctaaaacatataaaatcaagctgtaacccaaccaccttgggcacatgttcttaggacctcttaagactgtgccttgggggctggcacagtggctcacgcatgtaatcccagaactttggaaggctgcagtgggtggactgcctgaggtcaggagtttgagaccagcctggctaatatggcgaaaccctgtctctgctaaaaatacaaaaaattagccaggcatggtgttgggcgcctgtaatcctggctactcgggaggctgaggcagaagaattgcttgaacccaggaggcggagtttgcagagagcctagattgtgccactgcactccagcttgggcaacagagcgagactccgtctcaaaaagaaaaaaaaaaattctccctagtttatgttctttatagctcttaggtatgtctaaaatcactttactggtttatatgcttattgtctgtctctttccattctaatgcaaatcccataagacaagaatcttgtctgtctcatttacattttatccctattgcttagcaaagtggctggcacatggcagatcttcaaaaattatttgttgacgtctttttaagggacagggtctcgctctgtcacccaggccagactgcagtggcatgatcgtagctcactgcagcctcaaactcctaggttcaagtgatcctcccacctcagcctccagagtagctcagactgctgaaacatgccaccatgcctggctatttttctttttaattttttgtagagatggagtcttgccatgttacccaggctagcatggctagcattcctgttttgttttgttttgttttcctttttcatgagacagagtctcactgtctcccaggctggagtgcagtagtgtgatctcagctcactgaaacctccacctcccgggttcaagcgattcttgtgcctcagcctcccaagcagctgggattacaggtgcatgccaccacgcctgg

SEQ ID NO: 202891 - DNA, 1000 bp, Homo Sapiens; identical to SEQ ID NO: 114779

SEQ ID NO: 202892 - DNA, 1000 bp, Homo Sapiens
agaggcacagccaatccagggacccggggcaggaaggctgtggcagtgaaagcccttgccaggcctcgcagcccctgacttcacttgttggaaatgatggggggcctcacacactccttctccagtgttcagcagaggctgccatgccccatggagcttcactctcagccatagtctgagacactctgcttgacaaatggtcaggatttaaaagcggaacaaactgtctcaattttaataatctttgccaggaatctgtgccaaactccagagcatggaaaagaactctgcacatgaacacatcatatagtacacatagaagaaatttcttttttttttatgtgacaaaaaacagcataaaatttaccaatattctttggcccaagttccaatgatattctggtccaaaattatgctacagtacctttctggcacatcccaagagtttaagtcccatgtccaccatttacatgctcaagttacttaactgctttaagcccattcccttacttgtaaaatgatgatgataattataccatgttgtgagaattcaacaacattagcacagtgtaatgcctggcccatagtccgcaaatgcataatacagatgagctatgttattgttgtagttattgttattctttctgaaaaagggagaagtaaaaccttgactttattattttcttaactctcttccccatagagaggaataaaagaataagttttttaaatttgctgccttaaactaatgaaaatctacgatcgcaacggttcagagaagctaatctaggaaactgtgaatgaaaaagttgaggccaggcacggtggctcacgcttgtaatcccagcacattgggaggccaaaatgagaggatcacttgagcctaggtgttcaagaccaggctgggcaacatagtgagaccctgtctctattaaaaaaaaaattagcctggcataatagcatgtgcccatatagtcccagctactagccgaggcagatc

SEQ ID NO: 202893 - DNA, 1000 bp, Homo Sapiens
aaaaggagagaagaagacaacatgtctgaatttttgcagagcaaagggtgatattgctccatttggatggcgcttaatagaagctttgactttaggaataggatgcagggctgtctttaggaataggatggagggctgtcaattctcattttgcccagggtggcgctgtctccatctcactccacctcagcaaaatgacggatctgaaagcagctgaaccttacattctcatggtagcaggctttggaaagggtgagatacagagtcagacaggaattgatggaaagggagatataaaagaaaagaggataaagtggaaaagaagcttcagaaagaaaagatatccatatattagagttgtcaactctgcttttacaactttggctttccttaccatcaaatccatatgtaaagcctagtttactggagaaagttttcatttaattagtattcccaagttcaattagaggaaaagggttatgatgtagggttcctagagaatattttctacggataaatgacactttccccaggcagctccaacccttaatgttgtttttgggaaaatgcacccaacttcctttataatagaactaaaagaaaatataaataatgaatgcctttaaatcaatctcagtttcaagaaaataatagcattaagaattgtctatatgggttagttattagcaacccaaaaacgtattttttcccttttgggaaataatttttaaaatacatttggaaaagttgtggtcagttctgcagtttcctaagtttctggtgatgaattttcctatgcttacccagttttgtagtcttatgaatcactttagttttaagtgtaattgctagatagaaaatattttcattcttagccatcttcttacatcgcatatcataggcaaaagttgtactttttaaagtgcccatttcctcctatatagcaattctgagacagaacccagaaggctggtgcatcttccctcatggtggtaagatc

SEQ ID NO: 202894 - DNA, 1000 bp, Homo Sapiens
ccatgactattggtacaagtctgtgtaccactacatgtgtgtgaataaactctcaagaatgtatttctttatgcacagaaataggactatagtcccatagttctgtcatatccagtaggactagagaagtctatggagttaagaccaatgtgtccagactaacctcatcaggcaagaagggctgtgtgaggctcacatttctctacacagtgggtagaactcaccgacaggagtctccaggttataggtcgaacctccctgggaacccctggccagctacacttcctcagttcatctgtaaatagaaaacagccttgttaggttaactctccacaaatgctctaaagcaaaccgcaaccagcactgcctgatgtctccttccatccatgtaagaccaccaccaccacctgctacccataagcacagtgaaaagcccaaaacagccccgagcagctaagtgccaaggacacggccttgcagtagcagtcctgtcagctcagagatgaaagttagaggggaagggaaagaccagtgggtgtagatttcagtaagagtcaccttgagataaggaagaccaaagtcagaatagttgcactagggtctacaggccacagaaaccagtcccacctaatttggtccataatctctagtaacatatgtctgacttaatacctgcatgtcactgcaatgggcaccaggtcaggagaagctagaaaagtaaaagaaggaagaataaagagcagtagcttccaggtctctgagaattccagtcacccaaagctcctaccttgcctgggctcacagggactcacctaagtcagtgttctggctggagagaagttgacggaatttttctaggcgggttttctcccggacagtcattgggggggccccagaagcgttctgatccgagatccgggcaacgagggggatgatgggccggagagggagtgattgctgtttgtggagtgggttcctcaggcatgtatcacctgagatc

SEQ ID NO: 202895 - DNA, 1000 bp, Homo Sapiens
cactctcatactgctccaataaacccttttaaaacaaaggtccagcaactagctgtctgactgtacaacatctgtaacatgagaaatggaatccacacagcatcccacacaggtccctgaggcaatggggtactgcccctcagacaccctctcgtgcacgtgaggtcatttgcaaagttcactttggtaactttctctccttctccctgctccatgggaatgaccacacaggaagcaactggtgcctccctccgggtctggggccacgcgagcatctctgtggaatttcctccctgaaggtgatcctctggcctgtcaaactggcacttcctaatggcacttggccttggaggcactattaaagattcatcatgtgaactctaatttaaaagccgcacgcaatatgctctcaaacaaacattgaaaatttcgagttcactatgttgaaaggaccacaagggtccactcctgccaactcagtttgtcttgatcctgctgcgaagtcaaattctctggctgcagagaaacatgtacatttgccttcagaaccactgtggtgtcacagatcggggcagtggccccctgaggcatccaacacagtcctcaaccacccattttcatacagctctgcagtcaagacacattagttgtcacccgaattgtgcccatcttgtctctgttatataacaagcaaactccaaggcacagtctgcatttcacatgggcctcacagcatttacaaagctctgggagtcaggaaacctggcctcaagcatcagctctgcagatacaagctgcaggagcctggcaactgatttgttatcctggagcctcccgtcatttttctgggaaagcccatggcaatatcaggcactcgtggttgttgcaaggattgcaagagatcaaatgaaatccaaaatacgattatcaaacaacaatatgagatgctatgtagtattaataggactaaaataaattgattgactatagctgttcgacc

SEQ ID NO: 202896 - DNA, 1000 bp, Homo Sapiens
tgaaaattatataattcaaatttcagtgttcataacattttacagcagagtttgagtagttctgagagtcttatggcccaagaaactgaaaatactatctggctctttatggaaaaagtttaccaacccttgaaaataggtcattgtttctctccttataagataactaaagtgatcaacctaggccttaaagttttgccttcaagataagcctttagtatttcacattcaactccttgaaccctggtaaacctagctgtagttaacaatctagaatgaggttaagaccttgggaaacacagtaagttgttaaaaaaataataggttgatttgagaagctgaataatgttactttcaaattgtacctcgttagtgtttgactatctctgattacaaactcccaatttccacctatttgttttttaaagcacaaaattattctggcacgtctttttaaattgactgcagaaataactcatccagaatgatagaatcgccctttgggactttacccctattttcacttatagtggtagcgttgtcaaaggcactacggtaaaagtaaatgaggaaattaaatgatataggaaaggaaccagtttagttgagcttgaatcttcattttcttttaatagaacttcaaaaatctgattacatggagtatgctgggagacagtactatttgggagacaagtgtcaggttagttccttcttcaagaatcagtaatttttttaagaatgtgctttttgtcatgatatgagttgaacaagacttatttacaaagtactagaaactttttatttatatttttaaagagatagggtctagctctgttgcctaggctggagtgtagtggcatgatcctggctcactgcagcctcgaactcctgggctcaagtgatcctcctttcctcagcctctctagtggctgggactacaggcacataccaccatgcctggctaattttttttatttttatttatttatttatttatttt

SEQ ID NO: 202897 - DNA, 1000 bp, Homo Sapiens
tcctgtgtcagagcctgggggacgagtcacccagctcacccccacatgctcaaaacagtcaccaagtcctctgggctccgtccccttaaaaaataccccaatagctaaaataatacattcatagaaaacaacaaaaaacaaatgcaggctgggcacagcggctcacacctataatcccagcactttgggagggcgaggtgggcggatcacctgaggtcaggggttcaagaccagcctggccaacatggtgaaaccccgtctctactaaaaatacaaaaattagccgggcgtggtggtgggcgcctgtaatcccagctattcaggaggctaaggcaggagaatcgcttgaacccgggagacaggggttgccgtgagtcaagattgtgccactgcactccaacctgggtatcaagagtgaaattccatctcaaaaaaaataaataaaataaaataaaacaagtgcacagtttaaatgctataaagcaaacacctgcggccaccacccctgaaccgactctccagtaccctccgcatgccccgggtgcggctccccgcacagagcagcccctccacaggctctgcagccaccgtccatcctctctacatggttttgtcacccaggcgtgcagcccttggtgccaaagagtggcctcccctccatcttctctgaaattcatctctgaagaaagtagattgtcccaggaaattcgtctttgtggggattctgtacctgttaacgttttcctctgaacttctgccaatcggtgcacggatttagaggcttccccagatcctgtttggttggttgtgggcacgagtgctttcaggcagtggtgtttcctgaggaagaggcatgcggtgcctgtcctgagtgttgtcagcgggcagctgtgggcgttcaagcttatccggatcccccactcccctgggtatggaacagcccaggtcactttctgtcctcgtccgccgcagggaacacttcaggaagtggaagttgcct

SEQ ID NO: 202898 - DNA, 1000 bp, Homo Sapiens
ggagccgcaggctgagcaagtgcctcccctcgggccaggccctctgtcctccaaaccactgggccaggagagcctggccctgctctgtggccactcaggcagatgtattttggctgtgcctgcccttggctgtggggctgctgccaggtggtggtagccccaggatgaaaccagccctcccccaagacctagatccacggggcagaggcaacacaaaggaactcaggacgctgtgaccgggcacagctcaggcccaaagatgtggggcaggtccagtcacaacagcagccccacgtcccttctggagagtctggacggccacccctgctgtcaagcccctgccccatgggaaactcacctccacttgacctaactgcaagcaaaagtgtccaccaaatgccctgggtctgtggaggggcgaggaaggggggatgaagggggatgaagtggggaagtggggagaacagggaagagggagaaacgcttgttggccaagaagaccggcagagaggaaatgacacagctgccccaagagaggcaaaacgggtagtaaggacacccgcaggccactcctcccctcagagatctgcccccatccttccctagcctctgccacaaaaaccagttctgtctctactactagctaatggttttttctttgtagaggcatggttttgctatgttgcccaggctgctctcaaactcctgggctcaagagatcttcctgcctcagcctctcaggcagctgggaccagaggcacacaccaccacccctggctgatttttcttttcttttccattttttttttctttctttttttttttttttgagatagagtttcgttcttattgcctaggctggagtgcaatggcgcagtttcagctgaggtgggaggatcacctgagcctgggaggtcgaggccgtggtgagccctgctcacaccactgcactccagactggatgacagagtgagagcctgtcttttttttcctttttttc

SEQ ID NO: 202899 - DNA, 1000 bp, Homo Sapiens
tctgtcttgctgccatacaagatgtgtcttgcttcccctttgccttctgccatgattgtaatattcttgaggcctccccagccatgcagaactgtgagtcagttaaatctctcttttttaaaataaattatgcagtctcagtatgtttatagcaatgtgataacagactaatacagaaaattggtactggcagagtgggatactgccgtaaagataacctgaaaatgtgaaagtaactttagaactgggtaacaggcagaggttggaacagtttggagggctcagaagaagacaggaagatatgagagagtttggaacttcctagagacttgttgaatggttttgaccaaaatggggatagtgatatggacaatgaagtccaagctgaggtctcaaatggagatgaagaacttcttgggaactggagcaaagttcgttcttgctatgctttagcaaagagatgggtggcattttgcccctgccctggagatctgtggaattttgaacttgagagagatgatgtaggatatctggcagaagaaattctaagcagcaaagtgttcatgatgtgacctggctttttctgaaagtgttcagtcatgtgtgttcacaaagggatggtttgaaattagaactatgtttaaaagggaagcagaacataaacgtttggaaaatttgcaacccattttttggggagaaattcaagctggccgcagaaatttgcatatgtaaagaggagttgaatgttaacagccaagacaatggagaaaatgtctccagcgctgtcagaaatcttggcagcagccccttccatcacaggcttggagacctaggagggaaaaatggttctgtggggtgggcccaggaccctgttgctctgtgcagtctcagggcttggtgtcctgcattccacctgctccagctctggctgtggctaaaagggagcatgtacagctctggccattgcttcagagggtgcaagccttgagccttggtgatc

SEQ ID NO: 202900 - DNA, 1000 bp, Homo Sapiens
gtaagtgttaattgaagccgtaagagcagatgaaattgctcaagggagtatgtagaattagaagagaagagggccaagaataaatgatttgctttatgtaagtagaaggaattatttatctatgctaattttgtccaacaaattattattataaagcaatgaaatggattttaattgaaagttgaacaacttttacatccaaatgagtcctgttcttttaaaatttcatttggaagtcactcatttattccagaagtacagatgctcctcaattttcgatagggttatgtctgaataaacccatcataagttgaaaatattgttagtcaacatgtgataaacttacgaagggtttatccgaatgtaaccccatcataagttaaggagggtactgagcacatactgctttggcaccatcataaagttgaaaaattgttaatttaaaccatcattaagtcagggactgtctgtattgcccaaagtattattggagcttctctttgtaaaaagctttatagcaaattcacagctacacaagaacgtagatcttctggctttattatggaattgtttttctgtctctttatttgcatggcacatataacttatttactttttttttttttttttcaagagacagggtcttgctctgctaccctggctggaatacagtgatgcaatcatagctcactgcagcctggacctcttgggctcaagggatcctcctgcttcagtctcctgagaaactaggactacaggcatgcaccaccaccccctgctaatttttattttttattttatttttcttgagacagagtctctctctgttgcccaggctggagtgcagtagtgtgatctcagctcactgcaacctctgcctcccaggtccaagtgattctcctgtctcagcctcccaagtagctgggactacaggcgcacaccaccatgcctgggtaattttttgtatttttggtagagatggggtttcaccatattgatc

SEQ ID NO: 202901 - DNA, 1000 bp, Homo Sapiens
tggctcgtgcctgtaatcccagcactttgggaggctgaggtgggtggatcacctgaggtcaggagttcgagaccagcctggccaacatggtgaaaccccatctctactaaaaatacaaaaaattacccaggcatggtgtcacacacctgtagtctcagctactcagcaggctgaggcaggagaattgcttgaacctaggaggcaggttgcagtgagctgagatcacaccaccgcactccagcctgagtgatagagtgggactccatctcaaaaaattaaaataaaaacaaaaatttaaaaattaaaaatatatgtaaactctaaagactcatgatatagcaaatgtcagtgtatctatcactgtttaagaagaatattgccaggcacggtggctcacgcctgtaatcccagcactttgggaggctgaggtgggtggatcacctgaagtcaggagtttgagaccagcctggtcaacatggtgaaaccccatcactactaaaaatacaaaaaattacccaggtgttgtgttacacagctgcagtctcagctactcagcaggctgaggcaggagaattgcttgaacccacgaggcaggttgcagtgagctgagatcacaccactgcactccagcctgagtgacagaatgggactccatctcaaaaaattaaaataaaaattttaaaaattaaaaatatatgtaaactctaaagaatcatgacatagcaaatgtcagtgtatctatcacccagtttaagaagaatactgccgggagtggtggctcacgcctataatcccagcactttgggaggctgaggtgggtggatcacttgaggtcagcagtttgagaccagcctgggcaaaatgatgaaaccctgtgtccactaaaaatacaaaaattagccaggtgtggtggtggacgcctgtaatcccagctactcaggaggctgaagcaggagaatttcttgaacccaggaggcagaggttgccgtgagtggagatc

SEQ ID NO: 202902 - DNA, 1000 bp, Homo Sapiens
tggggcagcatgtgcgcaatgacaccaggacaggctgcatggcacagagctgagaggaccaaccggtatcaccaggaccccaggaagccaggatcctcatcctgtccttgtcactgaccagctccatacatttacaggataagtttaatttctttggcctttaattttttcaacctcaccaggagctaaagtcatgaaatctctactgttccttttctccattattttaagataattaaaattcttttcacccttgacctccacaggtttaggatttttcattttaagcagtcaatatgacgttaagaaattcgtagttctcaccaaactccaagtagagaaaattatgtcctgagatccttgggctaggcatggatctggagacctggccacatgctcgtggtcagaggcgtgtcagcagtgtctgtgccgagactgggaaggaagaggcagctttggagcttaagaggatggcggagtccttgataaataaagggttttccaggaagacagaaaatctctcactttctgatacacaaggagttcagtgagtggaatcttcagtaatcaaaacctggttaatatgaaaaagaaaaaaaaagaaagtaaaaattagaaagaaaaaggattcacatagtacaaaatagagaaaataatgaagctgattaaagagggtatgggccatgtgagattgtttgttgttatctccatcaagaaaagcatttgtgatgcatctatctgtgcatgccaatgtgataatcagcgcacagaatccttgcccttcaagtacttactctgtcgcatgtggaaagtcatctagagataaatgtgcttccccttggagttggggttctcactgggatttcccaagttaattagtctctcttggggagccagagtgatcacttattgactcaaaaacaattaactttttaacaattaagcttagcctccaaccacaaatattccacaatttaaacaacaacacgattatggcaaa

SEQ ID NO: 202903 - DNA, 1000 bp, Homo Sapiens
acatctggctacttttttttgtatttttagtagagacggggtttccctatgttggccaggctgggctcgaactcctgaccttgtgattcgcccgtctcggcctcccaaagtgctgggattacaggcgtgagccaccatgcccagcctgaggctgcatttctaacaagctcctgggtgatgtggatgctcccggtcatgagataacactgggtagcctgaaacaggccaattatgcctcagtttcatgcaaagggtagcactaatatgggagattataccacttccatgtgagagaagtaaacaaattctgatgacccaacgagatttctagaaccagacaatcttgggcaaattctacagtagtgggtcttaattctgactacacattgaaatcagcgggaaaactttgagagacccaatgcccaggccatatgcaagatcaacaatgtcagaatcacaggagataggactcaggcagcagcacttttttttaaattttaaattttaaatttttttttatttggggggaagctttaaaaaaaggtttactttaggttcaggggtccatgtgcaggttgtatgtatatatatgtgtgtgtgtgtgtgtgtgtgtgtgtgtgtgtgtaaacttgtcacaggagtttattgtacagattattttgtcacccaaatattatactaagcctagtatctaatagttatttttttctgatgctctcccctggccaccatccaacctcaaataggccccaatgtcttgttcccctctttgtgtccatgtgttctcatcatttaacttccacttataagtgagaacatgcagtgtttggctttctgttcctgcattagtttacaaaggatgatggcctccagctccatccgtgttcctgcaaaggacatgatctcatccttttttatggctgtatagtattccatggtaccacattccgtatgtaccacattttctttatccagtttaccatacgtggacatttagttg

SEQ ID NO: 202904 - DNA, 1000 bp, Homo Sapiens
caggagctgttcgactactgggtgtttccggccagggcagaacctcagccatggtctcctcacagcccaggcagcctcagccacaactctgctgccctctggcccatggcagagccaggttctcctgagggagaaggggcaggaggggagctgcctgtacccaggttgaaatctggggtgaagtctcctgcttggcaccaggaattgtttttggaacaggtttttggatgttagatggtattaatatttatgtcaactcaaatccttgagggagtgtaaatccacctcccccgccccgccccgcccccgcccctgtctccttctatgagggagaaattgttagggagaaactctaaagtaatcctatgcataatcttgtcataaataggattccatttggggggaaatttggttcatttaaagatcaggtttgggtcaatggaggcagacctggatttacccctattttatcactgcattatttgcatgtgagtttgtcagaagtttgtatcttgacaggactgtggtccatctggggctcaggccttgctcagaacctgctgctggggtctcacaaggcttcctggctgctggaattgccccaggactctctttctctggaagctcctgggtccaggggcatctcccttccttttccagctttctgaatcccacctggatgttccaatgctgcctctgtggtccatgcatgtggcaagcataaaacctctgagatcccgaaggacttttccagaaaaagccagacaccaagggagtttgcaagtttcagagtggatgagacacggggctgtgcccctctttctcactgcagtcttgttccgagagcaaatcatccagcctcctctccaggcacccccttcacctcctcctcgcccctccttcctcaagggaaaccaggatgttcctagccctcctttagctcctcgactgaggagggagctgcttctcaggaaggcctcagcatccctgacctgtgatc

SEQ ID NO: 202905 - DNA, 1000 bp, Homo Sapiens
ctgggtaacacacacacaccccataaccacctgctctcatgtgaattccactttttgggatgtgtccatgacattaaatacccagtttttttaaggctttaaatctctatagacattgtcttcatgcagtgtatacaaaagaataaattagagctatgagaaacaactcagaccaaataaaccagggagaatatatccctcgagaaaaggtctttttggtttgaattatcaagaccggctgtctccattgatgcagctcaattttcaacttggctgatttgatgacagtcagaacattgtttaaaaatcaaaatgcatgaaggctaaggaaaaatgaaaataaaaattccattacaacttaatttttccatgttatttatttttatgcattcatatataaacattaaattagtatagaaaaaacactgcataaatgtttgagatgagttaaatgccataaactcataaatacttcagtaatgcttgtttattttccttttcctatatataaatacccacatttctacatgggatatgtaaatctgccctcatatattgtattttatatggtagctatgtaataacattgcatattttcaaaattcatatacttactatcatattcataattatatacttactatctggtaagtatataaatatttccctaagccaaaaatggtgtttcactggagcatctttacataattaccagacaatttggaacttaaaagcatcactgattgaaatagctatctaatgaagggccccaaatatttcacatatcttaatatctgaacactttttatatgaaagccttatcctagcacacgttcaatattgcctcccttcccatctctggttttgccatttaaaaatgttcacgtgtttcttttcccctccctgttcacacagagaaacaaatagcagcacatcctgctccaatatcaaaatcaggttcaaattttccattcaaaggaaaccaaactaaaatgagatc

SEQ ID NO: 202906 - DNA, 1000 bp, Homo Sapiens
cgacattttccacatatacaaaatagatcagtagcacatatcagagttgctcatggtgggctgccaatgcatggctgatatgctgtccttcactctctagagttgagaatcattgccacacatgctacagtagcaaagattttgatgctttgaatcctgttttcctaattaagaccatgtggtatgtgtatgaagttgcacctggtttataattctaagaaagaagaaccactattgcccccactttttatagaagcttgatgattataacagaattcactgattctttttttttcatttttgtgctcttataattttgacttcttttgtaatatataaaaaagccctatgcttgtttatcttccttaaatgcctcaattaccctccctgatttaagtggtgaaaatctgatgctaaggtcccttatttctccactgactgattcatgcgatggagaaagagatggaaaatgaagaattaaggctttctttcgtcattcatcttacctttaaagattcttggccaggtgctgtggctcatgcctataatccccagcactttgagaggtcaaggtgggaggatcatttgagccgaggagttggagatcggcctgagcaatgtagcaagactttgtctctacaaaaaaatttaaaaattcaccaggtgtggtggtgcatacatgtagtcccagctactcaggaggctgaggcagggggatcccttgagcccaggagttcaaggctgcagtgagctatgatcacaccactgcactccagcctgggcaacagagaaagaatctgtctcttaaaaaagagaagaaaaaaagaaaaggattctttttttgtttttttttttgagacagagtctggctctttcgcccaggctggactgcagtggcgcgatctcggctcactgcaagctccgcctcccgggttcacgccgttctcctgcctcagcctcccgagtagctgggactacgcccagttaattttttgtattt

SEQ ID NO: 202907 - DNA, 1000 bp, Homo Sapiens
tgtccgactttcagctcacgcagaagagataatctagatttctagatttctctaaacaggaattttaagagggcccactctcattatgctttaaagggaaaatactgctccctttatgaagtgagttatggagaggtccactgaagtgaagtaaggatcaaaagcatgctgtggaacttgcagctcctcaccaaatggaatgtgtctatttttaaaaaatatcaattaagcagacagaagaggaaaaatgggttcccactttgctcctatcagattggcaaaagtttaatcaaatgataacacctatagctgatagcagtatgggggagaaagcccttatcatacacaattagtggaaatgtaaaatttaaatccttttttttgaaatgcaatggaaacattttttaacatgagaaatgtactttcaacctggctatcttgtcttaggagaatatactatagaaataaatacatcagggtatatgtgtgtgtatatatatatatacacatatatatgtgtgtgtgtatatatatatacacatatatatgtgtgtgtgtatatatatatacatatatatgtgtatacataaaaatattaatttattatgctttattcataatgccagcaatattgagatgaatgaataaatcatggtgtatccatacatgaaacatcatgcagccattacaaagaaagatttagagctaaaacagttaccttggaaacagtttcatggggtatttttggaagagaaactgataagcagagtaatgtataaaatataatcccatttttcttaaagcagacaatctaaagtctagcctctaagggtgtgttttatgtgctagataagaatggggaaaatacagaatggcatatgctaagttgttaacacgagttgcttgaggggaggaggtggcattggggaaggggaagagtgaagacaagtaaaacaaaacaggctgcaataagaaaccccaaaacatttctaaaatgatc

SEQ ID NO: 202908 - DNA, 1000 bp, Homo Sapiens
actcattgtgcccctctctgagcctcggtttcctcacctctgaaataagctctgtgcccatctcgaagggtaactgaggagatcagtgagggaatgtgggtgatggccttagcatagggcttggcacactgtcctggttgggaccctcccagtgaatcccaaagcaagctgacatctagctgtcagagaggagaccattccttatattgtcttatacttaatttcttgtttgctgaaaaagtagaagttagaattggcagaagtgaaaaatcacagacaactggggaccacatttcagacctggtgttaaaattcaacctctgacctcagggcttgtgctatctatggattcagacattgtgtaaaaaagcatcatgaaactccctgttctgttctgtttcgttctgatcattggtgcatgcagcccccagtcacataccccttgcttgctcaatagatcacgacccccgcccccacagcccctttagagttgtgagcccttaaaagggacaggaatcacttattcggagagctcggtttctaggacgtgagtctgccgacgatcccagctgaataaagctctttccttccacaatccagtgtctgaggaattttgtctatgactcctcctgctacagctggagggaaactctcttccttcctagccccagttgtctctttgtaactatgatagtttgctgccgatggacacggcaagtctgtatgctgagatgctgggttgcagcaaagaaggggttaatcatagggtcactaaagaagttgctgggagggaacctcaaatccatctcccagaggaatctggggctggggtttgttgttgttgttgtttggtgtctgtttggtgtttgtttgtttgttttttgagacagtcccacgctggaattcaagggcacaatcatagtgaaatggcaaagatttccttgtccccttgcagggcctgcgatggggactggctcgcttctttggggccccgctgctc

SEQ ID NO: 202909 - DNA, 1000 bp, Homo Sapiens
agctcaaacctcaagcatccagggccaccgcctgcctctccgatcggtctgttctggctgggagaagcccagggcttccctgcttgtcagcccggccgcttgcccagcagtttgtgagatggaaggtggagagaaagaactgtgggggtgagaagtgacgtcaccataggggctggggttgtggacaggcccccatcaaccctctcccgccacccccagagcaccaatgcgtcatcttggagtttctttagtgcttaggcagatgaattctgacgtgacagctgggaacccctgcgggggaagttggggtcaacagctgatcccagaggctcccgggggcactgacacctgggagccccagctgtgttgccccttttccagccatcaggtttggggggctccaagctggcatttatacccactgcctgcagccgtgtgaagtctttcagactgagttcaagtcttgtttcaccattgtcagcagagtcactcagcaaggtgctctgtcccctcccgtggaaaagagggtgacccagaggtacacagattgttagataggtcctaaggtttgaaaagtcttagagcattgccaggtatggtggctcacacctgtaatcccagcactttgggatgctgaggtgggcagatcatttgagcccaggagatggagaccagcctgcctgggcaacataggaagacccccatctctacagaaaataacaaaaattagccgggcatggtggtgcgtgcctgtagtttcagctactcaggaggctgaggtgggaggatcaattgagccagggaagttgaggctgcagtgagctgagatcatgtcacctcactccagcctgggcaacagagccagaagctgtctcaaaagagaaagaaaaaaaagaaagaaagaaagaaaggaaagaaagaaaaagacaaagaaaaaaaaaagtcttagaacaattcctgggatgaagcagattcttcctgcttaggaacctttcagatc

SEQ ID NO: 202910 - DNA, 1000 bp, Homo Sapiens
gtgattttatcccccacagttctggaagatccaagagcaagcttccaagaggaccagacagaagctgtgtattgcccttttacagcctaggcttggaagtcacatagtgtcacttcagcagcagtcacaagcctgcctggattgaaggggaagaaatgcagaacccgcctcatgctgggagggaggtcaacgtcactctgtgagaagagcttctgggatgggagacgtcgttctgaccatcttgcaaataacatttgccacgttcctcctctggcaacaatttacattcttcatatctgcaaaatgatgccttatttccttcccgtgagattcccaaaccgcatcccatcagggcatccgcttcaagtccagcatctcatcattgaaatcaagtccagctgcagatgaggcttctcagatgggattctttgaacgtagttccttgagtgttaatcttacggatttaaagatctgttaatgaaagatacaagttacctacacacacatgcacacacacacacaccacgtgcacacatacaccacacaccacatagacacacacgtgcacacacacaccacatgcacacacaacatgtgcacacacaccatgcatgcaatgatgggacaggcatgggaaaaccattctggatgatcctgttcaaaaaggtggaaaatggtaccccacaggagtcactggtccatagtattaataattctgagatccaaccaggcatatgtcaccagttccttgttcagggctcagtcctacagcccaggaattgttcaccaagcctctcagctccaccctcttggctctttttgtcctctgaatcttttcttccttttccataaaacaaaaaacaaaaactgagcttgcaattaagccttctcagtacatttcctgcttattaaaaaaatatatacatatgttgcagtaacgccgggtgcggtggctcacgcctataatcccagcactttgggaggccgaggtgggtggatc

SEQ ID NO: 202911 - DNA, 1000 bp, Homo Sapiens
gagattttttttccatttgagttatgcaattacacttcttaaatatattattatttaatatgtatgcatatacactggaactgttgtgacacttttaatggctaatgttcatgtttataaaatatgtaaattttcagctattaatataattgcttgctggtatataatatcagataaaatgtatataacaaaaataatcatataaaataacaccgtttcctcaaatctccaacctcagctaccacacagttgctcctctggttcaatgtaaaattttcctcaaaagttaatatattttaagttattattttaaagagagagggtcttgctgtgttacccaggctgcagcgcagtggctatccacagggctgatcacagcacacaatagccttaaactcctgggttcaagcaatcctaccgcctcagcctcccaagtattaatgactgggactataggtgtgtatcactgtgcctgcttttttttttttctctctctttctttaaaaactttttttctttttttttttttggggggtagagacagggtctcactgtgtcacccaggctggtctcaaactcctggcctctacctcccaaaatactgggattacaggcatgctccaccacacttggctattatattttaagggttactttctaaaccataggaaaattagctgggtgtggtggtgggcacctgtaatgccagctactggggaggctgaagcaggagaattgttgaacctgggaggcagaggttgcagtgagctgagactgtgccactgcactccagcctgggaaacaagagtgaaactccatctcaaaaacaaacaaacaaaacacacacacatacaccctgaaatctctaacactgataccgggcaggggtagtggtcacggtatagagaacagcatattctcaccatcaaaggtgaaatttcacaggccaattagggtactgatttaagatgataggaccagggtctcttttacatagatc

SEQ ID NO: 202912 - DNA, 1000 bp, Homo Sapiens
ttagaaatagcttactacacgtggtgaagagatactgatttagaaaagtcaatgcaaataaagctcttgattatagatttataccatggttataatcagaaattgaaaaccacagatttatttttatttttatttttgctttttaaagacccataaaattttatcctctctggggacatgttagtatttgctgttttgaagtaagcaacaagtttaggtatactgtataaatcacatactttaatgccatggaaatgaaatacagttttgatcttgaaatcaatttcaaagaaaaaaagttgttggtatcttgcttctccattgctttgtagtgaataaaatgtgttagaattggttgaacttttgaaaataccaaggtatttgtgtttaaatgctatgtgtgtcttcattgtaaccatttgagtaattttttattttcttaactaatgatcatattttaatacattagttttactttatcaatattgtgctcatttctatgcatttttttaaggattattttagacttatttgctgctaactctattcttttatttgctgctcattctttgaaaaacaaaggagaaaatggtttgatgcaggaatttttaaactttagaagtcctaatttggcttaaaatgttctgattatgaggttttacgaaggaagtttttaacttattgtttcatcttggtatgtgactgtttcttattttacttttttttgacaatttttcttttttttggatttgatgtatagctgtttaagcttacacgggatctatttggccttatattgactacttctgttagtaaaatatgtatagtttcatctgttaaattatggtgactgtgcagtattccatttccttgtttaatggggtatatgtttatgtacacaactgcatgcacatttgtcttattgcgtatgtatacaaggcattgttttgtagtactttttgtaataagagcatttttctcagtttattttaattagatc

SEQ ID NO: 202913 - DNA, 1000 bp, Homo Sapiens
gtggcaggcaggttaggtgatgctattctaattcagttgactaagatacatacttgctcagaagttacttttttcaagattacatggacagtgatttgcagaactgatatcagagcccagggtttcttactgcaagcttctctgttggtcatgaggtcccaactatcagtcccacatagttctgtttccttccatgcctacctcttggctgtttcttagctgtttcctgtagtctctacctaaacttccctgtcatgctttttctttagtgaatcctggtacttctcctagtccactccagacctccttatacctcaccgctctcctttttctaggccttaaccctgtcaagccatacttgctcttttttggagaatctcaacatactagagtctaacccagtgattgtcaacagggaacagttttgtcccccaagggacatttagcaatgtctggagacattttttgttgttacagctgggggggtactaccagcatagaatgggaagaggccaggaaagctacatcctacagtgcacgggataaccccactatgacaaagaattatccaacccaggctgggtgtggtggtgggcgcctgtaatcccagctactcgggaggctgaggcaggagaattgcttgaacccaggaggcagaagttgcagtaagccgagatcgcaccactgcactccagcctgggtgacagagcaagactccatctcgaaaaaaaagaattatccaccccaaaatatcagtagtgctgaaggtgagaaactttgctgtaactctgcgcctggggagatcttgtgtgaccaactcctgacttgctctttataggtggagcagctgcgccaggccattgaagaactgtactactttgaatttgtggtagatgacttgccaatccggggctttgtgggctacatggaggagagtggtttcctgccacacagccacaagataggactctggacccatttggacttccacctagaattc

SEQ ID NO: 202914 - DNA, 1000 bp, Homo Sapiens
aaaataggaaaaattaaccgatacattttcccaccccactccgaatcaggaagatactttatctttgacagataattactgtgagtttaatttgtaaattaagtgtattcaggctttttattgccataaaataagctcagtcttagatctcaagaaacttaaatatataccctgtagaggaaaaggctgtctcctacttatttttgtattctcctcagtacacagtgcagggtgcttcatatattacatatgcaccaaatgtttactgagttgaactaaaattacacgagcttgttaatgaaaaatagctaagagctaatatttattgagcatttattacatgccaggcaatgtgctaggtattttacctgaattatctcatttaatctttgcattatccctatggaatatgtatttatattattctcatttagaaatgagaaactacgctgagagttaagtaacatggtcaagatcatgcaactaagtaagtgacagaagaagggcttgaatgtagatatttcctagatatctgttcaaagaaacaggagtgaaattcacatttctagtgttgctgtctttcctttgtcatcagttatgaaggagatatattcaacacgtttaaatagaagaataattatcgcctacacttatgtggcaaaacttctatctcatcattctccttctcgcctctctgcttttgcaggtcttaaactttataagcgtcagcaagagttccattggatgaagggccctgccacttggtctaacagagcagtccacagaggggttagcaatgctgactgatctgcattagtgccttctgctttgggggctgaaattgattttctgcattttagagtatcatcatgtcttagcttttggttgaggtcaaatgtggtacctgcttagtatctgatacagcctcaatcatgggattaagtcttctctgacagggatgggatttgatggcctaagaggtctttttgccacagtgatc

SEQ ID NO: 202915 - DNA, 1000 bp, Homo Sapiens
tggggtttcgtcatgttggccaggatggtctcgaactcctgacctcgtgatctgtccacctcggctgcccaaagtgctgggattacaggcgtgagccaccaagcccggcctataaaggtgactttttaatgattaacaagctaaacatatttttttggaaaagagcaaacttgcaacagagtacttcacaagacaaagaggtgcttatctggagggcctccctctgagcaagatagaggaggcaggagacatccaaggcggcccactatcttcatgccaatacccgtcaggccaatacccaacatgatgagatgcaatgttttcagagctgacatctgggcaagtcactgtcaactgaaattaacccctgaattcactacgaaaagaaaaaaagaggtgactgagctggagtgaatggttggtgtttcgcagctcctttcaactggaagagttgaatgagaagttccatttctctcactgtatttttgctgtggcacctttggcaaaacctccttctctagagccttgggttctcattcaggctgcttggtcctagctctgcatatgcaaaaactttgtttatatcattgctggtttcaaaaaggaattcaggcagcttataatcttattaagaatacttaacaaaaaaagaatataaggtattttgtactcctcaaaattgggaacacctcaggagattttttttttaatgtgttagagaaataaatatattaatagtagtacagagcagggtaggactttacgaccctttaacagagaaccatgtgccttctcactcagcacaatttttgagggatatgcatttgttacttcctgtattcatctttaacaataagatattttcagttaagaaaaaaagatgtgaatttggattaatatagctctcaatcataaacaaaccctaaaccaggagtgcttgttaagtcttccacagcctggacttcaaactcaggacctgcacccaccctccgataagatc

SEQ ID NO: 202916 - DNA, 1000 bp, Homo Sapiens
agtgctgggattacaggtgtgagccatcacgcccggccataacagctttattcataattgccctgaactagaaacaacccaaaggtccatcaactggcgaatagatcaataaattgcagttcgaccatatgttggaatactaggtgcagggaaaagaaacctacgactgatgtccacaatgacatgaattaatttcaaaagcattctgtaaagtgagggaagcagactccaatggctaaataccaggtgattctgtttaatgacaacctggaaaaagccaaactgcaggcacagaaatgaaatcagtggttgccaggggctagggaacggggaggggatccactgcaaaggggcacaggcaactttctggggctagagaaatgttcaatatctttttgttgttgttgtgtctagagatggggtcttgccatgttgccgaggctggtctcgaactcctgggctcaagtgcaggcaggagggcagtggcacgatctcagctcactgcaacatccacttcctgggctcaagctattctcctgcctcagcctcccgagtagctgggattacaggcgtgagcctctgcacccagccaaatattcaatatcttgattgtggcggtgagtatactggtaactatgtctttcaaaactcacccaagtgcacactttaaaaggatgaatcttattgtatggaaattacatcccagtaaaccttactttaaaaaataatgctagccagtaaaactgtcagttaattttaatttttttttagacaggggttattagtccattttcatactgctataaagaactgcccaagcctgggtaatttataaaggaaagaggtttaattggctcacagttcagcatggcaggagaggcctcaggaatcttacaatcattgcagaagatgaagaggaagcaagccaccttcctcacagggcagcagaaggagaagtgccaagcgaagggggaaaagccccttataaaaccatcagatc

SEQ ID NO: 202917 - DNA, 1000 bp, Homo Sapiens
aacagtaggagtgcaataaatacttgttgaataaaataaatgaggtagccaggagaaagacaggtcccccatggctctgacggaggtaaatccagaaacggcagagctcttatctgtatttttggaatcaggacatgtcaggcaaacatgctgtaagagaatgatggtgctaatcatggaggattagcccgtgctttgtttccaggccccctggactcacctcctgggcctggtgcctacactgcctactatggaaaatgcctgatcccaccactaaaataactgtttcagatcagggaagagcaatggaggcagcaatttacttcaaagcaactctgatggaccctgatattatttcctagcataaatccaccctatggacacagaccctgaatcacttcagacctagtctatatacaatggttgttttacaagcaatgtcactctggatcttgtgcacaggagactgacttcaatgacagttccttctctacaacactctcacttagaggaggccaggtatttggaaaactttggcgccagagatggcatttcatgccacttcctggtcagcactaagtattaccctcctgttttagaatatgaatcacaacttctccttaaaaagagctggggtggggggtgggaagagagggtgggtggaaggaaaagaaaaaacaaattcatacaatctaagccatgctaattttccatcttgctttaagatctcccttcagttgtagaggcaagggaggactatggatttcaatggaatatgggggaattgccatcgccctacagatcccattggaatgtatgctctgtgagagcagggaccagcccttgctctgctcagtgccagacactcagtgcccagaactgtgcctagcacacctacagcttagtgactctctgttaggtggacagaactgatttatgactgggcatagtggcttacgcctataatcccaacactttgggaggccaaggcgggcggatc

SEQ ID NO: 202918 - DNA, 1000 bp, Homo Sapiens
tacctgacaaatgagtagtgagaggacccattcattgaaaataaatattcattcattttataaattttcataggactagtagacactttgaatgggaagagattttagctagaaaatgctgctatctcagaagtgtaaattctcatccaaatttagtctaatgatttttattatagaattggagttttttttgtgttttacttattacattttagtacaatcttgaataaatacttcaatgttcccaaaacttggtaagtctaccactgttggtaagacagatgatttttagaagatacctgagcaacgttttgtttgttaaacaattaagcatttaatgtgtattagaaaaaaaaaggctgggtacagtgatttgtgttggtaatcccagaactttgggaggctgaggcaggaggatcacttgtgctcaggagttacataccaatatgggataaatagaaagacctcatctccacagaaagaaaaagtcagccagatgttgtggtgtgcacctatagtcccagctacttgtgaggctgttgtgagaggattgcttgggttcaggaaatcaaggctgctttgagtcatgattataccactgcaactgagcctggatgacagagtgagatcccatctcaaaaaaaaaaaaaaaaaaaaagcaaaagtatcactcacacctcaaatgtgttttcatggttattgttacttattattacataaatgcattaataaaatatttaaaagtttggtcaagttaaagaaaatataaagttaaaaataatggatttttattaaaatgattttcaacattattaacagggtcttatatttttgtataattttgtctatatgaatagatttactatcagtacaagcaccaaaataatactaaatctacttgatcacaggaataaataaaatgtctaaattggagttacttttgaaatagttaatggcgggtactcttgagccctgctacacaaactgtggtcagtgacca

SEQ ID NO: 202919 - DNA, 1000 bp, Homo Sapiens
taagtatgagttttaatacttactgtgctctaaagggtttgtgtgatattaggcaagtctcttttaccacatcagccttagttttcctctctgtaaaggagctgaatacatttttcaacatttttttctcagtcagaagtattttcatcttttctaactacaaattcgaaaaaaattattaaacaaactatgtctattaatttgttttccaactactataaagacatctacaactaccaaaccacagttactgatcagcatgattattaacatgttgggttggtataatttcagcaacaaagatgtcatttaactttccgcatagccttggaatatttaaataccttagaactatctgtaatgctccatggatttataatcttcctgtgaaaatgctatgtttagtttttatttcaaaaatagttaataaatactgagccaggcactggcattattaggtactgaggtaacaaaaactgttcttgatgcatttccaaagtggtagagaaattggtaaagaaaaatcaaattcagcaaaaataggaaatacaataatagacctacaaataaaatctgggatcatgagaaggcctatcaatatcctcattgaaagaaaagagccacaataacaaaaccctatttgtagagactcacctaaaaggaggagccatctggccatactgcttaccagacgtgtgctctatggaatcaaagccctggagacactcattcaaaaataggctcccagacttaattttgcttgacaaacacaatattttctgtctcactcttaaagatttacaatgcatatttgcatattaaaggctctaagaagtcccaaaggcaaagaaacacatctaacttggcttgatataaattttctgaaatatttgaccaaagaatctacttttgcagaataaaaaatagtagcttagtttaggacactctaaatatggcttttggaataaacaagaccatagcagagccatgttttatgatc

SEQ ID NO: 202920 - DNA, 1000 bp, Homo Sapiens
tgggctgatcatggcggtgcggatgggcctagcctaagtcctgtgctctatccctggagccaggctggggagttgtcttccctggaatcccgtggatccccaagtggaacgtggtggctgctgcaaaggaggggtgggtgctagagaggccaatgcttattacatcacccaaaagagtggaagggcctgggaataatgaacttggagatgtgaacacctgtggggctgggagcatccttcaaccctccaagggaggtcatggggcaaagaaaacaggtgagtcagggtgatccagagggcaaacgtgggacaggtggggagaagctcagatccatgaggaagtctctgggaatgactttctatcatggtgtagtatagggacgaaggagcatgtgggcttaggaagcagacacattggaattttttaaatttttttattatttttttattttttagacagggtcttgctctgttgcccaggctggagtgcagtagtgtgatcatggctcactgcagcctcccaggctcaagcaatcctcccgcctcagcctcctgagtagcgggaactacaggtgtgcaccgccctgcccagctaattaaattttttttaagttgaaattttgccatgtgttgcccaggctggtcttgaactcatgggttcaagtgatcctcctgcctcagcctcccaaagtgctgggaaaacaggtgtgagccatcatgcccagccttgaatttttttgttttttgttttttgtttttttgattttttttttctcgagacggagtcttgctctgtcacccaggctgtagtgcagtggtgcaatctcagctcactgcaacccctgcctcccaggttcaagtgattctcctgcctcagcctcccgagtagtggggattacaggtgtgtgccaccgtacctggctactttttgtattgttagtaaagacagggtttcaccatgttagccaagctggtctcgaactcctgacctcaggtgatc

SEQ ID NO: 202921 - DNA, 1000 bp, Homo Sapiens
tctctcttctttgttcttcatcattgtttcccctttctatactggaaaatttccagtatttccaggcatgcagttatgtctcccaacttaaaacacagcaaatggtagttagtaccattgccagcgactgctccattttcctgctttcctttacagccaaacttccaaagagttgtcttttcttcctgtctccaactcctcacctcccattctctcttaaacccaatccaattaagcttcctttcttactcttccaccagaactgctcttaaagttactaaaaactgggctattgctaactccaggggtcacctctcagtctttgtcttacttgctctaccagtagcatttggcattagtcttctcattttccaggacacctcttgagtttcctcctacttcactggttattctttcttggtctcccttgttactcctggtttattaacactggatattccagaccttagtccttggatctcacctttatttgttcccactccattgatatctcatccagtctcatggatttaaatagtataattaagctggcaactcccaagttatatttcctcttctggaattgtttagggatctccaaatttgttcattcaactgtttacttgacaaattacttggctatatatttaaaaatcccttaacatgtgtgaaaccaaactgtgatttttcttaaagttatcataccatttgcttttatgcaaattagaaaaatacttctcatcctttcggcagatgctgcctgtggagggtgaacagcttgcctggatgcttgggtgcgggcatttgcagcttccctcatcttccccttcaaatgcctcctcccattgtcttccatttcagttgctagcagttccagccttcctatcattcaactcaaatattttggagtcatccttgaggtcatttttctttccagtcgtatctaattaatcaataagccccgacaggtagttaggttggataagaggaaagagaattc

SEQ ID NO: 202922 - DNA, 1000 bp, Homo Sapiens
caggaaacaggaaaagatggtcctatgaaaggaacaaaatatcctgaaatcaaccttaaagaaacaccaaataatgacttacctaacaaataatttagaataatcatcttgaagaagctcaatgaaccataagagaataaagaaaacaaaatctggaaaatgatgcatgaacacaatgagaatatcaacaaagagaaactattaaaaaaacagaaattctgaagctgaagaatactatatctgaattttagaaatgcactaaaggaattcaataatagagttgatgaaactgaagaatcagcaaacatgaacataggtcatttgaaattattgagttagaggaacaaaaagaaaaaggaatgaagaaaagtaaagaaagcctaagggacttatgggataccatcaagtggaacaatatatacattatgagagtctcagaagaagaagagagagaaagggacagagaggatatttgaagattaaatgattgaaaactcacaaatctgaggaaggaaataggcatctaaattcaagaatatcaaaggattccaagtgagatgaacccgaagagccccaaaccaagacacattacaatcaagttttcaaaagtcaatggtaaagaatgttaaaaacagcaagagaaaagccactggtcacataaaaggaagtccctgtaacattatcagcagatttctcagcagaaacattacagaccagaaaaggatgggataatatattcaaaatgctgaaagaaaaagctgtccaggccaggcgcagtggtgcacacctgtaatcccagtactttgggaggccaaggtgggcggaccacaagatcaagagattgagaccctcctggccaacatggtgaaaccctgtctctactaaaaatacaaaaattagctgggcatggtggtgcatgcctgtagtcccagctacttgggaggctgaggcaggagaatcacttgaacccaggaggtggaggttgcagtgagccaagatc

SEQ ID NO: 202923 - DNA, 1000 bp, Homo Sapiens
ctttacaatttggatgccatttttttctttctcttctctgattgctgtagctaggacttccattactacactgaataacagtggtgaaaatgggcatccttgtcatgctccaggtcttagaggataggctttcagtctccctcattcagtacgatactagctgtgcgtttgtcatatatgggttgtactatgttgaggtatagtcctcctaaatccagtttttttgaggatttttttatcatgaagggatgttacattttatcaaatgctttttcagcatcaattgaaatggtcatatggtttttgtccttcattctgttgatatgatgtatcacatttattgatttgtgtatggtgaactatccttgatgcttgcatcccaggaataaatcccacttggtcatgatgaatgagctttttaatgtattgttgaattcagtttactaatattttgttgggattttttgcaacaatattcattagagatattggtctgcagttttcctttttctatgtgtttttatgtggttttggcatcagggtaataccggtctcatagaatgagtttggaagtattcgctcctcctctattttttggaatagtttgagtaggattggtaatagttcttctttaaatgattggtaaaattcagcagtgaagccactgtttctttactgggagactttttattatagcttcaatctcgttacttaatactggtctgttcaggttttggatttcttcatggttcaatcttggtaggttgtatgtgtctaggaatttgtttattctttctagattttccaatttattggcataaagttgctcctaatgatgcttggaatttctgcagtatcagttgtgatgtctcttttttcattgctgattttatttggatcttcttgctttttttcttagtctggctaaaggtttgtaaattttgtttaacttttcaaaaagccaactttttgtttcattgatcctttgtgttgttttatt

SEQ ID NO: 202924 - DNA, 1000 bp, Homo Sapiens
aaaggattgtaagaggatgattgttttttagtaatttttgagaactcccagcatgttttgaattgcattttcacctactctaggttgttagactcttatttgaatgagattttattgagacaggaatacatggaatgctgggattacctcggttaaatgaggaagcatttttctaataaccagtcaagagcaggccaggcttcctcaccaggatgagttgagacctactgagtttggatgagcacctgtaaggaatgtaggggtgttctgccctgggtggaaggctgtgatggcttctaggatccctttcaattctgaggttctatgacttcatgaaaacaagacattgctggacaagtttgagtggcccaccttcctacctgcctatcccacagtctgaagtggcatttatgaaaagctgggaacacagaaggagacaatgggtctccagcctacggtgaacagttcttttctggcagctaatttagctctagaagtttccagttcccaccaaaacattgagagatcatcctgtagtttggggcacacaatcagaacagttaaataaaaatgcaagtggttagttttacatctgctggggacattccatggccagctacatagaagtctaggcattctatgtctccagccctaggagctggggatacaagtgtcactgagacatagctcttattcttgaggcattcatcatctgtggaagagagagccatggaaaccagtgattacaatccagtgtcccagcatagatagaaatatgcataaggagggggacatgggaggggaggacagctttgctgcagaggctgttcttgagcaagtttgaaagagtaaatgtggtctaccaatgaggcttaccaagagcaaggctatggaaaaggcattccaggcagacaaagcaccatgggcttaggagcagatatgtgaggccaaataatgtattaggggagttgaggccagggaggggtggtctggctggatc

SEQ ID NO: 202925 - DNA, 1000 bp, Homo Sapiens
tattgttatagttggattaatatctatcatatttgttagtgttttctatttgttgcccttattatactcttttaatttcattttttagagttttctctagagtgtgcgatatacttttacaactactccaagatgttgtagtgtttcacagaacactgtaccaacttcacaagtagtgtgagttttatatttctattttatacccccttctcttttcccttcctccttctcccccatgttcctattcttcctcccctcccttccctctattttctctcccttgtgagttttttataatgacaaaataattctaattcttctctcctgttccttacatcattgctgtcattcatttcacacacatatatatatgcatagattattgaacagatttttgctattattatttttaaaagttatctgttagatcaattaagaacaagaaaaattaaaatttttattttatcttctgttttatttccttctttatggagaggtgcatttctggcctttattattttctttctctctaaagaatttatttttaacatttcttttatggaaagtctactggcaacaaatttcctcaatgtttgtttgtctgagggagtccttatttctgcttcatttttgaaggataatttcatagagtacagtattctatgtttttttctttctctgtcaacactatacatatttctctttaatttcttcttgcttgcatgttttctgagaagctaaatgtaatttcttatctttcctcttctagaggtaagatgttttttatcctctggtattttccaaactttgtctctttattctgtagcttgaaaatgatacacctaagtatggtgtttttgacatatgtactgcttggttttttctgagcttcctggatctgtgatttggtgtctaaacataatttgggaaaaatctcagtgattgtggtttcaaatatttactatctttctttctcttttttattctttttctagaattc

SEQ ID NO: 202926 - DNA, 1000 bp, Homo Sapiens
tctcccacccctctttctaccctctctgccttcgagtttatttgtataaatgtgcccctttgaggcctactgtgtcctctcctaagtatcccattcagaaaaatacagcacttgctagttgggattctgcattcctgactgagagaagggctcaacttcagctgaggcaggtgtacattaccaagcctaagtatctcataaagagaattcaaagcatgatggactgatacctctatcttatacattaagaaaacacatatacttatcttcacacctgcttgcatttgaaaattaacttttacacaaaacataaatgcacacatgcagcattaacaccattgattcagtaaatatttgttggtgcccattatctgcaaagcaggtattgggagtaaaaagacaactaagagctcactgtctagtagaagagacagacatctagacagttataacactctaaaatgctataagcactgagtactggggaagcacagaagggaggaaagagtttggaggaggtcaaggatgtcctaccagaggacttgagacctgagtagagtggccagatttagtgaataagaagcacaggattcccagttcaatttgaatttcagataaacaacaattgcatgagatgtgcttatataagaaaattattctttgtttatctaaaattacaatttaatagggcattctgtattttatctgctaagcctccatctgagattagttttgtcaaagtcagcagaggtaggaatacgaggtagctagtagcaaggacaaggctaggaaggtagccagagttcaatgctttgtgtaccatcctaaggaattgggactttattcctcgaagggtaggtagtagggagccaggaaagcattttaagaagaagagtgatgtgatcaggttggtgttttcagtagatttctttgggagtaatgtagatgatggatgaggggaatcaatttggaagctgttggaataatgtgacaggtgatc

SEQ ID NO: 202927 - DNA, 1000 bp, Homo Sapiens
tttggaacaattccccatttcccacttccctcaaaccttggcaaccaccattctactctctgcttctgtgaacttttctgttttaggtacctcatataagtgaaattatgcaggatttttcctatgattggcttgttttacttagcataatgtcctctaggttcatctgtgttgtaacaaatggcagaatttccttcttctctaaggctgaatactcttctattgtatgtgtataccacattttctttatccatttgtacattaaagaatatttgggttgtcttcgtgttttggctgttgtgtatagtactgctatgcacctgggagtgcagatatattttcaagatgctgattgtaattttttgaatatatacacagaagtgattattgaatcatgtggtagtactatttttaattttttgaagaacctccatactgttttccacagtaaatgtaccattttaaatatccattgtagtgtataaggattacaatttcttcacatccttgctaatgcttgttatcttttataaaaattaatagccatcctaacaggtgtgaggtgatatctaattgtggttttgatgtgcatttccctgatgattagtgatgttgaacacctttttatattttttccctttctataggtcaacttttcactctgttgattgtttcttttgctgtggcaaagctttttagtttgatgtagttctgcttgtctgtttttgtttttgttgcctgtgcttttagtgttatttccaggagatcattgccaagaccaattccatgatgcttttcctttatgttttcctctacgagttttatagctttaaatcttctgtttaagtatttaatccattttgatttgatttttgtgtatgatgtaagataaggatccaatttcattcttttatgtgtggttattcagttttcccaacattatttgttgaagagactatcttttccctactgtgtattcttaaaactcttattgaagatc

SEQ ID NO: 202928 - DNA, 1000 bp, Homo Sapiens
gctgtggaagagtagaatttttgtatgcaactgaagttaagttcacatcaattcaagtaagactctcataactttaggatgttatatgtaatctccatgataaccacaaagaaaatatagaatatacaaaaatgaaagtgagatgggaatcaaaatatgtcactgcaaaaaattaaccaaacacaaaagaaagcagtaatggaggaaataatgaacaaaataatgaacaaaatgaaaaaggaaaacacaaaatggcagaagtaaatccttatttatcactacttacctcaagtgtaaatggattaaactcctggatcaaaaagacatagatggacataataatttttaaaaaatgatccaaatactggttatctaaaaaaggttcgctttagatctaaagacacaaataaactgaaagtgaaagaatagtaaaagacattccatgcaaataacaaccaaaagagagctgagatgactatatagacatcagacaaaatagactttaagtcagaaactgttacaagagacaaataggatattatgtattgataataaagccaggttctcaaaaaatgtaattataaacataaatacaacaaacaacagagcaccaagacatatgaagaaagcactgaaagaactaaaaggagaaatatacatcagtgtagtaggggaaaactaaaacaaaaaaagagagaaacagttggagacataaatagcccaatatcaataaaagcgtaaaacaagtagacaaagataattaaggaaatataggactcgaataacactataaaccaattggagctggccacagtgtttcatgccttaattccaccactttaggaagccaaggcaggaggatcacttgaggccaggagttggagaccaacctgggcaacactgtaagaccctgcctctgtaaaacagtttaaaaaaattagctggggtggtggcatgcacctatggtcccagctactcaaggggcggaggcaggaggatc

SEQ ID NO: 202929 - DNA, 1000 bp, Homo Sapiens
ttaagggataggttcttactatgttgtctaggctagtctcaaactcctggcctcaagccatcttcccgcctcatcctcctgagtagctggaactgcaggtacatgccaccatgcccggcccacaaattcttcagagagtttctctaataatgaataaattcaagttttagacagtaatctgatttatatcagcatttgtactctgagcatgggacatttgtttatttattccacattatttattaagtgcctattctgagcctgaccttggcaatagaatagcagtgaatattttctttaaactcattctcatggagcttaaaacttagtagggggaggcacacaatacaaaattaaatagatatctataatgaataatatattagtttggtgcaaaagtaatggcagttttttgccattgaaagtaatggcagaacctacaattacttttgcaccaatctaataaatcaatacaatatatattacgtgagaaagtgaaaagtgcttttgagaaaagcaaatcagaaaaggggagttgggagcgttgtgggggagggttgaaatgctaggcagggtctgaagaagacgacatttaaagaccacaagtgggaaaggagtgagctatgcggataacctggaggagggggattctgggtggggaacagcaagtacaaaggccctgagtcaggagtgcacttgtcaagtagaggaagtagcaaaagagaccgatgtggctgtaaagtgagaaaagtgacagtagccagcttgcatagcatcccattgccaatggttgcagcagtacctagaaagaaggccagcactgaaatctagtgtttttggctttctctggtatctctgagaaagtgtcagtctggcatacccattgtcagaacaatccacttaaataatatgtgtcctagtcagtttttgctgcgcagcaaacaactttaagtctcagttacttacaactacaagcatttgcttttctcacttatggatc

SEQ ID NO: 202930 - DNA, 1000 bp, Homo Sapiens
ttatttgctattcatgtaaattagaattcattgttcattgtttgctacatgttaattttactaataacttttatagttgtatggtagttttctcttttgctttgtggtatttatttctaccaggcccaaatttcccagctcaaattctgcagatcaaatttttgtcaaggagatgtgagttttctgccactttttagttaatgcattttattctatgttgttttagccattgtttcattgtcttaaatcagttttgttttttatgaatttgacagagatctaattttttagatgatttcttggtacaaacagcattagtaggaaaaggtgtaggaacagggttgaaacactgcacttcattgtggaatacatactaatgtataaacatttgttgagcacctcctgttggttaggcttggtgagagaccctttatatacattgtcttctgtatgttaagctctattctgccaatcaggaaactgagagttagagaagttaagtcttcaaggtcacacagctagaggtgacaggggtggatctgaatccaagtccagctaattttgaaggtctttttttttttttttttcttacaggatgtttttcctttgtgtttgtaaggcattcttctaggcactgcagagaatatgaaacattaattactgctgacttcccaccagaagcctcttatttgatgtcactgtgtagctggtcagtgaccactatggtagcattcttggcacaaagcaggccctcaggaagtgctggtgcccaccgtcattctcgtgttaggttggttgtggctgtcactgtcttctttataggcaataagaaccttggcaattgcaaccatggttttactcatgtgatatcatttgatcatcagaattacctggtcagtagctagatgggcattttcagccccattatgtaaatgaagaaactgaggcccagattggtcaggtgactttcccaagatcagccaggtcactacagagctga

SEQ ID NO: 202931 - DNA, 1000 bp, Homo Sapiens
atttgtataaagtggagtagaataggtcaagaggggaaaaacaggtgatagaaaagaaaaaaaggtacagaaatagaattttttctaaaagaggatattcaatacaggtatcagcaaaatatgttctttagcatttaggtggcagctagaaacttaggatagtggcatgtaagaggatgtcaccttaaattttgtactgtaaagataataatggtcaacctagcaaggatacttagtaaggtatacatgcatgcacacaaatacatacatacaaatacatacaaatctgtttattaggacctagcagggagcttcttaactatttgctgcatgaggaagcaaatgtcatttagacagcctccaccaattttttttgctcccccacccaccccacagcttttaatttggattaattaaaaattcaatataccaatcacaaatatgaggatttacccaatcagcagaatatcaagaaagacaaaacttcctacattaaaaatataagcacataaaatcattttaaaattaaagttattacctattgataattatatccataacatctctggcactgaagtcgaagggcctgtaaccctctcatttaaaggcaaactctgtattgcaaccagcttctcctgtatctgagcaattaccgtgttactcttcggttgcttcacactcaataatcctgcccagttgcaactgtaacctacccaccaagcaatttctccttcctaatcaatatctactttgcaaactgaggacactttagaaatctcattcattcaatgcacatttaatgagagcacacactacgttcaacgtttgctttagtgaccagctttagactgctaatgttaggctgttatgatttcctataaattttattttgtgattatcatctgcttatttttaactttactcactaagtttagccaatttgtcaccctatttcctaaatgacttcatttatcccgcattcaccaccacacttgaattc

SEQ ID NO: 202932 - DNA, 1000 bp, Homo Sapiens
agtaaaggttcacagcagttaaattacattaacaaatattattagctactatgtaagccaaccaagtaaaatacttatattgtaggtaaaacaaatcattgggtgtttacaataatatttggatatctccatttttaaacacggttatcaaatatcctataattcttagtcaaatgagaaagattcagagaggatcacccgtacccccctcaaccaaatactcaaatttgtttagtaagctaattgttttctaatatgggcaagagtaaatatgaagaagctgaaccacactaagtatgagtttattgagtcaaggcagagtacatattttcttagtagacccaagtctattggcaaatccatattccacacttttcaaactacttttaaaatacagtacgagtgagacagtaccttggataacattctagtttaaacactggctcatgattctctaaataacataattgggaggatagacatttcacaggaaaaagaatccatctgttaacatcttatggtagttatgtaaatataaaaggctaaattaaaaagaaggaaaaagaaatcattaggattttaaacatattaaataactggataataattcatgttggaaaattctaagcaatataatatacacaataattttgtaaaagaccagactttactacatatgaaagaatctcaaattctatgaatatctaccattagttttacatgagaaataaccatctggagaagacttataatgatgttaaattcatttcttgcaaatatgagaacaattaacatttataaaaccaccacatatatattctagaactacaaacattatatattttaatttccttaataattgtaatttttccttctttgcataaactggctattggaaattttaaaatagatggtagatgccccacaccagtagaaaattaaccaaaaccgactcaaattagttcgatgtttctgtttttggcataacaatgctgaattc

SEQ ID NO: 202933 - DNA, 1000 bp, Homo Sapiens
ttctgcgtgcttgttctttgttaatcacttggcaagcgcttatttgaatattaaaaatttctttaatcatcaaaggcaggagcacagtctcatgaatattcatatttttccccctcctcagactggattctagttcattaccctgcagtaaaagccaaacagccatcaatcgccctcattacaggctctggcgttttgattggctgcctgctgcccagagctttttttaatttttttaattttttcccccttctcctatgagctgtcttgtacctgccaacaaccaaaaaaaagaaaaaaaaatcaacaatgcaagaataaatttctctggttggaaaacaactttgcaaacttgtcaaacagtccttgtggcttgctgctgccaccgctgtagcgtccaccagcgccacctccttccccccgctgtccttcccccaccaaaaaaagaaaaaagaaaaaaaaaagaagcccaagataaaagagagggggagagaaaaataaataaataaataaataaaaagggagaaacttgagcctcagagatgaatatttgtcaagagagttgacgtaagtttcatttgcataatgactttgtacttctgcattaataaaatttgcatatgaagccatgttaattactcctgatcatgctttttgcattcatgcatagtaattttctccgacttgtgagaattaatgtcttggcatggggggagggggcgcggggactgtcaggttcccttgccagtgtccctcactcacacgcgctgcctccctggctgtctccttccttgatctatgactcatttctgcactatcagtaggagttctcagcttaaaaaaatgtatcaattgaaaggcaccagtagggagaaaaatactcgtctcctgcacagtgtattccagaccacctctctccagctctgaacatggaatctgtaatcctcccatttgggaggggacgccccagaggcttcaggggtggggaaggctcgaattc

SEQ ID NO: 202934 - DNA, 1000 bp, Homo Sapiens
gcccacttcagattgccctcacagcttttatcagcctcctggcttctacgtttacttatatctttggtcttttacaaatgccttttatgtaaactttatgtaaagttgtatgcagagggtgagagccatagacgtgggcgatggccaaatcgcaatgggctttctgtgccacggaaggagtttgcacattatttagaaggcagtggggagacatgggtgagtttgaggccttacattagcatgtagtggatcactgtggctgcagaatgaaggagagggggcgaggcaggaacagaacctagttgggagttgctgcactttgggcaagagatggtaactcctgaaccagatctttggctgagacaatgagaggtgatgagagaggcgatgagccagatctttggctaaggcgattagtcagaggcaagaagtccaggctggaagtataaggtgatgagacagactcaagaaataggattttaactcagtaagacctagggattgccttggtgcaggaatgaggtagggcactgccttccctgcagccctctctgatggagtcttttcatttgcttccacctgccatatctccattgtccctccattacatgtaaaacctcactggctctgaggctcccagcatctgctgcactacactccctgtagagtgcttaagagtgtggcttcttggccgggcacagtagctcatgcctgtaatcccagcactttgggaagctgaggcgggtggatcacctggggtcaggagttcgagaccagcctggctaacatggtgaaaccccgtctctgctaaaaatacaaaaattagccaggcgtggtggtgcatgcctgtaatcccagctactccagaggctgaagcaggagaattgcttgagcccaggagggctcaagtggagattgcagtgagccaagatagctctactgcactctagcctgggtgacagaacaagactgtgtctcaaaaaaaaaaaaaaaaaaaaaa

SEQ ID NO: 202935 - DNA, 1000 bp, Homo Sapiens
cctgtttcactctttcctgtccctcgctcctgtcccttgggaccattccaagaaatcaattaactgtaaagaagccctcctttgagggccagggtagggagagtgggggtgaggagacaggctcagacggatccctcattagactttggttaagaggtaaaaccttcccacatacatccttccccatataacctttcattttaagggcttgggtggggtcttagacaccacagctactaccccttccccctaaatctcttcctctatttcccctttctcgctctctgacctttcctatctttgatctggctgagaccctccagagtcgctgaacaggcccgggaaccatttcttttgtaaatctatatatggcgatttggcacctgactctgaaatttcacatttattgtagctcagtgtctctgtagaagcttccatttttatatcctgttacacactgatcattccacccagagttcctcttccagaaaacgctgacacctagtttttttagtgtctgttacacaagttccagttttcctgtcatcccggtccatccctctggtcctgttctgagctgggttactaacgtcagtcttaaaatatgcccactccctgcccactgccagcgaagccaatgaggcacactccacaaaagacctgactggcaaatagtcgatgactacctctgcctgaatactatgcagctataaatgcagcctcatcttgtcctcgttttagcagccacatcatctggctacatagtaactgctgattcctatttcctaatgcctgccggacatttccactgggatgtcttcaggctcctcacattaataagcccacgatagctcattatgtcgtcccacagagctctgcctcatgtatttgtggtctcggagaatggagtcacccaatctcccaggctagccacctcagagactctcgtaaagactccagcccctccagcctccccatccaattccacctctccccgatc

SEQ ID NO: 202936 - DNA, 1000 bp, Homo Sapiens
atgatctcgatctcttgacctcatgatccaccctcggcctcccagagtgctgggattataggcgtgagccatcgccccagccctaaagtcatgttttctgttgtcaggaagtttaacatatagtttgggaggtgaatttgagataagatggtagttgacatgatagtgtgaaacctttcccttttttttttttccaataaatttctccattgaagcctgccttaggaaaaattcatgtcaataataaagcgggaggggaaaagcatttcccagaaccccacatgagaactaccataaagctgggaatagaattaaggagtaacattattagctgataatggactgaatgagaatggtatagtgagaacctctgttttacctctgtgtgtcagagggcccagaatccttggtgtagtaatgatggattgtagaaccttccccaaatggcacagttgaaacttgatccaggaagcccaagtcattgccgttaagactctaccatattaggatgggcaggagaacctctcctagctgtatagatccggagttggcaaactactgcctgtgggctctattttataaataaagttttgttggaatgcagccacagtcatttaagtattttttgtgcatgcttttgcaatacaatgacggttgagtagttgtgatagagactgacccacaaagcctgaaatatttattatctgactttgtatagaaagagtttgctgacttctgatattgagcaagccctaactaggagaatattgtgggaacagcgtagtggccttagtgaaccacagtcttaatttctatttgactctttgcccttggtgctctaagagcctgaggaataaggttaataaggtgggggacttcagtgaaaattacttttccgttgatctggacttgagtaaatcctttgaatggctgggcaggaagttttgtattggttacctctttcacgtgtcaactgtcacagcagagatgtggaatttgc

SEQ ID NO: 202937 - DNA, 1000 bp, Homo Sapiens
cctttttttttgagacagagtcttgctcagtcgcccaggctggagtgcagtggcatgacttcggctcaccacaacctctgcctcccgggttcaagtggttctccttcctcagcctccctatagtccctgattccttctattttttttttttttttttgagacggagtctcgctcttgttgcccaggctggagtgcaatggtgcaatctcaggtcatggcaaccttcacttcccaggttcaagcaattctcctgcctcagcctctcgagtagctgggattacaggcatgcgcctccacgcctggctaattttgttatttttagtagagacagggtttctccatgttggtcaggctggtctcgaactcacgacctcaggtgatccacccacttcggcctcccaaagtgctgggattacaggcgtgagccaccacgtctggcttctttttctttttttcccccgagacggagtcttgctctgttgcccaggctggagtgcagtggcgcgatctcagctcactgcaacctccgtctcccaggttcaagcaattcttctgcctcagcctcctgagtagctgggattacaggtgcttgccagcacgcctggctaatttttgtatttttagtagagacggggtttcactatgttggccaggctggtcttgaactcctgacctcctaatccacctgccttggcctccccaaatcctgggattacaggcatgagccatcgtgcccagcccctgattccttctttttttttctttctttttttttttagacggagtctcgctctgtcgcccaggctggagtgcagtggcgcgatcttggcttactgcaagctccgcctcccgggttcacgccattctcctgcctcagcctcctgagtagctgggactacaggggcccgccaccatgcccggctaataataatgttgtatttttagtagagatggggtttcactgtgttagccagggtggtctcgatctgacctcgtgatc

SEQ ID NO: 202938 - DNA, 1000 bp, Homo Sapiens
tcacctgggctggagtgcagtggcatgatctcggatcactgcaacctccacctcctgggttcaagcaattctcctgcctcagcctcttgagtaactgggattacaggcacccaccacttcgcccagctaattttttgcatatttagtagagacggggtttcaccatgttggccaggctggtcttgaactcctgacctcgtgattcgccaacctcggcctcccaaagtgttgagattacagccgtgagccactgcgcctggccatagttcaattcttacattaagttaaactagcctgccttcttccatctgaaatgagtagataaaattactaaggaattttaaatataccaatctgggcagtaaccttaaattctattaaatacaaattttcagagagtgtacagaggaatatgtaccatgaggatggtagtttattgttggcagtttgttttattcttttccttcccagacttccaagcatgaattcagcaactctgtaaagctcatcattaggaggctaccaagaagaataggatagtcctcccacccatgaggagctaacagttctgcacaaatctcctacctcctttaatttctttgactttatgagttatttattcttatcctcttattatgagaatccagcagggttgatttgatttcattacttgtacctcgggctctagctatgcagtgttgagcaaacccatttggactgaatccttaagtactgcagttacacttgtgaatgaactgagacagtgagattcttaaacttgtgtgggaggaagttatgctaagttaatggaagcgttgcgttgtgttaatgtaattttccctgctatttttacagttttgatatgtgtccaaataactgctcaggccgaggagagtgtaagatcagtaatagcagcgatactgttgaatgtgaatgttctgaaaactggaaaggtgaagcatgtgacattcctcactgtacagacaactgtggttttcct

SEQ ID NO: 202939 - DNA, 1000 bp, Homo Sapiens
gcaggatcttcccactcagacggtccagcatcaggttggatgggtgtctttgagaaacagaagacagatcagggagggatcaacagagataacggatgaaaaaatcaataagtacgtgatactgtaagctaggagttggcaaacgatagccctcagccaatccagcccctccacctccacttctgcaagtccagttttactggaacacacagcacgctcccttgtttaagtactgttccaggctgcttccatgctacgacagcagagctgactagttgtgacagagaccaaagggcccacaaagcctaaaacgacctattaactggtcctttacagaaacagtttgccaactcctgctgaaatgtgggcttatgtgtgaatcacaggttgtcccactgtactgagatactgtgcttttctgaggtctttggtgacctaataagtcatttctggcagcactggcaccttctggtgacaaggctctatcatttttactgagcagccgtaacagggtctcatctccttaagtccctgagccaatcccggcaaccacctggcttttatcaacagatattctgctagacttttaaaaacaaaaatctactatttttgtggggtaaaattatttttactctcaaatagttgcatgagacatgattccaggagaaaaacagtagacatcagagaaccagtcttttttacattcttgtgagtccgtttctgaacattcgtaaattacatgttcagtcagtacacttggacaaaacttattatgcaaaaatatcagaaggatctactttggttggtttcaattacagaaataaaatgatttatcttagcacagtggtgactgacaaatgtttcttgaatcaataaaatcaatatgatttagtatttttgtttttttctttgagacagagtcttactctgttgaccaggctggaacacagtggtgcaatcacggctcactacagctttgaccttctggacttaagtgatc

SEQ ID NO: 202940 - DNA, 1000 bp, Homo Sapiens
atcctcagaaaatccccaaatatttggaaactatgtaacatgcttccaaacaaaatatggataaaaaataaatcaaaagggaaatcagaatgtattttgaactgaatgaaaattaaaacacaacataccagaatttgtggagacaacaaactaggaatagaagagaattgctccaacctgataaatagcatctatggactactcatagctagcaacatacttaatgacaaaaaactacaaaatttccccctaagatcaggcacaggccaggcacagtggctgatacctataatcccagtgctttgggggctgaggagggaggattgcttgaggtctagagtttgagaccagcctgggcagcataagtgagaccctgtctcctaaaaactaaaataagaaaaaaaacaatcaggaaaagtccaggcacggtggctcatacctgtaatcccagcactttaggaggcagaggcaggcagatcacgaggtcaggagatcgagaccatcctggctaacatggtgaaaccccacctctagtaaaaatacaaaaaaaaaaaaaaaaattagccaggcgtgatggcgggcacctgtcgtcccagctacttgggaggctgaggcgcgagaatggcatgaacccgggaggcggagcttgcagtgagccgagattgcgccactgcactccagcctgggcgacagagggagactccgtctcaaaaaaaaaaaaaaaaaaaaaaaaaaaaaatcaggaacaagacaaagatgcttttctccatttctgttcaacattgtgctgaatgttctggtgagggcaatcaggcaagaaaatgaaataaaagacattcagactggaaaggaagatgtaaaactattgatattttattgatatttacaggtgacatgatcttgtatacagcaaatcctaaataatccactaaaaaatttctagaactaataagcaagttcagcaaggtggcaggataaaagaccaatatacaaaaaaaat

SEQ ID NO: 202941 - DNA, 1000 bp, Homo Sapiens
gtcttgaacttctgggctcaagcgatccacccgcctgagcctcccaaagtgctgagattacaagcatgagccactgcccccagccttttttgagattttaggccactcatcagcaagcattcaaagattgtagaagcaaaactcacagacttatacaagcatcacttaagaatcataaaactgtcactttaagccttagagccctctctataccttcattcttaattctgtccagattaattaacatcaggtcacactatctgcatatgcttagagcccaaaacaaaatattttgtacacatacaaaatacaagacccgcttttctaacaggatttcaaatttagctttttaaacttgacaaagttttaggtgtaagtttttttcctattttatccataatatctatacattatatttttcattaaattttcagtttaagtcttgaaatatttactgtagatataaaacttatgcatggaacttgcatggtggtgcatgccggtggtcccagctattcaggtgactaaagcaggaggatcacttgaggtcaagagtttgaggttacagtgagctatgatcatgccactgcaatccagtctgggcaagaaagctagatcctgtctctaaaaaaaataataataaagccataagagaaaagattgataagttcaaatgcaaaaaaaaatcaattctgcaaagcaaaaaacattgtaagtcaaaaaaacaacaaactaagaaaaaaatacttgcaatcatatcagtgataaaagaacaaatctccctatatagaatgatatagaaaaaaatatgcataggtatgtgtatgtatatgtgcttatacaggcacataaaataaaaagatcaatttggacaaatgtataaaaatggacacagaatatgatcagaaaattcacagaaaaagaaatacaaacgaacattcaacatatgaaaagatgtttaccctcacacaaaagaagcaaaaaacaatttttcactcat

SEQ ID NO: 202942 - DNA, 1000 bp, Homo Sapiens
tttagtgtctggacacttttgaagtggttttgtccgttttttttcataaaatactgccactgctccattactgtttgtgaggaagaaagtataataacacattgttttctctgcccccgccaccaccccaccatggttcctgtttttatatatatatatgtatatatgtgtatatatatgtgtgtatattttttttttattatttttttttctgagacggagtcttgctttgtcacccaggctggagtgcagtggtgcgatcttggctcactgcaacctccacctcctgggttcaagcaattctcctgcctcagcctcccaagcagctgggactacagatgcgtgccattatgcttggctaattttttttatttttagtagagacagggttttgccatgttggccaggctggtctccaactcctggcctcaagtgatccgcccgccttggcctcccaaggtgctgggattacaggcttgagccaccatgcccggcctcttgtttctatattaaagagacatttacctaactagataaagacctgctatgccattaacttaacttttttttttttttttttttttagagacagggtctcactctgttactcaggctagaggtgagtggcacgatcacagctaacctcagccttgacctacctggcttaagtgatcctcccacctcagcctcccaagtagctgggaccataggtgcagcgtaagccaccacatcatttagcagaaacggggtcttagtatgttgcccaggctgttcttgaactcctaggctcaagccatccaaccacccaatctctcaaagtgctgggattacaggtgtgagccaccacacccatctcacaccattaactctttcagtcaatctgcattaagcatttagtatgtacttggtactatggaaagcatcaaagaaattgacactacaggttctaaaaactttccattgaggaattaagacttagtcggtctctagctgtgtgatc

SEQ ID NO: 202943 - DNA, 1000 bp, Homo Sapiens
ggtagtacatgcctgtaatcccagatactctggaggctgaggcaggagaatcgcttgaacccaggagttggaggctgcagtgagccgaggtcacgccattgcacttcagcctgggcaacaagagcaaaactctgtctcaaaaaataaataaataaataaaaataaaaatacaaaaattagcgaggtgtggtggcacgcacctgtaatcccggctactcaggaggatgaggcaggagaatcgcttgaacctgggaggcagaggttgcagtgagccgagatcatgcccctacactctagcctgggcgacagggtgagactccatctcaaaataaataaataaattaattaattaaaaaaaaaaaagggggctggatgtggtggtggctaatgcctataatcccaccactttgggagactaaggcaggaggatcgcttgagctcaggagttcaagaccagcctgagcaacatcatctatactaaaaaaaaaaaaaaaaaaaaaaaaaaaaaaattagcctggcgtggtggtacacatctgtagtcccagctactcaggaggatcacctgagccaaggaggtcaaggctgcagtgagctgagatctggctactgcactccagcctaggtgagatcaagactctgtctcaaaaaacagaaaaaagaaaaaaaaatgggccaggagcagtggttcacacctgtaatcccagcactttgggagactgaggcaggtggatcacctgaggtcagaagtttgagaccagcctagtcaacatggcgaaaccccgtctctactaaaaatacaaaaattagctgggtgtggtagcaggctcctgtaatcccagctactcaggaagatgaggcaggagaatcgcttgaaccctggaggcagaagttgtagtaagccaagattacggcactgcactccagcctgggtgacacagcaagactcccccttgggaaaaaaaaaaagaattaacagtatcaactttgcagaacaggatc

SEQ ID NO: 202944 - DNA, 1000 bp, Homo Sapiens
taattatatagtatactattctatactaatataatgtataaatatgtaatgtatattactatatattcaattttattaatatatgatacattaatataatgtatactatcataattatacaatagaattatattattatataattatgtaatataaaaatgcctataattattatatgtaatttttatatatatattattcttccaggtacttatcctcattcttttttattatattaaaaaatgatatataatatatatcattcataacaccgtatgatatagtcattatatcatcacatgatagagtcattatatgaatgctacatattcataatatatacttatataattgcatgtattatggtattatatatgtaagatatgatatatatgattatattatatatgattaatatgtaatatatcatatcagataatatactaatatataaggttatattcatatataattggtaatatataatatatattatataatatagaatacaaatatataaaatatataactgtatatatcagatattaagtatatatcagatatatgttatatatttatatattacatatattaatatgtaatatctatatattatactacaaattaatataacattaattatatcagatgatatattatatgttatatattattttacaatatataatatatgtcatattttatattattttacaatatataatatatgtcatattttatattattttacaatatataatatatgtcatattatatattatataatgacataatatatgtattataataatgtattataatagtatatgttatatattaatatatcatatataactatatattaatatacgttaattatatcagatgatatagatgttatatatttctatattatttcatattattttataatatattatatattaaatatataaaataaaataacaattcatgacagaaaaaaagtacaggtttgatc

SEQ ID NO: 202945 - DNA, 1000 bp, Homo Sapiens
cagcataatatcccctcctctcaggatccttaatttaattacgcctgcaaagtcccacctatcatgtaaggtactgtactcacaggtcccagcaattaggacatggaactcctttggagccattttttggcctacaagaagcactgtaagttaattgtaatatattgcatggtgccctttacaagtgttcactggttaaatgtaaactttaaaaaattcacacatttttataatttgtgttctttttttaattttttaatatttttggaggctcttttgccttctgagaggtcctccttgaagcaacatgatttcttatctcaataatggaagaattgtttgttacaccaaaccagtggttctcaatcttggctacccattagagtcaacttttttgttgagttcctatgttaaggctgcacaccaaattaattaaatcaggatccctgtggaatggaccagaattcaatatttttaaaaggtactgaagtgattccagtgggtgtctgaaactgagggccacttcattcagtttatccttcctctgcttacctaacctgcttttctcttcttctactccttccctatcttctcttctggccccttttttcctgttatctgtaagtttgtctctctcccttatatactccaatacaatatattggagtatattattttatactccaatacaatatattggagtatattattttatactccaataagtataaagtatattttattttaattatgtcatattcaataagaaaaaatgtatagatgctctcaaaacaatcaatatggtatggcttagtgtgtatagacagaactgttctgggaacaaaataatgcttcactttaccaagaagcttcatgtctgcaaattccacacctctctgatcctgttttctcctccgtagaatgaagcgtttagaaaaaaaattctctatgttctcttctaatttataaactccacaattctaaatatagaaaaaagatc

SEQ ID NO: 202946 - DNA, 1000 bp, Homo Sapiens
gcccagcctctgggagctttaaaaaaaaaaaataaaaagcccaggccctaccccggggatccacattctatgcctgactgaggtgtgtgtatttaagaattgcccagggggttgtaatgagaagccagggtcggaaagccatccagtgagcccagtgtccttatctataagacaacatctgctaaagctcatagagctgctgatgggccagttgccacatctcaggggcctaacagggttgggcacacaattggtgctccagaaatagggaagaacaaatgaagaatgacgaagtccagccctctcactttccagatgggaaaacggaggcccaggagggtaatgtcactggcagaggccagacaacaaaagtcaatggaaatactaagatatgaatttctggaatctggcatacagtaggcactcaataaatgccaaggtgacagtgagccccaagtccagctgtgtgactgggactatatttctaccctcttcccctccagcccagacaaggctgcagatggctacaagctccaacggggtcagcagagccccagaaggggtagccggcaccaaccccctgaaggctgctgggcgagagggtggaggggtggggttgtggggggatggtggtgagaggatggaggggaacgctgtcccccggaggtgcccccagtcctcaccttcgcactggtaattactccatagggagagaactctttcctcagtttgtcgtcatcaatggagtcgtccagattcttcacatacaagttcacaccctgggatggaagggaaactgctggatgtccccttctcctccaagccccaactgccttggggagatcagggaactgacgcaggtacaaggggcatggggagccccaccagcccagcctcctgctccccgtctccctcagcacccaggtacccccatccctcagcgtgcccatcacatgcaagctgtagcccccacatcccaaattcccctgcagttctcaca

SEQ ID NO: 202947 - DNA, 1000 bp, Homo Sapiens
agaatcttgccggtcttgctcaaaaatcatcctcagtgtctcccatatagtcaaggctcaatgactacttattgaaaaatgaaaaaaatcaatagctatttgtgggatgaatgaattaatggagtcatctagtttatttgttgtaacttccgctagactgtaagcccctgagggcgaggctcttgccagacttgttcagtgatttcccccttcctaaatgacaattatttgttgcatcaatggatgaaagaatgactaagaattgctggggcaggaggaggtggcatgtggtttcattcagagatgagccttgtccagggaacagactgcctggcttagctttcagaatatggcttcccaccctgctctcctgcactctccacagccgtctacctcctaacagaacaatttgccattttcaatgaaggttatggaggaaaatctttacatctagttacttagaagcttgttagaaggaccacctcattcttgttcttagcttgtttgattgttaaagacaaaaagccaggttaatttaggagggaggataatttttcaaaataacataagtcctttatacaggaaaacaaaaattacattagacaggaaggaaataatatggttgggtagttgctaagtgcaatttgtggtacctgagattttctttttttaaacctacagtacttaagagtgatttcttggggaggtaatgctttaagggctactgagagtacctcagccttgactaagatgcagttaacgtcgctgggtgttaaaaacactggttcaagaaccatcagcacagaacagcctgtccctgctattcctggagttccatgaggctgttcaccattcagcattcctgttctgtttattttagagaacattattctgctctcaagttcaaaatttctgtgttttagtcatgaaaattaaatgacacctatctcccgtgcccccaacacacatactatatcagtctaattttacttactagatc

SEQ ID NO: 202948 - DNA, 1000 bp, Homo Sapiens
acttacacacttaaggttctttcatgtcttttcatggcttcataactcatttctttttagtaccaaataatattccattgactgcatgtaccaaaatttatccattcacctactgaaggacatcttggttgcttccaagtttttgcagttatgaatagagctgctataaacatcatgtgcaggtttttgtgtgaacttaagttttcagctcgcttgggaaaatactgaggagcagatggttaggtcatttggtaagagtatgtttagtttcacaagaaaatgccaaactgtcttccaaagtggctgtactattttgcattcccaccggcaaggaatgagaatatctgttgttccacatccttaccagcatttggtgttatcagtgttctggattttgccattctaataggtgtagagtggtatcttgttgttttaatttgcaattccctaatgacatatgatgttgagcatcttttcatattcttatttgccatcatctttggtgaggtgtctgttcagggttttttgcccattttttattgtgtggttcattttcttattgttgagtttaagagttctttgtgtatttggcttaatagtcctttaccagatatgtcttttgcaaatattttctcccagtgtgttgtcttctcattctcttgatgtgccttttgcagagcagaagtttttaattttaatgaagtccagattatcaattatttcttttgtggatcatgccttttgtgttatatctgaaaagtaatcatatagctgggcttggtggctcacacctgtaatcccagcactttggaaggctgaggcaagaggatcacttgagcccaagagtttggctgcagtgagccataatcacaccatgatcacgcccaaggaatgcttcagtgagccatgatcatgccctccaacaaataaataaaataattaatttatttagagactctgtctctaaattaaaattggtattgcattgaatctttagatc

SEQ ID NO: 202949 - DNA, 1000 bp, Homo Sapiens
atattgttatcattgctttagagacaggcccaggcctcccagggtgcgataaagtcccaggggccttggatagcacaaaggaccctcttatagtcagtgatcctcagtacaagtcagttactgaagaaatacataatgtcccatgcctatactacccttttaagaggaataattactacatattatatcaggtaaatttcactgctatttctttctcaaatttttttttcaaattaagaatacaaatgaaatctagttaagatagctgctgatatagagtgaatgtctgtgtcctgtcaaaatttatatgttgaaattccaactcccaatgtgatggtatcaggaggtaagcgcctttgggaggcgattgtcataagggtggagccctcatgaatgggttagcacccttttataaaagaggcttttgagagctcccttgccccttctaccatgtgaggttacaaggagaagatggctgtttatgagctgggaagtgggccctcaccagacaccaaatctgttggaaattggatctaagatttcacagccttccaaactgtgagaagtaagtttctgttgtttataagccacccagtctatggtatttttattattgcaacctgaacaaactaaaataggtgttaagaagccatgcttggctgtcctcaatgctcacaaaaggcacgaagtatgcctaaattaccaacaaatcctgtcatcactcctttcaaaatatatccagaatctgactgattctttccccattttctgctaccagatatcttggtccaagccaccatcatctcctaccaggattatgagagtctcctaaaaagtctccctgactccaccgttgccccactagtctactccacacaataatgccagtgatcacaataaaacatgagtcaaatcaagtcactcctctgctcaatatcctcaactagcttctcctatcacttgaagtgaaagtcaagtccttacaatggcttagaagatc

SEQ ID NO: 202950 - DNA, 1000 bp, Homo Sapiens
accttgtaaatacctaatattctaccatcctaaaggggttcagaaaggagatcaatgaacatcggtcttccacatatgccctgtgaaactgttgaggctgagaaatgccctggccattttcaggatctaatgggcagaacatgcatgacctggacattctattcctcagttgcctgaaaaacagtgacccatactgtgagctgacattttctgatttaatttcaaatagtgccacccctgggccagcatgaagatttgcatttttgaagccaaatggtgagactctggtctgagaactctctaaccaagatatccacctgattccaaagcattcggaggccctgagaaaagcaattcccagaatccactgatgcttagcaatgcttcaactccacctttgggtttcatatccccagtgtcaaagcttctcctcaaaagggtccctttggccctcattctggcagagcccccttgatggtaagtggttcagatcaggcgttattcttgagtccttcaggatggatgcataatctgggctgatattgcttagtgagtaggaggagggttgaagtctgggtccctcttagcagaggagatttaaaaaatcttggatctatcataaaatcaattttctttttccctttctggctttatatttgatttcaggtttcctttagttttttccccccatttaaactcattttacacatttctttctgctttttacttgaggcctttacctctgattatagtcctccaccagaatgtttgcttaagccaaagtgccagctcagttatggcttattcaaaataccaaccatggtgcccagggctgtttagtgtcccccagtggacacagtatactctagaacacaaatattagggcaccagtaaaaagctggagtggtctgagcaacgacttctaccctgtttctctctctcacttttacacgattagagtcttctccataggtctatggttgtgtctttcaaagaattc

SEQ ID NO: 202951 - DNA, 1000 bp, Homo Sapiens
aataattttaaagaataaaaatggtataacaacattcagttttataaataacaaattatttcaaaatttaatgttttcatgaatcttattccttcttactacaaagcttctcaagaaaggttataactaaaaatctgtctaacagattttaactaatacttcttctaaacctattttatgatccttgttcaaataaaatctctatgtatgctttttattttgttgaatagtggaaaatgttttcttttttgctttttttctgaccatggaatactttatacaaatgggattactctgcttgaagggaggatgggaagttggaatacctcctgctgaagtttaccatcatggaccaaaatatgaaaaacttttctggaccaacacttttcaaacactgcacaatagcattgttgtgaattaaaaaaaaaaaaattgtggccaggtgagatggctcacacctgtaatctctgcactttgggaggctgaggcaggtggatcacttgagcccaggagtttgagaccagcttgggcaacatagcaaatccctatctctacagaaaaatacaaaaattagctgggcatggtggcgcatgcttgtggtcccagctacttttgggaggctgaggtgggaggatcacctcctagaggtccagactgaagtgagtcgagatggtgccaagaccccatctcaaagccgagaccctatctcaaaaaaaaaaaaaaaacaacaaaaacaaaaacaaaaaagcgaatgattagaggaagaattcagaccaaaagggccccttttcacagtttttccatatctactagcttaaagtcataagggacattcattacaaaatgggagatggcaacacaagcccagccaacatagattagtaaaccccttatgtactggaaatactgaccatcttctccatacacgtgtctcatgaatggaaaaataccatgtgttatggacttcacatatacgcatttttcatattttcacaagctt

SEQ ID NO: 202952 - DNA, 1000 bp, Homo Sapiens
acttttaaaatgatttgaacacttttgaatgactttattttaaaatttcattaacattgaatagacatttatgatttctttaagagtaagtggtcctaaagtgaactttctattattaactttatatttaatatattgctcatcattaatgtcttattttgaccctagctgataaagcttttcgagacatgaaggtgctcaagatgagtcagtctatcattgtatctggagaatcaggagccggcaaaacagaaaatacaaaatttgttctaaggtgagtattcagctaacttgaagtatttgagtaggttgatcttttttttccccccttgagatagggtcttactgtgtcacccagggtggaatgcagtgtcaccaccacagctcactgtagccttgacctcctgggctcaagccactgttccacctcattctcccgaatggctgggactataggcacatgccaccatgccctgctaatcttttactttttttgtagagatgaagtcttactgtgttgcctaggctggtttcgaatttctgggctgggcttgagcaaccctcctgccttggcctcccaaaatgctgggattataggcatgaaccaccatgcttggcaaccaggttgacttttttctggtaaaaaaatacttaagtaaaagttgtcaaccatttctaagtgtatagcatagtagcattaagtatattcacgttgttgtgcagccaatctgtaccatctccagaactttcatcttggaaaactaaaacttgacccatgcaacaacaactccatttatccactcacctagcaaccaccattctactttccagtttttctgtgaatttaactactttagctatttctcatgtaagtgaaattacacagtatttgtctttctgtgactggcctattttatttaactcaacttaagattcatccatgttgtagtatgtgtcagaatttccttccttttatttttattttttagtattttggatc

SEQ ID NO: 202953 - DNA, 1000 bp, Homo Sapiens
gctgataccaatgattacccaacagagacagcctgacgctgttgaaacccttggtcctatccagttttgcaaacgctaccccattccccgtccccttcactttcaggaagcacacgcccttctcaccaccttgcgcacgacagaaccacaaggccaccgtgtcaggggagctcctgctttacagaaaaaaaactaacattctgtccccaggcactgagtccccggccccacccccgtaggcagcacaagcgctgtgcaccctccgtgcctggagcatcctcgccctgcacacttggtgcatctgcgccccacccctccctggccctactgctcgcaggcaccggggcctttgaaattaccttcaggaaaggcacaaggtaaggttgaggtgaagaattaagttctcggtataacctgcttgtgaaatcttctgcttctatttttccatccttaaaaataaaatccatgttgaaattctggtgaatgagattccacacacacttctgaatcccgcatcactctggtctcgtattttacggctgattccgccccgagtttcactggacagaggagatgggaaagtctgcgtgctacacctttcacaggtacatgtgtgacaggcgctcaccctggacactgcagtgcagccagctgcggaccacgtctcctcctgggagggtcacctgtctacttctcgtctttttctaagtctcttactcaatgccagtctttactcagtgcttaccaggcacctactcggtgtcaggcattttgctaggaggcagatcagcctaaaagtaactccattatcaaagccagcactgcaagtgcggtgctgcaggaggtcacagcgtgccaggggccacacagacaggatccacacagtcagggcatccgcgccttcaggagcagatgacagctgtgctcacccctgcaagcggccagggtgcccagagtctacagtcagacaaaagggagcccagagcaagagggccagatc

SEQ ID NO: 202954 - DNA, 1000 bp, Homo Sapiens
tggcatttttagaaatgagagacagggcagctgagtaagaaacttactgagcaatttcaaccgttgattagcagcactaaggggacaagtggtgaaccgagcagcacctagagcaccacccaatgcgaaaaagagacaagaaatttccaacccgacggggaggtttcaaaaggaggagcaggagggcagagccggagaatgaatgggggaggggcgatgcctggggagctggggctgagaagttcccaaaattgttcaaagatctgaatcttcagattcaacagcacagtgaggtctaagaaaaatcagcccacaccagacgcacagcagagctgcgggacattaaggatgagagaatctcagagcaagcaggcggaaagccaggtatcctccaaaaaaaccagcacctggaccgaggccacctcccactccagcaacaagaggcagagggcaggagagtggtggcctcaacctgttgagagaaaataaccgtccatgagaagttctcatcccagcgtggggaggaatgcctcggtggctgagagcacagcgaccacctaaacccacctctgcacgcgccctccagaaaccacatggatcaatgagagaaacaggcgggctgcagaaatcccatgccttcagcatgactagaggacacagaaccctccagacttaaaattaaccataaggtgaaaagtaaacaccaacctccagcatgcattctccatgcccgccttcacagagagctacgaaggtctgaaaaactgcagggaagagaggaaggagacgggaacaaagaccctaagactgacctaaaatcagctccccaaagagaacatcacagcctccacaagaaaataccaagtcccagtgagtcagtgctgatctcagggaggggccatcagagcccacgcgcccctgggggcagcctcaggaagatgcctcgtgggagaagaggaggcccctctggagcctgggcagcaaggggggaatgaggatc

SEQ ID NO: 202955 - DNA, 1000 bp, Homo Sapiens
acgccagcttgggcaaccgagtgagactccatctcaattaaaaaaaaaaaaaaaaaaaaaccaaaacagaagtaaaagaacaagtttgttcctttgtatataatgtaacttataaaaagtttccacatctggttatatttataaccattttaaattcttttaatttcttaatctagttgtcattaattatgatttgtttgtagaacatagaaaacaaaggaaagtaaaccttcactataatacacaggacccgaagatctaacaataaagtgttattttaagattttgtttgtcttttcgaaactaaaattctgttggtagaaccagatttttgaagtacctaataattttcaaggactcaaaaaaacctaatcatgctaaaattcaggattaaacattgtattcattaacttttcctaattgttaataaattaattaatcataaattccattaacattatatactcttattcaaaaatgtactttttggtaaaggtaattggtagtccataatctatcagccttttcataaaaactcaaagatactcactgagccatctaaacttaagtttcatgtagtgtctggcacagacagtatatgtttcagcttaaaggcattcatatttttaaaagctacctctagtgctatttctaagaatggcaagcaggacatactgacagatttcactgctattatgatgcaattcacaatataaatgtaaattacagtctaaactagtaaagaggggaatcaattagtgcttaatctatttgaagttctttctaaaagtctctaagaatgaaacatacctcccttctgttgctcatttgatattggcatttctatgtggcagatggtgaccttatccctgtgcttcagctaaaaagatttttattaaggctaaacaagtgtgaacagtgctaatttcctgcagcaggcagatatgaataaacctctagaatgaacgtaagtaccctgcctcaccatatggttaagatc

SEQ ID NO: 202956 - DNA, 1000 bp, Homo Sapiens
ccgcccgggccctatggaagaacacacctgagcgccagctcgcccgcctttctcagcgcgccgtgggaccccgccccctcgtcgcggatgcggggggacggccgcgggttgcagaaccagcacccagcgcagcgcgagcagcactgcagcccgagctgttggggcggaggcggggacccagccgcggaagagcgcccccgcgcggcgcgggcggcaaggggcgctagcccaggtgaggcgctcgcgccgggagccccaggtgaggcagacacgccccggctccccaccccgggggcgcgcggcggccgtgggacagcgacacctactggatgctctgggcaccgcgactcccgacactgcatcccaggctctaagatgggacccagagccgggtcgggcttccacagcgcctggggtgcagcggccattgtcgcctgcggagttgttggccgctcttggcctgtgacaggctggcagggtgagtcgctgcttagccacgagccccgcctggagaaggatgggagaggcacatcccggggctgggccgcccagcaattaggactcttccactctgatctctgggtggcttgggcaatgtcatgtgctggtggcttctgttcctgttcgtgaacacgggtggcaactccgccaactcgtctcctctctcaagagtctgaataattaatttgtactcacatctcataaaacacaaaaggattaaaaaaattaaaaacgccagaagggaattaggcatattccccaattccccaagagcttaatagatccctcgcagtaaattaaatgccagtcccacaaggtatttacatcatctgcattactgttgatgactttcttgtcttaacttcacagtcgtggctaaatagcaaaggaaattaatacttaagcaaagtaagtaaacgaacaattattttgggcatcattagagcaaagaaagtgcaagaactaagcactacttaaaaattcaatgcagtacaagatc

SEQ ID NO: 202957 - DNA, 1000 bp, Homo Sapiens
aatcagaggagataacatatatggaagataaagtgaataaaagtactttgaaaaactataaagcattccacaaatatgagatgatggtattatccatccataaataggtagatatatctctattttatagtttcagattaaacaaaactgatatcaatagtaaaagtcattttacttatcaattttctgtttttttttttagttttaaagatattattggccgggagtggtggctcacacctgtaatcccagcactttgggagattgaggtgggtggatcacttgaggtcaggagttcaacaccagcctggccaacatagtgaaaccgtctctactaaaaacacaaaaattagccaggcatggtggcgcatgcctgtaatcgcagccactcgggaggctgaggcatgaggtttgcttgaacctgggagatggaggttgcagtgagccaagatggtgccattacactccagcctgggtgacagagcaagactccatctcaaaaaaaaaaagacaacaaagatattattaatcactgaacactattttctctcaattataagtaattgaaaattctaatcaaccttagattaacctcaaatgtgcgaaaaagtgaacaccaaaactcattgtgattttaagttctaatcatacacataaaagttttaataaactaataattataaaatgaggccgggtacagtggctcacgcctataatcccagcactttgggaggctgaggcagacagatcacaaggtcaagagactgagaccatcctggccaacatggtgaaaccccatctctactaaaaatacaaaaattagctgggtgtggtggcacatacctgtagtcccagctactcaggaggctgaggcaggagaatcacttgaacccaggaggtggagattgcagtgagccgaggttacaccactgcactccagcctggcaacagaacaagactccatttcaaaaaaagacaaaatgagaacaaggtcttgatc

SEQ ID NO: 202958 - DNA, 1000 bp, Homo Sapiens
tttattccagacactgctgcagtaactgttcttgtcttttttgcactcatgctagtggttatgtaggatagatttctacaagtggcacttttggcttgcatattttacattttaggtggaaactgacctttagaataatgatataaaaatcatctataattggccggacacaatggctgacgcatataatcccagcactttgggaggccaaggtgggcagatcacttgaggtcaggagttggagaccagcctgggcaacatggtgaaactctgtctctactaaaaatacgaaaagtagccggaagccgtgcatctgtaattccagctgctcaggaggctgaggcactagaatcgcttgaacccgggaggcgggggttgcagtgatccgagaccaggccagtgcactccagcctgggcaacagagcaagactctgtctcaaaataaataaataaaattaaaaaataatcacatataattctcctcgtccagtttcactgtgccacataactattttcatctttgtatgttctccttcctcttttgttcacatatgcatattttccaagataatgcatgctgagttttggggggatttttttctttttttgttgttttaatatccaaaaacatttaaccttgttgtcatatcatctttgtgattaactacttagtgactacataatactcggtgaaatagttgtaccataattggccaaatatcttacctgtgtacatttgggttgctcccatttctttttggtttgtttgttttagagatggagtctcactctgttgcccagactggagttcagtggctcaatctcagctcactgcaacctctgcctcccaggttcaagtgattttcctgcctcagcctcctgagtagctgggattaacaggtgtgcatcatgacgcccagctaatttttgtattttttagtagaaacagggtttcgccatgttggccaggctggtctcaaactcctgacctcaggtgatc

SEQ ID NO: 202959 - DNA, 1000 bp, Homo Sapiens
attaaaagtatcttaagcaagtagtaattgatagaagctttcaattacccatctagtttgtataaacattgaaagttttattttgtagttcctagaatatgtaactatatgatatgacataatagcttactgtagttccattgctcaagcttcactaagaaactgggatgattcaacaaggtaattctaatttcagtctttcggacctatttattaactttcaacaaaaaggtgaaagatttaaaaattttaaaaatttacctaagtaaagttgatctttagaaataatgttttccaagctgcttttgaagacagttaagtaggcagctctacaattcatataaaatatttcctcttcagttagtggaaatttctttgttcgaggactctctgaaggtgttgatttctgactggagaaagttgcatcgcttcgtggactgatcgccattctattggaaaataatttaaaaatgtgtttgtcaatgtgagtcactaaaacacaaatgtcaccatgtctttcaaatacagggaggagaatcaagattttatacgtagaagaaaatttataacatatatgaaaagatcaagatattaaaagttttatatgtggaagtaaaagacgaatactatagttgtatatggacgtattatatattaaacaagaataagcctttggcagttaatttctaattttagatatatacatatgtatatatataattgttcaaatatgtgataatagccaaaagaacaaagatatacacaagagaagaatcactgaacaaaggaagagcacacatctattctctcaaaatacgaaagtcagatgacagtcttcatcaggtttttaagaggagcaaatcagttaatacatgtgaagcatatacaatattgcttgacacgtagtaagtgctaaataaactgcagataatgagaaactccagaataatgagaatcgggatatgagtggtagttgacacccatcttccacagcaggatc

SEQ ID NO: 202960 - DNA, 1000 bp, Homo Sapiens
gcatacttgaacaggttctttataaaatgtatcacatccattaactgagctatttataaaaaatgaatgacatttctacttgttttgctttctaatatcagagtaaccttccctttacatctcttactattaaaagtatttaactgtaaagcaattaacagaatttcagggcaggaatcatgtcttattcttcattgtatttctactaagggatgcagtgtatctcaaaatatcttgttcagtgtccggtaaatagtatattctcaatatgcaattacttatctgaactgcccaatgccaccctaggtatatatagagcactatattccaagggggatatcacagaaatataaaatactctctatatttcttattagtaataagcatccagaggcttagtctcctaaaaaattataaaactgatgcaatgtgttgaagaagtagtaactaaaaatctagaacagaagaattaatgatgctgaaacaaggagaaacaatattcatatttgccataccaactctgagaaggtggccgtggctcccttccttcatagattaatgcatttgtgtataccgatatcatcaacaatgtgtacagcaggtcatactcttacttgacaaatgaaaatgatggtcaagtactcccaaaatgtgctggaccactgcaggaagagactggccatgccctgtccagcctcacctttacagattcagtttggaaggtgaaaaaagattggccacaacttttttgtggcaactctattgcttgtgttgcatattttctaagaaaagaaatccaagaaatcttgagaaagtgagatggagctaagggtgtttgatccctctgaaggagagaaagagtactgtttttataccctgtgtaagtatcatagagtgaggcaacactatctatcaactgctcactgttattaatagtatacctgctgtgtggccagaaattgacaatgatgagtgctgcaaactttttagaaaagggaga

SEQ ID NO: 202961 - DNA, 1000 bp, Homo Sapiens
ctaaaaatacaaaaaattagccgggcgcggtggcgggcgcctgtagtcccagctactcgggaggctgaggcaggagaatggcgtgaacccgggaagcggagcttgcagtgagccgagattgcgccactgcagtccgcagtccggcctgggcgacagagcgagactccgtctcaaaaaaaaaaaaagaaatcaaacctttgggtatttaaacattgtttacacatttaattaaatatgcttaaaattttaaagtgcaattaaagttttaggatggctgattcttataaatacttcagatatcttaaagagcagacaaaacatacagaaacaatggtttactgggaagctggtgaggtttaagcttcagggcccctcacttgcacagcctcttccaagggtctacattcatacttacttttgtatcttactttgcattctttttcttaaagaaagccacccaaattatgtaagcttctggccacacaaaatctagatcctcatgtcccatacttctttggatccttgctttatttattttgttatcctcctaaggcttctgtaccattatttatttatttattttgagacagaatatcactcagttacccaggctggaggtgcagtggcagaatctcagctcactgcagcctcagcttcgcagtctcaagccatcctcccacctcaacctcccaagtagttaggacaacaggtgtgcaccaccatgcccagctaatttttataacttttttgtagagatgggatttcaccatgttgcccagggtggtctgggacttctgggctcaagcaatccgcccaccttggcctcccaaagggctggaattacaggcgtgagccaccacgcctgtctgaaaatacttattttttaaggttagacgtttacatttctttttccagttcaacatagcatgttgctatactttatatttgtcacaatgacagatgaattgtgggtgttttctaagatcttggagtaaagatc

SEQ ID NO: 202962 - DNA, 1000 bp, Homo Sapiens
cagcttctttcttttagaacacttttttaaaaaaagattcaagcatgttgcatgtatcagtagtttattctttttattgctgagtgttagtccattgtatagatatacttcaactggtttctgtagtcacctgttagtgagcatttgtaatgttcccagtttttagctattatgaaatgctgctgtaaatattcatttataattaattacttctgaaaatatgtttttatttctcaggtaaatactaagaagttcagtggttagttcagacccataggcatatgattagcttttgaagaaacttctaaagtgttgtccaaagtgattttaccgttttatattttcactatcagtttataagacttccatttgttctacatcctttctaacacttcttatggtcagtccctcctaccatcttgccttgttgcactggctatataattttcagtacaatgttagtagaaattaaaagagcagacatatttgcttagtttatgatgttggtgttgagggtgaaggggattattttttcttctataattatttcatggtgacaatttctcttgttaattcaggtaagctagttatttatatggcactttcccatctctctcttgctccctctcttgccatgtgatatgcctactccccttttgccttctgcaatgattaaaagcttcctgagtccctcatcagaggcaaatactggcaccatgcttcctgtacagcctgcagaactatgagccaaataaatctttttttataagtttcccaccctcaggtgttccattatagcagactaatacagactaatatagtcttcttctaaaaagatctgttgtttcctctctcgatcagtcatatgttgttgcctctatggatgtcaagtaattttatgatagataatgcatatacaggaacaatagatgctccagataatccttccaccagaagagtttcttttttcttcttaggcagaggggctgaaggactgatc

SEQ ID NO: 202963 - DNA, 1000 bp, Homo Sapiens
agagaaatggatttctagaatatgacctggccctgactttgtgtctagtcaattacaagttcgagctaaccacctcaacatttcaaggatggccttttctttttctttttttaaaacagcaggactaaaatttcattgtattgaacataaatgggaaaacgtgcattgcagagtaaaatttaaaatgcttttatggaattttcattataaaactgcctgtaatggagttgaccttatattcacctaagatttctctggctccgagttcagatttcatgccaattaacatgttaatgacatatatcatttaaaaagcccatcataacttttatcacatcatgttacatctatttccttgtaattaaatcagaattacagggtgtaattacttttcttttcctgaatacccattccttttcagacatttaaattcaagtgcaagtactaaaagacacttgaaagtaacaacctaataaaaatattatcagttaatgaaagcgttgggtttctcctactctctggtttctttttgacaaattcctatctccccatgtactttgcatgacatgtaatgattggtcgtatccagtcaaatgcttcctaagctctttaaatcctcagggccctagtctctattaatatgcaacgttctcacacataaatataattacatacaattattagcggaaaaggatcagataaggtttattaacgaaatatcctataatcatccaagtccaagacttccccttacatgctaattcaatgaagggttagagtctgtaatcactacacctgcattgatcactgatggcaggatcaaagaaggggaacacctttgtttaaaagacttaaacaattattttgtagacaattctattatctgactgcttctgttcttccacgcactcttcgacatccaatttaaaacttaaagttggccgggcatggcagttcatccctgtaatctagcattttgggaggccgatgtgggtggatc

SEQ ID NO: 202964 - DNA, 1000 bp, Homo Sapiens
attgtatgtaattattttttctattgctgcttttaggatcctttatttattcttgacctttgaaagtttgattattaaatgcgttggaataatcttctttggggggtaaatctgtttggtgttctatagccctcttgtaattaagtctttatatatttctctaggtttgggaagttctctgttatgttactttgaatgaactttctactccactttctctctctaccttgcctttaagacaaataattcggatttgcccttttgatgctattttctaaacttttcttcatatatttgtcacttattcttttatctcctctgattgtgtgtcttcaaatatactgtcttaaagctcactaatttttttctgcttgtttaatcctgctgttgagagactctgatggattctccagtgtctcagttgcatttttcaactccagaaattttttacttaatttttaaaaattatttaaatttatttgttaaatttacttgataggattctagattcctttcctgtgttacctggaatttctctgagtttcattaaaactgctaatttgaattctctctgtgaaaagttacatatctgtctctctgggatttgtccctggtgccttatgtagttcacttgatgcagtcatgttttcccagatggtcttgatgtttgtggatgctcattgatgtctgggcattgaggaattaagcatttatggtaatcattgcaatctgagcctgtttatgcccatccttgttaaaaaggttttccaggtattcaaaataactttaaggttgtgatctaaatctttggtcatgatagttatatctgcattggggtgcaccccaagccctgtgagtcttgcacagttgtatatgttctaccttgaggatctttgataagatccagaagatttctctgaattaacagagattcttaacctttttccttactttctctcaagcaaaaggattgtctctttctgtgatgagctgcctggag

SEQ ID NO: 202965 - DNA, 1000 bp, Homo Sapiens
gctgtagtcagacatggtggcacatgcctgtaatcccagctactagggaggctgagacgggaggatggcttgagcccaggagttaaggccacagtgtgctataatggtgcctgtgaatatcgactgtactctggcctgggcaacgtagtgagactccatctcaatttttttttaatgggcaaattttatataaaaactgtatgtccaggttctacttatttattcattcatttttgagaaagggtttctctctgtcgcccaggctggagtgcagtggcaagatcttggttcactgtaacctccacctcccaagttcaagagattcttatgcctcagccttccgagtagctgggactacaggcacataccaccatacccagttattttttgtattttagtagacggagtttcatcatgttggccaggctgttcttgaactcctggcctcaagtgatctgcctgcttcaggctcccaaagtgctgggattataggtgttagccaccacgtccggcctgtctgggttctctttaaatcatttgaaaaattgaaaaacctggtaatactagttccaagtctatatggcaacaattagctttagcctcttttagaaggggcatgcactgtccaggctacccagtcctcaaagaaataagaatttaattattaaactctatccatttcactcatttttgttaccaacttgggctctgcaggcatttaatttccaacacaccccaagccctccctgactacagtttacaataagcctttaatatgtaaataaatactgtcaatctcttaaaagtagattgggagatgcagtgttccccaaacttgtttgaataggtaactcttttcaaatgctgaatacattttggaaatgctaatccataggtaataataatttataattattataaccatataaaggatctttaggccagggcggtgcctcacgcctgtaatcccagcactttgggaggacaaggcaggcggatc

SEQ ID NO: 202966 - DNA, 1000 bp, Homo Sapiens
tagacatcactatcaaaacagtgcttcccatcctgaaaatctttcacttggttttcattccccctccactgaaaattcaagtagttcgtgttttgactcaaatccttcaaacaacctttattctattaaagaataatacagcacaacctaaaaatccagtgagttgggaaagatatgagaatacaatcataaggtcatcactactacaaaataaaaaatatttcagaaactttatgttccatctagaaaaaggctcagaacaaacgacttttcacctcaagttaatataaacaaccttgaatccaacatcttgtcttccaaatcatatctgttgtctacatcagaaacctgtgagtcaacactggctctttcccacctaaacttgatgattggttgatcataaagaataatctacttatggattattttgacattctgacttcccctacctactaaacagcatctctaagagaatgttactaattttcattttgttagccactcttccgatagacaaacaatgactcattaatcaacaaaataccccttcattcagccctccctccattctgccatccacaccacctccagcactgcacaactactgagtgttctcactaggaaatgtgtttgtcctcaaatacaaatgtctgtatcagacgtgttggatgaattataactttagtttttaatgtagtacgtatactttcaagatacattagctaattagaggctgctggaaattattaatggtgaagttatctttttgggttccctgacatttcacatagaatgctagtttcaagttatactaacaaattaatactgtacaatttatatcataaatatctataactaagtttttcttatgaatttaggtttaataaatatttgtaagttatttttacatgatttcattttttttaatttggtctgtgggagatgtaattttcacatacctgtaatgtaaaattataattcctagtgctattttatgatc

SEQ ID NO: 202967 - DNA, 1000 bp, Homo Sapiens
atacaaaaattagcccggcgtggtggtgcgtgcctgtaatccagcaactcaggaagctgacacatgagaattgcttaagtccagaggcagaggttgcagtgagccgagattgtgccactgcactctagcctgggcaacagagcaagactccatctcaaaaaaaaaaaaaaaagtcttctttgaagatttctcaaagaactaccattcgacccggcaatccccctactgcatacatacccaaagggaaagacatcattatatactaaagatatttgcactcatgtttattgcagcactatttattcacaatagcaaagatgcagaatcaacctaagtgtctatcaatggatgattgaataaagaaaatgtagtgtatacatacacgcacacacacaccatgaaatacgactcagccataaaaaagaataaaatcatattatctgcagcaaaatggatggaatggaaggctactatcctaagggagataactcagaaacagaaagtcaaatactgcctgttcttacttataagtgggaactaaacaatgagtacacatggacattcagaatgaaatagtagacattggagactctgaaaggcgggagagtgggaggggaatgaggtttgaaaaattacttattgtaggctgagtgcagtggctcacacctgtaattccagcactttgagaggccagggtgggaggattacttgagcccaggagttttcagaccagcctgggcaacacaatgagacctcatctctacaaaaataaaagtaaaaattagctgggtgtggtggcacatgcctgtattcctagcgacttgagaggctaaggcaggagaattacttgagcccaggagttccaggttgcagtgagctatgattgcaccactgcacttcagcctgggagacagagcgagactctgtctctctttttttttttttttttttgagatggagtctcgctctgtcacccaggctggagtgcagtggcatgatc

SEQ ID NO: 202968 - DNA, 1000 bp, Homo Sapiens
agtgcagtggcatgatctcggttcactgcaagctccacctcccgggttcacgccattctcctgcctcagcctcctgagtagctgggactacaggtgcccgccaccacaccctgctaattttttgaatttttagcagagacggggtttcaccgtgtttgccaggatggtctcaatctcctgacctcgtgatccgcccgtcttggcctcccaaagtgctgggattataggcgtgagccaccgcgcccggcatttttgtatttttagtagagatggggtttcactgtgttggccaggctggtctcaaactcctggcctcaggtgatccactcgccttggcctcccaaagtgctgtgattacagacatgagccaccgcacccggcaaagcctagagagttttaacgctttctcccctctggctcttccctaagcttctctctgattttccacctctatgcccctgcggcctcctgcacctccggcccgtcccctcactgtccttacctggttataggtgcagttcttcttcttgcatttgctgcactggaagaggtcagtggtggtgccgccagtcttggccatctggtgctcacggatggcctcctgggtcatggcattcctcaactccctcagttcatcactggccatttcctggagaaaaaagagtctacccttcagggctgaggagtttcaggggccctgccctacacccggtttctagaaagcctgaacagaaaaggaggtaacatgctttattgactgcaaggagctggaaggaggcctggattccgggtcctgccccagctgggagaaagctgtccccgcagagtcctcctgccgcccacggctggaaggtcataatgcacattcaggtgagcagcaggcaaacagcctctgcccgaggacgagcactcctgtgtacatttcttcagatctggggctcatcctgcctgccaggaccttggccttggcctgaaccttcctgcttgagctgacttgatc

SEQ ID NO: 202969 - DNA, 1000 bp, Homo Sapiens
ttgatctcaaaaaacttcaacatttactgagctaaatatagagaaaaagacatagttacccaaataaactcaaaatgtaatttatttccattaataaactttttttctggtaatgaatattataaatgataaccttcatgtgctcttaggattccaaacagctttcagaatcattttattgccattttaatgttaaaacttatttattttctcattctttaaaaatcagtaaatcaagtttaactctgagttattagatattgtgtcaaaacatcccagttccttattggcgtggatgaacaagaagtaacttattgtacgaagactttatttacatatccacttatcttttttgactgtttcttgcacttaaacacatgtagaaatacgttcctaagtactaaacagttagcttttgagctagaaaagagaaaagataaagacagaatcaccaatgtcactgctacataagcatcagaaatactgtacttttctgtcctctggcaggtgtctgtgagaaataaacttaatatctgacaattttttacaggctagaatttgggactaaatgatttattacatattccaaccaaactgaaaactaggcaatggctcttcatgtaaaagctgtaaaagtttcaagaacattcttttctttctctaagcttgaattctactcatattcatagaagtctgggcatctttgtcaatacaaattggcaggcattaattatagacattaattcaacctgctttcacttttacactatcacaggttcatcctgagtttgggtaagatcatagctgttaagcatatggattatactttatgtattagaattgtggtgaagtcaacaaaaataaaagcattcataccactgttctgtttccaagtgtcactgttccaccctggcctatacaatgtcagtaaacattctaactactatagtcacattccttagtctatgtccccctcttttggccaatgtgagaatagatc

SEQ ID NO: 202970 - DNA, 1000 bp, Homo Sapiens
tgtttttatttttttgtagagacaagatcttgctattttgcccaggctgttctcaaacccctgggctcaatcgatccccccacctctgcctcccaaagtgctagaattacaggcatgagtcactacacctggcctgaatttccttctttcttgggacaattgttacattgttttcttagaacccagcatctaggaaatgggaagatgtttgtctaaatgcataaactcagttaaaaaatgaataagttctgaagacctgacgtacagcatggtgactacagttaataatgcattctatacttgaaatttgctgagagtagaccttaagcgttctcaccacaaaaataggaattatgtgagatgatggatatattaactaacttggttgtggtaagcattttacaatgtattcatatatcaaattcttttttgtcaattatgcctcaataaagctgaaaaacaacacaaaaacccagcagtcagcttaaatcccaaagaattaaatcccaaagaatgagagtctctgcagtttattgtatactcaccctgttccgggaagaacaaatagaaacatatgctaagtatatcgcatacgtatttcatttgtttttgtgtttcacaaagctatgctttgatatagcatcactgatttatggaagaggaaactgaggctcagagaggttgagaacttccttcaaggagaagcagaactggacctaactccagggcagttaggccctaaccctaagaagttctcagagaggctgagaattcctacaatggtaagtagacctggacctaacaccggggaagttagactgtaaagcctgttacctcgggcaccatgttcccttccctgctccaccttctcactaagtagattcaggggtttgtctcccttgcattttcttttttgtccagatgcacaagtcactttagcaagcaatcttgataatttcctctcttatttcatcccccaaaacatgacattccaaggatc

SEQ ID NO: 202971 - DNA, 1000 bp, Homo Sapiens
ctccacaggggccttccctggtgagttactgactaaccagaacagacaaggtgcccctgtactttcctttcacagaacttaccacaacggtaactaaacaactatttgtttggctactcggttaatggctgtctctccactagactgtgagctttgtaaggcccaggattacatctgtttggctgaagtctgtatcctcaagacctatcagagtgctggttgtcgcatatactctaatatttgaatgactatacgagtaagtttttttactgctagaatcttttccttcaagacctgtatcaaatgctctctctttcacgaagaaactgaatttcctgagctggaataaattgctccttcctatggattcctacaaaacgttcgttaactccagcctttaaaaccatctttatttcactgtggctagtatcacactggtttgcgtcgaggtctgtcttcccgtggaccggtagaggctaaaagaaaggcccaggtcagcctcatccttgagacttagcgcccgcaaaagttgggcggggctggttggaccaggttgcattgaggcggcgcagggccctgctgagggaagaagggcacgggcccggcttaccttctctttgactgcttggtagctctgctgcagccagctccgccaccatcccacgtcctccctgtggaagacagacacatctggcagcaccgcggtgcgattcctgcccgcccaaggatccggtttgttccccgctcagatgtaccctgcgggccgaggcttcgcagaccgcttgcccaccccctcacaatgcgactccactctgccctttcagatcagtccacgcccccgctgatctcacgttccccaccgggactctcgcccagcaccccaaccctgggagaattcaggccccaacgcctaggagcaaaacgacaagctcacccttccgccatcttgcctgcatgacatcaccactatttactgacctttgacttccgacacggcacc

SEQ ID NO: 202972 - DNA, 1000 bp, Homo Sapiens
gctgttacaagagtgtcttaagccagaaggcaaaggctgggtgtgatggctcatgcctgtaatcctagcactttgagaggctgaggtgggaggatcccttgagcccaggagttcgaggttgcagtgagctatgattgtgccactgtaccctgccctgggcaacagagtgagaccctgttttgaaaaaaaaaacaaaactacttacctccctcctttttttatctctctctaatataagttcagcccttcttttagcaatcgtatcaacctgttaaagaaagagacattaaaaaattgtaatggagaatgataaaagtggctttctctgtattcatatatttttatataaagtaggaataacgtttgggcagaagcacagtgaactttgcaggaaaggatgtgatggcggtaatcatgttgcttggcttgcatccttgtacctctgaacctcttgatcagctattttcttccagagggataaacagcacttggggtcagttactctttccacaaagtttagaactccttttcaaaatttatcgctcatttgtttgtttggttttggtggcaggaaatagggaaatacgtggaggcaattcactgaaaatggtaagcttttaacacactattaaatagcctaccatagcgatccccaaccattttggcatgagggactggtttcacagaagacaattttccatggaccgaagatggggattgttttgggatgactcaagctcatgacatttattgtgcactttatttctattattattacattgtaatatccaaagaaataattttacaactcaccataatgtagaatcagtgggggccctaaacttgttttcctgcaactacatggtcccatctggaggtgatgggagatagtgacagatcatcaggcattagattctcatgagtgtgcaacctagatcccttgcatgcacaattaacaatacggtttgtgctcctataagaatctaatgtgctgctgatc

SEQ ID NO: 202973 - DNA, 1000 bp, Homo Sapiens
gggccgtcgttgaacgatttgaattttcatataaaggtttgaggtgtgtgctctttccccaccacctgcaccccacgtttttattatgaaaactttcaagcatgcaaaaaaagaggagagaagagttggataaacacctgtctcctctgtcctttttatcccccaccctggatcctaagcacctgaaggcacgacatagtaccttagactcatactgctccaagcaggggcttggagtgtagcggtatgaatactttgtaccaaggtggcatttctggtccaccctgaccctctgggtcagaatctgcatttctaagattccctggcattctccggcacagtcaggtttgagaagtgttggcatggtgcatgctttgccaggagacgggacctgggtccacatcctagtcccggcacgttttgagtgttcagtttggcagtgattgttaggtgctggaccacctgctaagtgtttcccatacaaaactcatttaatcctaaataacaactcagtggctctcaacctgtggttctgctctccaggggacacttggcaatgtctggagacatttttggttgtcagtctgggggcggggctggatgcagtggctgacgcccgtaatcacaacattttgggaggctaaggtgggaggattagttgagcccaggagtttgagaccagcctgggcaatacaatgagaacctgtcactacagaaaagtaaaataaaaattagccgggtgtggtggtgtgcccctgtggtcctagctactcaggaggctaaggcaggaggatcccttgagcccaggagatggaggctgcagtgagctatgattgtgccactgcactccagcttgggtgacagagaaagaccctgtctgaagaaaaagggaataagcccagggtgggggtgttgttggcatctagtgggtagaggccaggaatgctgccaaatcccccacaaagcatgggacagctccaccccatagcaaagaatgatc

SEQ ID NO: 202974 - DNA, 1000 bp, Homo Sapiens
ttttttgtgaattgaaaaaagcaaactgggacataaatacaaaagtaggtttaacatatttttcagctttcaagtgattgttttgacatcatgaagccactaaaaatttatttttaaacactgttaagctttctattcagaaaatttaatgattctaatggaattctcaagttaaagtgtacttctaataagaaattacatagtgctgagaggcataaatgccaaatataaatacaattttaaagactgtatttattatataaagataattctcactgacatttagtaagattatatttattatataaagattgtattactagggcttgctccagtaatcatggccgatatcccatggccagtggataaactgcatctttaaaagctggcttcagcagctaaatcgagttacttagggtcggttatgttatcaaacatccattggctaatttattcctgaagcaaattgattaccattccatctggaaataattagggattattttgacttatttgagaattttgcttgtcttgccttgactagcattcattcaacattcaacaaatgtgcattgagttgctactatgcacaaatgtactagaagctgcagaattataaagaacacagtttggtgctgacacaaaggtgagatacagcatatttagtacaaagcagaatgcactgggcaccacatcagtgccataaacaaggctctctgaatttaaaagagagtgacacttccagggggagtaactggaggcagaaacaaaggtagaaaaaaatcttaggcagagacaactgcataaaccaaaaagcagaaagtgacaaggccaaggcttctcccctattcctactgtccccacaatagagcatgcctcttgtcaccaaggctcctctgcaagcttccttcctttctccttctctgggtctcaagtcaaacattactccctttgagaagccttctctttttaagcagaatttagttccctttctggaatt

SEQ ID NO: 202975 - DNA, 1000 bp, Homo Sapiens
ggaatatgtgttacatccatctgccagatggaatttggagataaacctctagggttaactccttttccttgatgtggcagatgcaggacttggcaggcagaacaatgttgcacaatttctttagcttgtttccatgatagaccgtatgtttttctaaggcctgtggcattaaggtgggttaaagaatgaaatgtttgtgcatcagcaaaggctgcagacaccaatgcaaccgccctttgattaagtttagttaaagggccagggaggttagtatgtgctctcatatgagtgatatagaaaggtgaatgcctttgttgtactgcttgctgtaaagaatgaaataaaagattaagttgttcatcagtcatattttgaactaaggcacattgaatattttgcatggcttgcactacataggctgaatcagaaacactgtttactggctgtttaaaagtttttaacactgttatcacagccataagttcagccctttgagaagaagcaaagtcagtttgaaaaacttgctgttgaggtcctgcaaatgaggcttttccattactagatccatcagtaaaaacagtaatggtcccttcaataggggctttttgagtaatagaaggcaacatccaggatgttaattttagaaactggaaggttttagactcaggataatgattatcaagaatgccaacaaaaccggccaaattaacttgccattcttgggaattaatataggcttgttgaatttgttgttttgttaatggaactataatcttatttggatcatatgccattaactttgttgagcgcagctgcgcttgtcctactagcacagcaatttgatctaagtacagagtgagtgttttggttgtattgtgaggtagaaaaagccactcaaccagatcatcctgttgaactataactcctgtaggcgaatgcttagtaggaaaaactaaaaactgtaatggctgtattggattaatccgttctacttgtgctt

SEQ ID NO: 202976 - DNA, 1000 bp, Homo Sapiens
ctcccactctgtgggttgtctgtgaactctgctgattatttcttttgccttgtagtatagtttgaagacgggtaatgtgatgcctccagatttgttctttttgtttagttttgctttgactatgcaggctcttttttggttccatatgaattttaggattgttttttctagttctgtgaagaatgatggtagtattttgatgggaattgcattaaatttgtagactgcttttggaagtatggtcattttcacaatattgattctatctatccatgagcatgcaatgtgtttccactgtttgtgttctctgtgatttctttcagcagtattttgtagttttccttgtagaggtctttcacgtctttggttaggtattaatatattcctaagtattttattttattttgcagctattgtgaaatgggttgagttcttgatttgattctcagcttggtcactgttggtatattgcagagctactgatgtagtgtacattaattttgtatcctgaaactttgatgaattcatttaccggttctaagagcttttcggattagttcttagggttctctaggtatacaaatcataccagcaaatagtgacagcttgatttcctctttaccaatttggatgcctttgatttctttctcttgtctaacttctctggctaggacttccagtactgtgttgaataaaagtggtgaaaatgggcatacttgccttgttccagttctcaagggaaatgctttcaacttttccccattcagtataatgttggctataggttggttgtagatgacttgtattaccttatgtcccttctatgccaattttgctgagggttttaattataaagggatgctggattttgtcaaatgctttttatgtgtctattgagatgatcatgtgatttttgtttctctgtttatgtggtttatcacatttattgacttatgtatgctaaaccatccctgtattcctggtaagaagcccacttgat

SEQ ID NO: 202977 - DNA, 1000 bp, Homo Sapiens
ttgctgtctgatctgtgtccagtttattcctaccaagatggccactgtctaggagatccctggctagtaaaaaagttagatttgggtgtgtcagtcaggtgagccatgtaagaggcagcacaacaaaatgcatgaagtagcagaagcagcgtattactcacaggtcctagagggaggagggcagcacaccaataggaattgagagccacctggtacaaaaaagcccaactagtatttaaaatggatgccgagacaacataaaatgacaataattcactaccatcccttacaaactatgatttgtaaatattttctcccattacctaagctatctttttactttcttgatgatattctttgaaacacaaaattttttatttaaagaagtctaatttatttttattgttgttgttgcttatatcttgagtgttgtatgtaagaagggtttgcctacaccaaagtcacaaagatttactcctatattttctcctaagagttttatagttttagctcttaaatttagatctctggtccgttttaataaatttttataaatggtatgaggaagggtccaactttgttcttttacacgtaggtacccagcagttccagcatcaatttttgaaaagattattctttctctcattgaattgtcttgactcccttattgaaaatcaattgaccataattataaggggttatatctggattctcgattctgaactattgatttataagtctatctttatgccagcaccacactgtcttaattactatagttctgtagtacattttaaaatcaggaagtggggatcctataactttttcctttttttcaagattattttggctattctggatgcctcacatttgtacatgaattttgtgtttagtttctcaatttttgcatacaagccagctgggatttttagggattgtgttggatctgtacatcaatttagggagaattgtcatcttaacagtatctagtcttctgatc

SEQ ID NO: 202978 - DNA, 1000 bp, Homo Sapiens
atggttgacttgttgctaaggaaaggaaacccacaaaagaactacatacacactatgattacagcttaatactttttttaaaagcccagaaagatatatacgtatacatacacatacacacacacgtatacacacacacacaattttccttttttttttttttttttgagatagagtcttgctctgtcacccaggctagagtgcagtggcgctatctcggctcactgcaacctctgtatcccaggttcaagcacttctcctgcttcagcctcctgagtagctgggattacaggcatgtgccaccacatttggctaatttttgtatttttagtagagacggggttttgccatgttggccaggctggtcttgaactcctgacctcatgtgatccacccgccttggcctcccaaagtgctgggattacaggtgtgagccactgcacctggacacacacgcacatttttgagacaggaactcactctgtcacccaggctgcgtgtagtggtgtgatctcagctcactgcagccttgacctccccaggctcagatgatcctcctgcctcagcctcccaagtagctgggaatacaggcgtgtgccactatgtccagctaatttttgtagagacagagttccacagggtttcccaggctagtctcgaattcctgggctcaagccatctgcctgcctcggccccccagagtcctgggatttcaggtgagccactgcgctcagtcccagaaatatataaattaagatactaatgggtagtgccagacaggaggaattatagctgatcttaatttcgtttctctaattccatattttctatagtatgattatatttcttctattatatttttcccaatacaactttgtgggccctgccctagaaattctgattgtaatcctgggattgggcctggagaacctatattttaaagagatctttagataatcctttgtagcctctcactgctggtcacagggaagtgttgatc

SEQ ID NO: 202979 - DNA, 1000 bp, Homo Sapiens
tagaaattataaatatatagccagccagtgaactgctcccacttcttaacagcatccaacccagaactggtccctgcttccttagagtcatctcaggcacaagctcaaatgcagtgagaagccactcccatcttcctgtcactaagatgcccacggttcttctgcagtgtcctccctctcccatctcagcaagctaaagaaacctaactctgagcacgagtgtgttctgggtggtcttggatcagcagacattaacataaattctttataaatgatctatgcaataccaatatattacgtacattatataagagacacacaaataaaagtttaaaaggttgagataaaaatgaatagaggtcgggcgcagtggctcacgcctataatcccagcactttgggaggttgaggtgggcggatgacctgaggtcaggagttcgagaccagcctggccaacatggtgaaaccccatctctactaaaaatacaaaaattagccaggcgtagtagcatgtgcctgtaatcccagctactcgaactgctgaggcaggagaatcacttgaacccgggaggcggaggttgcagtgagccgagatcatgccactgcactccagcctgggcaacagagtgagacgctgtctcaaaaaaaaaaaaaaaaaaaaaaatagaaatcctaatgttttcctcctgcatcctccataaattatctcacagatgccccaaatgtgcagatccttcactttggataccactgaactagtccatcccccaccttcagcaaagattgctagaaactatcccagagaggtgtcattttaaagataactttggttactttttcttagtactgagatttgatgtaggaaatttagaaaaacagggaagaacattttaaatactcatactcctaccaccaagaaatcaattactgttaacaagttggaggaaatcttaattaatgtcagtttgaaagatttcccaaagaggaaagtccataagatc

SEQ ID NO: 202980 - DNA, 1000 bp, Homo Sapiens
gaccaaaacccagtaacatcagaaaccaaaagccaaaatatagtttcacaaattgtaatacaggcacaccttgtttgattgtccttagttttattgtgctttgcgggcgctgagttgtttttttttttttttttacaaattgaagtttgtggcaaccccgcatcaaacaagtcttacgggcaccatttttccaacagtgggggctcacttggggtctctgtgtcatattctggtaattctcacatttcaagctttttattattattatatctgttatggtgatctgtgattggtgatctttggtattactgttgtaattgctccaggctgccatgaaccatgtccatataagacgacgaaattaactgataaatgtagtgtgtgttctgactgctccacagaacagccgttccccatctctctccctctatttgagcttccctattccctgagacccaacaatgttgaaattaggccaattaataaccctacaatggcctctaagtgttcaagtgaaagaaagagtcccacgtctctcactttaaatcaaaagctagacaaggttaagctcggtgaggaaggcatgttgaaagccaagacaggctgaaagctgggccttttgcaccagttagccaagttgtgaatgcaaaggaaaagttctgcaaagaaattaaaagtgctattccagtgaacaaatgaatgataagaaagtgaaacagccttattgctgatgtgaagaacgtttgagtggtctgaatagatcaaaccagccacgacattgtcttcagccaaagcctaatccagagcaaggacctaactccttcaattctatggagactgagagaagtgaggaagctgcagaagaaaattggaagctagcagaagttggttcaggaggtttaaagaaagaagccatctccacatcgtaaaagtgcaaagtgaagcagcaggtgctgatgtagaagctgcagcaagttacccagaagatccagctaagatc

SEQ ID NO: 202981 - DNA, 1000 bp, Homo Sapiens
cctggctaatttttgtatttttagtagagacggggttacaccacgttgacaaggctggtctcccaactcctgacctcaggcgatcccgcctgcctcagcctcccagagtgctggattacaggcatgagccacacaccctgccacttgctaattattctttatgttaaaaatgtgtttgttctgattatgagcgcggtgcccatctcctgagctctagcttacccatcaacctaaacaccccagttaatctcctctattaaactgctatctgaaatcctggtgttctactgtgttcttgtttttttatgtgtcttcaacactggaattcatggttcatgagagccagaacctatctacttgctcactatggtacatcagtgcctatcatcatggctggaacgcagtacactcagaaaagcaatcaagaacttgggaaagcaacatttcctggagacaagacatgaaagtaagtcttaaaatagggtacatgatgactacatattaaatccttaaatgtgtcccattatagcactcatcatatacagatttaacctcagtcatgtttcacccaagtctaacacaatttaaaagaaaaataacaaaatccagcaattaacaatgtaaaattcacaatgtccagcatccagtaacgaaaccaaaagcaggacaatgactcctaagaaggaggaaaagccaatcaatagaaacagatcccccaggccaggtgcagtggctcacgcttgtaatcccagcactttcagaggatgaggcgagtggatcacttgaggtcaggtgttcgagaccagcctcaccaagatggcaaaatcccaactctactaaaaatacaaaatgtagccaggcatggaggcacaagcctgcaatcccagccactcgagaggttgaggcaggagaattgtttgaaccgaggaaggggaggggaggttgcagtgagactagatcgtgccactgcactccagcctgggtgacagagagagacatt

SEQ ID NO: 202982 - DNA, 1000 bp, Homo Sapiens
tgcatcactcacacaaactgaggctttgagaaaaccagaggagagtaaagaacaggcttttgtgtgtgattcatgaagcagtaacggtttctcttttatttacattttggataaagggcagaagcaagaagggtggctgtgactgcattcttgatgttttcagcatttgtcaagtgggacgtgtcacctcattttatttttgcacattccccagtcagctctactgagtgtaaatgcggggtgccgctctcacaccctcagttcccatgttggcagttggaagggagtgcagcctgcattgcgcgctaacttcgtgcttgccatctgggagggaagttgggatccaggtggtgcagtcctggatctgaaatcctctgtgggaagtgcagagagacagggtagctgggtttctggaagggggtagcagcctttgaattcatctggctgagagctcagatagaaatccatccctcgccacagctttgggacagtcagatgtggtgcaccgaagacaatctgctggggactgtcagtggcttcctttgttacccttgccttgtccactctcttgggcctgggagggtcagtgtctgtgactgtttgatccttactatgcttggctgtagaggaaggggcctgcaagatgctcatggcctgcttgggaggacaagagtcatgcccaggaagccgtgccagtgaccaagggtggtggctcatctcctgccttgtgtgcttgttgtcagagctgtggcatcttcagccctcaaagattgtggcctgccggcttggctaaaagcacagctgcctggagcctctgtgccttttgggcttcctggggcccatgtctcctctctgcaaggtgcaccctggggctgaagctcgggtggctcgggtgtccttgcctgctctgttgcccagagacggctttatttttcttaccctgctaggcccagggcatgtgtggcttattcctggggctgcttgggacatcgtggaattc

SEQ ID NO: 202983 - DNA, 1000 bp, Homo Sapiens
ccgggtgcgtgtcctggagaggtagggctactctacatcacatcccagtgtgcactagggcccattaagaggggctaaagaaaattcatctccttcagctctcccagcagatctgtttgatttggggccaatctgcatgggaggctgagaaggagccttgctcagctgaatgttccctcattacattttccctggggattggcaccaggagctggagtcaccttctcccctcaacacaatttatgtgccttctcggggtcatccccggggtcggagacatgaggcccatctatctttgctttacttccaagtcagaagctccttgagtaacagaatttgtcttcgaggtgagtgtagggacagggtcatgaatgtagggctgagtttaatgcacacatcctcgcccttgaagaaacaagtctcagaagaagcctgttccagtccagctgcaaatgaaagccaagctgggtgccagccccagaggtgaaggagtgggtgttgacttcagcttggtgcaggtgcagctctctggattccccccgccaagctgggtgccgaccgcagaggtgaaggaggtggctgttgacttcagctgggtgcaggtgcagctctctggattcccccctgccaagctgggtaccagccccagaggtgaaggaggcaggtttcgacttcagctgggtgcaggtgcagctctctggattccccccgccaagctgggtgctgaccccagaggcgaaggaggcaggttttgacctcagctgggtgcaggtgcagctctccggggccctacctgcccccaggtcactggtgatctgccctcctctgcatggcttctgtgcctggtccacggccctatttagttatagttttgtctatttgaattgtggcccctaaatgatccattcatgaagaaccttggaatgtgggattatttggaataaagtctttgcagaagtcattaagatgaggtcatcctggatcagggtgggtcctaaat

SEQ ID NO: 202984 - DNA, 1000 bp, Homo Sapiens
ttattttgtgagtatggttgctctatgtagcaagcagttgtgacctaaagcaacccataaattacagatttagtgggagaactggacagttaacaacgtcacttttgctttggactactacttaggtcccttaaagtggtgccagtgccacagaactgaagattcctgactgtagggaatataccatctaattttgagtttcaatagagtaactttgattttagtgagttgttgggaaatcctttagatcattagttatgcagcaaaattgcttggctttaataatcatatgtactggcttattctttctgaaggtaagctacttcggaagcacaactattgactaaaaactaaaccttcgaaagaaatgacagcattgctagttttttgtgtgcgtgggtttttttggggaggggggcgtggggtactgtattaaggttagtttccaacaagaattgatgtaattagaagaaattgacttccttacctattgcctctgatatttacttgcttaaatttttttttattggaaatccagaaaaagtggatttagagaacaacactaactcccacctaatctatgacagagatgtagaagagagtacctgtgaaaaatgtgaaagtatctgaaaaatgtaacctttggcagcctgagcatagtcaaccagaaaaactatctgaattaaaataattggtccataggtactattttatttggtccataaggattattttttcaacttttttttcaagtgtattattatgtcatttcccacgtaggttactgatacctgaagactttttccacctttaaccttactcgttgaggagctttgtagtctaataaaagagaaatataagtaaatgttagatatatgggtggataatggtaactatgtgcttaaagaggtataaaagaagggtagggagcagataagacaaaggaagggctatattataaggaagaatattccaagtagggaaaaaaaaaaaaaaaaac

SEQ ID NO: 202985 - DNA, 1000 bp, Homo Sapiens
ttgtagagacagggtctcgcaatgttgcccaggctggtctcaaactcccggcctcaagcgatcctcctgccttggccacccaaagtgctgggattacagcgtgagccactgcactcagtgtacaggtgtgtgttagctctgccacttgatagtttgcaacaaggcacctctggatgctgtagatacagacgtgagcaaggcaaggaccctgcctcaatagagacatagtctggttggagagaaagaaaaatatacaagtaactattatctgtgatcattatttatctaacagatgtgttcgaacatctactgtggcagaccaggcactcttttatgtgtcagcaacatagcaaggaacaagagagagcttatattgtatagggaggagacagataagaaacataaaataaatgagtccatgaaattattttaggtaacgatatgtactgtgtgggggtagggggaaactagggtaattggattgtagagaactgtgcggggaattgagcatttttactaggagatcagggaaggcctctctgtggaatcaatatttgaggtaagaaccaaatgttgagaaggagtcaggcatgaaaagatttgggaaaagaacattccagacccaggaaattgcatgtcagaggataaatgcttgacttattcaagaagcagaaagaaggctagtgtgtttgaagcacggcgagtaaggggtaagttgcgggcaggggttgcagagtgaaatgaggccgaaggtaggaaggctcagctgatggagtacctcatagatgctggcaagcacaggaaggagttcagatttcatttcatatgcaaagggaggccactgcattgagtttttagaaggggttgacatggttcaattactgctctttttgtttttgtttttgttttttttgagacagggtctcgctctgtcacccaggctggactgcaatggcgctcacagctcactgcagcctggaactcctgggatcaaatgatc

SEQ ID NO: 202986 - DNA, 1000 bp, Homo Sapiens
cagctaatttttatatttttttgtagagatgagtttttgccatgttgctcaggctgatctcaaattcatgagctcaagcgatccacccgcctcggcctcccaatgtgcagggattacaggtgtgaacctggcccattggtgatgttttgatacatgtaatgtataagatcagagcagatggataattagcatatccatcatctcagtttttcatttctttgtgttgggaatgttcagtatcctcgctatctgaaactatgaaatgtgttaatgttaactatggccatcctacagtgccataggacaaaaatatggaagtcttcactagtttgtgtgtcatccttgcgcaggtgccatgctcatcttcccagtattattccagttttagtatatgtgctgcctaagcgagcatggaaattcattttagctgtaagtttgtgctgggcagattatccaataaaagtgcccttgtaatctaatagttctgaaatagccttgtgaatggcagatcccctgactgccctgtctgttctgcacccagcctgccagctttgccttttccactgatgtttttgtgggatgcagtggaccccagaagaacagtacctcagatttcaagcttgtgacccactagctcagcctggccaggttaaattggtgtcttaggttccctgtagaaagggtctgtgattgtcaacctggctgcgtgggagtaaagaaggtgatgtctgtgacaggcccagcactcagggactgagtcctgcactgatgcaggagctgtgtactcagcagtgtagtcctagcctccttccaagagtcatgaccctgctcaagatctgattttgcaaggcagccctttccagagcaagaagactatatagttagaaagccattccttatattgaggcaaaataggcctccctgtaaccttcatcttacagttttgtttctggtttttagagcaagagagtcaatctcataatctgcagcatgagaattc

SEQ ID NO: 202987 - DNA, 1000 bp, Homo Sapiens
cactagtattaataggcttcccttaccggcaaggcctgggcacaccaggtattgccttacaaactgcctcagataatactcctgtgtgactgactgttgcttccgtgattttaggcaacaaaaagggttttattcctcgagcaaaagacttttgagcattacctgaaactcaaaacttacctggcatatatgaagccttatgttaaaaaggttaccacataatttgttgcccaaagaagtctctttgagggaacactattaataacgataccaggacaatagatataagaagtgattgtctcaagcaacccaggacctatggtcaccctctcagtaaagcattcccaaatgagtgaataaatataatgcctttcactctctgttaacgttctgcctaggactgaagttcaggaaatcgaagttagtcctgctctgggagtctcagcccagatggttcatctaagcactcatcagtttaactattttgtatcttcctgcaggtaggcaacaaggaaaagatcaaagtattgtggttgccagctttctacagttacctaaaacgggaattctagtacctatgtagagctgaaatttaagaggtcatattttgaaacactttccatcattggaatctgtgtagacattcctcctgactttgaaaaaaaggctgatggtattttgttacaaaacacatcataggatctgtcctccggataagctctggtgtctttgtaaaagatgttttttctaagcttgtatattctttcgtagtgtgtgtaattcaatgataaaaggcaaaaggtcaacaatgaatgtgaagctccattttcatgatctattcaggtatgaaaatctttagatgagacatccacaatgctctctgatcacctctgattggaagctgtgatggaatcgtatttttatgcaaataaaaagacattaactttgggaaagatatgtaatgactcccttctggggttccaggaagtctgctgaattc

SEQ ID NO: 202988 - DNA, 1000 bp, Homo Sapiens
aactcctctgtcagtaaaatctgtaatctctctgaagcccagggtcgactcctttttacgatcttggttccaatcatagtgtctggcaggtattcaaaaaactgatcaaacatggagtgatgtgctttattgaatgccagaggaagatattggtgaggtctttaatttgtataaagagaaagttggagccaagtgacttattttgtttaccttttgctgtgctttttggacattcaagagcttagttcatcctgaaagcccagtgtatgtattatactcgctcttattcacaggtttctttgcaatttacgacttgccaaatgactagtcttctgaggcagcattattttcttggtattccacctccttagcctgtggggcttggaccttttgattttttgatggctagttttcacttcttccaaatttctgctaagactctagtattagtacatttatttaatagtttatgatgtctattttgagaaaggatttgaaatggtcttataataggaaagtattagagtactatgaaaatggtaaaggttggtagtatagaatgtggaggcagagaattagatgaatgattggggcaaggaaaggtgagtgctgcatgtaactcacgttgattaatgaaaggaagcataccaatttgaagcagatttttctcttgtatgaagaataatcaatcttttggattattacattaaataacattagcaatatatggagaaaatgttttacattttacaaacgatagagaaacattttttcacatgccattttagagaaactggataaaagcctcaggcataatagaaaagctttagtaatacaggtgttcactgttccagtggtttgattcattaatttcttttgggtggtgtccctcgaatatcagttgtctcattcaggctgttgacagatgctaaataacaatccattcaggaataagctctgtggacaacatgggcagtgaggattttccaaataggaattc

SEQ ID NO: 202989 - DNA, 1000 bp, Homo Sapiens
tgaagggggctattcatgttgtccatggaattaattcaagggaatgaatggctaccacaaacataaatagaattaaaaaatgctgagagagtggatgtgaagtgttctcaccacaaaaatggcaactacgagaagtaatggttatatcaattagctagagttagtcatccgacaatgtatatataattcaaaacatcatgtcgtatgcgataaatacacataattttatctgtcaattaaaaataaaataataaaatcaaaaccaattaaacaatgccatgcatgggcaaatattgggaatatgtaatgaaccataggttaagatgaattcattttagtacagctgaagtcccttacaaagatgaatttattttggtacaactgaaatcccttacaaacataattggagggggttgtattcattttcacagttgcttaatattctactctattgtgcaccgtattttaagaagatttctctattgataaagatctaggctttttcattggtggggagggagcacctacaaatactgaacaaattgccagtgttccagttgtggaatgaggtgatagggtgttcattgtactgctattaagttatgagtaaattaagcgaaagacgattgagcaaagagcagtagcacacgggatggttaggaagcaaggttatcgattaattataggcacagtctgaggcccaattaaaaagagatctcgtctaccagctctgtgggaaacaagcctggaaatagcattctgcagcagtcagaggtcttgttcttgggtttttgtgattcatggatattaaattattttgtgggtgaaaccatgaatgaaataatatgcataatcaataaacagtgcataagtaaatacatgaggaaaaagtgagtgatgaatagttctgtggcatatgaatcattaattttgattaaaccctaaactctgaagtccattagaaagagaccttgctcttctctgtaagagagtggaattc

SEQ ID NO: 202990 - DNA, 1000 bp, Homo Sapiens
tgacacccgtccctagtgtcccctaactcttttccaaaccctctttaagggaaattcacactgactgacagtcttctcggtacgctttctctttgggttgtcaaaacagctctcagtctgactaccagtttgcaggaaatacaagggacaagcaaggctaaatgacactataaaaatgcaaacagcaaaatgcaaagaactctacaggacaaatgacccagtttcatccagaaatgtattgcaagagaagaagtgagggaaggataacaaatggattaacagagattaagagacatgctatctcagactacgtgatctgcaataacaaaatttctgagactaggtacattgtaaacaaccaaaatttattttctcacagttctggacactgggaagtccaagatccaggcactggcaggtttgctgtctggtgagggctgctctctgcttccaaatggcaccttcttgctgcatcccccagagaggatgaaggctgtgttctcacaggaagatgttggaagagtaaaaagaatgaacattagttccctccagccctttaatgaggtcattaatcgcatttgtgaaggcagagccctcctgacttaatcacctcctaagggctccactgttaaatactatcacacaggagccggccatggtggctcacgaccataatcccagcaatttgggaggctgaggcaggcagatggcttaagatcaggagctcaagactgtcctgggcaacacaatgagacctctgtctgtacaaaaataaaaataaaatttaaaaagctagctaggtatggtggtgcttgcctgtgatcccagctacttgggaggctgaggtgggaggattgcttgagctcaggaggttgaggttgcagtgagccatgattgcaccactgtgctctagcctgggtgacagagcaatactctgtctcaataagtaaataaatacataaatataaataaatactatcacactggaaattttgaattc

SEQ ID NO: 202991 - DNA, 1000 bp, Homo Sapiens
gggtttagcttcaggtaactgagggagaatgtcattccccaactcttggcctgttacccccatatgcgcggctcgtcttcctcccggcctcctcttgatctgtggatttgatggtgcaggccactctgatagatcagagggattctgaggtttaaggtttcctttctgttttaaaagacagggtctcactctgtctcccaggctagagtgtagtggtgtgatcatggctcactgcagcctccatcttctgggctcaagcaatcctcctgtctcagcctcccaagtagctgggactacaggcatgtggcaccgtgcctggctagtctgtttgtttgagacggagtcctgctctgttgcccaggctagagtgcagtggcgcgatcttggatcactacaacctctgcgtcccgggttcaagcaatcctcctgtctcagcctcctgagtagctgggactacaggcatgtggcaccgtgcctggctagtttgtttgtttgtttaagacggagtctcgctctgttgtccaggctagagtgcagtggtgcgatctcagctcactgcaacctctgtgtcctgggttcaagcgattctcctgcctcagcctcctgagtagctgggactacaggcgcccgccaccacgcccggctaatttttttttgtatttttagtagagatggggtttcaccctattagccaggatggtctcgatctcctaacctcgtgatccgccctgccttgggctcccaaagtgctgggattacaggtgtgagccatattttgttatttagtagagatgaggctggtattgaacttctgagctcaagtgagcctcctgcctcagtctcgcacagtgctgggattacaggtgtgagccaccgctctccacccggtttaaggttttaaaagcaatcggacagcgggccagtcgggaagtgtccactggtcctacctgttccccagtgccaccattcatagagaaagtcatgccaactaggcgaattc

SEQ ID NO: 202992 - DNA, 1000 bp, Homo Sapiens
gctccctgcgccctttcccccttgattttaaagccgagaggaaagagaaagctcttctaaaattgtcggtatttcttctcacataaaacaaaaaaaaatttattgaattcctactgcatacatatctctgtgagagtatattgggagttagcacagcataaagtctgttaggaagagagaacaattacacataaatcgaacaacagaagatagtatgtgacaatgatacagacatagggaaccaaaagagtggaagagctctgaggactacagtgattagagaaagcctcataaggagatacaggatttgagctgagccttagaaatggtttggcagagaggatacaagaagatatttttaggaaggaacaaagtcagagagataggaatgaaaatggtatttttaaaggagaggtagtagactaatctagccagagtagagtatttcacattcaagaatagtcagcaaaacaatttaaaaggtagatgagggtgatacacagagggctttaaatgccaggccagtaagtatgagggttttttttttagttctataggtaatgggggaaccattgaaaattcttaataggaccatgatttgataaggacctctctttaaaaagagaggctgtcagttcttaatataattcgaaatgaaaatgagaaatgatttctgaaatagatttcaaaagcaaagatttagagtaagggtagccaatcttttcagtgctttatgtcatcagtaagaccctgcccatggctaatgattgatggaggaaaaaaaaaccccagacgttaaaaaaaaaaaaaggtgaaaaataaattggaaaatatgaatgtggtaaattgtagagtactgctcataattgccgtaaatgctcttcagtgtcctttatgccataaacttttctacctctgatcttggcttagataagaatcccattatagatgttgtacaaaatttagttaaggtcctgaatggagtggccatttggaattc

SEQ ID NO: 202993 - DNA, 1000 bp, Homo Sapiens
attacattacaaccacaatgagatatcactacacattcactaaaataactaaaattataaggactcaacgtgccaaatgttggcaaggatgaggagtaatggtcctttcacatactactgatggaatataaaataatacgatcattttggaaaagtttgacaatttctttaaaggatacacatacacctaccaaaccacccagatattccatacttagacatttatccaagggaaataacagcatatgttcacataaacactttaatgtaaatatttatagcagctttgtttgtaatacataaaacaatccagatgttcactaacaagtggataatcaaattattatattccatacagtgatatatccatatagcaataaaaagaaatgaacaaaatcatggataaacttcaaaacaattacactgaatgaaagaagccatacaaaaaaaataatactactgtatgttttcacttacagaaaatcacagaaaatacaaactgaactatagtggcagaaagcagtttttgcctgggaatgaggaaaggagaatgaaagctgggttacaaaagggacatggggaaattttcggaggtggatatgcttattatcttgatcatggtgagggtttcatgggaatacacatatgtgaaaagtcatcaaattccccattttaaatatatgtagtttactgtacatcaatacctcaataaactggtgcaaaataaagtatataaatacaaaaagactgatgaaagtacccctatgaagatggcagcagtgaacacatcattttttaaaatttcctgaatccctcattaaaaacagagcaactaggacaaaaataataaaattaaacaaaataaataaaataaaccatgcataacatctacaccataactacgtgataagatttcccacacaaaccaaaaatgcatgccacgtgtgaatggcagctaaaactgcaaatggttttgtatcctccaacagctgatgaattc

SEQ ID NO: 202994 - DNA, 1000 bp, Homo Sapiens
atggagaaaccccgtctctgcctaaaatacaaaattagccaggcatggtggtgcatgcctgtaatcccaactactcgggaagctgaagcaggagaatcgcttgagcttgggaggcggagcttgcagtgagcccagatcgtgccactgcattatagcctggacgacagagtgagactccgtctcaaaaaaaaaaaaaaaatcagccaagcgtggaggtgcgcacttgtggtcccagctattcaggaggatgaggtgggagaatcatctgagcccaggaggcagaggttgcagtgagctgagatcacaccactgtactccagcctgagtgacagagtgagaccctgtcacaaaaaaaataaacaaaatctataggggtagataagcaggctgaaagtccaggcaggatttctatgttacagtcttgatacagaattccttcccagaaaacctgtttttgcacttaatgcctctacttgattggatgaggcccacccacattatatagagtaacatctgttacttaaagtcaactgattataaatgttaatcacatctacgaatactttcacaggatcatctaaactagttggtttttgttttttttgagacatggtctcactctgtcacccaggctggagcgcagtgttgcaatcacagctcactgcagccttgacccatgggctcaaacagtcctctcaccttagcctcttggatagctgggactacaggcatgcatcaccatgcctggctaattttttctgtcttttatacagatggggtttcaccatgttgcccaggctggcttcaaactcctaggttcaaagcaatccaccttcctcagtctcccaaagtgctgggattacaggtgtgactcaatgtgcctggcatagattagtgtttgatcaagcaactgggcaccatagcctagccaagttgacgcataaaattaaccattccacatagaaaagattccaaggttctccgttagactatattcagt

SEQ ID NO: 202995 - DNA, 1000 bp, Homo Sapiens
tagaggtgggatttcaccatgttggccaggctggtctcgaactcctgacctcaggtgatccgcccacctcagcctcccaaagtgctgggattataggcgtgagccaccgcacccggcccaacacacgtaatttaaaagcagtatcgttttggtcaatttgcttagtactatatagatatatagcatagtagttttgatgctgtatattttatatatgaatagagaatttaagtaattccatcaagtcacacagtggcagagttaagacctgaactcagaaagtctgatactagagctcacatttgaagtgactgtgtaatacctaagttattaccagtacttgggctccctctgggtattgaaagaattcagtgagataatgcatgtaacataagaagtgttcagaaaacagtagctgctattctcatgtttactatcagctcactgtagctctgtcatatctggatgtaaggcattcctttctatgctggccagtaggggtaatttattgcttagtgattttcttgctgttgagtagcacttcacattgttaactgattggatttagcttctggaattgatattgtagaaaagtcttattttatatatgtataatatttaatatataatatttaatatttaatatataatataatatatgtttatatatattttatatatatataaatataaataaatgtagtgggtaggatatatatatatatatatatatatatatatatatatatatatctcttaaatgtagtgggtagaaaacaagctagatgatgctgtagtttccccttgatatagttctcttaagtgtatgactaaataatgttttagcaatttcctgggtttttttcatgtgtttatcagtaattgaaatagcctgactcacatgttaggtattaagagccttgaaatcactcttttaggccattcaaaattcatactagaacttagtttctttttaacttaaaaagaaaaaaaaaagatc

SEQ ID NO: 202996 - DNA, 1000 bp, Homo Sapiens
cagcctgggaaacgtgacaaagctccatctctgcaacaaatacaaaagaattagccaggcatggtggtgtgcgcctgtagacccagctaattgggacgctgaggtgggaggatcgctttagcctgggagacagagactgtggtgagccaagatcgcgccactgcactccagcctgggcgacagagcaaggccctgctgtctcaaaatattaaataaataaatacatttatttccatggagaaacaataaagagaaacatcaaaactcagatggcaaacctcctcagcccttcctgaacctttttcctccccagcattccaacatttctctcaaaaactctcaagcctgcccagctttacctctagcctccctcttgcatttcccactcagcaaagcaaaaaggtggctgcattcgaactgagtttcgattccagctctaacttcaatgtccatgttcctaaccactctggttcccagaagggtttctctaggaagaaaaataagggaagggcattagacgtagagaaaacaacaaatgcaaagaagcgagggtttgacagaatctggctgcctctgagggagtggagggacaatggttcagcggggctagagagcaaacttcctgggaaaggaggtggcagggtgaagcaggaaaggagttcgtagccagtgtgtagaaacccataggccatgtcaacaattttgaatttctctacaacaaaaaattttaggcaggggagaaagttgcttgtgtctgaatttccaaaagactctttagggaaagaaatcattgtattaaaaagagacttgcactggaatatttattgcagcactgttcacaataatcacaaagacaggggatcaacctaagtgtttgtcaaaggagaattggataaaatgtagtatgtgcatataccatggaatactgtaatacttagccatagaaaagaatgaagtcatatcttttgcagcaacatggatggaactggaggccatgatc

SEQ ID NO: 202997 - DNA, 1000 bp, Homo Sapiens
aatcccaggctccaccacagaaatgcctcttcaattggcctggcatgggcctaggcatctaaagtttttaattaatccagaagattctaatacagagtcaggactgaaaacccctgggatagacacccagaggtcacggaggacaagttggaaaagatggtcctcttggggtgccagatgggagaacagcttttcagggtgtggatgcttctgaacaacgtgcacccgggacagctctttggaggccccagtggcctggccagaccccctcttatgatacaggcctcgggggccaaggtaggggccccagacaaagccctgctcagatccagcctcagtgtggggaaaccttccatcctgaaaatgtttttgtctaaatgaccgccggaatcccagcaaatccttccaattcggccccagaaccctccctgcctcgacacaccaagatgtcacggaggagtctgttccctcctcctttaaaatgcttccagcttctgtaaatggctcttctggagggaggcgcctgtgatcttgtgttttgaaagccaattcgccaaacttgtttcctgaggggattgtttagaaaaggggagagaatcctcacttggtggtttctgctccttgtatcatttgggtttgtcatgagccacagggagcagggtttgagccttttcttggtgtttctgctctgctttgttctgctgcctgaaggataaatgtgtagattcggaagcagtaatgaccagacctcctgataacagtcacaggggtcatttattaagcacctgctgcataccaggctctgtgcttgcattcatcctccctcttcttaacagggtggggtttgtatccacttttggccctgggcctctctgagctttgtcctaaaaggggctcacacgaggatcccctcacagagatggagtgaggattaaagagctgacgggcatggagggagcagccagtgtccagctccagagaagccctggataaatgggaa

SEQ ID NO: 202998 - DNA, 1000 bp, Homo Sapiens
actctgaaatgaaccatttctctgttgcgtgttctcggcatctggcaaggccatggtggggagagagcgctccagccttgccccaagggctggtgaggaggtccagacagtttcacctaggcctcagggacgcttcccatgagaaaagaggattcctgctgggccaggcactcctaccctgcagcgtgggagcagtcgctggaggtgcttgagttgctgggtgctgtgtcccagtgcccctgcagtcctcttcgtgctctccccgtgaggctcccaaggcaggatctggaggcgcagactgttcaggcagccttgtctggcttgcaggattcctctaagctctgggttttctaggattccaattacaaagggttataatcccatctcctgttgggtaaggaaaattcaaagtactggagagagatcaatttttctgcctgttacagttctgggggctggctcagagggagcaggttcttagcactgctcacgtggcagctccaggtgccccttggaccccacactttaccacatagccctgttcttcctagggctggggtccctctgccactgctctgtggacttttgtgcaaaacacacgcatacaacaaacttggagctagtaggaaacctttgtattcagaagaaaagtggaaacaaaacaaaagtgttgaagttgttctggtagccggccttgtgcaggcagcagtggtgtctctagtggttcctcccttcaaacctacttaccccatgtcattatatttagcacagtacctgtaatccttccactaagttccctaacctttataattattcagcagcaaatattgtacctttgggatcctaaggagctagctcttgcttccttccccccttatctctgggaggtagcttgtcgcagaccctaccttagaggtactcagttactttggagggcagaattagtctctgatggggataccatttccctctttggccctggattggggaggaggaattc

SEQ ID NO: 202999 - DNA, 1000 bp, Homo Sapiens
ctgtgaggaagtgaggaaatactatacctgtaagttatcaatttgacgattttgatgaaatgaacagtttccttcaaataaacagctactactgcttacttcaaaacaaatagataacctttccacaaagaaaaccccaggtccccagatgcttcagtagtgaattccagcaaacaattaatagtaccacttctatacagacttttccagaaaattcaagaagagggaatacttcctaaatcattctttgagtccagcattgccctaataacaaaacgagacaaagacactgcaaggaaagaaagctatagaccggtgtccttcatgaacataaattcaaaaactctagggattggaaaccagtggtgtataacatggttattaatacctcatgaccaaatgtggttaatccctggcaggctttttcaacatttgaaaagcagtcagtgtaattccctgtgtctaggccaacttcatagctaggtgacctgtgcagtcacatgttgctgcactcttgtaagaagggatcctgtacttggcttaatgccctgttgttgccatcttgaagttcttcacagttttatctttgaacttgtgatttgtatgtaaagtctgatggacactggactatgtgtgcaagtagacaggatacttgagaggcactgccctactaagctgttggtctgtgtagtatggcctgggagtgtcctggaattgtgtgtgggtagccagggccatgacctttgtctgcattggttgcagcagcagcaaactcacaaacagttgcaccccagagaggacccacagtgtgaggctggcttgcttgtctctcccctgagcctgtccctctgacattcttaggaaatactaattttctgggctgaatactggggcagtaacttccagctttcaggcagtcaccattgtcagtaaagtattagaaaataaaagcatacttgtggacattgtgttaaggcacactaggcagttcctagaattc

SEQ ID NO: 203000 - DNA, 1000 bp, Homo Sapiens
gctctattggtgactggttcataaactccaggtccagaagcagaggggctcatgaccaagctttgctgtgtgcagcagccttctcagatgcttgctctgggcaaccactcttcagatgcagccccgcagggctctgaaagcagagcgtgtccttcagcaccccctttcctgaagttgtagccagctctgccgggctgcctccaccactttcatggcatcagctaaccatagtgcttccattttcatcaggaggcttatgcataagcttatatttaaaatgtggtcagaaaaatgtctacaagtagatatttgagctatacttcatgttgcacggttcaacatgaaccactaattgacccacttctaaaaaaatcacctgcaatataataccgtcaataaatggatgttaatttttttgtatttatattttaaacctattcatacgtctcagtgtatgtgtgttgtaaatcaaagatgaccgaggcaagtctcaattattttaagaggtttatttgccaaggttaaggacatgcctaggacaaaagaacacaaaatcataggaaaaatctgtggtctgtgcttttttccaaagagaatctgaggacctcaatatttaaagggaaaaaagcaggtattgggggaaagaggaagaagaaaaatctttttaaagggtggtagataaaagtggcaagaggttgcatcctttttagtctcggatcagcattctctgaatctacattttacatgtgagagggggtagaggaatagtcacttatgcattcaacttgtcctcagtgaatctgcattattacataaccttaaataaacagagggtagaggaggcagtaagataggcatttgtctcaggtgagtggagagatgacttttcagttctgtcctttgtcccatacctgagaagatcagcgatgaatttacacggtcagagtgaaattcaacagaactgctttagggtaaagattgtggggccaaccaggaattc

SEQ ID NO: 203001 - DNA, 1000 bp, Homo Sapiens
attttaaacacgtaagaacagaaaaggtggagacttggtggttgtaaatttggacaggaatatattgaaatatcatgtgtatgtggatacagatatcagtattctggttactgccctcaaaaagcatatgttctttttaaggagttaacaaagatatgataaaatactgaaagaataataccagtgatacttagtaagtgctaataactaccttcagaatatagtatagaccaacactgtccggtagaactttcttggatgaaagaaatgttctctattttatctaatagccactggctacctgtggttatttgagcacttgaaatgtatgctgtatgaatgaggaatttaattttatattttatttagaaatttaattaactaatttaaggatagacatggtggctcacacctgtaatcctagcagtttgggaggccaaggcaggtggattgcttaagcccaggagtttgagactagccttggcaatatggcaaaaccctgtctctacagaaaatttaaaaattagccaggtgtggtactgtgtgcctgtggtcccagctactcaggaggctgaggaaggaggatgtcttgagcctggaaggttgaggctgcaatgagctgtgatcatgccactgcactccagcgtgagcaacagagcgcaataccctgtctcaatttttttttaattcagtgtgaatagatacatttgattagtggctaaccttattaaattctacaattctcaaaagatgcttgtctcaggaacccttcatttaaaagtgatttacggccccagagtgcttttgactatgtgggttatatttactgatatttacagcattaaaaatagaaaaattttaaatatttattcattcttaaagttactacatgttaacataaaatatctttgaggaaaagctatttttaaaaaagagtggcattgttttacatgtttacaaatctctttaatgtgtgggttaatagaaggcagttgaattc

SEQ ID NO: 203002 - DNA, 1000 bp, Homo Sapiens
attagtaattatacttctcttgtagacacaataacccttaatgtatttttgccatttatatacatacatgcactttattttttccttcttcctcaaaagagcacactgttcactaacagaaggaaaacaagcatcacactgcatcgctggcgatttgtaacctctccataatgaaaggcagttatatttgctgttgaggattttcctttcatttttataaaacgcaaaatacactagaatataatgccacagacacagctccgcaaataaagatggaagcagcatcaaaactacagttggggagaacgtgacatctctgcatgatggccctacttggcgcttcatctgctaatcaccagaattctgtagacacagagagttagcagtatcaatgactaacacgcgaagtactggtgtacaaaagcctaaagaaagccagtctggaaccccgtgcacctggctctcaggcctatctcctccactttttagcttcattaaaaatggagagaacctcttccggctgcttcctcacctgagggctgcaacacctgctcacaaggatgttgggatccacaaaggggagatggtgcgactcactgcctcacaacccagaacacttagacccccaggaatactcactaagaagttatgccaagagccaaacaaagctaaagaaaaataaacatgacatagcttccagaaacatcagtgttactcaaagattttggtgagggaaggttaagtaaatgaatcaataatttaaaagttgttaacattaaaacaagtataaattatggattagaatgtaatcgttgcatagatttttaagctaaggcccctgtccttgcttgcctaggtcatttttggccatgctcttagatgtgggggtgagtagcaaggggtggacccttctctcctttttcattaaagatggtcttgggaaaaagtatggggctgaaacagattttaatatcacaatggcccttcatgtggagaattc

SEQ ID NO: 203003 - DNA, 1000 bp, Homo Sapiens
actatgtttaaatagagtataaaaaacagctgctactgtatacaaattgtaataatgtgtaatataaaaaataatataaaactataaaccaaataaccatggcatgttaggctgaaaaagaatgatccaaattaaagaactctaaggttactgaactgtttgagaaaagaatgaatactgtttagtgtaacactttattaagttacataggatgccaacatctctagggtaagcgtggaaaaaagagaatggtgtgtacaactgttaaattagtagaagaaaaaccatggaactatatttaaaaaaaaaaacaaaagcaaaatccaaatgaaggcaataaagaaaaaataaggctcaggaaaagcaggacaaatagcaaaaaataatatggtcaaaatgaatataaatgcattagtgcaatcaataattagtgtaatctgctaaacaacatacatcaactgaatattttacttaaaagacaatgactgattgaattaaaaaatagacaacatatgtccacacagacttgcatgtgaatgttcatagcaactttatccacaatagttgaaaaaactggaaatgacccaaatatccatcaacttgtgaatagctaaaaaacaaacaaacgaaaaacctgtggtatatccatacagtgaaattatactgaaaaaatataaaggaatgaaactctgatatgtgtaacagcataaatgaatctcaaaggcattatactaagtgaaagaagccaaacacaaaagtctacttactgtatgatttcatttgtatgactttctggaaaagacaaaataacatagtgataaaaaatagatcagtagtttcctaatgccagacgtgagggaaggaaactgatagcaaaaaagcatgaggaactttctggtgtgacggaaatatctatagctttattgtggtagtggttacatgactatacacacctgccaaaattcatcaaactgtacacttaaaatatgtgagtttgatc

SEQ ID NO: 203004 - DNA, 1000 bp, Homo Sapiens
tgcttcccagggatgggagtggtgggtgtgatggggacacagtacccccactaaaagacttctgctctatagtatctctttttttttttgagacagagtttcgctctgtcagccaggctggagtgcagtggcgcagtctcaactataacctccgcctcccgggttcaagcgattctcctgcctcagcctcccgagtagctgggattacaggtgctgctatcacacctggcttaattttgtatttttagtagagatggggttttaatcatcttggccaggttgatctcgaactcctgacctcaagtgatccattcgccttggcctcccaaagtgctgggattacaggcttgagccaccgcgcctggccttaaagtatctcttaagccgtactgtgtatcttgaaaatttctgtcaggtacatcccaaaccggcgactcctgaccctgaactaagccagcagccaggttcagtcctgagtaaagtgttggcgagcagtccctgccctgcctcgccctcacggccgcctaccatctgggcgctgcctgcatttcagggacagtgctggcatttgtttttccttttgtatctttcaactagatagtgttgtcacctacagaggagggtttttaaaagtgtcgctgttgccctaggcattgcctgtgatctgtatcaaagccccacgtgtgaaccacagcttgagctgggaactgagaaagggtcagttgtaaaagtcatcctaggatgcacgtccccagcccccgtgcatggatgtggacacgcaggctggaggagggtggggggctggccaccctgttggcatcttagcacccagcaggctaaagcttgcagctttgtttattttcctgaagttcaaagttcccatccctccgtggaaggcctaatagaacaaagaccacccacctgcagttgcttttctttcttttttgtgcttcaactctaaagaatcatgcactatgaaggaagtggctcctgctagatc

SEQ ID NO: 203005 - DNA, 1000 bp, Homo Sapiens
gggagcagcatcctttagaaatgtccagtgaaggcaatagggagcaagaaaggaaagtttagaaacctataaaaaggaaaatcagggtgcacacaacccttccacatactgtccttttcccctctaaacaagcaaggtatccaggactatagaaggaaatcaaaacaacaccgaaaaaaaaaaacaataaatcaataataaaatagtataaattgctacactgacggaaaagtatccatttgaattagcaatctcacatactactccaaatcactagtccagctggcaaaaatgcagaggtgtaaacaatctttgtctatacaaactactatgagaaaagaacagaaaatgagaatccaaatgatttacctgatgaaagtccctgccttaccaaggaatagtaataataaagttgaacaagaagaaaactgtagcacagcactccaagctaaattacatgttcccaaagagcatttcaggacatgaaaacaatcttgagtcataaatttaaaaactaaggagagaaatcaacaacaataaagaagaaataaaacaagataaaaaccgaggaaaaaatagttgaaaaagtcaaaattatatcataggtcaagactaaattctgaaatacccaaggaagaatagttttgaatgaaaacataataggcattgggaaaaagtagaaaaatatttaaaagaatgtaaatgagatacagaaatcaaaagtcagaaaaagtagatgaaatagaacataagcaaataatgtccaattcacgtataattaaagtccctgaagaagaaaaacaaagcaatagaacaaaaacctaagtaatatttaaaactataatatgtaaaaattttctggaaataaaactttcttactacatatattgaaaagactttcatcattattattaatccattgaatccccagtttcttaaatttttttctttgagacagggtcttgctctgttgcccaggctggagtgtagtggcatgatc

SEQ ID NO: 203006 - DNA, 1000 bp, Homo Sapiens
ttctgtatagtgatataaaaattaatgcctgcaaactttcaattttatcagtgaatgcttttgtaaatagaatcttacatagaactccaatatacaaaaatataacagtaattatctatctatttatctatccatatttttaatagagatgaggtctcactacgttgcccagactggtctcgaacttccagactcaaaagatcctcctgcctcagcctcccaaagtgtctaacagtgatattttattcaaataaatatactttctgagtgtaaggcttgatgctcactttggtcatgttggtcagtatgtgccctgaggctcttcacatgaagacaaaactggagcctggagccggggaggcccaccttacagcctcatcgtcctgagcaaccacagaaacacagcccgtgaaatagcgctgccacagtaccgggcctggcctgaaggatctgtcaactcctcggaagctgggcggacgagtcccctccccacaccttgctgtgcccactcaggacttccaggcagttctagcagccccactaactacacccacgtgaatggagctggggaggaagggcacctcctggaccccgtctgcctgaacaccaactaaggatgacctggggagatgaacctagatcaaaagcagccactttttctctgaatttccagggtgtgggctgggattttgtcctcctcttcccctagccttgtgtttctgtcttttctagatgcagactctgggcagaggcctcttttgcctgcctggtctaagagcagctcaggttgggtgtaataactgagttgaatcctaatgtcaacacgtacatttcccaccaaggagaaatgcaggggccagtcacaaataaatatgtcagagctatacacaacacagctatatatacccccagatttatttatttattttatttttattttattttatttttgagatggagtctggctctgttgtccaggctggagtgcagtggtgtgatc

SEQ ID NO: 203007 - DNA, 1000 bp, Homo Sapiens
aatgtaggcaggagggccacagtggcgctgtggattcagaccacaccttcggctctgtttggggcccttcctgtaaggagcgtactgatgccagaggctgggggtgtggaagggaagctgctgtgctgttagatccattctgctatttagccagccttccttttcccagctggcacagacaggatgtgttagagaggtgctcagacctcctttcagagcaactgaatcattctccaggagggacagggagtctgaaatgcaaacaggttcccagggttattgaagagcagccaaactgaacacccactgctctgtggactcaagctggttttagacattgtttggtcaggaccagagccgagctctggggcccactgggggctcttgtcgcaccatatcattgattctacaatgcacatttcccccgcctctcatgttttaacatgtctgaaatcaggatgcatcttccatggatggtgtttcagggtttcattgatcgtgtttttcttcctgagtggcacacaaaattaatggtgctccctagagttgatggtccctgcggttcagtgaaccgtgttgctcttgtgtaagctcctgtgggaacatagagtctctgtgtcccaccttcttcctcgcagtggtcagcacggatgaggtgggagttgcataaatgtcagcattcgaaagtgagggcgtctgtcggtgctgtctcactgtggggcttcagagaacgtgagcacctgtgtttgcattctccatcaaggttcatgtcctgttggctcataagcatgattatatccattatacaaactggggcacaggcacccagagagaagtcaaaagacttgttcaagatggacaactaggaagtggtggggacagaccagtcctgtctgatgccagatccagcgctgtatctgccagtcagcatgcacactttcatctctccagcctcttcccactcacctttactcaacatttctgggcctccatagtgatt

SEQ ID NO: 203008 - DNA, 1000 bp, Homo Sapiens
tgggcaaactgatccataatggatgcttaagtctgcaaacttccctctactagatcaagcgcagaactgattcatctgccaggtctttctttctggctgtcacctgtgcatgaggcctgcacatgcctcctccaacatctttctcagcaaccttactaaatgccccattgcttaaggtcttaggcagctcctgcagagggaaagccaaatcccttggcaggatacaaaaagcctttcctgctctggcctctgcctgcctttctatcctcatctcctccagcccacgcttagcctaagctccagcaatgctgtgttgctcatccacagatatctgggtgagaaaccttctatcctcagtatgtttccctgtgaagctactgctccatgcccagggctctctcgaggcggtgcccctttccggaagtctccctctgtccacatgctcctctctccttgccctcatcagaatggcgtgtgctgtttgtttgcttctgtcctgccaacatgctgtggctggcttggtactgggagctggatttcttctctctgcaaagcccacttcacatagtaggcatgcaatgcaaatttgcagaaggaaagaggggagggagcagaacgggttgttccctgtctctatagattttgcgttacagaagagtgctttgcaaagtgtgagtccttctacccatgcagggcatcttagtggctgttggcggcagtggtcatattagggttgttactatcatctactttaaaattaaagtaggaaccatctgtaaagtctcacactgagcaggcagaaaaacacaaccttcatggaagaaaaatctttcttgaagggtgaaatttctcacttggcaagagaaatgactatatgaagccaaggtgatttgtttgctaattgcactctctttctagggtttcagcagccaccaggtgtgaatgtcaagggaaccacaccatctgctcgataattctctgggggacctgtgattagatc

SEQ ID NO: 203009 - DNA, 1000 bp, Homo Sapiens
tggagataaatttatgtgtagactttttttttgtaagacatagttgataatgaaaatttatttaaatggtcttgcaatgatttaagtattcaaatgcttaaagaaagcattgctggtacaaatatttctatttttagaaagggtttttatggatcaatgccccaagtgtcatcagagccattggtgttttcatttttaaaatgtcacctgtaaaatgggcattatttatgtgtatatggctttttttggcattcctgataaatgtattatataaagtctatacattggataataacactagtatatttaaacttacagacttatttgtaatgcaaaccaccattttaatgtactgtaattaatatggttataatatatatatagtccttctgtcctaccatcacacaactttttgtgtgtgtaataaaccgcttttggtttgaaaatatttttcgaggccgggcacggtggctcacacctgtaatcctagcactttaggaggccaaggtgggtggatcacctgaggtcaggagttcgagaccagcctgaccaacatggtgaaaccccatctctactaaaatataaaattagccaggcatggtggtgcatgcctgtaatcccagttacttgggaggctgaggcagaagaattgcttgaacccgggaggtggaggttgcagtgggccaagatcacaccattgcactccagcctgggcaacagagtgagatgccatctcaaaaaaaaatatatatatatatattttttaaaaaaagaatgtttatcctggcattattcttattagcaaaatattaggaaaaacataaatgttttgaccaataataaggaaatatatgaattatgatatctatgtaatatagtaatggggaaattattaaaaatgatcttttcacagactattacatgggaaaatattcacaatataagtggaaaaagataagcaaataaggctttaactacagtgtgatttctaattttgtaa

SEQ ID NO: 203010 - DNA, 1000 bp, Homo Sapiens
agcaggaaaacagtctggctgaaacactggttgtatttcaaagagcagtagcaaatcagggtggataaatggtgtgggcctaagcagctggtgagcattaaatgtgtaagaatcaaattgtatccttagcaaacctctgaagatttctgagtaagatttttatgagtgttggtaaatttatataggatgcatatgggtagtacatggagaaaaatgaattaaggggaaaaaaagtgtgtaacaatccagatagaaagtgatttttaaaattctaattagagcggtgcagtgggaattcaaatataatacttactgagtcctcgacgcaagatgctgagtacaccaatgttggaaatacaagggttctcgcctcaagtggctcactatagtagaggaaatgggaatggaaaccagccacagtgaagtatgctatcacggtgatgggaagtgccagaggaacagacaggacaaagttgtagctctgcttagagaaatgagggcaagaagcaagttagaggaccttctcaccactttccaaacgaaagaaatgaggaaatgcacagcactagaaaatgaaggtaggttcagggacctgcaaacaggttcctgtggctggaacagaaagtatatggtagtgaaatgttctttataaaaaagtagcaatggacagaatgaactagaaagatacaaaaagaaaaaaaacaaacaaacaggcttttgtaataatccaggacagcaatgaagagtgtaaatgggaatgaggaacaagagactaataggaaattagttttaaataagcaaaattttcaaactgataaaggaaagtatgttcttctaaaacatcatgctgtttccagacttggagactttcaatagacttaactccaacttaacctttagaagtcttagcctaatttcttaaaaaaaaaaaaaaaaaaaaaaaacctctcctggcctgcagaccaagttaggtctcctcttgtgtgatcccaataggatc

SEQ ID NO: 203011 - DNA, 1000 bp, Homo Sapiens
tataaaactcacccactctgtttagctcattagagctcctttttattttgtagattacgtattgcccagttcatgagttactaataactcaatcagagctttgaaatttaatttgctgaaacttttttgtttgtgtgtttgttttgatacagggtcttattttgtcacccaggctggagtgcagtggcacaaacacagctcactgcagccttgacctcctgggctcaagcgatccttctgcatcagcccccgcacatagctgggactgcaggtgcaagccaccacatccagctaattttttctttttttttttgtagagatgggatttcaccaagttgccctggctggtctcgaactcctaagcttaagcaatctgcccgccttggcctcccgaagtgttaggattacaggtgtgagctaccatgcctggccaaaactttgttctttgacaaatacatcttccacatgccagacactgggaatattactacgaatatatcctgttcttaccttcaaggaggtaggaagaaaactacaagatagtgtggcaaatattgtaatagtaagcacaacatgcaacaagagcaatgaatggtacaaaattgaaaaatggttaggtagagggaaaaaagaagattgaagtaataatagtcaacattatattgctttgcatgtattatctcttttcatttgcataacaaccctgttattattcctatttttcaaataggcaactaaggatcagaaagtattttgattggctgggcgtggtggctcacatctgcaatcccaacactttgggaggccgagacagtggatcagtggagcccaggagttcgagagcagcctgggcaacatagtgagacctcgtctctacaaaacacacaaaaataaattatctaggcatggtggcacgtgcctatagtcccagttactagggaggctgaggtgggaagatcacctgagcctggggaggtcaaggctgcagtgagccatgatc

SEQ ID NO: 203012 - DNA, 1000 bp, Homo Sapiens
ttaatcttaatgcagtttctggatatgaacaaactataactgagatgtcataaattataatcacaaaaatttttgttgattgctaaacctgctacttttgaaggtcttcagagcttttaaaacgcttaataattataccctttgcctccacaagatggagtaagtaaatagtaaatgttaacttaaaattgcagtttactttttatattaaatgtctttgcctgaaaatctgcaccattgataattgtttatatattagaacttacaaacaactatgaaaattcacacagcttccctctgtgtcagaaagatgatttttctcattttaaacgggaaatacacacttctggttaaaaaaaaaaagaaaaagcaactttgcagtgcccatctccttttattgggatataagaagcaaaattagtaattagaagccctgattcttttttattatatcttggttgcaggagaggtggatttgattgttcagctgcagagctgtggacttcagtcaaagggatggacattattttatctctgtttttttacttggcctttattttttcaaatcttaggttctctttttgtacctttcaccctctgctactgactcttattatttgaaacattaaatcggaagttatactaatagacatagggactttaattaaagtttacctttttttccagtcaagaataaaaaaaaaatggtttccaaataaatatgtattttttaaaaggttgtaagagaagcattttttttattttttattttatttatttatttatttttttgagatggagtcttgccccgtcgccccggctggagtgcaggagtgcgatctcggctcactgcaacctctgcctaccaggttcgagcgattctcctgcctcagcctcctgagtagctgggactacaggcatgtgcaaccatgcccggctaatttttgtatgtttaatagagatggggtttcgccatgttagccagactgctctagaattc

SEQ ID NO: 203013 - DNA, 1000 bp, Homo Sapiens
attccattctattctgttgcatgttacgtaatataaagggcatctaagggtcaggaaactagatgaggaaataatgaaatttgagactatgtggaaagaaaggatggagtgaaaagaaaggaaggtaggaaaatggaagattgctttcaaagtaagatctttgtgcatttggaatgaaaataaaatcaatagggagtgcaaggaagttcctctggtttgaatgaatctgcccggcttcaaaaagttttacttcatgattgaatcgaaactcaaaagttgaacaaggaaattcaagcacgatttttattaaccccatatggcccagggagacttttaaaacagagacacttgctgctttctccagccctggatgttggggttttgcatgtaactcattcgtgatataaacgtatctcgtggggttttgcatgtaactcattcatgatataaacgtatctcctggggttttgcgtgtaactcattcatgatataaacgtatctcctggggttttgcatgtaactcattcatgatataaacgtgtctcctggggttttgcatgtaactcattcatgatataaacgtatctcctggggttttgcatgtaactcattcatgatataaacgtatctcctggggttttgcatgtaactcattcatgatataaacgtacctcctggggttttgcatgtaactcattcatgatataaacgtgtctccttcttttaattaactacttctctcatcaagggaaggggaaataatcccaatctaacaactcatccatgatgaactttgctgtctttcttctgtttccaaatgaatttggcttattaaaaaagtaatgagctattaattaactctacactcatacaaagctgtttaattctcaatctaattagccgcaatctgatgaaggattttaataattattttaactttgctaacagaaacatcttttcacttttcataagttatttatagaacagttcacattggatc

SEQ ID NO: 203014 - DNA, 1000 bp, Homo Sapiens
atgaaaactagtaactttgacctgcattttgtaaacactgaggaaaactatttgaacttaaaaactaaaaacaaaaaatggcattacttttaagagaactacactttctcctgttttagggagaaaaaagaaagacttccatctcacgtatatatgtaaggcaaagaggggcccatggctagtgaccctgtgctcaaaggaaaggctgagtgaagatagcgttttggttttcaaagccattgaatagccatattacattagcaaatggcttcacattaaaaggtaccaccactgtggaggataataacgatagtacctggattccaggattaactaactgggtcctgggccaggagacaaaaccaagccagcactcttcatatcacagacaatttaactagacaaacaatatttaacggatgggatcacactattttagctgaaattacactaaagatctgtgtattatattaaacttaaacattagtgattccatcttggtcacaataaaaggcaactgctaaaactactgtaaggaattaaagacctacaacaaaacgtgcctctgaagtacttaccatttagttgctctgagaatgttctcccatttcagaggtctgattgatatggcttatttcaggacagaattatttaatgagcacaactttcctcaatgaccatgtaacaaaatggaaagaccaaataggaaagacaaaggctgacacaagggagtcaactgctggtgcttccagaaatcctggaaagcgggggtgggggcgcccaggagtccacagccacagtgctgtactacatggctttttttcttaagttcaggcaggtgttggatttgggcttcagcttgctggcccataaaatgaggaatccagaaatgtgatcaaagatccctcctatgacactgaagaaattccttgtaggtatctgctttccacaaaccagaacactggcttgggctgaaggagtgaatggctttcagcacaca

SEQ ID NO: 203015 - DNA, 1000 bp, Homo Sapiens
gtcgcccttggtttgccccatatccacctcacatcttctctctccatctttgtgtgtactcttccctcctcatgggcggcctttcacgtttcctttagggtcttgctcaaatgccattttctctgtgaagctgttttctccttttccttctgattctgccactctaagtaatcagatctctacagtcttgcatctgtccaccaacttctaaaattctgtgaaaaggggaaactaaactcatctactgtggttaaccagaccacaaagaggaatgctggcgttcatgaagaatattctgagagccttgtcaaagtcactctgttgtccaggccaaacagaggagtgtggatgatagagatttcggatgtggcttgtgaaagggaggagggcaaggctggcagaggtggagttctgtctatttaaagtagttgtctgtttagcagtgcaccctggaggagacagggctgtctgtgctctgggccatatcaaaggtgccctcaacaccccacagttcaggtctgttagctttcctcataaaaccatgtttggagagatggcttttcagaaggaattttggcttgaaactggaagaaagcatgcctgaaaatttaattgggaagtaagggtatatcaaggggggaaaggcagcagctttgaagtggaaaatatcttgcaaagagtaaaaatagtggcttttaagtggcatatgaggaggttcggtggccagccctttcattagctgacttcctgtgccccactgggactgtcctctgagggctgattgctgcctttgatgcctctaaccagctggtgtcactactcaggccgaggatttcaggaagacaggtagcttagcaaagaggaagagaaggtttgtttcatgaaagctgatctaccaaacaccatctggcaagggattaataaccagaatatataaggagctcaaacaactctataggaaaaaatctaataatttgattaaaatacagggcaaaggatc

SEQ ID NO: 203016 - DNA, 1000 bp, Homo Sapiens
aggcgctggtgttctggggcggtcccggccagcctgaggggcggcggtagctgtctctgtggaggagcgacgtccgtaacgaagtctttttaataaaatctgctgctttaaagcagaaaccgagcgggtgaggatgtaaagtgtggcatggaaagtaggagtcttcagcacacgggtgttttcttctgctgaatctttttatgctggagtttgagactaccgagttcttcctgctaacaggactggccagttctacaaagttgttgcttttcatgggcgcacgtaactgcccggagtggaagcgctgtgagtgccgatcaccgaatgggccgagagaaaaggtgccttttcctagggagctcttaacgttggtcctagggccgggcgcggtggcggaggtcgaagtgggcggatcacttgagcccgcgagttcgagaccagccgtggcaacagcgagactcccttctctgctaaaaataaaaaaattagccaggcagagtggtgcgctcctgttgtcccagttactctggaggctgaggtgggaggatcgcttgagcccaggaggtcgaggctgcggtgagccatgatcgcgccactgccctccagcctgggcgacagagcgaggctctgtctcaaaaaaaaaagaaaaagaaaatgagtccttaagttaccattaattgtcgtgaataaaaagttggtctcagtgagttttgcagttgacaacgaaagatgggtgttcgtgtgtgacagcgactcctggtttctcctccactttacctgccgctccacatcaagttttcttctgctggtgccactttctctgctttaccttcaaggttggcatcctccaagtaatggcgattctcattccctatctacgctcttcctatggtctttgctgaattcttggctttaaatatccctgtgccccagcaccgccccccccgccccttatttcactaattcatgttttcagctctgagctcaggatctgtaattc

SEQ ID NO: 203017 - DNA, 1000 bp, Homo Sapiens
tggtcttgaactcccgacctgatgatccacccacctcggcctcccaaagtgctgagattacaggcatgagccaccgcgcccagcctgaacttggtttttaaaagaccactttggctggagtattgggcaagagtgattttctaaggtcccttcccagctttttccctgtcattctaggctgccatgaactggttgcctgagccataaagacacagtttctggattagagtgactgaagagcttagagtggttccttgcccttggccggagtagggaatctgtgtcaccttgttctgcaggagatggaggaagtgactccctcagggaggggtgggaatcccatcttggaaaacatcctcaaaccacctgtattgtttctgcctcctgtgtggaagtttctgccaatgacacagtgctctctggaatgcacccccccaacgcacacacccaatcttccgtttacacaggcatagctgtactttgcattcctcctaggatttagttcaaagctagcctacaggaactggtcgataaagagttactgattgattactaaagaaagagaatattctcagccattaagcaaatattaatgagttttatgagtattatgttggtctctgggggtgcaaggtgattaaatgggtttctagtcttcactgagctcagaattcagtggatagaccaaaaactacagacaactacaatgctggatacaatagttataacagcaacatttactagggccttccttatccaggtaggacaagttggctttggagccagactacctgggttcaaatcatggttttaccacttactcgctgtgcatctttgaacaactttcttaacttctctataggaataataagagaacctacctgagtggtactattttgagaattcaatgaactatctcatataaaacacttaagtgcaagtgctcattgttaaatattactaaaattaccttaatacctgcaccatatgatcttacata

SEQ ID NO: 203018 - DNA, 1000 bp, Homo Sapiens
ttatatgaggaatgtgtatctaggagatactgtttggcgttggctaagggtggaatgaatcatgtatgtaatagattatgcaatttacagtgatgagtggatagatttacttatggggtaggttataatgtggtgggatgtgaatctagaatgtgcctcctaggcagtcatgcagattgtgcatttggtaagtcaggtatgtcatgattcatgtatctaatagctcttcatttgcagtgtccacctagtagctcttggatataacgggtcatggctgtggcatggtgtggttgatcttggttgatcgtagaccttatttaattgaatctaagatgtcatctatggaaaaatgcattgttatttttgttgccaatgaaattctgacatgacattgatcacattccccgttaagcaatgtggaactgtgcctcagagtggaagaggccatgtattcctggattgtgtggggagtagctgtgcctgtggcctgccataggtgccaggcaggtggcagaggcctgggctcagcccttggaggctcctcccggagctgccctccacatctcttctgtgtttaccccttggtcggatcttctgtttcttcccacctctgcactgcccccaaggccggtggagccaggtcagatactcctgaggtaggcatgggaggaacccgccggtatttggtctctttcagccccttatcaagtctcatagtgtgggttgcagggggctgcctcttgctccctccctcagagtcttgtcctggctaacagaaaactgagccaggatcatctttctattttacagagggagaaattgaagccctgagaagagacgatgtaaataaagttatcggaatagtgactgagctagttcctaaccccaggtctcctgacatcaaatctagcctctcttgtcctccacaacagttgctccctctcccctttccctacaggcaatagcactccccagtcatctcagcttcagaggtcagatc

SEQ ID NO: 203019 - DNA, 1000 bp, Homo Sapiens
aggtagacgtcagaatccagcctgagctcttcgcactacactcttactttcatcctgatttagccttcctttggtggctcccaaatttgctacttctcttttttgttttgagacggagtctcactcactctgttgcccaggctgaagtccagtggcacaatcttggctcactgaaacctccgcctcccaggttcaagtgattctcctgcctctcagcctctcaagtagctgggattacagatgtgcaccaccatgcctggctacttattttttaatttttctgtatttttagtagagtcggggtttcaccatgttagccaggctggtcttgaactcctgacctcaagtgatccacctgcctcagcctcccaaagtgctgggattacaggcgtgagccaccgtgcccggttcttcagattggctacttcccttctgcttttgctaggactaccttagtctaggccttcaccatcttcttcctgaattgctaaaacagcttgcctgctagtctctttgtctactcttttctgctccaatttgcctgtgccctgctgctgtatactttttcatatttcagcacattttgttaatagaatgatctgggcctaactcagcaggaaatttattctctagcatctaaaaatggtttttcattaggctaggtgtcacctactcatctgtgccttgttaggatggggagcagtaaagtcatacgagatatagactaggtttataagatagctgactttttaccatccttggtaatgatagatgaggacagaactcacatgaagttcatagctaatctacaaagcttgctgtggctaacagctttaatctaaaagcttaggctgatatgtttgcagccagttgtgtttctctaccactgtacaaattcaggtggggcccaaaagtctcaggtgttaatgatctacacactaaccctccagctgaggtgggaatctttaaaagccacaaatgcaaaggaattactgaattc

SEQ ID NO: 203020 - DNA, 1000 bp, Homo Sapiens
actatctggtcttggatctgccgtcatctggatgttgaaccttgggaggtcttcagcccatttccccatctgtaaatgagatttatgaccccatggtaggcatgtgctcgtgttctcagcgtccatccacccctttcccactgtgaagcaagctgcaatcttccagttggcttctgattttaaagcccatcagccccacaccacgcctcttgccctcttggcctcaggagtttgggcattgccctggctgtggtggtccaggcagagccacccttcagactttcctttctgcaggaagatttgcttgccctgtccccagatgagaatgaggcagtgtgttgccctggctgatgatgttggctgccttaactcctcggaggaagccagcctgagacaaggcagatacacatggagggcagagccaagagaactgcagagaaagagacagaactctgatacattttaaggccactctatcatggaatgtttcagttatgtttacagcaaaaaatcatcattcttccatgtactttgagctgcattttctgacacttgccatcacccatcttctaataggcagagacttcttttagggttcagagtgctgggattcctgatcagagattgatttctttgtcatttctgctcagtgactacagtcttagcctgtgtgactcaccactggatgcacccactgtgtttccacaggaagggagactaggaatgtgtttgaagagttgcctcatttcccacctatgtctgtaagctaagaggagtaggaataggctatacagcagaagcctatccacagagaatggtgcaaaagaagagaagagcaagttccaacaactcagttcagggagccatacactccctttccagctgctgccagtttacgctgggtttctgtctcttgtacccaagatagctggctcagaaaatcattttattcatcttcgttttcccagcacccaacactgactggcacatagtagaattc

SEQ ID NO: 203021 - DNA, 1000 bp, Homo Sapiens
tttcatctgagtgtcattctcatgatggctttgtctctttagacaaagagtttttcccttgtgtttcttttgtgtttttccttgcctttgcatgcattgtaattttttttgttgttgaaagctggatatgttgcatttggtaataagaactgaagtaaatcgtctttggtgtgagattttatgtcaatctggataggagttggactgtgcttaatgtttgttgtaactataggtacaagaggcttcatgttcttctggtgtctgtttttgtctctcctcttggctttggagcttctctgtttattcagagagagtctgtgtcttaaactcttttctctgtcatctactctttttatactggaagcttgtggtggtaggttgtggggaggtaaagttttctatagtgttgtgggtaagtctctttcagcgggtctgtgtctttgggctgtgacctttgcaggtgtttccgtctccccctgtggtattgttcctccacctgcctaccccatggctgcagcattaccgttcctggagccctgaccccttttggacatgtttttttttttcccccttaggtgatacaggagccagaaggccagagtgggaggaattttcttctctcatctgggatgaggctctggcaaagtcctttgttcctggagagtaggtgcttgttatgcagaaggctctgagtatatttctccatcactcagagccatcactcagggtctctttcccccacccctaaccaggaccacaaaaagatcttcctcaggttctcaaaaggagaacatggtagggttcctggagggcaagttcatgaaagtgtgaggcctatcatgggtgcagccccagaagtttctctccccttgtgctagtctacactgtcttcagcaattcatccaaattaccatttaaatgttccccttagtttctgcctccagcgacttctgcttcaggtaaatagatcttagtttctaagattttagtttcagagatc

SEQ ID NO: 203022 - DNA, 1000 bp, Homo Sapiens
gtgattctcctgcctcagcctcccgagtagctggaactataggcgtgtgccaccatgtctggctaatttttgtatttttagtagagacggggtttcatcatgttggccaggatggtcttgatctcctgacctcgtgatccactcgcctcagcctcccaggatgctgggattagaagtgtgatttttttgtatttttagttagagatgggatttcaccatgttggccaggctggtctcgaactcctgacctccagtgatccacgtggctcggcctcccaaagtgctgggattacaggcatgagccccggcgccccggccagcatgttctcagtttaaggcaggatgagacttgactctttggtgtgtgtggaccgcattcgctcatctatgtagaccgcattcgctgacctgtttattcgctgacggacacttggaccactttcaccttttgactattgtgaataatgctgctgtgaatacgggtgtacagatatttgtcagagaccctgctttctattctttcttttttaataaaaattttatttatttttttttgagacggggtcttgctctgtcacccaggctggagggcagtggcgtgatctcggctcactgcagcctctgcttcccaggttcatgtgattctcctgcctcagcctcctgagtagctgggactacaggcatgtgccaccacgcctggctaatttttgtatttttagtagacacggggtttcaccatcctggccaggctggtctcgaactcctgatcttgtgatccacccaccttggcctcccaaagtgctgggtttacaggcgtgagccaccacgcctggtcaaaaattacacttttttttgtagagacagaatcttgggaggctgaggcaggaggattccttgagcccaggagctggaggctgcactgagctatgattgccactgcactcctgcttgggtgacagagtgagaccctgtctcaaaaaaataaataaaaatatagatc

SEQ ID NO: 203023 - DNA, 1000 bp, Homo Sapiens
atttttgataaaaagcatgtctatgattgttgatgtgcaaatataaagagccaagcatggagaaagaagaacaagagttaaaacatacctcagtgaccaccaccagcccttacatacctgccctgtcctggtccccttctccaggtgccctcttcaaagtatcccaaaccagagaaacaatataaccagtgaccatcagggagatttcagttccagacctaggacctgcaatgaatttcaggggaaaagtgctttccttttttatcatctactcagaggatgttgactgacagctaaaactactcaaagggtacaaaattcagccttatggtttcaagaatagtcaaccctgcatgtgaaatcatcagagaatggagatttgccccctgtccaggcaggctcttaaatttgcagttcagatataaaaaaaaggtctcacttgtttacttatctgttttgcatatattttttattttctgttgagtatgatatttgatataaaaaaaaaaaaactttttagctgaggatggcttctggggttagccagttcttagagacagcagaagactcagctgggagcatgcctttgatgcaccaactaacccatccagagccattcccttctatctggcctgtacatctcaaaaggcaatattcctctaccttgacaagcccagggccagctaccaggcaactagagaccaccaaaagccccctaaaattattccaattggccaattctaaattgttcacactgccctgttttgccttttccatcgaaaccaaaataaggactgaggtccaagctgtccctagctcctgtcttctgccatctgaccaaagcttggtgcttccaatgtggccctgagttgtatgtggtggcctcctctctggaactgtgcgtgtagtcaactttgtctttctcacgtctccttggtggtggcatctgactgattatctcataaagaaacacaaaacattactgtttctgtttctgatc

SEQ ID NO: 203024 - DNA, 1000 bp, Homo Sapiens
gcatatacttggaatacctttatttatgagcagccccttcaagatgagaactgcaatggaaaatatggtaggtttggcatcagtaacaacatcagagctggttatgggaatagctcagctcagcctctgaccctgccaagtgcaatagcactgacagtcatctccccctgttaattatcaagtcccagttgcagagaacaatgaactttctttattactttgcctttcatcttaaaatacagttgcaagagcagaactttagaaaaggaagaacacagtttgacagaaattagcagccagagtctaactttaatgagaggttgacaaattaacaactgcatactatataaagtacagtaacgtattttttctcttgttttaagaacaaggaagagccaatgagatagtatatgtaaatgcattagaaaaagataaaaggctttgcgtgtgatggtactggtggtggcttttgttcaaaccgactcaaaatcatccacgctagtctgcaaattaaagcagagagacaaatgatatctcaaaatcctctctcaagtcatcttcattgcaacccctgatcccaaatccttcttcctttcaatactctcttctataggaagacaggaacatacactcatacatacacagttgcaaaccactggggctagcagaaggcaaaggggcaagtaaaatagagaaaaaaggatgctcgtggcagatttttttgcaaaaaatgacaagaattattgatctgcctgtactcattcctttgggtattccccactcctacactgtggttgtacccatgactacctttagccaatgaggcattagcaaatgagatgcaactgaaagcctgaaaaatgcttggacactggggttatcctttcttgccattcttaggatccagagaccaccatgtaaaggcctaaactgatggggatgagggacacaagaccaaatcatccccagctgacatcaagccaaccaccagccatgtgag

SEQ ID NO: 203025 - DNA, 1000 bp, Homo Sapiens
ctgcgccattgcactccagcctgggcaccaagaacaaaactctgtctcaaaataaataagtaaataaaaataaaataataaaatacaaatttattcaggatagcatattaaacattgattgatgttggtactttaacagataagaactattttaattttgtgttcaattgagtcaaccctaatttgtttagaaacttctggaattgaatgcaatctgttaaaagtaaagacgtgttaggccagataataatattgctttaagcttgcctatctctaacacttattaggagaatatatttatatctgtctttttaaagtaagtattgaaacagctttgtttaattctcttttggtaagaaagatttctttcataacatttgcataatttttaaaaaaataattgtacaaaaatcacagaaccagtaaagaaatatctgtgacttgagggtctcaggaaggcagtatcaaatggagattcatttatttatttatttatttatttatttatttattgaggtgctgtccttttttaagagtgtatttgttcctctttttgtaaactgcagacaacttgaactgatggtgaggtctggtaagaaaaaaaaaaaaaaaaattcaaagctaccaagggagaaaaggtgaatttcattggattactaaattcacaaacaaactttataggtcatcattgaacattttatttatattagaataagcaagcattgagcaagatagaaataattttgcttcaggttatcatcattgtgaactatcacaaggtataagcacagaaatgacagaagttctggcacagaacaaggaatttgcacatggtccaataacatgaacaaaaaaggttgtatttatttatttatttatttatttatttatttatttatttatttatttttgagacagagtctcactctgtttcccaggctggagtgcagtggtgcaatcttggctcactgcagcctccacctcctgggttcagatgatc

SEQ ID NO: 203026 - DNA, 1000 bp, Homo Sapiens
agagagaagggaggaggagagagatgtgaggctcctttaaacaaccaaccagctctcatgtgaacaaagagagcgagaagtcactcattactacaggaagggcaccaagccacgcatgagggacccacctccgtgacccaaacacctcccactggaccccatctccaacttactggagatcacatttcaacgtgagatttggaggagacacacatccaaaccatatcactgcgtgtggtagtgcacacctgtaattccagctactcaggatgctgaggcaggacgattgcttgtggccatagttggacatcaacctgggcaaaagagcaagaccccatctctacaaaaagtttttaaaaaataactagatgtggtggcatatacctgtagtcccagctattcaggaggctgaggcaggaggatcgtttgagcccaggagttcaaggttgcagtgagctatgatcatgccatggcactccagcctgggctgcagaccctgtttccaaaaaatagaaaaaggccaggcgcggtgctcatgcctataatcccagcactttgggaggccaaggcaggtggatcaccagggcaagagatcgagaccatcctggccaacatggtgaaaccccatctctactaaaaatacaaaaaattagctggacatggtggcgcgcacctgtagtcccagctactccagaggcagaggttgcagtgagccgagattgtgccactgcactccagcctggtgacagagcaaaactccatctcaaaataataataataataaataaataaataataaaaaagaaaagaaatacaagtggccaataaacacataagagctgtttatgttgggttggggcaggagaaagtggagagagagaggagtgagagatccagcagaaagaaaccctagacaaagctgattgtagctctaccaacaagcaagaggaagcagctctgcagggacagctgctctcccagctgtgcttctggaaggatc

SEQ ID NO: 203027 - DNA, 1000 bp, Homo Sapiens
tatttgccaacagcaaattgtctgaaaaagaaatcaagaaaataatcccatttactgtcagccctgcatatccatcggttccacatctgtggattcaaacaactgcatatcaaaaatataatattcattggatgtggaatctgcagataccgagggccaactgtgtatccatgggtttctcaaggcctactgccgggcttgagcatctgcagattttggtattcacagagggtctggaaccaatcctctgcagagactgaggtacaatagctatcaaaaaaaaaaaagatatgtaagaataaatttaaacatcagtgaaagaaatggaaaggaaacaaataaatggaaagatatttcatgtttatggattggaagaattaatactattaaaatggctatactcccaaaacaatcagattcaatgcaatttctatgaaaataccattggcattcttcactgaattagaaaaaaaaaatctaaaatttgtatggaaccacaaaagactccaaataaccaaagcaatcttgagtaaaaagaacaaagctgaaggcagcagactacctgacttaaaaatactacaaagctgtattaatcaaaacagcatgctattggcataaaaacagacacatagaccaattgaacagaataaggagctcagaaataaattcatgcatctacagccacctgatttttgacaaaggtcccaagaacacatactggggaaaggatagtctcttcaataaatggtgctgggaaaattgggatgtccacatgcagaaatatgaaactagacctctatctttcactgtatacaaaaatcaactcaaaatggattaaagagttaaatgtaagatcccaaactacgaaactactagatgaaaacacagaggaaacacttcatgatattggactaggcaaggatttttctggataagaactcaaaagcatgggcaacaaaagcaaaaatagacaaatggtattatatcaaacaaaaagctt

SEQ ID NO: 203028 - DNA, 1000 bp, Homo Sapiens
tcagggattagtgttgattgtgatggtgatggtgatgatggtggtgatgatagtagtgatggcgatgataactgtgatgatggtggtgggaatgatagtgataccaactctcctgcttgtcggtgttgtggaccctgtcagcccgtgctgaggacttctgtcctgtctgctctgaggccccagtgctgctttgcttggagctgtttgggaggcacagtgggtttgatgttagaaggaagaagcacatgcatgcgtctgtgtgacaaagccatttgcttgacgacacgctggcactacttggcactgtacctctgcagcggcagtgaccagtgtttatccagccttccccacaggctagctcatttgtttggcatttactccatatgatgagtagggcggcaggattcctgtgattcccattttgcagatcaagaaactgaggcttagaaatggaggaggacctaaggtcagatgccagccagtagcaacaatcacttgatttaatccaggcttctttgcattgcacactgctttgcttactttaataggacatgaagagttcggttttagaaattttatacagggccaggtgaagtagctcatacttgtaatcccagcagttgggaggcctaggtgggaggattgctcgagcccaggagttggaggctacagtgagctatgatcatgccactgcactccggcctgggtgacagagcaacaccgtgtctctaaaagaaaaagcaaaaaaataaaaaagaaacttggtacaggattaaatcatagatgattaaaataagaaaatgggaagaaatttctaatgaacagaaatgcagtaaggggctgggcacggtggcttatgcctgtaatcccagcactttgggaggccgaggcgggtggatcacctgaggtcaggagttcgagaccagcctggccaacatggcaaaaccccgtctttactaaaaatacaaaaattagccgggcgtgatggcacacgcctgta

SEQ ID NO: 203029 - DNA, 1000 bp, Homo Sapiens
atttctaaaaatgtagttcaacacatctccctctgtggcttgaaacataaattccaccaccttctttccaccatcaactactatagaaatctgcaaaaatgtaaagtatctttaaatgttttaaaaatcaatgttcaaaattattaaagcacacaaagaaaagctcaagatgcatattagtataactgaggcacttagtaaaatattttagatgacacttgtgtccaccaggtttgttaaaataaaagaacagcaaacaccactacaaaaatggtttagaaatggggcattctggtgaatgtaatatgctccttcctaagagaacatctaagagtgtgtgtgtgtgtgtgtgtgtgtgtagttattttaaatgtttatataaaccatttataagtttatatatacataatttatatacactatagataaaattttataagatatataaattattgctctgtattagtaacacaggaatttaaggttaccaatttaagaagactaagaatgtgatcatttccctaagtagggaagctaagatcaattctttcaccattgatactttgcaaggtacagagaaaacacattttatagaggacatactcttggttgatctactcatcataaaattgtagctgtattaacagattaaaagatcagtgatgatttaaaacatttcaacggatatgtacacaagtaaaaactaatgtatggtgccaacaagtaattttgaggttcctctcccctcgctggagtgccagcattccttctttgcagcccaaacgccatctcttctatatgctctcctagattcctgctctctccatcccccaattccgatgagctgccctttcggtgctcccattgtccacacccaacactaagcttaactctaccactgcacttgttcaacataattatgctatattatgttgttctcctagatgtcatctccttacgccttatgctccctgataatacaaattctgtttttcagatc

SEQ ID NO: 203030 - DNA, 1000 bp, Homo Sapiens
agagaaatggaagactgagatctgacttagcagcctagaaagacttagcagcctagaaatggggttcagctaattctgggaacagagtccggtcacttaaggtaccagagtgtagccaagagcccccttttctgggcttggggaaccagaaccatgtgttcaacagaccattgcctgtacacagggtagagagtgcaggtgtatactcctgaaccagccacccttcttttttttttttttttttttttgagatggagtctcactctgtcgcccaggctggagtgcagtggcacgatctctgctcactgcaagctccgcctccccggttcacgccattctcctgcctcagcctcccgagtagctgggactacaggcgcccgccaccacgcctggctaattttttgtatttttagtagaggcggggtttcaccgtgttagccagaatggtttcaatctcctgacctcgtgatccgcccgcctcagcctcccaaagtgctgggattacaggcgtgagccaccgtgcccagcccccagccacccttcttaagcttcaagctataactactgagcctgtgatgaaagtctactctatgccagacccccacaagctgggtgcgggcagtatagggacaaagactctgcccttgggatgccaaccatccacttgagaagacacatacacatacaatgagtcatcatcacttactgtttatggacaaataaacgtccatcaaggtagccatcaactcgtgggtagggacaaggaaggctacctagaggaagaaagggtgagtagaatctctccctctctctctcttttttaagagacagggtctggctctgtcatccaagctggaatgcagtggcttgatcatagctcattgtaacctaaacccaagtgatcttcttatttcagcctccctaagcagctgggactacaggtgcatggcatctggctaattttctcattttttgcagataagtggtctcgctatattgg

SEQ ID NO: 203031 - DNA, 1000 bp, Homo Sapiens
agtctcatggctgctgtcagttcacttatctattctttctgttagaaggcaataatggcttttccttcaccctgtcttccaaaagtcatgaatgcttttcactggcaaaatctaaacaagagctctcccaagaaaggattgcaagaattgtagtgctgtagtttcagtctctgcagtatatttccaatctctgcaatatagagaacagcttagaatgattgagcatgacacagacaaaattcagcacaaagagtaatcatccattttcaatatagctgactcaaagatgattaaaggaccaggtaattctttagaaaacaactgtgtctaaaactgacttttttcagtgactacaaaggcatatgtatttgtttttcttagcgggaattgtgccttccatctgttcttcttaaaacatgtgaacatattttcttatgattaggtttttttctataccatgatttcaaatggctccatatcttgtataatagagctgtgaaataatttatttacagtatcctacagttagacatttagattgtttccaatttgtcactatgtaaataatgttgtcatgaacctctatgtaaataaatacgcatggaattgttttattaaaaggtatgtgtatttttaaatgtttttcattgttttcaatactgagtgtgtgtgtgtgtgtgtgtgtgtgtgtatatatatatatatatatatatatatatatatatatatatattagcttttactagttatgatagccaaaaagactatctcttttttcctctctctctggtccttgatttaggaaggctatctattttaattagtttgtctttaattactggaaagacttagctttccccccatgtctattagccatttatatttctatttttattagtgacttacttttctacacacacacatacacacacatgcacagtgccctcatcatcatgtcattgttcttctagagagatccattgaatggtttatggaattc

SEQ ID NO: 203032 - DNA, 1000 bp, Homo Sapiens
tctgggtaatgaaataatctgtacaacaaacccccatgacataagtttcctatataacaaacctgcccatgtacccctgaacttaaaataaaagttaaattaagaaaaaaaaaaagatagggctttctttctttcaactcctttttcttctctgctggagttctaagccagaatctgttacaacatacaagggaatatattatttcctcttgtccctccttccacctggctgggccaggactagaccccagttgtagccccagttgtggctgagggaaagcacattcatgtcatgtccctctgtggtgtcttccagccaggtcctgacaggtgtgtgttaggtcagtctctaatgagagctctaagatcaggatgtgtcctgggtgacatgttagggggatgggggaggaggaagtgatgagtgagagaaagaaatctgaacttacagcttccttggtctgaagccatacggtctaagtggcttacagaaaaaggagggctccataaagcagaacccaccttaccaggccctcttaaaatagggatgagagtctgagccacaacaaaaattagaatgagactttccttttctcaccattattcctgtacattgacctcccttagagatcatagggaaagggctggctatgagtaaactctagattccatggtcacagtgacctctaataaaagcctccttaatgaccatgggttgctcaaatagagttaaacaagaatctaagtgcttctgatttctctggagcctagaaaccctactgcaaaacaatctaatcatctctctccacaattagactattgatattcaaataatacatgatatgtctagtgtagtggctggggttgggaggggtcacagaagccagaagggaaaaataagtgctccttaaagaaataagaagtaaggaaagtctaacacagtggacatcaccacaggacatgaatgtcagaaaaagtggggtttgtagggacatgtgaattc

SEQ ID NO: 203033 - DNA, 1000 bp, Homo Sapiens
cattttgttcccagagtgatcacccaggagttaagggtggcgggggtcctgcggtccagcctgtatgatgttgctgtctccacggcaacccagcacggaagggccccgccagcccgcccaggacctcccccgcaggccccgctgctcctccatccccctgcctgttccctgccagccctgcccatagcccaggccccagtaaggctcctcagattcctcctgtccgccctgggcccactctgggctccactcactgccagagaggcctctgtgaggtcgtgattatgccacaaaactttggggaattcccctatgccctaggatgacatccaaatcctttaacatggccacaagggcccacgctgccccggccacccagcaacccccttttcagtccctatctgagaacctttcaccccaaggctgcagcgactcccacctcctctcattcctgggaggcaccaagccacctttccttccagccacccacagctctttcttttgccaaaaatgctcccttcaccctcatccctggccctgacttaacctttgggtttgacacctcctccagggagcgttccttgacctctcaagtctttgttaggatccagccaacccctctgcactaccacagtaggccagaccagcctgtgtagaaagtatctgttgatttctttctttctttctttttttttttttgagacagagtctcactctgtcgcccaagctggagtgcaatggcgctatctcggctcactgcaacctccacctcccaggttcaagcaattctctcctccctcagcctcccaagtagctgagactactacatgcgtgcgccaccacacctggctaattttctgtattttagtagagacggggtttcaccatttgcccagggtggtctcaaactcctgagctcaaatgagccacctgccttggcctcccaaagtgctaggattacaggcatgagctactgtgctctgctgtgtcggttgaattc

SEQ ID NO: 203034 - DNA, 1000 bp, Homo Sapiens
ccttggggtatagcactttctctggtgcaaaatcaatgagggagggcatgtcaggaggaccaaagcgtcctatttggatgggaatgtcaaggccagctcctgagaagggactaagttggaggacgcatttggagttcaagtcaaagaaagcagtagtacagggaacctctcccaaccccattcgaatccctccaagatgatttactgcactgacaggagcccttcctatttccatagggttttgcaatttaatttcaaggctgttcatactcctttcctcatgtgagaggtaaaggtgggaattattatccttccttcccctgctgagaacccagggacccccaccctttcctgaagtcccatggttattaaggggcggaggagttcccagcctagaatggtggttattatctccctgatgaaacgatatgacatggtctaacccaactgtctctcccccatacccataatcaggtcttgaaacaggttccctggaaacaatcaagcttttcattgcatcacaagagacctcagacgaaagagatgctctcctgggctatgatcatgtgctatgactaaatctgccatgaagctgctggcccagggttatgttggttccaaccctactgagacatgcattacatagaacaatgtcttcactcagccaagatgtatctttttaatcacaacaatattagagatgataattgccccccccaaaaaaaaaagttgagtcaattattctggaatatttgattagccctaataaccaaatgctattaaacccacccaattaagcctccaattacgaggaagttgcaggattttctgaatgctacttaataagccttttagcttgaagagtattatgtcattttgttctaacaccacaaaaacctgtcttagaggagattaaagtgggcattcttcaaaggagataattctgtcgaagtgcatagtgagctctttatgctggaactcggctgagaacactgaattc

SEQ ID NO: 203035 - DNA, 1000 bp, Homo Sapiens
gttaaataataatttgttagaactttttaattttcttgactagtaagagcaagacatttaatcatcccagcatgtaaacagtgctgtttatttttaaataaaaacatggtattactcagaatgttatcagtactaagccttatttgtcaatgtgtcaagccttcattataaataaaagtaaaactggaaaatgtgctctcaaaaactcagctttagagaagtagacactgttagttgttttgtttgaattttttcaatttacagatacattacaatgtgcatattggctttctagaatacatacatgtttagacgtttggttcaaggttatcacatgttagaagtaaaatgcccttgactttgccatttctcttacctagtgttagcaaacttacatggtttgatccccaaggtccaactgtttgcttttctccctaaatcagaggcagggaatgtctctgccaatcaggccacagagaatggaattcagactttgtgaaggctgaagggattacctaaggagcctaactcatctagtcaaggctttctgtgagtgttctttagatgatatttgaagggaaggttagaggtcatttttctctttcacaaaatacctggaagacctcgtgctttgcttcccagagcctctgcaaggcactgctgtgtgtcagtacacctatgtccataggccatccttgaaatcaaccatgataagtcaaaaagagagaggcacaggccaggatgtcacaaaagccagttcccttctcctggtacagcatggtctacatggtaggtgatggaatcttacctttcaaggtaagatatatttttatatcttttaggtctagttgactcataactttgttcacatcctctaattccttaatgatcttcagtttagttgtttcattcattacttaaggtggggtattgggctgggtgacgtggctcacgcctgtaatcctagcactttgggaggctgaggcgggcagaccactca

SEQ ID NO: 203036 - DNA, 1000 bp, Homo Sapiens
ttctctctatattttttacctacacactactgctttctccagttgcatttgcgtggcatgactagttaatatcctgtctgctgaaacagaattttatgtacctttagaaattcaaaagaaaagagatcattgaactttaaaaatacatttttggatgtcatctcagtatgaacataaggagagtatagtgaatgcagtattacagaagagccatgagttttacaagacaacataaagattattttggccaaagccactgtgatcttaaaagactctttttaaagtatattgtaaaatgtacagtgtactttaaaagatggaaaaatcactttttaaatagttattgtttgccactaggttaaacattttcttttcaagattccttttcaaaatctatgtggtgaaaaaattagtttgttataacttgtttacataaaattgaatgaaatgggaaaaacatctttaaagtcttaccgagagaatacgttgtaggttaggaactaggggtgtgtgtgtttacttggagaactgttttgctgctggtgaaatattctgctaagtggtgagcacacacctgacccaatagccatcattacttaagctgtttctcctttataaaatattcttgggatgtttgaatttagaggaaaggaataagaaaggagaaatgagtatatgcagagtgacagttgctaaaagccattgaaatgttagttgctggtaaactatataccaaattataatgcttctgtgtattgttagaatgagaaatgtttgtatcagacctttgcatgtatgtggaagagggcccaacctggctgggctggatttgctaaagactcgaagctcaaccaaaattcctctctttgaaatgagagaggtttttttgtttgtttgtttgtttgttttttaaactttttgacaactatcttatcattaaccctggtttggcctctgttacctttaaaggctaaaatcatttaagactgtttaaaggatc

SEQ ID NO: 203037 - DNA, 1000 bp, Homo Sapiens
aaaatggttttatggttttaattcttaactttaactcaatttgcagttaagttcattgcatttgaatggtaaatgtgtttgaatttgaagatctgtaataaatggtatctttaaattctgccaaaatattctttcttaatttcaagcattaaataaaatactatacctccagttaggccagatactagatcattgttggatctggtatctggcataactagtacgctgcaggtacttagagagaatactgagaaagggtggttatttgtatctttgtaattttttaaaaaattataaaagttactttttcctttttgcaataggttcttcttgctttgctggtgatcatgtcacttggattaggcctggggcttggactcaggaaactggaaaagcaaggtatacccctcagccttttctcagaacattcccttatttcttctctcttctggccttaattcattaaaatgtatctcccatcccaagcctcctctgtcctccatgcagcattctgcttctagacatctccctttccccactctacttatcgggagtccacatctgaggttggcattgctcactgtactttctggactttactttttcaccctgctcatttgagactcattatcattccagtgtttttctcttacctttctccaccctggttttttttttttttttttttttttggcaagatctcactctgtctctcaggctggagcacaatctccactcactgcagttcctccctgccctcaggtgatcctcccatacttgagcctcccaagtagctgggaccacaggtgtgtgccaccacacccggctaatttttgcagttttagtagagatggggtttcactacattgcccaggctggtctcgagctcccgggctcaagtgatccacccacctcagcttcccaaagtgctgggattacaggtgtgagttgccgcgcctggcccttcttcatctttataatggactttggtaagtggatc

SEQ ID NO: 203038 - DNA, 1000 bp, Homo Sapiens
tgtggagtgatttaatgtagggtttttagtgtaggcatagtaaggcttttttctagtatcttggtcaaaagtataaccaaatttcttgggttttaaatcccaactctactatttgctagttatgtgaacttggccaagtaactgaactgctctggaactcagtttccttatctgtaaatataatcataataatagaatctgctttacagtggttgagttgtgaggatcaaatgaattgatgtgtgtgtgtttgcatgtgtgtctatatgtgtaatacacacatatatgcagtcatatcacttaactatgggggatttgttctgagaaatgtatccttaggtgattttgttgttgtgtgaaaatcatagagtgtatttacataaacctgatggtatagtctactacacgcctaggctacatggtatagcctatggctgctaggctacaaaccttatcgttttttattgtactgaatactgtcagagattctaacacaatggtatctaaccatagttaaccatagaaaatagacaataaaaataaagtataaaagattaaaaatggtacacctgtataaggcacttaccatgagtagagcttggagaactagaagttactctatgtgtcagtgagtgagtggtgaatggataggaaggcctagaacatttttgtacactcctatagattttatgaacactgtacacttaggctatactaaatatgcaaaacattttgttttttcaataatgaaataaatttagcttactgtaactttttatttataaacttttgcttttttaatttcttgactcttttgtaataaccctaagcttaaaacaaaaaaaattttacagctgtacaaaaatgttttaatatccatatctagaagctttattctgtttttaaattttttatttttatattttacctttaaaacatttttgttaaaagctaagacacaaacatacacattagcctaggcccacacaaagtcaggatc

SEQ ID NO: 203039 - DNA, 1000 bp, Homo Sapiens
tcactcaagcctgtgatcctgccactgccctccatcctgcacaacagagtgagactctatctcaaaaagaaaaagaaaagaaaatatatcttcttaaataacaatcacagatatagaggataaaatataacagaaattcttcatatgcacagctgagtttttgtgaaataaaggcaacaaatttaaagaaaacccaaaacaagcatagttttataacactgaagccaatgtttccttagggggcatttttacccaccttataaacgtgactttttttttttcagacagagtctcgctctgtcacccaggctgaagtgcctggtgcaatctcggctcactgcaaactctgccttctgggttaaagccatccttctgcctcaagcctcctgagtagttgggattacaggtgtccaccaccatgtcctgctaatttttatatttttagtagaagcggagtttcaccatcttggtcaggctggtctcaaactcccgacctcaagagatccacctgccttggcctcccaaagtgctgggattacaggcgtgagccaccacacctagcctaaaatactttttaaaaaaacgaaaagataaatctttgagtccatgcaaggatgggagatgtaaaagtggctcacataaaattactgggaacttgagaaaatgcacattcagtaaagtgctaccagaaaaaaaaaatccatcttccaacatagtggaacacaggacagtctcaagtaagaccccaggaaaatgcagaaaacatgagtcttgtgatcattgatggtatgaatcattaaatcgcctagactggggcttgacattacatttattatctggtttaagaaactccaagtgaagcaattaacatgaggtaagccttgactgttagaacctgaggaagcttgttagacacagactaaatcgttgctccccagtctttctggcacgggggtatggagctgggggatggttttgggatggaactgttccacctcag

SEQ ID NO: 203040 - DNA, 1000 bp, Homo Sapiens
ctgtatgccatgacccttaagctactagaatcctagttttgctttacagtccctaggtcagatcacccagtcagttaaaactattttctaattctttttttgcagattcaactttcacgtatcaaaccaccctgggtggttaaaggtcagcccacttaccagatatgcccccggatcatccccaccacggagtcctcctgccggggttggactggcgccaggaccctcgcagacattaaagcccgtgctctgcaggtccgaggggcgagaggtcaccactgccatagagaggcggccaccactgccatcggaggggggggtggcccgggtggaggtggcggcggggccaccgatgagggaggtggcagaggcagcagcagtggtgatggtggtgaggcctgtggccaccctgagcccaggggaggcccgagcacccctggaaagtgtacgtcagatctacagcgaacacaactactgccgccttatcctctaaatggggagcatacccaggccggaactgccatgtccagagctaggagagaggacctgccttctctgagaaaggaggaaagctgcctactacagagggctacagttggactcacagatgggctaggagatgcctcccaactccccgttgctcccactggggaccagccatgccaggccttgcccctactgtcctcccaaacctcagtagctgagagattagtggagcagcctcagttgcatccggatgttagaactgaatgtgagtctggcaccacttcctgggaaagtgatgatgaggagcaaggacccaccgttcctgcagacaatggtcccattctgtctctagtgggagatgatacattagagaaaggaactggccaagctcttgacagtcatcccactatgaaggatcctgtaaatgtgacccccagttccacacctgaatcctcaccgactgattgcctgcagaacagagcatttgatgacgaattagggcttggtggctcat

SEQ ID NO: 203041 - DNA, 1000 bp, Homo Sapiens
aagagagaaagaaagaaaggaaagaaaagaaaagaaaaaagaaggaagggaaggaggaaggaaggaaggaagggaggaaggaaggaaggaaatctgcaaatggaaacaaatgtcatcaattgaggaataggaaaagtacagtccctcgatactggaaattttgtcatgatttcttttattattattattattattattttgagatggagtctcactctgttgcccaggctggggtgcagtggcaccatctcagctcactgcagcctctgcctctcgagttcaagcgattctcctacctcagcctcctgagtagctgggattacaggcgccagccaccatgcccagctaatttttgtgtttttagtagagacagggtttcaccatgctggccaggccggtctcaaactcctgacctcaagtgatcagcccgcctcggcctcccaaagtgcggggattacaggtgtgagccaccgcacctagctccaagatatatattatgtgaaaaagcaatatacattaaaaacttttgggaaaaaaattaaatggtggaactggggcttggcatgtgaagggagtttacatttttttctttccttttatctcctaatgaacatattacctttttagctaaaaagtaaattaagataaaatacaaattaaaaataaaacaatgaagcgagggtttgttaactggaccaggcaattccgcatgacagcattcaggccactaggggtggaggtgacttgactctttcttctccatctggcccactccaaacatctcccaatctgcatttttcccaatctagtcaatccttccctttgggctccaaacaaagacaccattgttttctcttctttaatcaagatgggatttgtgtgccttctcctccctctgaatgtaggccccgatggaagataaggacagaaggcgccctagagggtggggccggtgccccctccccacctccctgacctcagaattggaattccgcggatc

SEQ ID NO: 203042 - DNA, 1000 bp, Homo Sapiens
gcccaggccggagtgcagtggcacaatctcggctcactacaagctccgcctcccgggttcaggccattctcccgcctcagcctcccgagtagctgggactacagtgcccaccagcatgcccagctaattttttgtatttttagtagagatggggtttcaccatgttagccaggatggtctcgatctcctgacctcatgatctgcctgcctcggcctcccaagtgctgggattacaggcgtgagccactgcgcccggccgactggaaagtatttcaaagtagccagtgtaaacatgttcacagaactgaaggaaagcttgattagagaagtaaaggaaggtatgatgataacgttgcatcaaatagagaatatcaataaagagatatacattttttttgttgtttttgagagaatctcactctgtcacccaggctcgagtgcagtggtgtgatctcagctcactgcaacttctgcctcccaggttcaagcaattctcctgcctcagcctcccaagtagctgggactactggcacatgccaccacacccagctaattttttgtattttttttagtagagacggggtttcaccgtgttagccaggatggtctcgtctcctgacctcatgatccacccgcctcagccccccaaagtgctgggattataggcatgagccaccacacccagccaagccatacatttttttaaaaagaaccaaatgaaaattctggagttgaaaagtacaataactaaaatttaaaattcactagagaggctcaatagtagatttgaacagaagaaagaattggcaaacttgaagctagatcaaaagcgattatgtaagctgaagaacagagagaaaagagaaaaaagaaaaatgaaatagagcctcaaacaaatgtggaacaccattaagtacaccaacacacgtataatgggagcattaggaggagacagagagctgggtgcagtggctcacgcctgtaatgaggcaggcggatc

SEQ ID NO: 203043 - DNA, 1000 bp, Homo Sapiens
gagatcgagaccattctggctaacacggtgaaaccccatctctactaaaaatacaaaaaaaaattagccgggcgtggtggcaggcacctgtagttccagctacttgggaggctgaggcaggagaatggcatgaacccaggaggcggagcttgcagtgagccgagatcacgccactgcactccaacctgggcgaaagagcgagactccatctcaaaaaaaaaaagacacagtagacaaggagatgttggtaaatgctaactgtccatattcacatagagacatagtatactctgcgctcaatagaggaaagcagctagaattctatgcacgactacacaagggcctagcaccttccagcttccagcagagcaaagggaacaggtttttctttttttttccatagacctcggtggtgttgattccatatagtttttgttgagacacaggatgtttccgttttggggtttggttttttatttttattttttttaacaaatgacatgtgttactaaacaaatgtttaatgtatattgactatacaaattcctttttagattctttttcttcaaactttaaaaaaaaaaggccttttggctgggcgcggtggctcatgcctataatcccagcattttgggaggccgaggtgggcagatcttgaggtcaggagttcaagaccagcctgaccaacatggagaaaccccgtctctactaaaaatacaaaaattagccaggcatggtggtggccacctgtaatcccagctactcaggaggctgagacaagagaatcgcttgaacccaggaggtggaggttgcagtgagcctagattgtgccattgcactccagcctgggtgacaagagcggactgtctcaaaaaaaaaagccttttaaaggggaaaataaaaagaatgtagcattttaacatttaaaaatcactgaaaaacgtttgattattcatgagtgatattaatgtgtcactattttttaaagggccaagaattc

SEQ ID NO: 203044 - DNA, 1000 bp, Homo Sapiens
ttctggtaagtcaagcttaattgttcatcacagaggtacccagggattctccccagactttttcattcctcatttctctcccactcatttggccaccataaagcagtctaattagtgttgagtcatttggttttgtccctcccacagtcccatgggaaaggagactctgagaatcagtgccattcatacttacagttgcagtcattttacatcggtcctttggcagaaactaaaatgttgtatatgtatgtgctttctggaggatgcaagaaagaaaaggcagtggcaacaatatgttgcctagctgacaggagaatttaattactttaaccttttccttccagattgcaactgggcttcagtttaattcagcagatatttattaatctcatcctctgtgccatgtactgtaataggagctggagttacaacagaagtcagtctctgccttcagggagctcacagtctagtgttttcataaacatttattttactcaattcaccacttctatttttttgtttttgagacagagtttccctcgtcacccaggctggagtggagtggcgcgatctcggctcattgcaacctctgcctcctgggttcaagcgattctcctgcctcagcctcccaagtagctgggattacaggcatgtgccaccatgccggctaattttctatttttagtagagatagggtttccccatgttggccaggctggtctcaaactcctgacctcaagtgatccacctgctttggcctcccaaagtgctgggattacaggcatgagccactacgcccagccaaccactcctgttattgtcagaaatctccctgctgtactaaaatacttctttctctaaagagcagtaagctagaacccattctgtctcatccacatagctgcctataacagctttctttgacttacaggtaacagcactaacattgttgaaagaagaagacttcccaaatcttggctgcctacttgatagagaattc

SEQ ID NO: 203045 - DNA, 1000 bp, Homo Sapiens
ataaaaagttcagggacatggtgtactgctctccagatcctttcccagctgaaactctatacccatttagcactaatttcccattttccctagcccaagataaccaaccaccattctactttctctttgaatttgactcctaggtacctcacatatatattcctatttagtggaattgtagactatttatccttttgtgactggcttatttcacttagcactgttttctaggttcatccatgttgtagcttctgtcataatttccttcccttttaaggctgaataattttccattgtgtatatgtaccatattttgttcatccattcattcattgatagatacttgagttgcttctaccttttggcaattgtgagtgatgctgttatgaacatgggtgtacaaatgtctgttttgagtccttgttttgctttcgtgcattctattaaaaatgttaaggttctttgctttttacttttttttctcttttatccaccttttgactttattcttaaagttttatcttggtataataatttatggtatgttgcagaattaggagcaaagtcccgtgtgtccttcactcagtttcccccaatggtaacatttttcataattacagcacaatgtcaagaccgggaaattgacattgatacagtccatatacaggtgtcccttggtatctgtgggggattggttccagaaccctcgatgataccaaaatccatggatgcttaagtttattagataaaatggcatagtgttttcacataacctacacacatcttcctgtatactttaaatcatctttcgattacttataacacctaatataatataaatgccgtgtaaatagttatattgtattgattttatttgtattttttttattgttgttatttttcattgtgttttttccctgaatattttctatctgtggttggttgaatctgagcatggggaacccatggatatggagggctaactgtatttattcagatc

SEQ ID NO: 203046 - DNA, 1000 bp, Homo Sapiens
tgaaaccacatctctacaaaagatacaataattagctgggtgtggggatgcacatctatgtcccagtgactcaggaggctgaggtgggaggatcacctaagcctggaaggtcaaggttgcaataagccatgatcacaccactgtactccagcatgggtgacagagagagactctgtatcaaaataaataaaatgtaaattcagtggtttttagtatcatcaattgtgcaactatcaccaaaatctatttttaaactatttttatcacctcagaaagaaaccctgtacctattagtaatcacttcccatcttcttttacccccatcccagctctaagcaaccagtaacgtactgtctctataggtttgtgtattctaaacatttcatatacactgaatcatataatatgatcttttgtgactggcttcttcacacaatgttttcaagatcattgggttgtagcatgtattattactatcttttaacctacgtaaaatttcatcgtatggatataccacattttatttatccattcatcagctgagagacatttgtccccacctcccctcactttctggcttttatacataatgtgctgtcaatgtttatgtacaagtttttgtgttggacatgttttcctttctcttgactatgtatctaggagtgagactgctaggtcatatagtatctccatctttagcattttgagtaactatcaaactgttttccaaagcatttgcaccattttaaaatcctaccagcaatgtaggagggttccaacttctcaacatcaacctaaagtaattttcaagcttcattttatcccataaattgtgggtcccatgttgtcagaatgcaggtaggttttaaggaagttgcattcactcatttctttgcaaagaagcttcaaatacaattttttttttctgtaagaaaatggagttggacaagtttattctgagacattttcaaacttgaaaagtctgtgcttttctgaattc

SEQ ID NO: 203047 - DNA, 1000 bp, Homo Sapiens
gaagaaaaataattcactatacccagacccagaaattatagattaaaaaaacagctattgtagaaatattcaatatgcccaaaaatctaaatgacatgaatatatgaaaataagagaattggccagggacggtggctcacacctgtaatcccagcactttgggaggccgaggcgggtgaatcacttgaggtcaggagttcaggaccagcctggccaatatggtgaaacctcatctctactaaaaatacaaaaattagccgggtgaggtggtgggcacctgtaatcccagctactcgggagaggctgaggcaggcacatcgcttgaacctgggaggtggaggttgcagtgagccaagattgcaccactgcactccagcctgggcaatagagtgagattctatctcaaaaaaagaaaataagacaatcaaatggaatatagagatgaaaattataatatttgatataaaagtttcattcatggaattaaaagcaaaattagatactgcagaagatcactgaacttgagaacaaagcaaaataaattatacaaaaggaaacagaaaaaaagggggggaacattctcagtgaactgtgggagaatattaagctatgcaagatatatgtgactggagtgtcagaaatacaaaaagagaaaaaaaaaatcctcaaggaggtaataataaagatgaaaaatttccaaattttctgaaaactataacccaggcatctaagaatcacagtaagccccaagggataaattcaaaactattcaaaggtacatgataacagcaggaaaatggtaataagtaagaaattgtcaagcgacctgaagaaaagacacactatattcagagaaacaaatataaaaaaatcatagacttccagaagctatgctaagccaaaatacaatacaaaatttataaagtgctacaacacaccaaaaacttaatacctaccaaactacctttcaataaagaagggcgtaacgatagagtgaatt

SEQ ID NO: 203048 - DNA, 1000 bp, Homo Sapiens
gaaaataaatgaactaaagccgcatacaaaaacatgaagaatttcacaagtattatgttgagtgaaaaagacaaagaatttgtactgtattacttcatttatatgaagttcaaacacaggcaaaattaagctatagtgtttagggatgcatactgaaatgcagtcttttaaaacagctttagaattccttggccaggtgcggtggcttacgcctgtaatcccagctctttgggaggcagaggctggcagatcacctgaggttgggagtttgagaccagcctgaccaacatggagaaaccccatctctactaaaaatacaaaattagctgggcgtggtgtcgcgtgcctgtaatcccagctactctggaggctgagacaggagaatcgcttgaacctgggaggtggagagtgtggtgagctgagatgtcaccattgcactccagcctgggcaagaagagcaaaacttcgtctcaaaaaaaaataaaaaaataaggctccaagcgctgttgtgagggttaaatgaactagataattaatgtaataaacagaatagttttggcattcaacaaacattggctgttattatattagctattaaaaatttaagtcatttaggtcaatgaaacaggagggtttccagaattatacccaattaattatacatgggaaggtgatgaaggtagcatgtcaaattggtataaaaagatggaatattaaataagtggggatactgtatcagataggaacatatttggttgcaagaaacaaaaattcctgtgattactagcttcactgtgagtttattttttcacgtaataaatccaaggttacataatccataactgatatggcagtttaacagtgttattaagaactcaaggtccatttattgctctattctgccatctttggtgagtggctttcatcctcattgtctcagaaaagttatttcacctctaagtattacatctacatttcaagcaggaagaagatgaagctt

SEQ ID NO: 203049 - DNA, 1000 bp, Homo Sapiens
taaaaggagagtcagcccatcctttgaaacattgaggccaggaattgacttctcctcagttttcttcaagaactttttctttgcattcacaacttggctagctggtgtaagaggtctagctcttggcctatcttggctttctacatgccttcctcacttagctttttatttaaagtgagagatctgtgagtcttcctttcacttgagcccttagaggccattgtagggttattaattagcctgatttcaatattgttgtgtctcagggaatagggaagcccagggaaagggagagagatgagggaacggctggtcggtggagcagtcagaacacacacaacatttctcagttaagttttctgtcttatattgggtacgaattgtggtgccccaaaacaattacaatggtaacatgaaagatcaccgatcacatatcactgtaacagacacattaataatgaaaaagtgtgaaatattacgagaatttccagaatgtgacacagagacagaaagtgagcacttgctgttgggaaaatattgccagtagacttgctgcatgcaaggttgttacaaaccttccatttgtaagaaacacagtgtttgtgaagtgcagtaaagtgaagcaaaataaaatgaggtctgcctgtacatgcatatactgatgtgtgtctgttaatttttcctgcctgttacggattgagcacgtcatgtagacacagtccattggatactgcaattctgtgcatacattgccatcgagaccccaagactgtgtggttataagaaggaagtgccactgcttactcctctcctctcccttctatcttacctgcttttgttgcctttctcctcttcctccccttacttggtctcagtttggtttgtcctgaatgacaggcagtatggctcagtggttggaagttcagtctttggaattagaatacggagctcctaattgaccttaatactttctcactgtgtaatctcggacagtcaagct

SEQ ID NO: 203050 - DNA, 1000 bp, Homo Sapiens
cctcgggaggctgaggcaggagaatggcatgaactagggaggtggagtgtgcagtgagctaagattgcgcaactgcactccagcctgggcgacagagcaagactctgtctaaaaaaaaaacaaaaaacaaagaacaaaaacagtttaataaattgtacgttacgtaaactaaacacattttagacaatctgtaagagaaatgaaggcaatcgaggctgttttcacaagtccttggctttagtatgatagcttccaagttgaacctgatgagcctgacctccttgtattaatgtttccatacgctggattggaataacttgtgcaaccagtgggatatgtcagaagtgaccagaaatgagtgggctgccatgttgtgaggacactcacagcctgtgaagaggtctaatgatgaggaagtgaggcctccagccaacagccagtgttaacttgccaaccatgtgagaagctaccttggaaggagatcctccagcagcccctctcatgagagaggtcaagccagagctaacctgctaaactcctaaattcctgaaccacagaaactgtgagataatggttattgttttaagccattatgttttgaggccatatgttatacaggaattgaaaactaatacagatagtatgaaggcttctttcatcaactgcctgaggttggtggtgtcttcagtcatttatatagatctatttgtttctggataatattacagctatttaaagatattttgtggctctatttagatacagctacattcgcctttatatgttttgaatacccagtaagtaacttgaaaatatttcctgatattggagggaggggcattgctgaatttcagaaagttaaggctagtaagagctatgactaatataatacatcttgttggatactgtgaatgcttttcatttaattctgtaggtaaaggaaatagaatctgaaggaaggccagtgttttaagtcttcttactctaacgtgaatgaatt

SEQ ID NO: 203051 - DNA, 1000 bp, Homo Sapiens
tttcacgtctgttcattttctcttcactgtggcgtcagatcacggagtaggtgtaaatagttgcctttaggatgtgaagctggggctcggagaggagaggccagcttcttgaagactgaagagcctagaagattctgtgcaacctgtgtgtggctcaagagcctgtgcttctcccaggggtgacagctcccccactagatgccgtgtccttggagacttgaactccccctgtgctctgaacacaccagctgccgtggtagccatcagacgtccctactggagccattttggcccaagagaagtggctgagatggggatatggccctggtttgtgcaaactcagggaaactcggggatgtgacctcctgcagctttgccgtgtgttttgacctctcccaactgcttgggtttctttttttttggagacagagtctcaccctgtcgcccaggctggaatgtggtggcgtgatcttggctcactgatactgccgcctcccgggttcaagcaattctcctgccttggcgtcctgagtagttgggattacagacgtgcgccaccactcctggctaatttttatatttttagtagagatggggtttcactgtgttggccacgctggtctcggaactcccgacctcaggtgatacgcccgccgtggcctcccaaagtgctgggattacaggcatgaaccactttacccggcctgcttggggttcctttgaggccttggacatccgacagcattactgagggccggatttcaatcctttccacagcatcttcacacgtaaattgaggggcccttggtataactgacctgtgcatggaggatgtttctcctacatgtgaccttggagagggaccagttcactgctgaagataagacgagtctgaatccctggctagtcctggtcccgggcctaggccctgcagcttggccaacatcggggttcctgcagggcactcagagcctcctgggctgcccccaaaagtgtctgc

SEQ ID NO: 203052 - DNA, 1000 bp, Homo Sapiens
cttctggagtgtgcgtgctcggagcatgcttcattctgcttacaccaggccgtgtggcatttgctggcctgtatgtcctcaagggcgccttgcagggcatgccacatcaggttcagctccacgtccatccatccagactgctcagaagggctggggtggggcttgctagctggagagagtatcagaatgaccccaaactcctgggagaaaccctaaagagctgcttggccatctctttcaactccttcaagtctttgctcacaaagtccctttcaggcttgaagtcagatgatgttggtgccctgcccaggggtccccaggtgctgtgttggcagtcagaggctagctgttgccccttctctggacaactgccctcagtcaatgggagctgcttcaactgggtccatgacacctgcttcccaaggggacagcctgcagccaatgacagactgatgtggtgatagagaaggccggcccccttgcctcagcacagtccagttctgcctttcttgccccagggatccctgtggggtcgggctaaggccaagctttgcctcaaccacaccctggctttagctcttcccctctggcttcccgccctccctcacaggtgtctcctgaaattcctctttcaaaaaattcctaactgggcacagtgatgcatgtctgccgtcctagctacttgggaggctgaggcgagaggactgcttaagcccaggagttcaaacccagcctgggcaatttagggaaaccctgactctaaaaaataaaataaaatatttatttttaaaaaaatcatccaggctgggtgtggtggctcacgcatataaatcccagcactttgggaagccgaagtaggtgaatctcttgagcccaggagttccagactagcctgggtaacatagtaaaactccatctctataaaaaatataaaaattagccaggtgtggtggtgcacacctgtagccccagctacttgggagactgaggtgggaggatc

SEQ ID NO: 203053 - DNA, 1000 bp, Homo Sapiens
cagaaggatatggaatgcacaattactgatgactattaatgttgccattgtaaaataaagtttaaaattagttctaaatataaaacatttttatggtttttctcaaaatactgttaataagtttcaacatttcaataattatatgtttgctacatgggaaaattatgtgaaatgacatttctccttcatgctggatagttgggcctgactacttcactattttgctaatttcccagggaaatatatagtccagtacacaacttttcataaagttaacaagccaaaagctaccaagtggcatcaatcagccaaagattactaaaacaattagttgtactatatcatatcatatggactattctgatattgaattgtcaaatttatcaaaaagtctttaacaaaggaaaaaaagacttcctacctctatttcagaagcagacatgtacacagccagagtaaccaaagataacactaatataatgtatgggaaggcgtaatctgaaagataagcattggtattatgttggaaatgaaacaaattttctcaataaaccatcaaataaattcaaatagtaattttccttagagtcaaatcctttctcaaccagttctgtgagacttacaacctaaggttctgaggcagtggccagcaagctttttctggaaagggcaagatagtaaatagtttcagccctgcatttctctgtctcgattacccagctctgcagttgtagtgggaaagcagccatagagaatacatacatgaatgggcacggctgtgttccaataaaaactttatggacaataaaacatacgtttcatactcacatctagaaatataagtcttttgattttttaaccataaaaaattgtaaaaactatccttgggccagctttgaagaaccttgccttattaaggcatccagtgaatgtaaataattaacttctctcctctgcattctagaatagtaccagttatgtactaaatttaggagaattc

SEQ ID NO: 203054 - DNA, 1000 bp, Homo Sapiens
gcctggctccaagaccccaggggtctcactctctcaaatcggcctgagaagatttgaggatgaaaacagacccaggactcggccaagtctcccctccctgttacccactcagcctggccccaccctctcacgcccggactgttgcggtggcctcctgggctccctgcctcccattcagtccccttcggtccccttttggccacagaagctaagtcagacagaccctgtccctctgctcagagccctccagggttcccaccccactcacaaagcctgagccctcccacagcccacaggcccaaccagccaaggcggagtaggcctgtcacctcccaacgcctccctgtcactcactgagataccgcctcaccacgtaaaaccaccacggcccgcatgccagctgcctctcccggcctggtgttttcattttctttagcactggttcccttctgacgcctggtataaaatccctgttcatcttctccgtctctgccacaggagagtcagcaccatgagggcagggatttttgtttttgttttcttccattttgttcccagccatatctatacccagttcctaaaactggaggcacttaataggtgtctgtgggaggcaggaacgggtcctcaccagctctaggggcaggtactatcgttatttccactttacgaaggaggaagtgaaattgagcaagacctcacacagctgggaagcggaaagtcagtgccttgatgatcatgatgatgatgatgataacaacagctaagatatattaagcacctactgtgtgccaggcaccgttctgggtgctggaacaatagcaaaagaaaaacaccaggtgcggccggcaaggtggtgtgtgcttataattccagcattttgaaaagccgaggcaggcagatcacttgagcccaggagtttaagaccagcctggccaacatggtgaaaccccgtctctactaaaaatacaaaaattaggctgggcgcaatggctcacac

SEQ ID NO: 203055 - DNA, 1000 bp, Homo Sapiens
ctgctcaacgaaataagagagggcacaaacaaatggaaaaacattccacgctcatggatagaagaatcaatattgtgaaaatggccatactgcccaaagtaatttatagattcaatgctaccccatcaagctaccaatgagtttcttcacagaattagaaaaaaactacattaaatttcatatggaaccaaaaaagagcccatatagccaagacaatcctaagcaaaaagaacaaagctagaggcatcacactacctgacttcaaactatactacaaggctacagtaaccaaaacagcatggtactcgtaccaaaacagatatatagaccaatggaacagaacagaggcctcagaaataatgccaaacatctacaaccatctgatctttgacaaacctgacaaaaacatacaatggggaaaggattccctatttaataaatggtgttgggaaaactggctagccatatgcagaaaactacaactggaccccttccttacaccttatacaaatattaactcaagatggattaaagacttaacgtaagacctaaaaccataaaaactctagaacaatacctaggcaataccgttcaggacatagacatgggcaaagactttatgactaaaacaccaaaagcaacggcaacaaaagccaaaattgacaaacgggatctaattaaactaaagagcttctgtacagcaaaagaaactatcatcagagtgaacaggcaacctacagaatgggagaaaatttttgcaatctatccatctgacaaagggctaatatccagaatctacaaggaacttcaacaaatttacaagaaaaaaacaaacaaccccatcaaaaagtgggagaaagatatgaatagacacttctcaaaagaagacatttatgcagccaacaaacatatgaaaaaaagctcatcatcactggtcattagagaaatgcaaatcaaaaccacaatgagatatcatcttatgccagttagaatgatgatc

SEQ ID NO: 203056 - DNA, 1000 bp, Homo Sapiens
aaagtgcaggttgacacaatagaaattacagaatcagagaaattggttttgccagttaatagttctgttacattagacaagttatttaacttctttgagctttagtttcctcatccagaatgaggataataccaaaatttacaggactgttaagggttagaaaaaatatttgtaagatgggtagcatagtttctagaatataataagtattcaacaaaagctacttgtaattactgctattaatttaaataatactaaaatgcataaggctaaattttcttgctattacagatttccttaaaaaaattcctgagcttcatctgttaccataacagctaaaacacctctcaagaccatttatataattcaagttattcttatattttaaatttttcatgtttaaaaaatggtgagaagacacctgctaaaacatctgtatataatttgaagaaattacatactttatgatttcattttattgctgtaaatatttatgttttttactaatttctgtctcaagtgccataatatataagaaatatacaatggataaagagagaacatgcaaaataaagggaatgtggagaagaaagctgagggatataactcaaatattttcctcaagtccttggattctgtgaactataaattgctcatgatggattaatgttttaatttcagtaatacaatcaggattaagagaagcttagatagcatctttaaagggattcttctgctacatacataccacaagacagatacataataacgtatcaggtggatgaatacctgtatcttaactttgtagagtgaactttaagaaattgttgagaacttatatttaaaggccacctcaaaatataacaatttccctgatgactctttttattttcttattaacacaaaagtaccacacatgaccttatgccctaggacagtatacattacctagctcaggtttgtccagtaaactgattaaaatgcgaaaaggctttagatc

SEQ ID NO: 203057 - DNA, 1000 bp, Homo Sapiens
gtattagctggatgtcactgaatccccaagtctggatgtgacatgatccatgtgatgctcttattatggggggaaatcatttattggtgacaatctgtggaaggctgaccacatttttagcctcccttgcagttagatgtgataatgtgactgagttccaccaattaaatgtgggcacagggatgtacactactttctaggcccgctgcataaaactctctgatgcatcaccctttctgtcttcctctgttgattggattggcactcagtgtggccatagaatttacatgctgaagatgactatgccactgtgtggagtgtactttctgtacccaaccccaccctccaccacctatcttaatggctcattttggactttacatgagtgagaaataaacttcatcacagtgtctagtacttgtcttaataactacattgtggagaaccaaagggcacaagagagaaatcctgccctcctttcccagaaactaatttagaatgttcaaaataaccttttactttacatgaccctgtagaaatccatggcttttgttagggacaggtggacagcatctaggatgtcagaactctatacaggattatatatttataagctcttactcatcatatactccaactttctcattttcaaccttgaggtgaaactcttatgtatatttttgtggaagcatttttaaatgacagaaagtaatttatatatatatgcaaattccttataattatgaaaataatactttcagagaaactttacttcccaattttgtcagctgagtttcaatttctaatcatccccacctcaattcatttgaactagctgactcttccattccctttgactcaaattctctgcaggaactgaaggagaaatcagagagaggatctgagtctgagagtgagtttatattaatgcctatggtctttgaagccctagcaaaatgttcctccatagatcctacagttgatttcaaagcttatgatc

SEQ ID NO: 203058 - DNA, 1000 bp, Homo Sapiens
ataatcccagcactttaggaagccgacgtgggcagattgcttgaccccaggatttggagagcaaccagcctgcacaacatggcaaaaccttgtctctacaaaaaataggtgggcgtgacggcgtgcacctgtaattccagctgcttaggaggcagaggcgggttgtagtgaggcatgattgtgccactgcactccagcctgggtgatagagtaagactctgtctcaaaaacaaaaaaaaatctccaatttcttctgtcagcataacacctagtcaattgttcatgagatgtgtcaagctcttgactcaggtgtgtcctttcatccattcatccattcatccattcatccgcctgcccatttgtccagtcattcatcagtctgtcacttaatgggtgtctacttgtactaagcactgtactggggataaaaagatgaattactccctcccagcccttgaagggctcacagtagggacacaaacaattattatatataatagaatctgagggattatgaaaatccagaggaaagaatgactttttttcttcttctttttttttgagacggagttacgctctttgttgcccaggctggagcgcagtgttgcgatctcagctcactgcaacctccacctcctgggtttgagcagttctcctgcctcagcctcccgagtagctgggattacaggcattcaccaccacgcctggctaattttttgtatttttagtggagacggggttttgccatgttggccaggctggtcttgaaatcctgatctcaggtgatctgcctgcctcggcctcccaaagtgctgggattacaggagtgagccaccacacctggccaagaatgactacttctaaagcagtcaggaaaggcttcaccaagaatatattctggatccttcttttaatttttttttttttttttgagacagagtttcactcttgttgcccaggatggagtgcaacggcacgatctcagctcaccgcaacctcc

SEQ ID NO: 203059 - DNA, 1000 bp, Homo Sapiens
accaccaggactttacaaattatggtgatttgtcattgaaattggtcaagagcatccatgcatatagtgcaggttgaccttatgcctgtatgaatgactccaatttcaattcatggtaaccagcatagggtggtattcactacacaattcaaaaactgcccttcttggccgggtgtgcacaatggctcatgcctgtaatgccagcactttgggaggctgaggtgggcggatcacctgaggtcaggagttcgagaccagcctggccaacatagggaaaccccagtctctactaaaaatagaaaaattagctgggcgtggtcgtgggcacctgtaatcccagctacccaagaggctgagacaggagaattgcttgaacccgggaggcagaggttgcagtgagccgagatcacaccactgcactccagcctgggtgacagagccagccagactccgcctcaaaaaacaaacaaacaaacaaacaaacaacaaccaaaaaaacccaaaactgccttctctaccaacatgagcacatcagctcagtccctgaataccacctgctgctatgatcttcaaatagctacacttaagacacttgtgaatcagagaagtctttatccttttgaatttcaggatcaaatctgggggtgttcagttcaacaactcttttcctgcatcattttctcacagtggcttgaaggcagacgtgatggggccccggcaatgacatgcaaggattcaattctaaataaggtgctttgttgagattgttcttaactaaacattctcccaaagtgccaggcaactagaggcgacttattagacatcaatagagattaaagttaactaactagcaggtctctagttttagtgattcaggtcaggaggctgaataccaacagagtgcatctggcagcctgttgagaaaacaaatcaatcctttcctcctcatgcacatatcggctatccatggatccatggcattgcagatgcagaagaattc

SEQ ID NO: 203060 - DNA, 1000 bp, Homo Sapiens
cattgtccctatctgactcaggtagagatggtttttaaaatctcttcaaactatgtatcttgtctttttgtatgccttgtaaatttttgttgaaaggcagacattatttactggctaaaagggactatggtaaacagataagtaatgtgatggtaaggtgtgggtcaaggggaagtcttctatagttctacaggtttcagttttggtcaacctgtaccactatgctgtaatcttcaccagtggttttcaacagctcccttagcagggacaggatggcaagaggctgctggagttgggtgtttcttttttccaagttaggtttggctctgataatactctagcaagttaggtgttggtaaaatagtttctcctgagggcagagcaagccttttccaggataacagaaagctctggcatattttgaaattattcctgttcccctctccttgctggaaacagaagatttttttttcctggtatttactgtgaggatgtggtagaggttctggaggtaaaactcataggagattctccatacaattgggtccccctagagtttttgttttgtttttgtgtttttttaagagacaaggtcttaaggctggactacaggggtgcaatcatggcttattgcagccgcctcaatctcctgtgctcaagcaatcctcctgcctcagcctcctgagtagctgagactacaggtgcacagtatcatgcccagctaattatttaaaaaaaattttagctgagatgaggtcttactatgttgctaggctggtcttgaactcctggcctcaagtgatccaccctccttggcctcccaaggtgctgggattacaggcgtgaaacagcgcatccagcctccctggagtttttatttttcagtcttgtccaaattgagtcttcagcaattcatcaatcacagttgaggttttcctaccctcacacttgttcccatggaagtttgtgctcatgggtttctccgctggtgatggaattc

SEQ ID NO: 203061 - DNA, 1000 bp, Homo Sapiens
ccagcactttgggagaccgagacaatggattgcttgagcccaggagttcaaggccagcctgggcaacataaggagaccccatctctacaaaaaagaaaaaaaaaagtagccaggcgtggtggcacatgcctgtggtcccagctactcaggaggctgaagtgggaggatcacttgagcccaggaggtcaaggctgcagtgagctatgattgagccactacacttcagcacgcatgacagagcgagaccctatctccaaaaaaaaaaaaagagaaaattctgacacatgctacaacatggatgaatcttgaggacattacgctaaatgaaataagccagtcacaaaaggtcaaatactgtatgattccacttatatgaggtacacaaagtagttaaactcacggagacagaaagtagaatggtggctgccaggggctggggagaaaagactatagagagttattaataggttcagagtttcagttttataaaatgaaaataattctgtggataagggtggtaaagatggcacaacaatgtaaatgcactcaataccacagaactgtacacttaaaaagtttcaaaggtggccaagcacagtggctcatgcctgtaatcccagcactttgggaggccaaggcgggcagatcacctgaggtcaggaattcaagatcagcctggctaaaatggtgaaaccccatttctactaaaaatacaaaaaattagctgaacgtagtggcacgtgcctgtaatcccagctactcaggaggctgaggcaggagaatcgcttgaacccgggaggcagaggttgcagtgagccaagatcacgccattgcactccagcttgcgcaacaagagcaaaactccgtctcagaaaaaaaaaaaaaagtttaaaaggtaaattttgttacatgtattttaccacaacttttttttaattttctaaagtacagggtggctttctgcaatttttactatttccaaagaaaagcagaaatgatc

SEQ ID NO: 203062 - DNA, 1000 bp, Homo Sapiens
caagggttctatatgcatccttacccactctaataggagggatctatataaaccaataattacagcacatcatggtaagttctatctctgaagttggtgtagtgctgcagtaacgcagagtccgatgtgccactcaggacaggactggcaccctgactgtatgcacctatgcatctgaccagttgtaaaactgcctgaggcacctactcctcgaactcttgctacctcttaaggcctaggggtaggaaacatgtgtaaagaaaggcatgtatctaccagacgtacatgttcagtaggaccctgcttaaattcgtaagccaatcccaaaatggaattactctgacttcttagaatttagccttctctcccctaataactgactatccactccaacagctcaggccattttagaaactttcaaaagaacaactggtatctgagaacatgtattcttattttcatggcctcaagcccaagggactgtcctttagttacactcacacttttttccccccacccaagctggagtgtaacactgtgatcacagctcactgcaacatcaaactccctggcccaagtgatcctcccacctcagcctcccacagagctgagaccacaggcatgtgccaccataaccggctaattttatttttgtaaagatggggtctccctacattgtccaggctaactataccttttaatgtgctccttgtctttaaaaacaatacctttggcagtgagttttaattctgacctagagatgcaaaacagtaaaatttttatatcgtaaaatagaagaggtctgaaaatttttgtagggaaagagaggcgatttggtgacaggtggtgattacagaggcctgaaaggaaattttcagaaaaactaaagcctcctaaaatgtaatgcctttgttagtttagaaagataaaataccagccgggggtggtggtggctcatgcctgtaatcccagcactttggaaggccgagaagggcggatc

SEQ ID NO: 203063 - DNA, 1000 bp, Homo Sapiens
catcatttgggggaactatgtttggctatatggtcagtgaacatgtcttaaaagtaaaaggagaggggaaaggagaggaggggacaaagaagagagagacaggaagaggggcagaagagaaggggagagagagatgaagagaaaaagagagagagagaaataaggagagagggagaacaggaagagagaaagaaaaatactttttttggtttatgtcaggggtcccccacccctgggccatggaccggtaccagtccctggcctgttaggaaccaggccgcacagcaggaggtgagcaggggtgagtgagccttacaacctgagctctatctctgtcagatcagcggcagcattagcttctcataggagcgtgaaacctactgtgaactgtgcatgcaggggatctagtttgcacgctccttataagaatctaatgcctgatgatctgaggtgaaacggtttcatcctgaaactatgccccaagccctattcagtgaaagaaattgtcttccatgaaaccagttcctggtgccagaaagattggggaccgctggcttatatgactaaagagacagaggaatctcatttcaggtgaaacttgatcaattggatcaaacatatccccaaggacctgatgtttttgcatctcttcattatgctaaggtcaagatggttgccacaagccctcagagatatatgctagctttctattatctaggaggaaagagatgcagaattcccactgcagttccatgagtcaccctgattggactgacgaaggtcacatgcctgtctctgcatcaatcactatggccagtgggggtgggggatgggatggattatgatgactggatggatctaggtcacatgtttcatccctagagttagagctggagtcagcatcgccagatgcacacagattcccaaaaagaaacctagaactactggtaagagaagtgtatgctggaaagaaaatcaatgaatgtccatcatgttgatc

SEQ ID NO: 203064 - DNA, 1000 bp, Homo Sapiens
ggggccctggctgtccagctgtgagtggccttcccctcgcctctcagcacacctggaaacgactccacatgtgggcgccgcgggatgctgggtagcaaggagatgacccagctgaacaatgcatttggtccactcctgcgaggggaggagaacgccgagggacaggaactgcgcgccagcaaaagacaccctaacctggggtgcgcccgccagctgctttcccaaggtgaaaacctccaagaggcgagatgcaaatcccagtggcgtccacacccggaggtgtcttctctccaggtcgcccctccgtctcatgcgacaccccaatccccgcagcctctgctcagcgtgggaccaagaatggggagtcctacccctcctcggctttccagccccctaacccaagacaagagggcgcgcgcccgggctgggacaggtcccagccgcattttcgtagattgcactccccgcccgggagcgacccgttccagcagcccccttcccgccccatcaacgcggccgcactgtcggcgtctagaggcgacatcctggcaaagacaggaatcaagtcagaaattcaggctctagaagcaaaggctgcggtgcctcctggctggaagaaaacggcgggtgggtggaggatgcggtgcgcgggaatttccccacggacgcttgctgtttcctgctcacctttcaggaaggtgcccctctacctgcaccctcccctgcaatttggagctcgtccgcgagctcagctacccgctggctccctctgcccgcgcccgcacaccacagactccgcttaccgtaccctacccggtcctagagggcccagaggggatctcctgaaaccaactcgcctgcttggagccagccccgacgcatatctcgagagtggcgggaggcaaagcagccggaatgcccgagaaaaaagtgggcgtcagaggcccttgtcctagcgactcccccaccgcaccgactgagtcccgggactgcagggatc

SEQ ID NO: 203065 - DNA, 1000 bp, Homo Sapiens
cctttctcacttctagggaccattcctcacgctgctctctctctctctctctgcctggaatcccttcgtctgcctactcatcctttcaggctcaactcagaggctactttttctgcaacacccttctggcctccctcagaagaacttgcactttccgttttctgttcctattgcactggtcacagatctgttttagcagtgatcttgttggtagtgtctgggtgcaaagggctgcattttcacatgtctgttatctcacattgactgcctgggacattatagatgttcagtcatgtttgttaagtagaagaatggctgagtgaattgtgggccaagttttacccatcttcagtgcttaggctgcagaaggtagaactgaaaaggtgaaaccagagttaaacgtggctcattctcctcccactttttggaagatatttttgtctccagaatcttcagacccatgaagtccattctgatctgtgttccagcctttaagatggacccaaatgtatttgtttctaggtggctcacaggtctgagcttcctgggagacctgcagactagaaatggtgcaggactggtctgggacaggttgaccagctcttcaagactgagacagtggggtgagaaatgcctacatctgaacaatgagagtggcagcactctttcttttgattgggcttccttcctgtgttttctcagagcttataaatgaagttagtatagatgaatccaaagaacggcaagaattttcagagggtggatcgacagaatagatggaagagcccattatctgtatgaagagactcaggaagtaaggagctccaaaagccacgaatagattctaaacagatatcctgatttcatcttaaatgctctcttgctcatctttccctgatcccctccaaatgtcttcattccatccggtattagaattacttacagcactggtaagacctctgctaatgacacctattcttctaggcaggataggttctta

SEQ ID NO: 203066 - DNA, 1000 bp, Homo Sapiens
ggatcatagctgtgggagaccctctgaccccacatacatatgagttggctgggagaactgcccagagggttggggagacagaactccagcctacattgagcccagagggtttggtgtgggaactgtggcagtggagcatggccatgggtctccatccattaaggctcaataaactcctctaggaagcttaggctttgttagctgccatacctggacagagcaggactgtcttgcctgtggatggggccagtctgatctgagtgtccccatgtctgctagcatctcccagggtcctgtctggccacatttgcttagagtgcagcttcagttgcccagccaaggtgcttgccagcagtcactgcctagctctttcactggcacaccctgttggaacacttttgcagacagatcctcacaagcatgcacaagcccacagccttccctcatcagtgtgtgcggtgtgcactcatccgtagcctcccttactgccccactggcgcacatgcacacagggacctgccatcaccatactggagcacttgttccagcagcccccgttggagtttttctgtcagtggactgagaacaccttggcccctccagtgcatcaagcgattaacatcagggagctagagaataaagctctgggcctggtcccagcccttcagggttagagcatgcagcccaggaatgctgacctgagccttgctccttaaagcatctaggaacaaagccaattgactaagcccaacttataccacagtcaagccctcaagggcatcaaagaatataaaagcaaaaagtcccatccaaaccatccaaaagacagcaatttcaaagattaaagaaacaacaacccacacagatgagacagaaccaacataagaactcaggcaactctaaaagccagagcgacttcttacctctaaatgaccatactagctccacaacagtggttcttaaccagactgaaatagttgaaatgacagacatggaattc

SEQ ID NO: 203067 - DNA, 1000 bp, Homo Sapiens
tgtatttaggaaatctatactttttctacatccttggtaggtgcactggagttgaaaacctccaattgctatgtgttctctagttgctgttttgtgttcggttcagttgattgccacatcttctgtaacttccatcctttggggccctcattttctagcctaacttaaccttttcctctcatgttcctaccatgcgtcatgttaaataaattacctgtccttgcatggtgaccatatggtttgcacattgcttgtaccaagaatatattcttaaaaaatatttgaggtgttctttttggatttagagctgtagaaagcaaggatcttttttcctttttctgtttcttagtactttccccagtaaaacagattgagtgctcaacagacattgctgactagacagacatgtaagtgtagatgttttataaataaatttgttataagtctgatttttttaaccagtgggtttctatttaatttgtacagaaaaacccagatgctgagtttatctgaagggtttgtgttatgtggattttccttcttctccttaagtgattaaagtctgaatgttttaaccaccgtgaacttatttttgaataaaaggaaatatttccttggtatagttatgggattattctcaatttctgatatattgtgtgttcattaaacaagtagttatcatctctttgcactttgaatgaggttagattaattagaattttctgatcattgaaaatttagcattcttcaatgtatattcattttacacaactcttgagaacacttctgtaggaagactaaagttaattttttggattcttattgaatgagttagagttcacctacaaatacttggttggtccttaggactttttattttagaaactgtatttcttaaaactgtttactgccttcttaatgctttccaggaaccagatcctgaattgccagtgcatcaggtaaagaaaggtttagctgcaacctttagtttagagaattc

SEQ ID NO: 203068 - DNA, 1000 bp, Homo Sapiens
gcctcccaaagtgctggagttacaggcatgagccaccacgcctggcccacatgtaaacatttaaagaatttgagcggagccatccaaaaggtcatggtgatttttctgaaaaacagaaagcagcaccttagctgtagagatgctagaataactgctgtgacatcccagacacgctgcatgcatcttggagcttggatcagggaaaatagttgtggattcaggccctgcagtattagtgcgttttctaagtggtcacagtctggcaagggtgggtaaagaagggaggtagagtgaagagggcctagaaaacagctggtgcctaaaatctaattagcatcagcctgtagtctttaaggagctccagtttcctgctccttggggttatttgctggtcttgtgtgttatcttttcctgtaatgtttcttcttatgctttggtgctcctcatgctaatgctctggggtcctttagagggtgtggctctgatgatcactgtcacatttcatctgtaggcacatcctaagccaggaagagacatcgcagagacctgtcctgaacacatcctcataagaggggagtgtcatccagtcttcttaaccccaaaggataatacaaaatagtgctgagagtaaatagattgctttcgctttagtttcagactgagatcttgaggattaagtaagatgtgtgcatgtgcaggcaggagtagaaataatgaatgtaagatgtagctttaacgtgtggactttgtaatttttgagatgagagtgaaaacttcagccctcacttagaaagaaatcacatttggctggaagtgctgtttctcccccatgttatgctatgtaatggattaattataaaaatggtcacaattactctcctctttaaatctatttccttgagataggactttgcagctcctcttatcaagggttggagtctctttccctagcctgtgaatgtgggcttggcctttttacttactttagccaacagaattc

SEQ ID NO: 203069 - DNA, 1000 bp, Homo Sapiens
ccatgttggccaggctggtctcgaactcctgatttcaagtggtctgcctgcctcagcctcccaaagtgctgggattataggcgtgagccaccacgcttggcccaatattaacataaaaatttactggccctgcctggacctatcctgtaatttcctcaggtaatcctttggtgaactaaagtaggaaagccattctctcagtggtcaccttactcttttgctttttaaatttaagctacagcccaaacaatgggagacttcaacatcacacagcaattctacaccatttcaggaagcacaggtggctctgagtctcacttctgtcacgtaccagctgtgtgatgatgctggcaaatcatttcactttcatttaattcttctgaaataatctgctcctctgcagagtgggaaaaatacctgtgcttatagtgggtcattgtgagtctggatgacccactgtccaaaagttctttggaaattgttaatttgcaaatgcgaaggattatcttaaaaaatggaaaaacttaggcaaaacttcctgtctcagcttatgaaaaactcattttatgcgggccctttgcctacagtgaatgaatgcagagaacaaggaaaacagtaaaacatttgggtgttggtcctaacttaatccagccataaagttacaagacttttgaattttgaccacctttaaaaacagacagttgggtgtgaatatatctcacttaaaggttgtttaaatcgttagaggtacattacgttaacacgtgcaacagctagagagtaactggtaacagcagaggccttctccagcttaagagttagtaaggtttcaaaagcaagtctcaaacccctgacctaaagtgattcacctgcctcggcctcccaaagtgctgggattacaggtgtgagccactgtgtccagcccaaaagcaagtgagttgtttgaagtttcagaactaatttcacaacacaattcatgttgtaaatgttgtttgaattc

SEQ ID NO: 203070 - DNA, 1000 bp, Homo Sapiens
tagaagctgcaattacaggcgcgcgccttacgcccagctaatttttgtatttttagtagagacggggtttcaccgtgttggccaagctggccttgaactcctgacctcaggtgatctgcccgcctcagcctcccaaagtgctgggattacaggtgtgagccatggggcccaggccggtttagatttttttagatatacaaatacttaccaatgtgttacactggcctacagtatttagtacagtaacatgctgtgcaggtttagagcctaggagcaataggctacaccatagagcctaggtgagtagtaggctatgccatctaggtttgtgcaagtgcactctatgatattcacacaaggacaaaatcgccttttgggggacacatttctcagaatgtatccccgttgttaagcgacacatgaccatagttgaagaaactctcaggctggcttcttccttcttgaaagggattcggggccatgcctctttaagaccaaggagaattgactcccttccccacctgccctcttgccttcctgactcagacctttgcagccttccctcccttgcagctgttcccaacgtttactgtaaaaaaaaaaaaaaagaatgcgctattgtttaaagtggcaattaattgttcagcctctcatgggaaggagggaagctctgaaaatgttagtcattaatgcccagtgatgggaaggttcactttgacctcaggaggttacaactgccatatttcaaatggcagattttgtaaagtttcattcctgttgaattaatctaaagtacttctactttgattaaggcaccaggctgggtgctgtggggaggtacgtagaaacacaaaggcatccagccccatccatccctgtccttaagaaaacatcaagggaggagaagaatattgcacaaaggtagcctgtgggacctgcagcactcaagggtctgtgtcccagcataagggacagagttatgttggggagaagagaattc

SEQ ID NO: 203071 - DNA, 1000 bp, Homo Sapiens
aataactttctttgaagagtttgaagtttaacaaagtttttctctgtcatcatcttgaattatctttagccatcctgattttcagaatgtggttcttccgatctcatttcaacaaaggagataaaaacaaaacattgatgagaaattagggcagagaggaactataagcaggaaaccatcgagtagatgccactatccgtctataattcaatggtgaactgaatggcaaacgaaaaacttacctccccagaatttgagttttgtgggaaggttctcttcattcccatcaggagtgaatataaaggctcattgtgtctttgaaatttttctgtcttgtttccctctgttcttcctttatcccttgatcaaaggttcaacagtaagtggttgagatggtttttactgtgtgtctaacaagctgacataaaatctaatgacgtaaataatggtcagctgtagctgaggtctcctgcctctttttcctagtgttcactgtaaaggaatttaagcatatgtgtgtgcacatgtgcacgtgcgcgcgcgcgcgcacacacacacacacacacacacacacacacattcatgcactctttttaaatttcccataaaaactctacttttgaaattatccaggatatccttgagtggttggttccaaactccagaggctctagaggtttactgacagacagatcacactcactgtgtgcactgcctggatatagtattttggtgctctcaccactcacatcccccatgcaccccatcctcgccacaggacactctgcattgacatgcattaatgtgtgtgtgaagtgccaacaatttgcagatgattacagggcaatttgctgatatagagggcagaatctgaacatctcatgttacttaagagaaaaaccaaatcattggttacttaaggatttttttctttttacatttttaaatatgatacaaattatctaaaaagaagttgaaggattttttaacttctaagatc

SEQ ID NO: 203072 - DNA, 1000 bp, Homo Sapiens
tcattttgtcacacaggctggagtgcagtggtgcaatattagttcactgcagcctctgcctcccaggttcaagcgattctaatgcctcagcctcccaagtagctggtactacaggcacccaccaccacgcccagctaatttttgtatttttagtagacatagggtttcaccatgttggccaagctggtcttgaactcctgaccgcctcggcctctcaaagtgctaggattataggcgtgggccaccatgcccagcctgaacaaacacttttcaaaagaagacatacaaatggccaacaaacataccaaaaaaaaaaatgttcaacatcgctactgatcagagaaacacaaatcaaattcacaatgagataccatctcacaccagttagaatggctattataaaaaaggcaaaaaaaaaaaaaaaaaggtgttggcaaagctgtggagaaaagagaacacttatacactgttggtgggaatataaattagttcaaccactgtggaaagcagtttggagatttcttctcaaagaactaaaaacaaaactaccacatgacccagcaatcccattaccaagtatatacccaaaggaaaataaagtatgctacaaaaaaggcacatgcactcatatgttcatcacaggactattcacaatagcaaagacatagaatcaaccgaggtgcatattaatggtggattaaagaaaatgtggtacatatacgccctggaaaatacgtaaatataaaaaagaatgaaaatatgtccttcgcagcaacataaatgtaggtggaagtcatcatcctaagcaaactaacacaaaaacagaaaaccaaataccacatgttcacacctataaatgggagctaaacattgggtatatatggtcataaatatgaaaacaatagacaccagggactactacagggaagattgatggaggggtgcaagggctgaaaaactacctattgggtactacactcactacctgggtgatgagatc

SEQ ID NO: 203073 - DNA, 1000 bp, Homo Sapiens
gtgttttgtgcccttgttctttcttcttattttcttatggtttaattaatgctggtaatttgccttacatcttttctggaccaaggcaaggattaggtaaacatataattaaataagtacatttatatataaacataagtagtagggaaaatatgggaagatatttgactttatgtccagtgttttgcttcttcttctttttttttttttttggagacagggtcttgttctgttgcccaggctgtagtgcagtgacgtgatcacagctcactacagcctcaatgacctcctgagctcaagtgatccacctgcctcggcctcccagagaagtgctgcgattacaggcgtaagccaccatgccgggcctgttttgcttcttaaataaaatctttgtcatatggtgttcatgctatttttatatttctttgaaaaagagaagtagtaaggtctctgattaattagaagcacttttaattttagaaaatacgtaatgataaacaataaaatgggggcatacttaaaagaatgctagaggtaaaagggtggagaatcatacacaggtctgtctttgtaccatgcggttttctatataagtagaattctccatcattacctggaaaattcagtcaactgaagcactctgtcctctaatgacatcataataatctgaagtgagattatgtatttttttaaaggaaatatttaagatgtgtaataaggatagtgtcacactttctatctaaatatgatgctgcatgaagacagcatgaacagagtcttagcggtagatttgcactagcccactcccatgattttacctatgttttttacctttatactaatgttacttgtgtgtattgaagcatcataattagggctaaaatagaacaaacataatggggccatatgcaaatcaaactcataactttgacctaattttgtcttgtataagttgggcaaaacagccagttttattcacccataagggtttattgaattc

SEQ ID NO: 203074 - DNA, 1000 bp, Homo Sapiens
taaagaagattgggtcatataaacttatttttaaaacaaatgtacaatctgagaaataaaaacaagcaaataaaaccatctgagctgttcaactgaatagagataatgagattcttatgctaaggcaaaagaaagggcaactccagaaactatttttgcctcagataaagcatgagttttaaggctgctttgtgggctgtaaatatattaaaataaacataccaaagtgacagacttctggggagttgagcttctccaacattagctttatgacaagttcatctggaatgctttgaccgctgatcaacattgattgcaactaaggacaagcatagatattgtacattactgtataatatatctatgatacagagctttttttgtaatcatagttactttgaaatttaggtttgtttaccataactcctgattcggtttcagcagcaatctgttcttctaaaattggcaaagctaaaacatgaattcaaaatattaatacagactgatattaagatcaccaaaataagaaacacattctagtgtcttgtaactggtaacaaagattaacatttgtgcatcactttataatttacaatgcaaatgtatgcatattacttcacttaagcctaaccaaagcagaagcagcagaatgtcttccatagagaacttgtctctgccacttactaagcttaagaatcttggagaagcgaacatggtgactcatgtctgcaatcccagtactttgggagttcaaggcaggaggattgcttgagcccagaagtttgagaccagcctaggcaacatagggagactacattcctacaaaaagttaaaaaattagcagggcatagttatggtgcatgcctatagtccctgctactcaggaagctgacgtggggtgatcacttgagcccaggaggtcaagtttgcagagagccgtgatcatgtcactgcactccagcctggatgacaaagtgagggcgtgtctcaaaataaaaat

SEQ ID NO: 203075 - DNA, 1000 bp, Homo Sapiens
caaattttctgattcaagtcaatttttatgtctcagtcattttttttttgtttgttttcctgacatttcctaaggcactgttttggtagtttataatttttgttaccttcatgattttgttccttttctcattttctaaatttctgaatttggttttggtgaattgattttctgtctgaataactctacagattattttgggaattttaggtatattatagtagcctcttcaagtaacagttatgtggttagttcatttcttataattatgttcttttctgtttcatatctagaatttccagaataatgtcaaattatgatggtaccaataggcatccttattttgctttttatttcaatgtgaacaataactattattatgtataagacactttgtttgcatgtattatatcatttaatcctcataataagcatatgaggtatgtgctattattattcccattttacaaacttgagaggttgaataatttgcttgagaatgtcctaaagtgactgagtcaagatttgaagccaaaagcagagcacgtgtgctcaaccactttatcattccaccttccatgtgattttcacttgagagtaccatgaagatcattgtatgtttttacatttgacttataaattaatggatttcctaatgttgaataaagcgcattatttttactctcacctgttacctctacatcgatttgtgtttctttgctattaaactttagatcgaacactaacaaaattattgttgtcagtaaaatatttttttacattacatgtcttttttttatttctctggctttactagactatagacaaacagaaataaatccttgtgtcactgggcaatgtagtaactatcatgtataaattttactactatgttagttaaaaatgtctaaggagcagggaaatgacatttgttgtgtacctgctattttcaagtgctcatcacatccaattacttttttttttacactgaggtgaattc

SEQ ID NO: 203076 - DNA, 1000 bp, Homo Sapiens
acctggcatttccaggtaagtccctgtggccatggtgcattggccttttctctgcatggccagatgagatttgctcataccgggctaaggacctcctgtgtaggaatgctcttgagggacactgggcttggatgttcattgtcttgtcatgtgatgtgtctgtcatggtttgatattgcattaagtgggcctcctgaaacaagttctgccatagtttgtataggattggcattatttgtttcatagagatgtgatgggtgaggccatctatgcctgccattttctttttgcttaggtttttcattaagaacttgatttttaaaaatagacatgaggcctggcatggtggctcacgcttgtaatcccagcactttgggaggccaacgtggatggatcacctgaggtcaggagtttgagaccaacctagtcaacatggtgaaaccccgtctccattaaaaatataaaaattagcagggtgtggtggtgcatgcctgtaatcccagctactctggaggctgaggcaggagaatcacttgaactcaggaggtggaggttgcagtgagctgagatcacaccactgcactccagcctgggcaacagagcgaggctctgtctcaaaaaaaaagacatgaggcttttggattttctgtttcttcctttgtcatttttttaaagataggtttgtcgcagaatttcatctaagttatcaaaacaatttacataaatcattcacagtatcctctgtgcagtgatgtccattctcattcctgctctgggccatttgtgttttcttttccccctgatcagactagctaagagtttatcatttttacagatattttccccaaagaaacctacttttgggtccattgatttttttttttctattgttttctttttcattgacttttgctcttttcttatgaatttcctttcttctacctattttgtgttcaatttgctgtccttgttttaggttcttttgatagaggcttagatc

SEQ ID NO: 203077 - DNA, 1000 bp, Homo Sapiens
gcaaaatttttaaatttttttgtagagatggtcttgctgtgttgcccatgctgattttgaactcctggcttcaagcagtcctcccactttggcctcccaaagtgctggcattacaggagtgagtcactgcatttggctgctgctttttattcttctaaaattcaaacactgatttttgtttaagttgttaagaatatatgaatttttggtggacagtttcatatgatatcacctgctcatttaaggctgcagtggccaaacataccagatttttaatctgacttagataccaatttcaacagaagcatccaacacagctaggtactctctgtaaaccttcagccctaccccctctgcctcactcagtatatgtctttacaactcctacttaacggagacaatagaatcctatctggtggggagttctttattgttaccaagtctacagattgtatatgtgcacacacatccccttttcttaggttgctgttaatatgagaaacatttctgtccttgtaaggcttatctctacctattgttttttttttttcttcatcggctgtttatttagcccctgctgtgtgccagccactataaataaaataaagccattgccctgttgaagcttaaattctagtggatagaaagtaaagtttgttgggtggtgttaagtgctatatagaggaaagtaaagcagagaagattgataaggaatgggttgacgtgtaacattattatttaaacagggtccctggggaagataacctcactaccgaagatcagatacctttttgtttttctcattcatcattactagccttttatgctaatatattttcctgggtaccatttaaaatcttgctttttttttttttaaagattcttgcagtgacttggaattgtatctttttgagttattttcctattggttgccctagttaggattaatacccattttaattataatagtatataaaagaactttgttcctataaagctt

SEQ ID NO: 203078 - DNA, 1000 bp, Homo Sapiens
catgaataattttacatttgactgtggaagcatctaaactaaaggagggagagagggttgttcttggttattcctttttgaggctgggccttcatcttcaaaaccttcatcttcaaaatgattaaaattgtagacaaggccacaggatgagaagggtccagtggcttggctctagttatcctagggaggggcagttccttgggtgtccatgaactcagaacgtgcaaacctagtattgcctcccaactctctcccggacccatgtgtctccttttgagttacagtaataatggagaacaactgggccctctgtttttaggctaaaggtcaagaccagaaaagacttggaaccaaactggaaattctgcttccttccccataactccctgtcagcttgtaagcaccttctgttcatccaagttttggagaagacattggtcttgtgttctgacagaccctggcctcccaagcttgctttccagggaatctcagcaaaccacaaacggaatgcccctgttggttccgctttcatctaccatttttttcctaaataaaacacaatgaaatattttatcttgatcttgaaatacttgcacaccaggacctgctgtagaagatcccaaggtaacagaaagttcatcaaagagcacagactctgagtcaagaggtggagcacccaagctaggttcacctctgaccccttccttactaacatcatgcccctgcgtgagtccaaaccatttcttgcctccagtgcagccaaatgacagaggtcagaagggtaccactgatctgattgttaagaggcaaagatgactcataccctagaagctctaaagtaccaaggcctgggtccatccctaagactgtttccctgcattccccagggctggcatgcctggatgctttagcatctccatctggaaacaagactcattcctcactaagtgccatggaaaggctgcaaagacactttcactagaacaagggttttaagctt

SEQ ID NO: 203079 - DNA, 1000 bp, Homo Sapiens
tggctgtgtcgtcaaaataccttaaaacattaaaaaatgctcaggattaattttaagacatgtataaaaactttattaataaaactgtaagtatttctgagagaaatttaataaaacaaataaatggcattaacaaatctcttgcatgggatgactctatattttaaacatgccacttttcccaaaactctttaatgtgtttattagaattcacctcccctccactccgccctccccttacagaggcatccacttttgtttttttttggaacataatgaaataattctcaattttatttgaaggacaaacctttaattgaaattattaatcataaaaattattatagaaataatattctagaacttgccctgtaaacttctatcatgtaattgaaaacgtgtaattaaatattggtgaaaagttgacaagtaatataatgaaaattaaacgtttttaaagaagtaagcaccaggctgggcgcgctggcttgcggatcacctgaggtcaggagttcaagaccagcctggccaacatggcgataccccgtctctactaaaaaaatacaaaaattagttgggcgttgtggcgggcgcctgtcatcccagctactcggaaggctgaggtggggagaattgcttgaacccgggaggcggaggttgcagtgagctgagattgcgccactgcacttcaacctgggcaaaagagcgagagtctgtctccccaccacccccaccccccaaaaaaagtaagcaccagtaagtatatcaatttagtttttaggctagaattttaataatattgagaaaatgataaattgtttaataattaatattgtcatagttttaagtttggaaaagcacttgagtaaatatattaccactgtagatcaaaataaatactcaaatatttaatatttagctgttaagatactataataaaatggtataagtataatacattttacatttggtgacaaaaattatttgcttggctaagctt

SEQ ID NO: 203080 - DNA, 1000 bp, Homo Sapiens
acacacagaagggcctttatgtggccctgctctgcccgggacaggtggggcttgcaggcctggccatgcccccttggactccatgccacagcaggcagaaggtggctgagttgcttcctaagccaggtggagcccggcctcaggcctcttgctgaaccggcatcccacccgaaacccgcctgagtcccagaggagtgcactccaggacattcagccaggtccacccgtgtcttagccctttcttttcccagtagactctgtctctgggcggctctgtccagcaccatgagcaccggcagcaggcaggaccaccgagcgggaggcccctcctcactcccccaggctcccggctgggcaggggcctcaccacacggctctgatgctgactttgaggcccggggtcaggtcctcggtcacaaactcgcaggggcagctcttgtcatccacaatgtcctctccggggaggcttgcttctggggggaaggagacaggccgtgaggggccgagggggccgggagacctattcccggggtcctgcagggcacaccggctagacagagcgccagggagcccctcgaggctccctgtggtgcccctcgggtgcacctgcttttctggaaacccacccatctgcacccagctgctctcgagtcaggaccttccccggcaggctgtggccacagggagtggccgatatggggcgtcaaaggacattctggccaatggatgaacagaacatggcgcatccacgcacagatgttaacggcggaaggtgcaggcctgacatctgaggctcagtgaaggaagccagacccaacggccccacgtgggagccgcagacacgcacggcccaagagcagcgggtgctggggctgaggcggggaatggggtgactactgatggggtcatggtttccttctgtggtgatgagaatgttctggaactaggctgaggtggtggtgacaactccaccgtgagcgtgctacatgccactgaattc

SEQ ID NO: 203081 - DNA, 1000 bp, Homo Sapiens
gcggctgaataaacaaaccgtggaacgtctgtacgacacaacactactcagacaaaaccaaaaccgaacacgtccgacccacacagaagcatggaggaatctcagaaacagttcagtgaaagaggccaaacacagacgagtattaaatgtgcggttccgtttctatgaagctcaggaacagacgaattctaaaaaccaggtcagtgactgtgaggacaggcccgactagagaagggaacaaggggagtgtcctctgcctggtgcaggcagcaggtacatgtgtctgtattgcttaaaactcatccaaggctgggcgcagtggcctgtcatcccagcactttgagaggctgaggtgggcggatcacttgagggcaggagttcaagaccagcctggccaacatggtgaaaccccatctctactaaaaatacaaaaattagccagacatggtggtgcgtgcctgtagtcccagctactctactcgggaggttgaggcaggagaattgcttgaacccaggaggcagaggttgcagtgagctgagatcgcgccactgcactccagcctggatgacagagcaagactccgtctcaaaaataaataaataaaataggccgggcacggtggctcatgcctgtaatcccagcactttgggaggccaaggcaggcagattgcctgagctcaggagttcaaggccagcctgggcaacatggcaaaaccccatctctactaaaaatacaaaaacttagccaggcatggtggctcaagcctttaatcccagctactcgggggactgaggaaggagaatcgcttgaacctgggaaacaagaggttgcactgagcagaggtcgcaccactgtactccagcctgggtgacaagagcaagactgtctcaaaaacagaaacaaacatgtctaataagggatcattatccaaaatatgaaaagaactcttaaaactcaacaataatgaacaacccgattttttaaacagacaaaagatc

SEQ ID NO: 203082 - DNA, 1000 bp, Homo Sapiens
ctcaatgctgttttaattggtatttattaaaagttttatatttgttagccatttgcatttcttttcctgacttgcccaacttgttctctggcaactttaaatggactgttaatcttctttactcattttaagaagttttattgtggccaggggtagtggctcatgcctgtaatcacagcactttgggaggccaaggagggcagattacttgggatcaagagttcaagaccagtctggccaacacggtgaaacccatgtctactaaaaatacaaaagttagccaggtgtggtggtgcgcactggtaattctaagtactcggggggctgaggtgagaggatcatttgaactcgggagatggaggttgcagtgagccgagatcatgccactgccctccagactgggtgacagactgaaactccatctcataaaaaaaaaaaaggttttattatattatacatattgacctgcaaactgtcatggaattaattcatttattcaatgactatttactgagcatcctcaggaaggaaagaccagagtgtagctgtaagtgtgtgtagaattgatggggaggagggaatgcagcagatggagctgatgacttaggcagaaaccagatcatattgcacatgttgttttctagtttatctgttttttccaaaaaagctgttttggtgatacagaattttccaatttttatacaagcttgtcatttcccctttaggacttttgggtttgctagacttagaaaaaaggtctttatacatgttttcttctagaatgtttatgattaatattgaaaatatacaagtctgaccaaactggaatttattttggaatgagaaacaaatcagatatccttttgatcctcctcaatagttaactattgaggccaggagcagtggttcatgcctgtaattgcaacactctgggaggccaaggtaggaggactgcttgaggccaggagttcaagaccagccctggcaacatggtgagatc

SEQ ID NO: 203083 - DNA, 1000 bp, Homo Sapiens
acatgtcttgaaaagttgttgtagttattatatttgatcagtttatcttttagtttttctactcaacatatgagtagtttacataccataattaacatgttataatattctgtgtgtttctgtgtacttactatgaccagtgagttttgtaccttcagatgatttcttattgctcattaatatctttttatttatgcttgaagtattccctttagcatttcttatatggcaggtctggtgttgatgaaatctctcaggtttctttttttatctcagaaaatatttctttttcatgtttaaaggatatttttgccagatataccattctgggataaaagttttaaaaaatatatgtcatgccactttttcctggcctgtaaggtttacactgaaaagcctgtgccagatatattggggctcctttgtatgttattgattcttttctcttgctgcttttaggatcctttctttatccttgacctttgggagtttcattattaaatgccttgaggtcatcttctttggctgaaatctgtttggtgttctgttaccttcttgtgcttgaatattgatatctttctctaagtttgggaagttctctgttattactcctttgaataaatgttcaatccctatctctttctctacttcctctttaaggccaataactcttagatttgcccttttgaggctaatttctagattttacaagcatgcttcattcctttttattcttttttctttcatctactctaattgtgtatttttaagtgggttgtcttcaagctcactaattctttattctgctttatcaattctgctattaagagactctgataattcttcagtatgtcaattgcatttttcagctccagaattctgcttgattctttttaattgtttcaatctctttgctaaatttatctgacaggattctggattccttctctatattatcttgaatttccttgagttttctcacaacagctattctgaattc

SEQ ID NO: 203084 - DNA, 1000 bp, Homo Sapiens
cctccccacccaccccgtgtctctcctcacaggctcacatcacccaagatactcaaagcatctcccccatctgcataacccagcaaagcaaggactccatgacctgctgtgtacccaggccaggaacctgacctgccacaggcccagggctgcgtgcacactggctgaatgcattagttaatattttggtgacgctggttacttgccacctctgctgtaaataacagcagcgtcaaggatacagtggccacgagaggtagcagctgctgatgtgtggagaagcctccatagagaaatacgtgtgaaagatgcatcaagaaaacccaagctgtgatgctgttaagggctgaaatgtgtctgctgaagtcctaaacctgcaaacgtgaccttatttggaaatagggtctttgcaaatataatcaagttaagatgaggtcatagtggattagggcgggccctcacccaataggaccagcttccttaaaagaaaaggaaaaggccaggcctggcacggtggctcacgcctgtaatcccagcactttggaaggctgaggcgggcagatcatctgaggtcaggagttcgagaccagcctgaccaacatggagaaaccccatctctactaaaaatacgaaactagccgggcatggtggcgcatgcctgtaatcccagctactcaggaaggctgaggcaggagaatcgcttgaacccaggaggcagaggttgcgttgagccaagatcgcgccactgcagtccagcctgggcaacaagagcgaaactcagtctcaaaaaaaaaaagaaaagaaaagaaaaggaaagggccagatgtggtggctcatgcctgtaatcccaactcttggggaggcagaggcaggaggatcgcttgagcccagcatgggccacatagggagaccctgtccctacaaaaagtaaaaaaattagccaggtatgatggtgcatgcttgtagtcccagctacttgggaggctgaggcaagaggatc

SEQ ID NO: 203085 - DNA, 1000 bp, Homo Sapiens
cttgaatgcttggtagaattcatcagtaaaaccacctgggcctactactttctgttttgggaggttatgaattattgacttaattcctgtaatggatatagacctattcagattatctatttctctttgtgtgagttttggtagttttctttttttcaagcattggtccattttatctaggttatcatatttgtgggcatggaattgatcataatattcttttattatcctctctaacacccatgggctctctttgatttctgatattagtattttatgtcctccgtatttgcttttcatggttagcctggctagtgatatatcaattttgttgaccttttcaaagaaccagcctttgattttattactttcctctattgatttcctgttttcaatttcattgattactgatctaatttttattttattctgcttgcttcagacttatattattcttctttctctagtttcctaaagtggaaacaaagattattgattttatattttttcttctataatctgtgcactcaatgctatagatttccctctaaatgctgattttactgcatcccacaaattttgataatttttattttcattttcatttagtttaaaatattttaaggtttctcttaagacttcttttgacttgtgtattatttagaagtgtgttgcttaatctccaattttttttaatttttcagctatttttctatcacttatttctagtttaagattccattgtaatctttaagtatattttgtattattcatggtcttttaaatttgttaaagtatattttatggctcagaatgtggtctctcctggtgttgttccatgtcaacttgagaataatatgtattctgctcttgttggatgaagtattctatgaatgccaattaaatttagttgattgatggtgctgttgagttcaactatatccttactgattttctgccaactgaatctgtcaattactgattgaggggtggtgaattc

SEQ ID NO: 203086 - DNA, 1000 bp, Homo Sapiens
attgccccttttgttgaagaggcacaggaatccatgttgtgatatataacatgctaaatcacacagttcctttatagaatctgtaagagcttgcagccatattgcaaagaaatttataagacaagctgggcgcagtggctcacgcctgtaatcccagcacttttgggaggccgaggcgggtggatcacgaggtcaggagatcgagaccatcctggctaacacggtgaaaccctgtttctactaaaaatataaaaaattagccgggcatggtggtgggcgcctgtagtcccagctactagggaagctgaggcaggagaatggcatgaacccgggaggcagagcttgcagtgtgagccgagatcgcgccactgcactccggcctgggcgacaaagcaagactccgactcaaaataaataaataaataaataataaaaataaaaaaataataataataaaaaagaaatttataagacaagtagtcacaaaatgatgtactattatttattaacattaaaatgtccatgacatattaattgtatatgtgtgtggcaagaacttctccccctcatctttagtgaataactcttgcccaaaagccctataaatgtttaggattccaagactatgtccttagctttccatttgtaaaacattacaactccactgaataacctcaactatttctgtgatattgtacatacaccatgacaactctaaaaacctgacactcattgtagacttttccctttcataccaattaagaagacctaacaattcaacctcctataagactcaagtcaatcttcctcttctccaacaaccccatttgtcatcaactacagcaataccttccaaacattcagtgccttcattctcactgaatagtaaggaactaatctgatcatatgatatctttgattaaaatctttcaatagggaaaaaagtggtcatgctgagattgtgattcttgggtgttagtaatcaacatcttgttccttg

SEQ ID NO: 203087 - DNA, 1000 bp, Homo Sapiens
cagtagatatgttcattattttgactgtggtgatgatttcatggtgtatgcatatgtcaaaattgatcaaattgtacactttatttatatgccctatattgtatgttaataactcaataaggctgttaaaaattggaaaacatcctaaaacaaagaaaattaatttaaaaattattatatattaccaattctgagttcagagaaaagcaatgaagctaaaaataaaacccttaaaacaaaaatgacataatattagtgaggtagtgaatgcttgtaatcccagttatttgtgaaatggaagtctagagctcaggagttccagtccagcctgggcaacacagtcagactccatctctaaaaaaagggttttttttaacccttcaaaaaattaatgaatccaggagctggttttttgaaaggatcaacaaaattgataaaccgctagcaagactaataaagaaaaaaagagagaagaatcaaatagacacaataaaaaatgataaaggggacatcaccactgatcccacagaaaaacgaactaccaccagagaatactacaaacacctctacgcaaataaactagaaaatctagaagaaatggataaattcctctacacatacaccctcccaagactaaaccaggaagaagttgaatctctgaatagaccaataacaggatctgaaattgtggcaataatcaatagcttaccaaccaaaaagagtccaggaccagatggattcacagctgaattctaccagaggtacaaggaggaactggtaccattccttctgaaattattccaatcaatagaaaaagagggaatcctccctaactcatttgatgaggccagcatcatcctgataccaaagccgagcagagacacaaccaaaaaagagaatttcagaccaatatccttgatgaacattgatgcaaaaatcctcaataaaatactggcaaactgaatccagcagcacatcaaaaagcttatccaccatgatc

SEQ ID NO: 203088 - DNA, 1000 bp, Homo Sapiens
ttctcttctctcttattgtctagatgtagataactcaccagtatgcatctggaggtctaaaccatctgcatagtgcaagcctgtgaatccacattggacatctcatggatacctcatacttaaccttctccaaaccaatctaaaactgaccttcctgccctaacctggtcctgttttagagtctccatctgtactagtcagggttctccagagaaacagaatgaacaggataggaaaaatgaggaattggctcatgtgattatggaggctgagaagtcccatgatttgccatctgtaaactggagacctaggaaagctgatggtagaattcagttcaagtccaaaggcctgagaagcaggggagatgatgatataaatcctggttggaggacaggagaagatgagaaatgtctcagctcaagcggtgagttaggaaaaaagggacaaattcctccttcctctgccttttgttctgttcaggccctcagtggattggatggtgcccatccgcattagggagggccacctcctttaccaagttcactgattcaaatgctcatctcagccagaaacactctcacaggcatacccaggaacagtgtttaatctgggtaccctgtggcccagtcaagttgatgaataaaattaaccatcacccatttcctctgctgacatcacccatccacttccattcagtcctgcaaaccagaagttgtgattcctttcttttccacctcccccatgtctaatcaatcaccaagtcctgttactcttaacttctgaacagcttttgaatcaatccagttctcttcatcctcatcacaactgttctagtcctattggctattatgtctcgcctagtctaaggcagtagtctactaactagtctcccaactcccttctggtctctgtcttctagacctgaccctgagggaaggtctagaaatgcaggcaggctgtccccattctgcttcctctacactaagatctagtcaggatc

SEQ ID NO: 203089 - DNA, 1000 bp, Homo Sapiens
gctctatcacccaggctggagtgcagtggtgcaattacagctcattgcagcctcgaactcctgggctcaagcaattctcttgcctcatcctctcaagtagctgggactacaagtatacgtcaccatgcccagctaatttttaaatttttctgtagagacgaggtctcactatgttgcccagggtggtctccaactcctgggctcaagggagtccttccacctctgcctcccaaagtgctgggattacaggtataagccatcaagcccagtctcaaacactttaaaacagggaggagagctcgcacctgtaatcccagcaatgtgggaggctgaggcaggcggatcacttgagttcaggagtttgagaccagcctgagcaacatggtgaaacctcgtctctacaaaaaatacaaaaattagccgggcgtggtggcatgtgcctgcagtcccggctacttgggacgctaagctgggaggatggcttgagcccaggaggtgaagaggcagcgagctgagattgcaccactgcactccagcctgggtgacagagccagagcctgtttcaaatacaacaacagcaaaaacaggagggtaattaagaaccaaactagatactttatgtgtcttaagtatgtcctaccacccagtgcagctctgagaaataaaagggactggcaagagatgaagctctagttattgctctcacagttactcaaaggaatctcagaggaatgtcattcactctagttcgaatctcattccataaatcattcattgtatcataagaaacttttctttaaaacaaaaacagaaatgactttacagtcattcatttgttagatatatatttattaactgcctggcacatagatggctgtactaacttatggggatttaagagatcctgtctctacaaaaaattttaaaattagctgggtgtggtggcacatgcttgtggtcccagctattcaggaggctgaggtgaaaagactacttgagc

SEQ ID NO: 203090 - DNA, 1000 bp, Homo Sapiens
acccggctgtgtggaaaagctggggcgcaagaagggagtggctgcagaatcggggcgccccggggttggcgagggaacgagggtctcgacagatcccgacacagggcttgtgtggtcagcgactgcgggacccggaggagtagcggggctcttaacaaccgccccgaaggtcacctattgaagtagaccccaacccagtgtcccgacactcttctgggacttatccacatcccgctgctgggccagggctagcaggacccagagagggcgtgggacggagttccacactgagcagtccgtgcctcaccaccgtcctgaaatgttctaacctcttttcgcgtgtgtgaaatggggatgatgcaggacatttgcttcacagcgctatagagaggaggagtaaaggaggcagtggatctaaagtttctgtttgcagggactttgtggctagcaagtaacagaaacacacagggagctcatgtaagccaccagatgactcctgtgggaatatagtgttatcgtgtcccacaggacctgaagttctctcaagaagctgacttgtccttgttctctctggatgctgatccctattcctgttcatatctttcccctttcttccctgctgggggatggaacaatgaggcttctaccagatatcagctccgactggctttgcttgaatcaagagtttgcccctgttcaatcagccatagccatggagtgggggtcatgtgtgggggatcaggatgacacccactggatatgtctgaggcagaccagtggggtgtaatcactagggacacctacatttgcctgtagtgtagggagggactgatgtcactttggtgccaggactgagtggccttctcaggaaccagagccttttgccgaaaaaaggtttgggatcctgaggccagaccagtcaggcagtccaccctgaacagagcccatgcaggacagtgggcatgagaccccaaacctctggctgagaatattgccctca

SEQ ID NO: 203091 - DNA, 1000 bp, Homo Sapiens
ggttattatctaagattgttctgtcttgctaggctgctttagtcctttggctagagaaagtgggtgttttttgttgttttgttttgtttgagtctgtgctcaatgacaatttgccagcttcctcagctccaaattcagagtatatgaggcataagaaagcccaaggaactcactgctgtgcatccttgggtcccaaggtctttagtttttctgtcttctctccacctttaaaagtcttcttatgtttggtttacataagatgcccgaagttttcagttgtacttagtgggaggaatagagaaaagtatatattctattccttcctcgaaatcctctgaaaacattttgatcatgcttacacttttctaattataacagtatggtttcattttagaaaatttgaatatgttttaaaaaataagaaaatttaaattacctagaatcattatttaaagagttaactatttccagcttttttctacgtaaagtgtattattgtgtgtgtgtgtatatatatatatatttttaatttctttacaaaattggaatcttactacaaattgaggtttctattcaatttttcccataacattaataaaattataagctttttctgatatttgaaatatccatctgttcagtggagataccagttcactcgtttgtgggtacaccattatccagcttctgtggtaagcagagcacttaagaggaaaggcaggcatatgggcctccgtgagctcacagtggtggggagctagaccctgggtacttcatcaggactatggagaagagggtaaagtaaaacgcctgatgctcaaaactagcaggcggtggtggcctgatctcggcataccaggaaaggattttgtgaggaaattgtgctttagtcaaaagaagttgttcgtgaggcagaggatggggtgatgggagtactcgtagcagaggggacaacacctgtgaatgttctgagggaaggtgcttgacagctcatgaattc

SEQ ID NO: 203092 - DNA, 1000 bp, Homo Sapiens
cccctgccacatgaagccctggaaacctgccctctgtggcttcccttcagcttttgcccatcatgtggcttggcctctagagaagctggacttccttgacgttctcagacacatcctgtccaagcttatatgaatttgcccttctggaaagtgcactgtagctccccatccaccatagatctttgcctcttcaaatataacatgcttcccaagttcaggtctacataaaccttttctataaatccttctctgatccatgtaaccaggtgtgaaccttttgattttggtctcctacagcacttttatattcactataggcatttatcctcctcctctcatggtctttcttacttgtgtgtgtatttctgtcccccactagtccatgaggtcctggtgagcaaggactgagtctccttccccacgtgatgtgcctttcagagatcgctgagagaatcacaaacaaaaactagctaataataataacgtcaccttacaatgaacataacattcaataatttattatagcatcacataactgcttagtagttactattactgtctccattttacagatgaagaaattgaaccacagagaggcaagtactacaaaatcgcacagcttataagtggaagaaccaggcttttaacccgtgcagtctggtttcatgcttttggcatgaggttagatctcccagcagtccccagtcctcaacacctttggatacttggcaaattccatggtgggcccagttagatagcttttgagctggagctcagtgtttgaaacctctgaaactccagggtcatcccacctcatatggaacttgacacttattcacacccacgtgtcttggcccagactccctgttttggaattcccttcccctatgtcacctcattgattcctcttcaacttttgtgattccacagaaattacattctccataaagatgactgtctagatcgggctacccagagggagtccttgtaatcagaattc

SEQ ID NO: 203093 - DNA, 1000 bp, Homo Sapiens
tcctgagctcaggcaatccaccctcctcagcctcccaaagtactaggattttttattttaaaaatccgatttttgaatttaaaagcaacattaaattcatgaaataaatcacatttggtcatgttgtattgtgctttttatatatctctagatttattatgttaatatttgtttagtatttttgcatctacatttatgtagatattggcttataatttttcttttttgtaatgtaaagtgagtcaggaaatattcataaattgagtcaggaaatattccctcctttactattctctagaagaatttataggattaatgttctttattctctaaatatttgggaaaattcaccggtgaagccatctaggcttagataatttttgtgtgtgagaaggctttaaattagagattcaatatttaaaaataggtatagggctgttcaaaatttttatttcttcttgtatccttttggtaagtaatgcttttcaaagaatttgtccattacaattaaattatccaagttttggcataaagatgtttacaatattttcttattgccttttaaatgtctatagtatctatgggtgcagagctttgggaggccgaggcactcagatcacttgaggtcaggagttcaaaccagcctggccaatatggtgaaaccccatttctactaaaaataggaagccgggcatggtggtgcgctcttgtagtcccagttactcgggaggctgaagcaggagaattggttgaacccaggaggcggaggttgcagtgagccaagattgcaccactgaactccagcctgttggacagattgagactctgcctcaaaaataaattaattaattaattaaaatgtctatagtatctgtagtgatgccctttcttcattcttgatgtttacaacttatgttatctctctctctctcttcatgatccttttcaacgaaccaacttttggctttgttagttttcagatccatttaaaatggaattc

SEQ ID NO: 203094 - DNA, 1000 bp, Homo Sapiens
tatctttaacaacccttttgaacttatgataaaaaatgaagataacttaaaattgacttttggtgagtttttctagatttgtctagaggggtataggcacagattttttgaggaccacaattatgggtaatgggatatcactgaaggattttgaataggggactgtttgataagattggtggctttgaaagggtatttttccattgtgcaggtggatagggtggcacatagaggttggggtgatggtaaaccaggaacaagtaaaacagtgaggagaagagagagggagagttcaaagcatgaaagggagcaggagactcaatattgctggcttcaaaggtgaagtaatagggccatgagattccttggctcatggccccattacttcaaggaatgtgggtggcttctagaagcttgaatgacaatgaaatggatgattcctctagagcctccttaaaggaaagaagccttgttcccatcttgattttagaggtgagatccatgctgcatttctgatctacagaactgtaagatgacatatttgtgttgtttaaagccactagtttgtgaattttattacaggagcaatagaaaacgaatacagcagatttacccaggttttccactgaggaaggagatgagtcatttgatactgagttaagtatgccaaaggttggcagtctagacttgtgggcattttagcctctttgagtacatgcttgttttagtgaatgagagaaagctgttatgaaggaacattttatatgaacttgcttgttttcatttctctacacctcactgtcctcttcctcaaagctaggggttagaatagattatctcaggttctcttcagcttgaaaattctaaaattatttgccttgcataaaatgaaagaaacaaaacacaccactatccccataaaattccttctctggtgagaatgaggggaaaaaaggagaaccacctacaagaattattggtaaaaacacacatagaattc

SEQ ID NO: 203095 - DNA, 1000 bp, Homo Sapiens
cttccatttctttctggaaggtgttgaaaaatctttaccaaccatctacctggctcctaaaggtgcaggtcatggctatgtctgagactggcaagttctgtccacaggtctcaccagatggttgggcagtcctccatggtcatcacctgtgggcagacggtcactaagggcaattggggggacagaatacctaggctgattggagtcatcctttttttatcagagtgccaggtagttgaatttgtgtaaattagatgttctcatgatgcaatttataatacccaggtgtacttggtataaaacttctcctggggaacctgacagatgaaaacagggaatggaagcagctgacaagtcaggacattccaacttaccttcatgcccagaagttagaggtcagggaggggtgggacactttcatttgtgagtggtagttctttttttttaatgcctggaaaaccattagaaaacaggcaatctggaaactttgggccttactcctaatttcatttttgattttagaatgtattagggtaaataacttattctgcttgtatttgaggatttgctgacttctgagagcaccatgtattcacttccattatgaatagggcagctttatgatatattgtctacattttggagtattgagaatgaaggggacaagaggtataaactttgattgtcctgggcaaaccagaacatgtggtcaaccctagttatgaagatcaatttaggttattcatcctaaaaccagaaattttgatagaactgacaggttaggtatcatgtcttatcctaataaaattttctattaaaactatgtaaattcagttttatgaaataaatctataccaagatcatttcataaaaaatggactttttgagaaaataaaaaatgacattgtattttcagaatctttcaaacatattctgatcttttttttttaattgacagtgtttgaaggtaaatagtgaccatggtttttgttaagaattc

SEQ ID NO: 203096 - DNA, 1000 bp, Homo Sapiens
attacctaaaagcaatgttgaactttaacacatctttccatatgctgtgcttcccgtaggcaagattttgcatttgtgctattttctccagccccttttcctggtttcattttgcataccataaagatcatgagaaagcttaattcaggacacaactcttaggttctcagctctacactgagatcctgttttgtttcaccttgctaaaaacgtcttgcccagtttatctttcaattcgttttctggatcttcgtccaatttaaaaatatgttaagattatttttagatcctagtcattagtgctatgagactgttttcaaacagatttattcttttctctcatttgctcaatatttgattccctatttaaagtgcttttctcctttcaagctttctacaaatctaaacattgggagaaaaaaaatgagggaaaggaccaattctctatatttgtgtaattgtaagcaaaatgtgctgtactcttttctggccacttggcacataggttacaggtcatgaactatatatgaaggcctgcagttcaaatgagatccacagatctggtatgttcctcccagactgtgtttcaaatagacaagtgttagttgcctgggtttttttttttttcttttaaaggagacttcatttaaatttcagggtattttatatccaaatatagaattagagccttctttaagacttgatttgaaagcactgaagtcactatcctatatggcaataattgggtggagctttcactgttggggcttaccactcccactgtgactgctgggacaaggctcaaacttctgaaactctgtggccaaggagaggagactagctacagtttcttactgaggaaagggagtggtatcagggggttgggggagacccctgttgttgaatgtccagaggtggtgcctgtgatattgacccccataggtgagctcgtgtgatgtaatggtcaggtcttggcctttacgtgaatctacgtgaattc

SEQ ID NO: 203097 - DNA, 1000 bp, Homo Sapiens
ttacaggcacctgccaccacacctagctaattttttgtattttcagtagatccggggtttccccatgttgaccaggctggtctcaaactcctgacctcaggtgatctgttcacctcggcctcccaaagtgctgggactacaggtgtgagccactgcacccaactgccttcctttccttttatttatttatttaaaaaaaatttttttttatttttttgagacggatctcactctgtcacccaggctggaatgcagtggcctgatctcagatcactgtaacctctgccttccgggttcaagtgattctcctgcctcggcctccctagtagctgggattacaggcatctgccaccacgcctggctgattttttgtatttttagtagtgatggggtttccccatgttggccaagctggtctcaaactcctgacctcaggtgatccaccagccttggcctcccaaagtgctgggattacagctgtgagccactgcacctggcctctaccctttcttatgcttgttgttggagaaaacactcatttatcttagagactttctcacattttacttttggctgattgcaccttgaatctctcagtattcaaggggtattggttccaggacgcctgaatatcccaaaattgatgaatacttaggtcccacatttgggcctgcggaatcctcatatatgaaaagccagccttccacatacagattttacatcccaggaatactgtgttttctatttgcatttggtctaaaacaaatccagccaggcatggtggcttgtgcctgtaatcccaacactttgagaggctgaggcaggcagatcatttgaggtcaggagttcaagaccaccttggccaacatgacgaaaccccatctctactaaaaatactagctgggtgtggtggcacatgcctataatcccatctactcgggaggctgagacatgagaatcacttgaacccaggaggcgaaggttgcagtgagccaagatc

SEQ ID NO: 203098 - DNA, 1000 bp, Homo Sapiens
cactcattgacttctttttactacagtggcaaaggtgagtagttgcaacagagaccatatgaatcccaaagactaaaatctttaactttttacaggaaaagtgtagtgatctctcatctggagctttaggactctagcctgtgtcacccaggacctgagccacaagctaaccattggccaggcgcctgcctctgctctatactgtgctttgctggccagagtctggtgtatccaagacccagaaggcaaagaggagaccccatttttttctgggttccacaaagaggttgtattttgccttacaggtaatgaagccatgaagaattaaatattctaggctaggattagcaggtgtgtgacttaaaagcagggaggccattaggagtgggtctctccacccatggcctcagtgacctacatttgccctggcattgccattgcccttgggccacccagcagatggctgctggcaggggagacatggttgaccaagattttatgaggttagtgtggcttagcaagcacttggaccaacctctatgggtactgggactacctgtgatgatgaagagagtatatagatccatagtccctgttcagatgcaggccctcaagcagtgtctgggatgagctggaggaatgtttctcaaccagagcagcttccgtttgctgccatgcacatgaactccagcttctctccatgtctcccacttctttgcagggaaggcctagggacccccaagaaatgaaaacctttttttttctttcttttttttttgagacagagtctcactatgttgcccaggctggagtgcagtggcacgatcttgctcactgcaagctctgcctcccgggttcacgccattctcctgcctcagcctcccaagtagctgggactacaggcgtctgccaacacgcctggctaattttttatatttttagtagagacgtagtttcactgtgttagtcaggatggtctcgatctcctgacctcgtgatc

SEQ ID NO: 203099 - DNA, 1000 bp, Homo Sapiens
cctggttccgaacaggccatggaccggtaccggggttgcggaccccttactctagagctcattcaacctccacagcaagttaaaggaacttcataattacctactccaagtttgcagtaaatgttgtggctgaaaacacagcttacagaatcagactgatcccacctcaattacctaagggctctgtgactcatttgtcagatgggataataatggacggctccatatcattccccacccccttgttactcagagcagcaccactggcagcaccagggagcctgggagaaatgcagactctcaggccccaccccagctcactgaatcagaagctgcattttaataaggtctccagtgactcctgcatacatttctactagtaacttctaaaatatagaaagagtgatggagtaagtatattaatgaaagtgtatctaccagaccaatggtctcaaattggtagcccatggaccagattttcctggagacttgtttgatttgtccaggattgtgtttttttttttttttttttttttgagacagagtcttactctgtcacccaggctgaagtgtaatggaactatctcggctcacagcagccccccaggttcaagagattctcccacctcagcctcccaagtagctggaattacaggtgcctgccaccatgtccagctaatttttgtatttttagtagagacaggatttcgccatgttggccaggctggtctcgaactcctgacctcaggtgatccacccgcctcggcctcccaaagtgctgggattacaggtgcaagccaccgtgcctggtctaggatcgtggtttcgaaaaaagcagacttggccaggcatggtggctcacacctgtaatcccagcattttgggaggccaaggtgggtggatcatgaggtcaggagattgagaccatcctggctaacacggtgaaaccccatctctactaaaaatacaaaaaattagccgggtgtggtggcgggcacct

SEQ ID NO: 203100 - DNA, 1000 bp, Homo Sapiens
ctcttcaaagcatttcctgaaaatgcagaaaatagctaccaacatggaaaccaaaaattaaaatccaggaaggcctgagatagagccaaggtgggcagggcatgcccatcagtgccattagagtttcagggttaaacccactaaacagatttaaatatcgttacattaacagaattccattaaactatggttcaactgaagacccacttaggaaaataaaatcaaactttaattgaaacaattctagggaaacctaaggttttaaaggttctagggcctttaatctcaggcaaaagaaaaatattaagagtgttataaagaatttttgtaatcccagcactttgggaggccgaggcaggcggatcacgaagtcaagagatcaagaccatcctggccaacatggtgaaaccccgtctctactaaaaatacaaaaattagccaggcatggtggcgggcacctgtagtcccagctactgggaaggctgaggcaggaggctgaggcaggagaatggcatgaacccgggaggtggaggttgcagtgagtcgagatcgcgccaccgcactccagcctgggtgacagagcaagactccctctcaaaaaaagaaaaaaaaagaatttttactgggccaggcgaggtggctcacacctgtaatcccagcactttgggaggcccaggtgggtggatcacctgaggtcaggagtttgacaccagcctggcccaacatggcaaaaccccatctctactaaaaatacaaaaattagctgggcatggtggcatgtgcttgtaatctcagctacttgggaggctgaggcaggagaagtgcttgaacctgcagggcagaagttgcagtgagctgagatcatgccatcacactctagcctgggcgacagagtgagactccgtctcaaaaaaaaaaaaaaaaacagaatttttactggccaggctcagtggctcacacctgtaatcccaacactttgggaggctgaggctggaggatc

SEQ ID NO: 203101 - DNA, 1000 bp, Homo Sapiens
tcagtaaagacttttttgatgacaaaaacaaactagcaaaattaactagtatgttcaccacaggagttttaagtgagacaaaggtaactttttggttctcattgaacccatggctgggtctagggtcttgatcagtctgatcatacttggtttctttctgtttctctgccatgtcttctgctgtgtttggtttcatatttcagtcattgacagctccaggctgatatcccattattccaaacatagcagaataaagactctaatttcaaagtatctcaagtaaatctcagaactgagcttgtgaatcttgattgcttatatctgggtattttgtccattcctgaaccaagattattccatctccagctgtggtaggtcatagcccaagtcacaatctttcacttttagagtcagtttcacaggaacctcgggaactaacagcaggaaaaggaaggatttctagataaacatcagtgccctcttatccatacaagggggacgatgttaagggggaaagactatcaacatccactgcagaagcagaaatggtgttaagagacaaagactatcagcatccacaaccatgagcaaccactgttttagaggtaaagaaactatataattagcacaggccaactctttttttatttttataatgcccagactacatgcatgtcttaatcatttcttttatataaaatttctgtgcacctaatgagaaggtatttttagctacacatccatgacccttatcctcattgttgcatttctcctctgaaccttgtcatcacctaccttgcccaaaaggcactgcttgttttagccattgagcaaggtgggtaagcatattgaatttgctgtcatatcctccttaaaggtgcagcaatgcaggtcacatgggatcaaaaaaatgaggcttattcctaatactttaggctatacttgtgaagcctcatgggaagtttttctttaaacaagtctacagcacttattttaggct

SEQ ID NO: 203102 - DNA, 1000 bp, Homo Sapiens
gtccctccagggagctggccaaaacctgctggtggaacgtgtcccagtggctttgtggagcagcatcagtatcaggtcatcatttcatgtccagatgccactgcaaacactgctccatgctacaggttgcctgggagcccagagccatctttctaaaacttgttcctctctggcctcaaatacctaaagcttgggctctgccttggctcccaagagccaactccagtcagcctcccagctgcatcccccaatatgatgatgcgtggcccagccctgggcgcctgccctgagcccaccagccccaccgtcactgccttcactgcccctttgccacaggagtcctggaatgacctgtcagtcctcctctccatttctccaacttgattgattcttccggatcctctgcccagcctccaggggagtcagccccagcagccaagccaccgcaaggcctcctggtgctatcagtctgtcgctacccctccttcactggcaaggactcacagagtatccctggtgtgtgtggacatctttctctccttccctcccctctgctgtggtccctcccctcgtctgtgtgcctgtcatctagtgacatgatgataatggcaaggacaatagcagcagctatagcagatactggcaggggcccatcctgtccccactgcacccaacctgcagggtgccaatggcttccttcatctcccacctcagggtttctcctggcacaggaggaatattctggacccacatgtagaagcggagagcacaactgttggggtgttaaagcctccccactcctctccccgggaggagccctcagccaatggcagcccggagttgggtgaagatcccttggcccttgctgggtccatgctgaggcatgtcccatgcactttctaagcaggtccctgaccataggctgacccctcatgagcacagcttgtgttgatttgccctccctagagcctcactttcccactcccacactgcctggatc

SEQ ID NO: 203103 - DNA, 1000 bp, Homo Sapiens
cctctgctctgaatatgtgcagaaaggcaagagacctatggagaactgtgtcccgagaggatcccctaataaaagtcaggaatattcttggaagaaggagggattaggccaggcttggtggctcatgcctgaaatcccagcacttcgggaggctaaggcaggagggttgcatgagcccaggagtttgagagcagcctgggcaacaaagcaagatgctgtcgctacaaaaaatacaaaaaaattagctgtgcctgatagtacacacctgtagtctcagctactcaggaggctacagtgggaggatctcttgagctcaggaattcgaggctgcagtgagtgagccatgattacaccactacactccaatctggatgacagagtacgacttcatctcaaaaaacagaaaattaaaaaggggagggattattgtgaggaggccaacaataaatttgtattgcagtggataaaattatgttttacgcttaataacagtggcatatatttattaaattattactacattgctactaaagcactgttctaatgctttatattctttaacttagtcgttcataagtgagtctttcatggtgttctaataggtaacgaaaagtccttttttttttttttttttgagatgagtccaaattgaagacctttgtcaacaaagtacaaaaccactgggtgtaaaataatgaaaaatgctgctgctagctaaatgtgtttccttcctttttttgaaacagtgattccagggtgaatttccactgattaataagatgattacctctgaaaaaaactttaaaataaaattaaacacaattttttagcttttggtaactttgtgctgagtatttttgcttaatgcctagaattctgtatggtttcctcccaaggaaggaagaggaaatggtgcgtggtgtggtggtagcaacttgacctcaactaagtcaaatttcatcaggaggctggaagtggtgaagagcccatgttagcgatc

SEQ ID NO: 203104 - DNA, 1000 bp, Homo Sapiens
taggaagggggcgagatgggatccttcagcaggtgaaggcccagaagtacacagacatttattcagaaagaataaatttgtaagtataattctttgagaaaggaaagaccaaatgatttgtggaaggcctgtcgacaggcccgcacttgaccccaccgtccgtccccgccccccacccctgctgctccactgactgccctgccctgctcgtctgctcgtctgctcttgctaattaacctcccttcgcctttcctctgccttaactgtcgtgttctagtctggagagattatatgttttaatttctactccagtctatgaattggtgaatcagccaagtgaatgcttcaaaaactgggactctcaaaagattaaaaaatatatatatacaaaccgtgaaaaagataaactctgtcccctccatctcccattggtttctgcctcggtgactccccccctcttggcctcagtttccctgtcagagaggcaggaccgtagcaccttttttccgcatgacaacgccctcacctcccagggcctaacaggtacagcaggtgtgctgtgtgtgctggttccatttttgggctatagacctgatgagatacatactccacacaagaggccttttcttgccctctaaaaacataaactcgagaaccttccctggctgtgcttctaatgaaggctagtttctgaaaaacatacagcatttggatcagtgtaatgtggtacaaaaattaacattctgttatggtccccagaagccaaagggtgtgtcctttacctgtgggaccagtgaccctgaatatagatcattccataaagaccacgcaggccatcccatgtggctgagttaaactcaaggaaaagctacaaaaccttcaacctctacttaccagagggatctgacctcccctcccccttagattataaggccttctagggggtggaatcttatttgattcctattgcacatggaccaacatgcactaacatcatgaa

SEQ ID NO: 203105 - DNA, 1000 bp, Homo Sapiens
gaaatatcaaatcaggctaattagtgtatccatcacttcaaatatttaacatctttgtggtaagattttctcttttctcacatcagttttggtaagttgtgttttccatttcatctaagttgtcgagttaattggcatagctgtttataatagtttcttaatatctttttaatgtttgcgggatctgtcaggacatatattctttttggtaatttatcttttctctctttaacttgtttagtattataaagggtccaaacattttattactctttccaaagacataacttttggatttaatttttatcctacttttgtctgtttcctatttcactaattacttctcttataatttctgtaaggtaataaaattaatttccttggtcacttcctgttcctcccacctcccagtacctggcaaccactgatctactttatatttctatgaatttgattattctggacattttattttatagtcacagaatatgtgccttttctttccctcaacatgttttcagagttcattgacattgtagcatatactagtacttcctttctttttattgccaaattatattccattttatgaatagaccacactttatctttccagtcatcgattgatggacatttgggtggtttgtactaggaatactacgtataggttttaacagtagaattgctgagtcgtaagaacctatcttgagaaaatgtcaataggttttccaaagcagctgcctcattttataatcacagcagccaagtaaatagtttcaacttctccacatccgtgccaacacttgttacattcttttttattttagccatcttagtgtgaagtggtatctcactcaaaataatgtatttcctttgtgatttctgccccaacctatggcttacatagaagtgcattctttaatttccaaatcttcagggtttttctagggttattttgatattagttaacattactttctaatttagttccattgtgatc

SEQ ID NO: 203106 - DNA, 1000 bp, Homo Sapiens
agctagaactcaggcacccgccaccctgctaatttttgtatttttagtagagacagggtttcaccatgttggccaggctggtctcgaactgctgacctcaagtgatccgcctgccccaacctcccaaagtggtgggattacaggcgtgagcgattgcgactggccggcaaggttttcttgaagtttgaattttcctttttggctgcctggtcatcctcattggtcttctgcttcttggtaacaatattgtcatcctgatcattttcagcagccagtttgccctcagcagcctcagcttcctcatctttatctccatcttcttcctcaccatcaacttcctcctcctcccccttcctctccactttcttcctcttctttttttttttaaattaaattaaattaaattaaattttattttatttttttgggacagagtctcgctctgtcgcccaggctgaagtgcagtgacacgatcttggctcactgcaagctccgcctcctgggttcaagtgattctcctgcctcagcctcccgagtagctgggactacaagcgcatgccaccacgcctggctaatttttttgtatttttagtagaaatgaggtttcaccattttagccaggatggtctcgatctcctgacctcatgatccggccacctcagcctcccaaagtgctaggattacaggcgtgagccaccacgcccagccctccaccttcttcccttctttgtctacctcatggtcagcctcctcctccccattgccctcattagtattcctgttagtaggggcatctctttcattgtccacctcctccacaacttcctccttctcctttaagtcttggtggtgatctaggagctggtgtgcacggctgcgtctgacatggggcacacaggtgatctgatgaaggggattaaaaagaaagtgagattcggggactggtgacaaagctgcctgccagaggtggctgcagtaagcagggagcctgatggcaaat

SEQ ID NO: 203107 - DNA, 1000 bp, Homo Sapiens
gacacagccctgggtgagagtttggttatgtcgcttcaaggaatccccatgggaaggagggtccttaccttatataaggtgaagacgccaaagtacagaggcacttgggtgacttatccagagccacctgtctcgactgtggcagagtagggagcagtctgtgtcttcagaagctgtggctctctcccttggatcctaatgatgaggccgtctttattgggcctttaccaaagccagctgtctcttttttatcagcagtctgcactaggcgaggccctctgtgttgctaatctgttttgtttttctgttttgctcatctgcactagttaaggccctctgtcttgtcacagttgtaaattaatttagaaagagctgtctccctgagggcaggggctgggtttttctttacacacctggacctaattcttctcttcttccatccattagtaagtgttttgctgtgtgccgtgcatggggataatgagaacaagaagttatgttcttgtctttaaggagtttgtcgtcagccaaggagacatttacaaaagtccccgttgtggtcagcgctgagagggagaaggttctagtgttaagagagcaaatcactggggtgtctaacctcgcctgaggtgaaggtgggggttagagcagtctgagagaacatattagtaacacaaagtactcaaatctggagcacataaaccactacaaatcaataaaaaaaggaaggcagaaaactccgtagaaaaactagccagtgatttgacagacacttgacagaagataccaagtggccagtgaacatgtgagacagtcacaattccgtgtattcatcagtcatcagggaagtcagaggacctgggttaatatgagacattgggccacgcattgaacttcccagatcccgtttcttatttgtaaatggggcttctcctgtcccttcccttcctcccagtactgctctgaagcttgcatgggaaaggctcttcagaccttgcag

SEQ ID NO: 203108 - DNA, 1000 bp, Homo Sapiens
aacttactacaaatttgtgggccatctttgaaaaaagaagaaaggttggtctgatgggagtggattatcagaatttattaacattaatgttactaaaattggtttatagccccccactgctaaatttgactggcttttaaaaaacagaaaaacaaaaataaggaagggaagggagaaaaaaaaagaggggaagaggggggaggggcaagagaggactatgaaaacaatgacaatgacagtggtagcagttttgataaaagtacaaattcaaaattaggtacagacttctgcttctaggaagatgtaatagaaatacatttccccattccttctactaagtacaactaaaaaccctagttactatctataaaacaaacatacctggactctgaaggatggagaagagaagacagaccgaggcacagcctcaagacccaagacaggccttgggacccgagaatgacgtggtgataagttttcttttaccttatatatccagacaaagctgaagaagccagcaacctgaaaacaccaatgggcacagacagaagaacctgctcgctccagccagagacgtatgaggacttgtaggtaagaggactgtttctagtcctggctctgccattaacaaatggtaacttggtagataactgtttctccagctctccgtggtcagccagcattatgattgaaagttgggaaaggaaaggagttgtgttttaagcaaattttaagagtttacttttttattgcttaatatagaaataactgcatattgtagaacatttgaaatgaaagaaatgtataatgaaaaatttcagagccggcccggtggctcacgcctctaatgccagcactttggaaggccgaggcaggcagatcatgaggtcaagagatcgagatcagactggccaacatggtgaaaccctgtctctactaaaaatacaaaaattagctgggtgtggtggtgggtgcctgtgatcccagctactgaagaggc

SEQ ID NO: 203109 - DNA, 1000 bp, Homo Sapiens
ttcatgtctcatttgggaatccttgggtctggaattattcttgaaaacatccattaaagagtcattagctattcttagagcatctctttttttacagagagaattggcaccaagcaagagcaaggaaccagacatcagttacggaaaatgtatccccacatcacatcatgggagcctagctcacagacactgccaatggaaattgcagaaatagatcaactgcaaaaggttacataggggacccgcatgctacattaactctctgtgaataaattacatgtaaaatttgagaacatgttttcatcaaataagtatttgtgaaggtaaattttaagttatgccatgtgcataatttcattgcattggtaccatatgaataagtatcttcataaagatactttgtgaacaagtcaagaagacaaaataattgttactagtatttacttttgtccttaaacacagagctaagatctctttctattgacattatatcctctatatccctaaaataatctaaatcattaattatagaattaatcagtaaggaatttaaaactaagctggaaaggcatgaaacaggatggatggagcagagggatgttgttccccaggatgagaaagagagaaaggtcttgcattaccaagggtgagtctgggtgactgagaggtcacaaactgatgagtgaagatagagtcaagacagaaaaataaagtcaggaaagccagtgctggtggggaaacaaacattcaaagcataactcacagttctggaaaaaacccagtattttcagtctctgtcagaacataaatcagatttgcagttaaatatttgaccgtttacctgaggacagtaagtctcagggaaaagcacgtccacatgtgcctcctcggtgggttctagaattcttccctcttccattccccaaatatgtatcagtgtaatgtctgagcaggggagtgcagagcaggcaagacacatagagaggcaccaggaagggaa

SEQ ID NO: 203110 - DNA, 1000 bp, Homo Sapiens
catgtcctcaccagcatttggtattgtctgttttttggattttagccattccaataggtgtggagtggtatctaattgttttaatttgcagttctctcatgacatatgctgttgagcgtcttttcatatgcttgtctgtcatctgtatatcttctttggtgacatatctttgtttttcttcctaacctccagccactccccattctacctctgcccatacatacctttttctcacatcatgggttcagaccatggggctaattatgctttctggcatatttttcttttggtcacttctcaagccgttaaatgagttagatccgctgagtaggtgctgggcctacctctgaattcctaagttgctgttggttttaactggggctggctcatgagttctccaccttatattctccaatgatggtgtcttccataaagtgtagctgctactgagatttgcaacctcaatcctaaggtttgagattgattctgccctccagtacagactgtagagagactggtatgcagatttgtccattccataccctattgggcttaaccttgcctttgatgagaaatgcatataccatgctcctttgaagccccaaccagatctcaaactctcatagttgaaccagcatcaagaagacaaagtctaaaactttcctggcctggccttttgctgttaaattcgttattgttatccaatgtcttagttgtaattttgctttttttcacttataaaaacagttgaaccattttactaaaaatgttgggaattagaaatgggagaaaacaattactgataatcctatcaccttttgtttacaattctatgtctgttcttatgatgatttctgtaaatgattctataaataactgggagtgacgctgtcccagttgtgcacagggcttttgctttgcgtgcatctcatcttcttagtgaggacttaacatcttctgaggcttccctgctacctgcttaacgctgttgtctgaattc

SEQ ID NO: 203111 - DNA, 1000 bp, Homo Sapiens
gaatcccgaagtatgtctcatggaagaactccctgatgaggtgaaatgagctctgtgagcacatgtgaaatctgccttgagggtccccccatcttggccttggggatcaccatgtttgttaccatcacaaagcctctgagaaatcctgcaggaaagaaacctgtagagctttgtacaagccagcatttactactactaacaatatcctgtaggactgtgtcatttaatcagcacatcaactctaagaggacagtatgactatgatttcagttttacagaagaagaaactaaagcacagagagtttacataattccctgaggcctcacagctagtaagtagcaaagagttgttttttttgtttgtttgtttgtttttttttttttgagacaaagtctcactctgtcacccaggctagagtgcaatggcccgatctgagctcactgcagcctccccctcgccgggttcaagcgattctcctgtctcagcctcctgagtaggtgggatttacaggcacgtgccaccacagcaggctaattttttgtatttttagtagagacggggtttcaccaagttggccaggctgatctcgaactcctgacctcaagtaagtgatccacctgcctcggcctcccaaagtgctgggattacaggcatgagccatggcgtccggctgtaagtagcaaaattttgaatcaggctgagtccagagcctatgccctgatccactccctcctgcctctagctttacccacaggtatttgactgcggtgctgattttccagacaactcctagtgacgccctgtggaacacagctgaggcaaatccaggttcaagacattctgaagtttcttccagctctaactgttaatagctctaactaaacagcaccatcaccagtgaattcatttgtctgatctatcaatcaatctgattgagactttctaatagagctcaggtgagctcagagggttccgaaggcctcaggttggagaagggct

SEQ ID NO: 203112 - DNA, 1000 bp, Homo Sapiens
gtttcatattggaaaattaattatggcctgtatgttagatgtttgggaactctaaagaaagatgctgatagacatttgagagtgatttacaaaaattattttctaataactgaaacttttcttcaaattagcttaaactaaagcccaacatagtcagacaatgttaggttggtgcaagagtagttgcagtttttgccattactttcaatggcaaaaactgcaactacttttgcgccaacttaaatccattgctgttctgagttatgtggggtggactgagtgtggacccagcacttgtcctattcagccaggacctctgggttcacttggggctctagatagcagaatttgtaaagccggaatagataagagactcaccactatttgattacattcttggatatgattagatatcgtattaagaattttggtccaagagagttggaaacaatgattaatttagatttagagaacatggaaaaatttaattcatagcctttgctttttcagatgtgcctaaatgaacagacctcttgccttttaatgcctggaaaaacctcagagtatgttgaaaccctttttgtttgtttgttttttagagatgaggtctcactgttgcccaggctggtctcaaactcctgggctcaagtgatccaccggccttggcctcccaaagtgctgggattataggagtgaaccaccgcacccagccttgaaaaccttttttaaatttttattttttttttagagacagggtctcgctgtgtcatccaggctgaggtacagtggggtgatcataccacactgtagcctctgactcttgggctcacacaatcctcctgcctcactcagcctctcaagtagctaaaattacaggtgtgtgttaccacgcctggctaattttttgggtagacagggtcttgctttattgtccatgctggtctcaagttcctggcctcaagtgatcctcccacctttgcctcccaaggtgctggaattc

SEQ ID NO: 203113 - DNA, 1000 bp, Homo Sapiens
ttctgatccgtagtcagacgcgttatccattgcgccactggcccgtcgttgtgggtctctcgattatctattcttcattaggatcactaagaaaatagttggtttgcaatacaaccaggcgtacattgaacaagactgtggattctagcaaagcgcgattgtctttgtggtcaatttaaataagtttcactcccttcagatatttatatttataaagaaattttctgctttggaacatcatgtacataatagagttactgtcgttgacatttgtttacttgatgtgcccacttctttctttttttcttttcttttcgtttttttttctttatgagacggagtctccttctgtcaccaaggctggagtggagtggcgcgatctcggctgactgcaacctccgcctccccggctcaagcgattctcctgcctcagcctctcgatgagctgggattacaggcgcgcgccaccacgccaggctaattttttgtgtttttaatagagacagggtttcaccatgttggccaggctggtgtcgaactcctgacctcaagtgatcaacctgcctcccaaagtgctgggattacaggcgtaagccacggcgcccggcctgggagatgtttcttaatgtcttttctgttgcataaagtatgaaattattttctctgtaaggattctttggttatgtttcttttgttatggttctttggagaatgaaatggaaaacatatgatgtgtacctcaagaaagtattccattttctttttcattatctcaaaatttttaaagtatttggatctctgatcactgttccacacaaagcatcagtatccaacacaagtatgtttaaaaaatgaaattatttaatgaatgagcagatgcaccgactgcataaattaatgaagctttcacaagtgcaatagacacaagggggcggtggctcacgcttgtaatcccagcactttgggaggccgaggcgggcggatcacctgatgtcaggag

SEQ ID NO: 203114 - DNA, 1000 bp, Homo Sapiens
acatgcctgtaatcccagctactagggaggctgaggcaggagaatcacttgaacccgcgaggtggaggttgcagtgagccaagatcacaccacttcactccagcctgggcaaaagagcgaaactccatctcacgtacacacacaaagtaataataatagtaataataataataaaataaaagttggtcagtggtcaatacattttccaggtcattcctgggagaataaacagtttaaaaaaggctcagatatcttagagagcctgagatgttcctagaactgaaaccagtgttgtacaaaaggaacactgatgttgaagaactactgctggattagaaggagttaggagtattaggaagccctacctgccattgggaataaaagtagaagataagacaatgatcaggttccttgtagctattttagccatgaaaatagaaactttagaccagatacagcatgcatatataagatagtcatgtaactttccattgaatgtgatgctcagtctatttactaataataattaggcataaaactcaacattaagaaatgatctcgcatggtaattttcaggtgcagcaaggatttaagaggctaagattttatgattcatgctacaattttctatttgtcttagggaagatctgtccccaaagaagcaaatggttggtagaagttatgagggaaaaaggaaagcaatctgaattgtgggtgctgtggcaagggagaaaaggagaaaaaggacagtcactatggctgcatatggggccaagagacagagcaggtgaaatgcctcttgtgtctaataattatttttgctgtaatcctaatgactgaactttccaggcttgaaaaactgccatagtattttaaaatcccaatcttagatctgtgttcattctaattttgagatttttactacttttagctcaatacatttaaatgttctagaattctaccacaaagaaccaaagaaactttagacattttcctaagc

SEQ ID NO: 203115 - DNA, 1000 bp, Homo Sapiens
gatatctccttaagatccgaacttcatttcttttgaatatatacccagaagtgagattgctggatcatatggtagttctattctcaaattattgaggaaccttcatactgttttccgtggtggctattttgcattcccaccaatagtgtacagggtttcaaagttctccacatcctcaccaacactgttgtcttgtgttttttggataatagccatcctaacaggtgtgaggtgatatctcatcatggttttgggttgcatttccttgatgattagtgatattgagcatttttccacatacatgttggccatttgtatgcctttggaaaaatgtctgttagcgtcctttgcccatttgtaaattggattatttgattttttttatttttaccaatgagttgcagtagtaccttatatatttagggtattaacctcttatcagatatatgatttgtaaatattttcttttattctatagattgccttttcattctgttgattgtttcctttgctctgccaaagcttttgatttcgctgtagtcctgcttatctatttttgctttttgttgtctgtctgtccttttggtgtcatatccaagaaatcattgccaagaccaatgtcaagaaacttttcctatgttttgttctagtagttttatcattcctggtcttacatttaagttttaatccattttgagttgatttttgtgtgtggtttaagataaggatctaattttgttttttttgtttttttgttttttttgtttttttgtttttgagacggagtctcgctgtgtctcccaggttggagtgcagtggcgcgatctcggctcactgcaagctccgcctcccaggttcatgccattctcctgcctcagcctcccaagtagctgggactacaggcgcccgccaacacgcccagctaattttttgtgtttttagtagaaacggggtttcactgtgttagccaagatggtctcgatctcctgacctcgtgatc

SEQ ID NO: 203116 - DNA, 1000 bp, Homo Sapiens
ttttattgtgtttattttactgtagtttatttagccatgccactgtcaaagggtcctacattttatcatgtatatggaaaccttattggcttccttattaataaaagtaatttgtagattctttatatcatttacaagtaatgatagttttttttccctttccaacccataaaatgttaattcttttttcttgtcttactgaactggcaagaatctccaatgttaaattaaaatagtgatagataaaactttaacttttcatttatattataaagtatggtatttgttatagggttgctttgtgatatcctttatccagttcaggaagtttctttctattctttgttttaatcatgaatgatgaatgttgtattttattgaatgctttttctatattctttgagataatcatatattttcttctttcatctagtgaataacactgattgatattgaagcaaccttgaattatggaataacccaaatttagacacattatttttctttggaaattattagatttgaattactaatattttgttcaggatttttgcatttatgttcataaatgagactgtcttatggttagtttctccttgaggttcttttatttttgggtttatatatttttgaagatacattattaggaacatattatatcttcccagggaattaaatatttctattaatatgtgatggccctttttatctctttgcctaaaattaactgtgtatgggtttaatttagctacaccagatttctgggttattatttgcctacgcagttcttcccccagcctcctttattcaaagacacaaaaggctttagatttgtgctttgtaaatcacataattggaatttgtctttttactagctttattaaggtataattttcatatgatcaaactcacatattttaagtgtacagtttgatgaattttggcaggtgtgtatagtcatgtaaccactaccacaataaagctatagatatttccgtca

SEQ ID NO: 203117 - DNA, 1000 bp, Homo Sapiens
gggagagagagatgtagctagatcgcttgtcctaaagctccagagggtactggaaagaggacagaatggctctttttaacacatctcctggcttcagtaaggatccagggtatcagggttggaatcttcctaagtctgatgggtggaaatgatgctcactttcccaaaagaaaatgaaaaacatcatttttggaaatagtgtcatctaaaaaatatgagctatgttttcttcattatggtcttctttgttatacctagggaggacttttaatgactataggatacgtcttacctataggggtatgtttgttcattcattttgaaatgcatgttttccaaattttctagtaatagcattattagaaaataaggtgttccgcatgctagggtttccctaaatagctgaggcttgccatttgttggtcaaactttattatttaatgggcaacttactgagatgtataacatattcttggagtagggtgaacacaaatgatccttttcatgaagatttaaattaattataattaatttaattaataaaactattgttcataatttagaaattaatatttataaattatggacactagtgctcactctggcctgcaaatcactgctgcccttagaggctctaggtaggtaggtctatcagatttatcctaaaatggtagcagactgccatattaatagatagcaggtgtagaatttaaatagtctgtctccagagcccatgttcttaactccatagtagagatggaatgtaaaaatgtgagagaggtgaagagttaggaaaatgaaattggaaaggtaagcaggggcagtctcacatcagagtgatgtgattgtgcatctggatgactttaaaaatttatcagtggcgggcctcaccctcagaaactggattttctttagacaagagtggggcccaggcatgggcttgcttttttttcttaactctccaggtgtagctagggtcgagaatcccagttctaggatc

SEQ ID NO: 203118 - DNA, 1000 bp, Homo Sapiens
aaagaattcaggaaaatttccctgatcttgttagagatatagaaatccatgtggaagaaatccagaacaccagtgagatatgatataaggtgaacatcaccaaggtatatagttatcagactatccaaggtcaatgctaaagaaaaaatcttaaacgccactagaaaaaaggatcaaatcacctataaaggaaatcctatcagactaacagcagatttcttagcagaaactgacaagccagaagagacagggatctagttttagacttcttaaagaaaaataatgccagccaataattttttttttttttttttttctgagacggagtctcgctctgtcgcctagactgaagcgcagtggtgcaatctcagctcactgcaagctccgcctcccaggttcacgccattctcctgccccagcctcccgagtagctgggaccacaggcacccaccaccatgtccgctaattttttgtattttatttatttatttttttagtagagacggggtttcaccatgttagccaggatggtctcgatctcctgaccttatgatctgcctgcctcggcctcccaaagcgtgtatctttttaaactaagcttcataaatgaagcagaaataaagtatttcccaaacaaacaaatgctaaggaaatttgtcaccactagaccagtacaccaaaaatgctaaaaggaaacagaaagatgatacttgctaccacaaaagcacacgtaagtacaaagttcacacatcctataaaataattacataattgaggctacaaagcaactagctaacaatattaggcaaggaacaaaacctcacatatgcatattaaccttgaacataaatacttgaaagagatagattagcaaattgggtaagaaaaacaagattcaaccatctgctgcctaaaagagacccacataatgtataaagacatacacaagctcaaagtaaaggggtggagaaagatatatcatgcaaatggggaacaaaaa

SEQ ID NO: 203119 - DNA, 1000 bp, Homo Sapiens
tccctctgtatctcaaagtgttgggattacgggcgtgagccactgcacccagcccccacccagttactcttactggcaaaggagaaaaacaaatcccctgtcctctgggccaagggcacagcagagatttgccaaaagcatgaaatagcctgttttatcacaaacccctgtgtggccataaaactatgtatgaactttaccctttattcctacctataggtttgttttaatatacaagtcatgatttgtgctatatcaaactacttaactctccgaccgcacctcctaggaatttttaaataaaatcgaggctatgggaggatgcttggggtttgtcctacggctctgtgtgacttgatgttccccagctcacacttggggaagaagcatcagtggtggccctgagctctcccccgggcctgccctgcccaagtgcacagggtgctgggcaaagttgtttctgccgtgccctgctggaacttccagacaactcctgactgcccgatggtgtttgaccttccatgactttctccggtcttgtcataatctccatcctcccacgtgggtgcttccttttgggtgttttcctaacagcaccattgcatctgttggaaaacaaggtcattagctctctgcctcttgttccttcgtgtttctccaatatcgttcaagtcttgcagactttcctgccagtttcccagctttgtttgccgtttcagtgttctgggcagaggtggagacctaagcccaacaagtaatcaaacaaacaaaaacaaatagaagactcagagctgaccagagaggtttgcaacagcattacctcgggggctgcaggttcaaaggtgtaagcatgacctctgttctgatgccaggctggtagttaggggaagtttggaacaagatcaccaatctcaacagaacatggtccttccacatttccagcatcaagtcagacaggcagcctcaccatagcttagggcggagagcgggcattggaact

SEQ ID NO: 203120 - DNA, 1000 bp, Homo Sapiens
ccacctgcctctgccgcccaaagtgctgggattacaggagtgagctaccgcacccagccgatgtttgtaaaaagatttttgttttaattctgactttttagttggattcagctagagaatttgtccaatttatttagtctacgattaccaaaggcataatcaaaaacatttagagactactgtcttagactatgccagcaatctcttaatgaatctgcaatcttttcttacccctgatctctcctccactttactgccagatcaatatttttaaaacaatgttcccatcaagtcgttttgacttgagagtcatcagtgactcactgtatagtggccctgtactataacaatttggtgaaactggaatttcccagtatttcctttcctttatgtttctggatcagcgttggccaataaagacacgttggatgatatttgagaggttgaaatgaagcagctgccattttttttatgctttagtgactggtgaagggcaggcatattgtcactgctctgcagctagctcacctcgtaggtatgggaaaacaccccaaaacacagttcccccatgtactgtattgagcagtgttgtcctgtcaaaattcacattcaccagtaacatcagaatgtgaacttatttggtaatagggtctttgcaactgtaattagttatattaagattaggtcctaatggattacggtaggccctaaatcccatgactagtgtccttataagaaggccatgtgaagacacggctacacagacatgcagggaagaatgctgtgtgatggtggaggcagagattggagtgatgcagcttggccaaggaaggccaaggattgccacagccaccagaagcggaaaagactctcccttagagccctcagagggagcatggcccagccaataccttgcttttggagtcctggctttctgaactgtgaaagactaactttctgtggtcgaagccacccagtttctgtggtactttcttatggc

SEQ ID NO: 203121 - DNA, 1000 bp, Homo Sapiens
atgaaaaagaagttaagcctaactagtatttcatatggaggccgactgggcaactcactgtcccatgcgtcaggcaaagctgggctctgtggggcctggagcttttatagctttggggattctctttaacaaaaacaatcccaaataagttatgaacgtgaatatttactaagagtatgacaaaagcctatatggtaatttttaaaaaacagacagcacacactgctgtgacactgtgcgtgttagtagggccttctcaaggctgtctgggacccaggcctcatgggcaagttgcggtaaagcggttaccctgagggcacctgtggggcagccggtgctcacatctctcactttagcttcctgagccaaaccgcagtttactgcagatgacgcctacccatgggctgctcatgaggcaaaaccagtaggcgacctcggagaaatggcagaggcagatcctggggaaccacgaatgaggtcttgaaaagctggcctgaaacgcccatccagtcaaggctaagccaggagaaaaaaggaaatggcaaaattgctgaagccagaaatgaatttacatcctgctctccaaattggacaaactttcccgagcgtaccagagcctggagaaactagctaatgagtgtgtgacctggcagggcattcacaatgaagcagtgacgctcacggtacccagtgttagctcctgcttataagcgagcctggaacaatagacaccgggatccccaagagggagaagggctgaacaccttcctatctgggcgatgggatcaacaggagcccaaacctcagcatcacacaatatacgcttgtaactaacctgcatgcgggccccctgaatctaaaacaaaaataacaaagaaaagcaaagaaaaatgaagcattggaaactttcaaactaactcctatacttctcagtgacatttaagatcatgcgttgctgcattggatactttacaaaaatttactaaacttaataaggatc

SEQ ID NO: 203122 - DNA, 1000 bp, Homo Sapiens
aacagatttgaggaaagatccagacaggtgaattgcctattttatttaaaaaaaaaaagagagagaaaaaaaaagatgttcagcttttagggttgagctgtcagttctcttggttttaatgtcctgtggtaaaagttggtctgcctagtattacttcaactgaaacttccttactgagtacatgggcaaaagcagtccaacatagtaaataatgatagttgattataacaatgaccctaaggcagtgtaacatatccaaatgttttctgatttatccatgaaagattgtgatcttgttgtgattttgttcccattcatttagtaagtactaatctgtatgtagtcaattggtattaaccagcgtacctcattccctgatccaagaggataacaggatgttttttgtgttttgtattaactctgctatagaggttttctgtatgaagatttttttttttttttaagagacagggatcttgctatgtttcacaggctggattcaaactcctgggctcaaacagttctcctgcctcagccttctgagtacctgggactataggcagaaggatgtttttaatttaaaaatgcaggaaggttaattatagtatcttctatattacggtcatgttctaaagatttctcagatctctcttcctaaagaaactggccaaagactaaataaagagatgaaattcagaggtcagtattcacctggaaagccttgctataaaagtacttctttctgaacatttaagctccctaatctctttttgaagattcatttgagcagacatttattgagcacttactgtgtataaaatagtatgaagaagggaagtagaactatgatatttttgtagccttcaaggactttatattctaataattccttaaattaactttcagacctatataaattttggacagtttttgtgtttttatttgcggaaattgagaattttgcatcagtcagacggaaagcaccagggggagaatgatc

SEQ ID NO: 203123 - DNA, 1000 bp, Homo Sapiens
aaaacataagtaatttaagtaatattaaacaacacaccgggtctcacctactcatgatagcttttcctagttaatagtaaaactgacaaccttggtaatgttagtaactctaaagtattgagtgcttactattttttaaagaaaagtggagctgtacattacagtagttaaagtggtaaaaacagattttattcaggaactactgtaataggggaagagagaccttagtatagaacaaggttcaattctgaatacagcatagaccagtggggatttatagccaaagagcaagatggcattaatggatgaaaaattacggagatgaaagaaacttaaggagtggggagattgtggttaagccaacctaaaatgattcttgctcaagacaggctgagtgatgagataccaaggcgggtgttggagagtgcagggatgcagaatttgattagataccgagggtgatcaaatattgaaggtgaacagatagtgagggtagggggttctctctaaactgactgcaagattcttactacaactgtgctatgcaaaattgaaaccaaaggtcaaggcctggttgagaagaggattccgaggagcctgacttaagtttggccaaggagggcatcttgtcagttgctccttttgttcaaggaaataaagcattattctcttctctcagtaatctaagtccatcttgtgttcagttccttttcagtaaagacgtgctaaaccatctgttgagacttcttaatgtcttgagatcatgggtagaacttatgcccagttcttgtagctgttctttctatctaagtcaccacctgagtaaccaagatcacctacaacagaacctatgatgttctggatacctcttttgctctcatagtgagagtgaggtcaactggagggataacttgttttagagataactttaaaaaatgaaagaaattgtggggaatcaagtagatgaagggattagtaagattagagaggtagtgagatc

SEQ ID NO: 203124 - DNA, 1000 bp, Homo Sapiens
ggactcttcaaatgatcagctccataattatatttttcatctaattttatgttcaagtgctcccctagagtggtgataagtgaaatcatcgattaatgctaggactctaagctgacctagaaaaactacatttgaagctgtattcaaagaatttcatttagccttactaggacaactgtcattcttatgtaacattttaaagttttgcattgagattgggcttgaaataaatgcctgcatttgctcagagactgttaaggagggagatagagtaggaagttgtctccagaaataaaatgataatgaaacctattgtttatcgagtacctactaattataaaccacagtgattatatatgacataatttttcatagatactaaatatatgtatgtatatttgcaatttttatccttgcaaaaatgacaagtataattggggtatttacattctctttttaaagacaggacaataaaatctagtaaggttaggattttgcccaaactcatatagaaattagcaaacatgagatccaaatccaggtctgtcagaccgcagggtctttgtttactctgctatatcatatttattattcattgatggatgtattaaacaaagattaattcagcccttcccattgccaggaactgttatagatgctgaaaatactgcagtgaaaaaagacaccaagttcttgctttcaaataatttatattctagtgaaggaaatagaatatacaaatatgtctagtggcattaagtgctacagagaaaagagcaaagcagtgtaacaggatcgaaagtgatggtacaagaggtatttgtactgtattgctgtggaggtcggtgatcagggaaggctccttctgtaaaactgacatttgagcacaggcctgaaggaagtaaaagagtgagcttatgggaatacatgaggaaacagcctacaagcaaaaggaggagctcatgcagtgctcctcaagtggggacttggtggcatgatc

SEQ ID NO: 203125 - DNA, 1000 bp, Homo Sapiens
aaagtatgaggaagtactggcaagaaaccactaattgaaacacacctcccccgctaagtgagtgtgaaactggccagtaattgttgttgagatgacttcaattacagtatgtacatccacaggtccagggtgtattttcaaaataaacaaatgatgtgtttaatactgtaccttctctttggctgtaaaataactcatgcctcactttagcaataaaattgcattttgtttgaaggtaaattataagacttcccttaatgatattctcaaatctaaacttcagattcttttttttaaaaaaaacttttgaaacattccagggtaatatatcaactctagccctagctctaatcctaatccctttcattctgatgggaatatacagggctaatgtagaagacaacacttagaagatactaatgttctcagtgacatcatgatatagatttttttttaattcccagatcctgagatatgctacccaaattatgatatcttttggtttttattatgattagaaactggccagctacagacatttggtaaattttgataggaaaaaggacaacatctccttgaagaggagataaagactttatcctggtatttgaatgaaatatgaattatattgcaacaaaagaggaaagtttttatgtacttattcacccatccatccatccatccatccatccacctaccacccctccaagtgccaggcatagacagtagtgggcctggtgagttggggagggtaaaggagattattctagtagtgactgaatacaaagtggataaaacatagtcttgacaatggatacttggggtctggtgggttgggaagcaaatggagactgtcattggccctgatctcattgcttcctgaatccagtgaaaccttagactgggaatgtctttcaaaaaatgtactcatttttttttttttttttttttgagacggagtctcgctctgtcccccaggctggagtgcagtggcgcgatc

SEQ ID NO: 203126 - DNA, 1000 bp, Homo Sapiens
acaccaattacagaaagtgctgtcaggattactttctgacgtactttcagaatgtcaagtaacgcctacttccacagttgtggaaagaggaagtgggtgactgccctgggcgtggaatgccagcaggtgaatcttaactcacttttctgctagagaaggttggctttggggtttctacagaaaatatggatctagcatatttagttaaaaacagtggttcccaaacactaaactgccagttttcattggtctcctgtaaaacgataaaaataactacaatgtgctgtgtttttaataaaactaaatatattcaataaaaaaaacctgggctttattctgaaacaattccttattttttagtataagacatttattttctttaaggcataattccggccatatattttcttcatattcctaattagcaagattaaaagatggcaatcctacagtcatccccatattgagtttcaaaaatgttaccgatttgtgatatccagtgatcccctccaaacgaccaccttctggggactctttggggtccatgtgcattgcttattaaaaagggattcccttctgaggtcagaacaaactgcttgacataagaaacaggtccaaaactctgaattctgcctgtgacagtccagttgcctaggctcgaacaagtcatttatcctcagggccttctagccagcaaattcagtaaataactcgggtttcccccgctgcagggccgggagaagtgaaaggcttaattgtggcaagagcagagcgctgtgtaagtgctgagtgtcttcattgtgcagcatcctaggagctttccttcacaaagcctgctcagcaggtcccataatagctggagaaaaaaatgtgaggagggagactctaacatatcaagtatttccctgggagtttctcatttcaatgagaagaatattctctaattaaaatgccactacattttttttaaaacaaattgctgtctaatttccctttgatc

SEQ ID NO: 203127 - DNA, 1000 bp, Homo Sapiens
catatatttcatatcttctcttttaatttagggcttaaagttttgccacctagtttgtcttgaaatttaacagaaaccatttgtaaagccctttcctctgtcaaacaaggtcactacaaagcaacacatctagactaagatacccatagataaggtgaccacataatttatgatccaaacttggatccttctgagtgtggaatgaggtcctattaatatttaagccaggatagtagatgtaaactggactgtcctgagcaaggcaagtcatcaccctatccttaaatataatagcctctttgaattatgattgaaagcttttcttattacttttttggatagttcctgttgaatacttagctgtgatgctactgaagtttctttcataagcatccacacaattaagttcttagaattaatgtcaggacagctgtttatcccccatccccacaaacacccttaccaaaaaaatgaccacagatatatcacatggtaaaaaactatactgtgttcatttttcctttttttgccaaatagctaagaaattaatattagaagcatcttgtccacctttccttctacataatgtccccttctggctttttttccctttgttgattttaagtgtaataatttaccacaaaactttgttaacacattagttaggatattcatatattcttactgttatcttatccttcagatgtgttggtgctttttagaaaagttaagaacaattggaccattctgtctttaaagtccttctcttataaattcattgactctatggtagttcacttagtaacttttttccttcctctcctattgctttataattctcaataagcttcaatatcccattcacagtttttcaatttctcagttttttcccctacaagaaactagtttgtaaattttgtgcccagcatagtgccatgtacattttagtgagtttgaaaatttttattaatgaattaacagatggaaggataggtagatc

SEQ ID NO: 203128 - DNA, 1000 bp, Homo Sapiens
aatggagagatcgggagatctctcaccctctgtctaaccaaacaatcaaacttggctccccagtggagaacactctgacatcctgaggcttctgttgttaacaaagtgagaagggcacagtcacacctgctaaaacaacaccaaaaatatttaccctgaatctacacacaaggtgaaaatcaggtatattcaggatgtgggaccttacgaacataatggcctggacttctcaagagtcgaaggcatgaaaaaaaagtcaggtcctgttgatgaaaatcaactagagacttaacaaccaaattggaagtagatttcagaggagaggaaactgttataactgctaaacagacgtgtaaccattatatagacatttgggggaaaacggaaaatttgaatatggattgcatattagatgttgtgaaggcagtgttaattttcttggtggtgacaatggtattgtggttattaggacaattatttattttgccttggtgtcagaggcgtgtgaaccagagcaactccatcttgaacaggagctgggtaaaatgaggctgagacctactggggggctgtattcccagacagttaaggcattgtaagccactggatgagacaggaggtcagcaaaagatacaggtcataaagaccttgctgataaaacaggttgcattaaagaagccagctaaatcccaccaaaaccaagatggtgatgagagtgacctctggtcgtcctcattgccacactcccaaacagcaccatgacagtttacaaaggctatggcaatgtcaggaagttaccctatatgatctagaaaggggaggcatgaataatttaccccattgtttagcatattatcaagaaataactataaaaatgggcaaccagcagcccttgggactgctctatagagtagccattcttttattcctttactttcctaataaacttgcttttgctttgcactgcagactcgcctgaaattctttcttctgcaagatc

SEQ ID NO: 203129 - DNA, 1000 bp, Homo Sapiens
ctgcagtgaaatgattgatagaattgaagtaaatcatctctcaggtttttcagctctaaaatagactgtaagcccaggcacggtggctcatgcctgtaatcccagcactttgggaggccaaggcaggcagatcacctgaggtcaggagttcaagaccagcctggccaacatggtgaaacgctgtctctactaaaaaatacaaaaattagccagatgtggtggcacacctgtagtcccagctacttgggaggctgaggcgggagaattgcttgaacccaggaagcagaggttgcagtgagccgagatcatgccactgcagtcgagcctgggtgacagagtgagactctgtctcaaaaaaataaaataaaaaataaaataaaataaaataaaatagattgtaagatgtgtccagagagctatgcatctgtggtaacccatagtgaaaggcaggcagggtgggaaggagtgctgaggatggcatatggtagatatgaacagggaaggagtaaaccccaaagcattttccaaaagagcagttaaggggcattaaaggcaggaaatggatcaaacaaacaaagaccaacaaaaagcgttgcttctccatttcttcctaccaaatgttttagcctacctgagaagagatacccctcaagttaactttagccttttaatacctataatgccaattctaagcacagatagaagcagacaatagaacagttggtctccagtctcaccatggaagtagctggaaggattccaatgagggatttagaaaaccactgtctaattaagctaggtattttaggattccatttggctgcatgaagcaaaaatgaaccagagtggcctaaacaaacaggaagccctgactctcattttacaaggacactaagggtaaggagcccagagatgagacaactcttcagggaaccaagctcttttctgtatcatgctcatgctttgttgaccttaacatgtgacctttctctttatgatc

SEQ ID NO: 203130 - DNA, 1000 bp, Homo Sapiens
gaggcagttcaaaggaatgcattgttaatggaataccaaactctgtaatacattttaaagagctttattcagagccaatatgagtgagcatggcccagggaagcacagtctcaagaggtcctaagaaagtgcacgcagggcagtcagattatagtttgagtttttacattttagggagacaggagttaataagcaaattcataaattgatacatggaggttatacattggtttggcccaaaaggtgggatatcttgaagcagggacttacaggtcataggtgggttcagagatttttaaatttgcaatcagttaaagagtaaagctttgtctaaaaatttggagttggcagaaaggaatgtttaagataaaaaagttgttaaccattacactcggtcagcatgacttataggggtgcataacttagcccttgtctggtgtgacattaggtcctatttataatttggtatcttattgccacaaagagtctgtattgtcagtcttatgatctctgttttaacattaatgctggtcagttgtgcctaaacctcaaaggaaggggatgtaaggaggtgtgtctgacctcccttctcatcacggccaagaactcagttttgtaggtttctctggggtcctcttggccaagggggagtctattcagacagatggggagcttaggatttttagcttacagcactttgcctaacaacatttgtgagaatataaggttggaattgtatgaaatttttttaaaacaatctttaaatcaaattgaggtttatgtttcattttgatcagggattaatttggaaagtaaaaataaagggttgctatacatgtaaatttctatctaagagatgactatttagccctaggtgcagaatttgaatcaaagaattatgatcaaataatttctcattaaattggcaaacatttgctaggaaaagtctttaaacagttctcttgaacaattaaaattactttattgttgttcttaggcc

SEQ ID NO: 203131 - DNA, 1000 bp, Homo Sapiens
gaggacaggagaaaccacttcctcctgtaggttggatatgccaggaggcctaagtttgcttctggtctataagtactatttccatttttgtccagaggcctctataactaactgtgctgattgtgcagagtgctgtgtcaatgatccaaggcataagaggcagctgggtacataggatcacaggcttaggggccatgagggtatttgtctccagaaaggcccaatgtgcaaccagcagttgatgttcaaatggtgtgtggcatgggactgaggagggcagcttcctgtatcaaaagcctgtgggcaacttacaggtgatccagagaccccaggaggcatgagaggaggttgctaaaacctctacagtgagggaatctctggggtatattaaggagagtgcttattgtgtgtaatttgaacagattctagagcatttagttaaaggagacctcattcaaggtgggctatattagcccattctcatattgctaataaagacgtacccgagactgggtaatttataaaggaaagaggtttaattgactcacagttcagcatgactggggaggcctcaggaaacttagaatcatggcgaaaggggatgcaaaaacgtccttcttcacatggcagcaaccaggagaagagctgagttaaagggggaaaagcctcttataaaaccatcagattccagcctggccagtatggtgaaaccccatctctactaaaaatacaaaaattagccaggtgtggtggcacatgcctgtagtccaagctacttaggaggctgaagcagaagaattgcttgaacccgggaggtggatattgcagtgggctgatattgtgccactgcactctagcctgggcaacagagtgagactctgtctcaaaaaccaaccaaccaaccaaccatcagatctcatgagacctcactcactatcacaagaacacgtccctcccacaacatgtgggaattatgggaactacaattcaagatgagatc

SEQ ID NO: 203132 - DNA, 1000 bp, Homo Sapiens
taaaaatgactttattacaaaaaaagtggaagggaggtgggtgtatagtctttgaatatccccaaatcttaccaaattgagagagcaactagaatagcaaaaccaaataccgcagacaacatctacaacacaattaggtgacaagttctccctaaatcctcacaaatgcatgggaagtcacaatgaacagctagaagttctgcactgtatcagaaacaggtagtatagggacacagcagtacttgagagaaaaggagagcttccttaggggtctctcagagaacaaacttccacaatcaaatttacgggagagactttggctcaaagtaccagtatcactgttcatcagtgactactgacgtcatctgtctaggaaaacagtggatctctacctcacactaaatcttcaacataatgtgggaaggtggattagacattaatataaagggacaaccacagttaacgtgtctcctgaaggaaggatacaataccaactatagagtctcccccaaaatgttggacttgagtctgattaattctctagacccaactaccatatgtgtaggacatattcaggctgtgggaaattgtgtagcaggtctactggaggtgtgatctgcagaatgaaataaatagaggactcaagagtaagtactaggaaatgtttaaccaatgctaagggtttagaaatgtttatgccattgtattcaagcacgttattagtggacttcttttgttgaacagtgtgtgtggatgggttcaagtgtccttaaatactcttggtgtgttgagtgtgcccagtctatgcagtagcagtaggcccatgtatcagtttgtgatccttgggaaatctaaaactattcctttgctatggcttgagaagcgctgctctatgggataaaggacccaatttcttcaaatgattgcaagaaaaataaaaggggatgaaaacgatacccgtagattaaaagaaagatctatcagtcacaatgtgtagatc

SEQ ID NO: 203133 - DNA, 1000 bp, Homo Sapiens
tagtagttagaattaagttcagttgcaagtgagtaaaactaaaaatagcaaataatggattaaacacacaaggtttcattctctataagtttggaaattggcattttaggtgggatttcaggtgggatggaggttccacaaagtcatcatggacataaactccttctggttggtcactacaccatacctagggtggtcctcatcctccggctgaagatggttgctagattcaaccatcacatctatgttccaggtagtaggagggaagaaagggaaaagaagaggccagtctctctctttgaagaaaatttcacagttacttttctcatttgccagaatattggctgcaaaggaagacaggaattatagtcttttatctgtgtatagtttaatattggataaatttggggttcttttactaagatggaaggagaaaatggatgatgaggcaagcagctaggagtctctggcatacacacttaaatatatttcttttaataagatggttaggtctgacattaattactaataagtttgaattattggtaaagatatttaattgtactgtagattcagtgttctttaaatgcttgctttctctatgtagagaacacttctgtcacttgcaaccaaagaaagactaactcatggtcagtaatcagggatttgttctattatttaagctctctgtttcactaagagaagcatctcagcaaattctaacacaaatttgtaaatatattcattcaatcattcatacaataaacatactgaatgcctaggtactaggaaaaaaaaacccataatttttgaattcaaagtgttcagtctggtagaaaaagatggtgataaaaaattttaaatgtatgaaagtgttataggtgcagtaaaaatatatgtatctggtgttgtggggtacagtagagcaagatatcaattctacaaaaatgagattaaagggtatgcatccaaagtaaggcatacattgatggtggaattc

SEQ ID NO: 203134 - DNA, 1000 bp, Homo Sapiens
gctttcatgaagggcagacatactgtcttctatcattcctaatacggtggtttagaaagagtatatttctttggctgattttccccatgttgtcttaaacaaataaacattatttccaaactattaggcaaatgccctaagctcatttttcctgtggtgcatggatgagggtaattgttagagaaggaaatcactgatagtacatatatcaataagaaaattcttctaaattgcaaatatgtattccacttgagtctggctgttctgggaaggggcagtgtagtgtagtggataagaacccagccttggggtttcaatgacctagattgaaatcctggctctgatactttctgtgtgaccttgggcttaacctctctagtcttgttaatttatctgtgaaatgaggatgatgatgataatagtaataccaccttagtgaggattaaacaagatgatgcctgaaacctatgggacacctagcacactgattaaccataatttaagtgctcaataaatggtggctgatccataaattgccattttagcagcagtcagtattctctaccctgaatatctattaaatctatgctgtagagtgctggggcaagacttcccaagtaggaggactcctcactgaggaatatggagaacatgtgctgaattcctcggttcatgaaaagaatatcttgtattgaaaaacacaaaaagagaattagtgatggtatttacagtagggtaggtctagccccctgacagttaacacttgtgcttttaatatttcttcaacctatggataattctgtttttgttagttttgttatccttccctttatagatggttactagcagttacctttctgaaaaaccagtgggaagaaagagagagaatgagagggacagagaatgagaatgaatatgaatattagttcccagttacctgacagaaaggctcaggtaaagaacagatgtacatagtagaagaggcaaatgggctgaattc

SEQ ID NO: 203135 - DNA, 1000 bp, Homo Sapiens
tgggcgcagtggctcacgcctgtaatcccagcactttgggaggccgaggcgggtggatcctgaggttaggagttccagaccagcctggccaagacggtgaaaccccgtctctactaaaaaatacaaaaattagctgggcatggtggcaggctcctgtaatcccagctacttgggaggctgaggcagaagaattgcttgaacccgggaggcaggtttgcagagagccaagattgtgccactgcactctagcctgggcgacagagcaagactccatctcaaaaaaaaaaaaaaagaaaatgtacaacatgatatatgtggcttgtattatatttctatgtatttctaacagggctgatctagacttcctccagccctacctccttcttgcctctggattcactgcctctatgttctgctttgctctccttaactcctttggaagatctccaacatccactttttgccccgaacgtcttgtgaaagacctgtggccagacgttctgcacagttctgctctggcacctgtgaattctcatttagaacttctttggtccattctgccacctcctgtgggtggaattgagactcaggagcacagcctgatgtccctagagacttcattagggccagttcctgtgtgtggaactcagcagagcctttggctgagcaggggcagccgggtgcagggcaaagtatacactttctgtgaccctgggggatgctacttctccaaacacctgctcctggatttctgcactgtggtaattatcagtgtaacagcgaacaatggtgcaaacacaggctttggagctagaggttctgatcccagctccaccttacaagctctgcaacactaggcttgtttgttgatctttttgcatctcggtttcctcttctgtgaaatgggagcaatacaaagctgtgagaattattgataggctttaagagggcatgcatataaactgcctagcctggcatatgtgcagaccctcagtggatc

SEQ ID NO: 203136 - DNA, 1000 bp, Homo Sapiens
taataccgaagaccatacaagaaaggaaaactaaactacagaccaaaatcttttgtgaatataaatgtaaaaatcctcaaccgaatattagcaaatcaaatccaaaaatgtataaaaagaattacatactatagctaagtgggatttattccaggtatgcaaggctggttcaacatgtggaaatcaattcatgtaatcgatcacatccacagtctaaataagaaaaatcatatggtcatatcagtagatgcagaaaaagcatttgataaaatccaacatccattcttgattaaaatctctcaggaaactaggaatgggggaaaattcctcaacttgataaagaaaatctacaaaaaacttacagctaacatcatatttactaatgagaacatagatccttttctattatgattagggaaaaggcaaatatgtcccctctcactactcttcagcatcatcctggaagtcctggttaatgcaataagacaggaaaagaaaataaaaggtataccgattgagaaggaagaaataaaacttaattcacaaatgacatgttggtatatgtagaaagtcccaacaaatcacaagtgctctggaactaataagtgattatagcaggttgggtgcagtggctcacgcctgtaatcccagcactttgggaggcagaggtgggcggattgcctgaggtcaggagtttaagaccagcctggctaacatggtgaaaccccgtctctactaaaaatacaaaaatcagctgggcgtggtggtgcacgtctgtagtcccagctactcgggaggctgaggcaggagaatcgcttgaacctgggaggtggatgttgcagagagctgagatcacgccactgctctccagcctgggtgacagagcaagactttgtctccaaaaaaaataaaagactatagcagtgttgcaataccatttatattagcacaaaaaaattaaagtccttagatataaatcttgcaacataagtacaagatc

SEQ ID NO: 203137 - DNA, 1000 bp, Homo Sapiens
tgtgaacagctgctgcactccagcctgggcaacatagtgagatcccttatctaaaacattttttttaagtaaataatcaggtgggcacggtggctcacgcctgtaatccagcactttgggaggctgaggcgggcggatcacctgaggtcaggagttcaagaccagcctgaccaacatggagaaacccgtctctactaaaaatacaaaattagcttggcgtggtggtgcatgcctgtaatcccagctactcgagaagctgaggcaggagaattgtttgaacctgggaggtggaggttgcggtgagccgagatcgcaccattgcactccagcctgggcaacaagagtgaaattgcatctcaaaaaaaaagaaaaggaaataatctataccaggcactccaagtggtgtgactgatattcaacaagtacctctagtgtgaccttaccattgatgaagaccaagattcttttggattggtgctcacactgtgccagttaaatattccgaacattacccttgcctgtgggcttccagtgcctgaccttgatgtcctttcacccatcaacccgtagggatgaccaacccggaggtgattcagaacctggagcgaggctaccgcatggtgcgccctgacaactgtccagaggagctgtaccaactcatgaggctgtgctggaaggagcgcccagaggaccggcccacctttgactacctgcgcagtgtgctggaggacttcttcacggccacagagggccagtaccagcctcagccttgagaggccttgagaggccctggggttctccccctttctctccagcctgacttggggagatggagttcttgtgccatagtcacatggcctatgcacatatggactctgcacatgaatcccacccacatgtgacacatatgcaccttgtgtctgtacacgtgtcctgtagttgcgtggactctgcacatgtcttgtacatgtgtagcctgtgcatgtatgtcttggacact

SEQ ID NO: 203138 - DNA, 1000 bp, Homo Sapiens
gttggagtgcagtggtgcaatcttggctcactgcaacctctacctcccagactcaagcgattctcctacttcagcctcctgagtagctgggactacaagtgtatcgtgccatcatgtccgactaattttttgtatttttgctgaggtagggttttgccatgttgcccaggcttgtctccaactcctgagctcagacgatccactcacctcggcctcccaaagcgctgggattataggcgtgagccactgtgcccggcctccacatagatgtcggataggtgttctgaacttatgccagagctgaactccacctgatccagaaacggctgccgtccacctgctcagaccatacctcagaactgttgctggctcctccttttccctcatgccccacatttaatccatcgctaaatctctgcggctctgccttcagaccctgcatctgaccccttctcctgtcctctacactgtagccagctcccagcccccattttcccattgtcggggctgctagcctcctaaccagcctctgcctccaccctggcctttcacagtctgtctactcaccatacagaaactatggcaaggccggatctggtggctcacgcctgtaatcccagcactttgggaggccgaggtgggtggattgcttgacccaggagttcaagaccaatctgggcaacatgatgagaccccatctctacaaaacagaaaaactagcctgctgtggtgtcgcacacctgcagtcccagctactcgggaggttgaagtgggaggatcgattgaggcagaggctgcagtgagccaagatcgcgccattgcactccagcctgggtgacagagcaagaccctgtctcaaaaaacaagcaagaagctatagcagctttgtaatagtgacatcgagttatgtactttcctgttctcacctgccaacagcttcccatcaaactggtaatgaaacgcaaagcccctcgcacggcctgtgtggctgtgcatgatc

SEQ ID NO: 203139 - DNA, 1000 bp, Homo Sapiens
acaacagaaaccaacttggaaactttttttctttgcttttcaaagagcttatttatttatttttattttaatttcaatttttcttttagatttactgcaggtttgttacaagggtataatgcatgatcatgctgcccaaatagtgaacatagtatgcgataggacatttttcagcctgcctcctcccttcctccctcctttcagagtccccggcatctcttgttcccctctttatgcccatgagtgtccaagatttagctcctactgaagtgagaacatgtgattttgggttttctgtcattaatcttcttagaataatggcttgcagctgcatccatgttggtgcaaagaacatgatttcattcttttttatggctacatagtatttcatggtgtacacgtactacattttaaaaatccaatccatcattgatgggcacctaggttgattccgtgtctttgctatcatgaacattactgcagtgaacatgtgagtgtatgtgtctttttgatagaacaatttctttttctgtgggtgtatatctagtaatggaattgctgggtcaaattgtagttctatttttagtgtaaacagcttatttaaaaggagaaaagtcttctgttaattctcattttatgccttttcattttagaaagtgattttacatacatgacctaatactggtcctcacaacaaccgtataaggtgggcagtacagatgctattagcatcttttttttaataaatgagaaaaataagattctaagaagtcaagtggcctgtctaggatgaactgaattatacccagatcttcaaggttccttctattaaatcaacattatataatacaatacaacattaactctgaaagatttattaaaactaatgagtaaaaaaaaaatcccaagcatttctttgattctactactatattcatagttttaaaaagtggtttattaagtatagataaattaagccagaaaattagatcttcagatc

SEQ ID NO: 203140 - DNA, 1000 bp, Homo Sapiens
taagactaaaaataatatctgggtttttttcttctccttcccttttaggttcgtgatgatgtataccacaatatactcacaaataacctccctaatcttctggaatatggtaacatcaccgctctgacaaatttatggtatactgggcaaattactaattttgaatatttgactcacttaaacaaacatgctggccgatccttcaatgatctcatgcagtatcctgtgttcccatttatacttgctgactacgttagtgagacacttgacctcaatgatctgttgatatacaggtaagttaaaagaatcatcacctttagggttcatccatccatatgttgtatttctttattaaagttttcattatgaaaaatttcaaacatgcacaaaatagaagaattatataagaccccacatacctatcaccctggttcaacaattgtgaattatgaagatttttgccaaacttacattaacttttttttcttatttaaggcaaattgcagacatcttgttatgtcacttctttgttctacagtatgcatctctttaaaaaatagaacatctcaaccacagtgctattatcacatgtaagaaaattgacaataattccatgatatcatctaatatctagtccatttccaaatgtcccctgcttctctcaaagatagctttttatagttggttgtcttgaatcaggtccattgtcatgtttggttgctatatctctgaacatatacctagaatagcctttttttttttttttttttttttttttttgagacagagtctcactctgtcaccaggctggagtgcagtggcgcaatctcggctcactgcaacctctgcctcccgggttcaagcgattctcctgcctcagcctctgagtagctgggactgccggcacctgccaccatgcccaactaatttttgtatttttagtagagacagggtttcaccatgttggccaggatggtctctatctcttgaccttgtgatc

SEQ ID NO: 203141 - DNA, 1000 bp, Homo Sapiens
ctgctcaatatatattacttggagaggattgaggaaactgccctcaagaaaggtgagtatctttctgtctctttctcagtcaatgattatgagcaaggcaccataatgttcttccggtaaatattacccctgatacctgctagaacttcgtgcttttcaaaaagtaccttcacacctatttttcttcctcattcctcagtgtcctatgaaacacaaagccaagtatatgatctttattatactgataaaagtgagacacaggcacaccacaattaatagcaaagccagaacaacaacccatatcttgtgaatcttagtttctctattttaccaagcttcctcccctcattagacacatctgttaacaggtaacatttaaccctaatgtgtcaagcattgtcctaggcactttacccacagaaactcatttaccctaatcctttcaacaaccctatgaaatagctgttattaacattttacagatgaggagactgaaccacagagaaattaagtaacttgcgcaaagtcacatagctggagtgtagtttgctgatattcacacccaggcaatctgtctttagagccagtgcccttaatcactctgccatattgctcctgtgaacccagaagacaacatgaaaggttgatgtactttactcatggtggccagtaagcagccaagtgtgatatttctccttacaggcctctcaactcaggccatctggcgccgactctgggatgaactgatgaagacaaggccttccagtttggaagtaagttaaggtatcaggtagaatgctagcctgattttgcatggtaaaagcaggaatagcacacaaacacaagctgggtactgataaagtgcagaggcaatgatggaatggatttgggaggagggctctgatggcttgtcacaaggttttggtccatttggcatttgtcactgaattgcttgctcactgtatttgcaggggacacaaaacagggaaagttagtgatc

SEQ ID NO: 203142 - DNA, 1000 bp, Homo Sapiens
gtaagaggcatgaaatccctacatgtggtatcatttgtatgttctgctgggtgtaatgcacagaactcatttgagacattctaaaatgtcctttttttttttttttttttttgagacggagtcttgctctgtcacccaggctggagtgcagcggtgcgatctcggctcactgcaagctccgcctcccaggttcacgccattctcctgcctcagcctcccaagtagctgggactacaggcgcccgccaccacgcccagctaattttttctattttagtggagacggggtttcaccatgttagccaggatggtctcgatctcctgacctcgtgatccgcccgccttggcctcccaaagtgctgggattacaggcatgagccaccatgcctggcctaaaacgtcctctcttaagggttatcttcaacctcaggaaagtaagagacatgaaatccctacagatagtatcacttgtattttctgctgggtgtaatgcacagaactcatctgagacatttctaaaatgtcctctcttaagggttatcttagggaagaggaaagtgagaagaacgtaatgctaacagaatgtaatggaacataatttgtatgatgaggaagaatgacagtcagccccatcctttctgagaaaagcacacaaaagcaccctctgacggggttgctgtaggctttggtggttcctaggctaggttgattcagctgaaagagattggggtagacctgcctccagagacctagccaatgagtatttaatgaactaaaataacagggttttcagtttgtttgtttgtttgttttttgagacagcagtgtctctctctgattcccaggctgaagtgcagtggcacagtcatggctcactgaagccttgaactcctgggctcaagcgatcctcctgcctcagcctctagagtaactagggctacaggtgcaagccaccatttctggctaatattttagttttttttttttgtagagacaggatc

SEQ ID NO: 203143 - DNA, 1000 bp, Homo Sapiens
tcaaattcaaaatgaacaaaatgaaaccctggacttaacccccaactcattccttcacaatcccactttcccttttcaggacatggtccatcatccagccaggtgctctagccagaaaccaggagtcatccatgaccacccctgtcattcacatccaactcatcagcaaaacccattcacttcacttcccaaacatggggtatcttgaatcagttctttcagccatacttccaatccagtatcactaccctggcctatgccagcataatctcttgcctactaagcggtctctgccttctgtcttgcccctttcaaatctactctccacacaatagcaagtttgactgacataaaagtaaaatgtaggctgggcgcagtggctcacacctgtaatcccagcactttaggaggccgaggtgggcggatcacctgaggtcgggagttcacgaccagcctgaccaacatggtgaaaccccgtctctactaaaaatacaaaattagccgggcatgatggtgcatctctgtaatcccagttactttggaggctgaggcaggagaattgcttgaacctgggaggcagaggttgtggtgagccgagatcgcaccattgcactccagcctgggcaacaagagtgaaattctgtctcaaaaaaaaaaaaaaaaaaaagtaaaatgtaaatcagatcatgttagtcccctgcttaaaacttttcaatgacttctcattagcataaaagccaaaattattactacaggccacaagatgctctatgattttgcccctccccacctcttcaacttcttctgatgctcctctcccccactgccttccagtcatcagttcttcaaacaagacctttcctggccaggcacagtggttcatgcctgtaataccagcattttgggaggctgaggcaggcagatcgtcaagaacaggaggccgggcttggtggttcacacatgtaatcctagcactttgggaggttaaggagggaggatc

SEQ ID NO: 203144 - DNA, 1000 bp, Homo Sapiens
gcccaccccttgtaccagtgtgcccagtatgcagaacataaagccaaaggagattattttggagatttaagatttagtgtctgccctgataggttttggacttataaggggccagttacccctttcttttggcctgttcctcttattcctcccttttggaatgggaatgtttacccagtgcctgtacaaccattatatcttggaagcaaataatttgattttgagtttacagatttacagctgtgaggaacttgccttgagtctccagatgagactttggatttctgagttggtgctggaacaaggtaaaacttttggggactgctgggatggaatgattgtattttgcatgagggaagaacatgaggtttgggtggctaggggcaaaatgctacattttggatatttgaccctctaaacctcatgttaaaacctgatccccagtgttggaggtggggtctaatgtgaggtgtttgagtcatggggtggggcagatctctcataaatggcttggtgctgtccttgtggtaataagtaagtccttgctctattagttcctgtgaaagctggttgttaaaaagagcctggcacctcccttccctctctcttgcttcccttcccaccatgagatccctgcacatactggtttcccttccccttctgccgtgagtggaagcagcctgagtccctcaccagaagcagatgctggtgccctgcttctcatacagcctgcagaaccatgaaccaaataaatctattctttatacttagcctcaggtattcccttacagcaacaaagaaatggactaagaaaccctcttttgtttcttccccatttttatgcctctctttgatctaacatctcaattttagaaagctctagcataggtacaaagagatgatccaatgagccaagtgttagattataagttagtctacttaattttgattaattacattatgcttgtatttatacaaaaataaaacagccaaaatacac

SEQ ID NO: 203145 - DNA, 1000 bp, Homo Sapiens
ttgagggggctctcaggcacgctctctgggagagaggtaagggcagggaatgcccgtgggaagctaagtgtacacacctgcttagctctacacctgctcttctatccccacagaaaagacactaaggagaggctcttgccagaagaaaaacattagaggaaattacaaacctccagaaggaaattccagaaatccccggagtttatttcttattgggaatagaagagcatttggccacctaagccttttaatttgttcagaatttgtggtatgcatgtcatagggggatctcagaggctagggagagacagccactggaaccgctgtttctaagaccctcttcctacccgcccacggaagtgggaatggggatggaaggccgcaccagagaacactggctgagacatgactcagggacccacactcctcctccctgcacctctcccatcttcaacgtgcagctttgcagtggcgagccagagaagcaagacgaggaggtggctcacatcactgctgctcagactgggaagtgtttgaaccctgagggtttgtttaaacttccaggccagtctccacacagcaagagtgggaccatatgggggttaaaaaaagaaacccggtcgggcgcagtggctcacacctataatcccagaactttgggaggccgaggcaggtggatcatttgaggctaggagttcgagaccagcccggccaacatggtgaaactccgtctttactaaaaatacaaaaattagccaggtatggtggtgggtgcctgtaatcccagctactcgggaggctgagacaggagaatcgtttgaactcgggaggcagaggttgcagtgagccaagatcatgccactgcactccagtctgggtgacagagtgagaccctgtctcaaaaaaaataaaacaaagtaaaataaaaaaagaaacccagctggatgcagtggctcatgcctgtaatcccaacaatttgggaggcagaggtgggtggatc

SEQ ID NO: 203146 - DNA, 1000 bp, Homo Sapiens
tgaactgctaaggcagaaggctgggaatcaatgtcattttggtcagaaggcagaggctcctggccaggaaaatccaaccaacacacacacaacacacacactaatgaaaatagatgacttatttccactaagtatttaaaaagtagcttaaggcagcaaataccttgagttaagagagaataagcagaattaactggtcattagtcagaggattgagccaactgagcccaactctctgccagtctatgtgcccaatgcagaccctctgccttcagctgactcatctttctttagctaggctatgactagactatacccaggctacacctaccctctgctcaagcttaatgttcctggcctttaagggacaatgtatatgtcaattctaacttactctacattgaaggttagaaatatctttggtggggtggaaggggagggggccccatgagtagccattttgtatactggagccttccatgagtactagaatgtacaggtgaagagaaaattggatagcactggagacctgagtgggaaatggccaggcctgaagacacagcctttgatagaaacagctcattttacctgacttttggtgggggacaaagaagagggagtttgtggtcagccagggatagaataggttggaatgtgatatctggtcctgtttggtcagcagaagagatattcatgatcagcaaaataattattcgatatttaaaagtcagattttttaaggacccaagaatctgacaaacgccatcactgagatttctgtgggggcagctgagaggcaaattttgtaatccccattttccaccaagtgaactggagtcacctaagaccaatagtacagatgagataagggcatgcaggcttccctgcctgctctccttcctaaggcaacatgggacacaggagaagagagagaaactctcagctcagatctactgacaggtgacttctccaggccttaatgtcatggtctagagaattc

SEQ ID NO: 203147 - DNA, 1000 bp, Homo Sapiens
cttttcccttgcttatgtttgtctgaattcaataccaggatagtgtgttaagcatgatgttattcttttttatttaatggtaattaattataaaaattgttttgaaatatatttgaattttctcttcaaagatgctttcttttcttgctatttaacctactaattttctatttggcttcatgatctaatttttgttaatcttgagaaaattagcaaaattaatgcaaattttggatattgtaataatagcatgggattagttacaaatgcaagcagatacaccttttaagtgtaaagaaccgaaaagcaaagtgtttatagttttatcattggctgtttggtttttcttataaagtatgtgttttatatcagtaatcatcagctaaaatgtttttaaagaaaacataattataagaggccgaggcaagaagatcacttgaagtcacgagtttgagaccagcctgagcaacatagtgagaccctgtctctgcaaaactgtttaaaaatcagctgagtgtggtagtgcatacctatagtctgagctacttaggaggctgaaacaggaggatcacttgagcccagagttcgaggcttcagtgagctgtgattgtgccattgcattccagcctgggcaacagagtgagactcaagaaagaaagaaaaaaagagagaaagaaagaaagaaagaaagaaagagagagagagaaagaaagaaagaaagaagagagagagaaagaaagaaacagaaaaagaaagaaagaaggcgaagaaaggaaggaagaaagaaaggaaggaagggagggagggaggaagggagggaaataaaaaaataaaaaataaataggccaggcatggtggctcacacctgcaatcccagccctttaggagccaaggtgggtggatcacttaaggccaggagttcgagactagcctggtcaacatgatgaaaccccatctctactaaaattacaaaaactgcactccagtctgggtaacagag

SEQ ID NO: 203148 - DNA, 1000 bp, Homo Sapiens
tggacagaagatataaacagacaattcacagacaggaaatacaagccaagtcttattttatgccattttatagccaccaaactggcaaaaagaagtaggacaacatccactgttgaagaatagggcaacaggaactgttatacaagggtaagaagtacaatcacttttgagggcaaagctgaaaatggacatactctataatccagcaattcttctcccaggtgtatactccatctagagaaattctcacaaatatgcacaaagaaacaggtaaattaatgttcactgcagcactatatgtagtatcaaaatttcagaataatctaattgtcagaaaaggactggatattgtggcttagtcataaaatacaaagcatgcagtacaagtgtggctcatatcacaattattatatatttatgtaccacaaaaaaagaaaatataccaattgttaggtcaagacatcatcgattttaagatgcatcccaatttcaaagatgttaaaatgttaggaggaaatgtgctagaactgatgaagtgcagcaaaatgaattaactgaaattacatatatcaacgtacataaatctcaaaatatagaacaaaaaaagttgcagaagagcatgtatcatttattataaagttaacagaagacaaaactataccatgttttatatgtggtaaaggtataaaaacatgcatggaaatgacagacatgtcaaggaagaaaagagaaggaagggacctcaaatttattttgcacactggatgacagttgcataggaagtgattctattactccctatactttcatagcctgggtttacattaatttttaaataaagaaggtaaaaaatctatcagagaataggaataacctattttagtaattgtttatttttaaattacaaaaatacagccctggcatggtgattcacacctgtaatcccagcactttgggagaccgaggctggtgaatcatttgaggtcaggagtttgagatc

SEQ ID NO: 203149 - DNA, 1000 bp, Homo Sapiens
acttggtaacctagtggaaaatatgggccacatgtgtaataaataggaaattttagtggagaaatgtatactctgaaaaagaactaaaacagaatgatagaaatgtaaaataggttaccaaaaatgaagaattaagtaaataggcttaacaactgggcagaaaggaaaagatcagttcacctgaagccaggacaacaggaaaataaacaaattggaatataaaggggaaaaaagagcagagcatttagtatctgcaggtcaatagaacacaattagcattcatgcaatagtagtttcaggaagaaagagaggaagtaagtatttgaaaaaaacgttgaatgagaactttacaaaatttaagaaaattatcatcccacggatattagaaaatccaaaaaaaaaaaaaaaaccaaagcagaataaatacaaagaaaaatcgaaaaatcacagctaggcacttcatatatgaaataccaaaaccaaagattaagaatagatttttttttttttgagacagggtctcattctgtcgctcagctagagtggtgcaatcacaggtcactgcagcctgaaactcccaggctcaggtgacccaccagcctcagcctctgagtaagtgggacttcagtcgtgcaccaccatgcccagctaatttttgtatttttagtagagatggggtttcaccatgttagccaggctggtctccaactcaagcaatccacctgcctcagcctcccaaagtcctggattacaggcatgagccaactttccaggccaataaagaacagatttaaaaacagtctgagaaaaaaagatacattacataataacagcaaaaatattgaggatgactcacttctcaccagaggaaaaaagaataaaaaaagccagaaaaaaaaagaattctgcccttaaagtattgaaaaaaccattaatctaatattttttttcagcagaaatatctttagtaaaagaacccaggatctgcaggaaggaataa

SEQ ID NO: 203150 - DNA, 1000 bp, Homo Sapiens
gcaggcgggcaggtccgtgcgcttctgtggctgaagcggccgggccgcagctattcctgcggggcttccagggcggaggacacgggctgacacgggctgtccctgggaaggaacttcaagtcatggagctgtcaaagtagaagcagcttaatgaatatttgtcctaatgctttcacctcgcagatagacactgaggcctagaaaggtcgatggagctaaccaggaaccaacaaagtaggttcctgagggttgaccagcctcacccctgaatccaggtgctcaggggacaagagacaattcagaaaagcagggagactgaaggacggcgtttggtgtggctttaggttgacttggagagccgcaaagggtgtgggtgggaggtgtgctctctagagtcccgtctcctcgcgggctgcctgctgggctgacttatcaatgtgggggctcagggccaccctgagttctgccttctgggtggccagcctgtgttggcgccgttggatggagtgaagctcagtttatgaggctcagggaggctctcgtgagccgatggaggggtggaggaggggagaggtgcttgctgcccggagagctgagctgctgggaacaggaaggagaagaggagctgttgggaagggggacagtgagtggagatgccctttatctataaaggtaaagactgttatcccattatcacttatgaaatgaggaatgccttgtgaggaccaaggtagggacatcctgggtgggagctgagctcctgccttgtggggtgcacatgcacaaacatgcacacacatacacaaacgcacacacatgcacacacacgcgcgcgcgcaaacacacatgcatacacctgaggaaggatcataggcgccaggtgagccaaacaggaccatgcagcggagctctcaggagggctggagaaggctgcaaacacatccagggagctccgaggtctatggaaatccagagaagcaattatggttggcttctgatc

SEQ ID NO: 203151 - DNA, 1000 bp, Homo Sapiens
tttggagctctggctttcttcccatttacatttcctccttggtttgattacagagggacagatggcaatattaaagagccgagaatgtggttcagagtcatagaacaggacgaaaccaggtgcggtaagcttgtacgttagaatgtacatttcagagcctggaaaggtgctgccatggggcccaagggggaactggaacctatcgccaggacagagggtcgagagggagggttgaatgctggcgaatcagcagacaagccctggaaggaggttcagcaggaggaggataaaaccagatagaaaagataggagagaagaaaagatggaagtaggtcaagggaagagtagactatgtccccatgaaaagtggtaggctttcctgccagtggaaaaacaaggatttgaatgagagcaaggctgtgggactctggcctgagctctccataatgggctgaggacagtgatgttggtgagcggaagcagagctttgcctgtcaggcggaacgagcagctggtgcttcggggacctgcaggccctttcctccttggtcccagccaagctgttgggaacgattccaagtggaaggaaatgcacccagctcaggaagcttgtgaagtaaagtgcaggagatgaaccccaagttctgacagcttgccagagtgcccgctgagtgaatgctggcaggaacatttgttttgagaatagtttaccataatgaattctgacatcattgcactctctcaggcaagggtgttgaaatggaataaatgacctaatgtcagggatttgtggaaaccctcaaaacagggagattgggagattccttggctctcttatcttcattttgagtggagttttaagcaacagttccttcttagatatttaattaatctcaacattttaagaattaactaacagtttgaagatatgaaagcaatcgtgtgggttttgtttgcctctctcaaattgggttatctcatagcatttggaatagaattc

SEQ ID NO: 203152 - DNA, 1000 bp, Homo Sapiens
tataaaggaaggcttcctggaggaagtgaaccggctgtagacagactgaagacactctaggccagggatcccgtagcctattaggaactgggccgtactgcaggaggtgagtggcgggtgagcattaccacctgagttctgcctcatgtcccatcagcagtggcattagattctcataagagtgcgaatcctattgtgaactgtgcatgtgagggatctagtttgctcactctttatgagaatctaattcctgatgatctgagtggaacagtttcatcccaaaatcatctccccaccccccgcaaccccagaaaccagtccctcgtgccaaaaaggttggggaccactgctctaggcaaagggaactgattggtcaaggcagagcggagctatagcaaaggcttctctcaaaagtaagaatgctggtagccaacagtcaccgagtacctactcagtaccaggccttactctaacctcttctatatattattatcccatttaatcttcataacaaccacaggaggttggcagtataattatccccatgtggcagaagaggaaagtgaagttctgttactggtccaaggtgctacagagaagcagaaggaccgggagtgacacaatacagaagatggaagagctcagttccctgcagctcagatgggggaaggtgggagggagagagtgtgagggagggatgcccaagccagaactgcagggatccaatacagaatacagaatttgaccttatacagtgtgggagcttcttaaagagttaatgcttctgagtctaaagtaagcagggcaggcagtggggaggagaagccggcagggaggtagggggagcaaagaggaactgaactagtcaggaagagctgggactctggaggacggacaggtggccacctccaagccatcaactttgatgacacaggttatctttgtcctggagctaagcatgcacctggcccaggagctggacaagctgaaaaggaagatc

SEQ ID NO: 203153 - DNA, 1000 bp, Homo Sapiens
caatagaaggtaagctctgtaaggggtttgcctctcttgtttatatccccagtgctaggtatatattactttaggaaaaaccattatttattaaaaatattttaggaaaaaaccctacacaaacagtattcctgtagtggttttaaaataagacaacaggctgggcgtggtagctcatgcttgtaatcccagcactttgggtggccgaggcaggcggatcacctgaggtcaggagttttgagaccagcttggccaacatggtgaaaccccgtctctactaaaaatacaaaagttagcctggcctggcgtcacacgcctttaatctgagctacttgggaggccaaggcaggagaatcacttgaacccaggaggcagaagttgcagtgagctgagatcgcaccattgcaccgtagtctgggcaacaagagcaaatgtctcaaaaaaataaaataagaccacaatttctttgatagtgtttccttccaaaggtggtggctaattctcctcttcttgaatgtaggctggatttagtgacttgcttctatgtgtagaatatggccaatgtggaggtatgtcaataggtcatgaattcctttttgttctctctcttcgatcattcactctgaagtaaagcagctgccttgtcatgagaacatatcaaacagtgctgtggaaaggcacatttggtgagaaataggcctactcccaacagccagggaagaactgaagccttctgtgacatgtgaatgagccacctgagaaatgtatttttcatcctcagtcaatcagtgtctcaaaagaggccgttagctggatccctcaacaaagccacttttgggttcctttcagataatacaggtttgctttgtaatctactaggtttggtggtagagtgagaagactgaacacactcccctttaggacacatcataaagcaaaacaagtatggcccaaagtagcatacacttaatgttcttttctactaggatttacagaattc

SEQ ID NO: 203154 - DNA, 1000 bp, Homo Sapiens
cagactgttcatttgaagccatttctgtaaacatcttccaagatagaactgtaatggattgaggaaataacacagaaaagacaaaaacttttgatttcaggcatgcaaagtgcgtgggcagatggacagttcccattgtgcattgcctttgataaattgggccttaatttatataacgatgctgtgttcacatccctctcctacctaaagttgtctttattggtttatattgtgttaaaattagcttataattattacttttgtattgtgttcagttttttaagttgcatgtttatactatttgctacagtatttttaagtttggggtgaaggccatcagctgtatcaaaaagacaaaacaatcactatttattcagtattgctgctttacatctccagaataagctttcgatgccaggacagtgactgcctgaaagctgcaggagctcttttcaatgcattttatatatttttagaaaccaaataaatgcagaaaactatttagtatactaattatattaaaccagcagaaatataaaggcaataaagtatatacatatatatggggggaggggaaagattaaaaaatagatttacagccagacatggtgatagccctaaatgtatttctcaatatgtttttctttattgaccctaggaggatttgagttgctgcagctttaaacagaaaattgccatgttcactaattgtgagcacataaatatgcttttagtactgctttgcttatgtacaaataaatctgtaatatgtattatatgtaattatccttttctttgactttcattttaaatgtatattttctgatcattatgagctgtaaaacaaagaatcaatattggatattctcccaaataataaattttcaggattcattggggcaaaaaaaaaaaaaaaaaaaaaaaaaaaaaaaaaaaaaaaaaaaaaaaaaaaaaaaaaaaaaaaaaaaaaaaaaaaaaaaaaaagggggggccgttttaa

SEQ ID NO: 203155 - DNA, 1000 bp, Homo Sapiens
cacttgacactcgtttacatgaagtgtcaacagctttcaggagcaatttaggaagccaaactatgggactcaataagtgagtcctattttctaaaaatgcaaaactatcctgactcaggctctgcagcaagaaaggctttctgtctccttcaaggccccctccaatacaaaagcagcaggcacccatgatcatgctagagtgagcatatactgcatttaggattgagctattattaaaataagacaaaagatgatagaagaggttgtaaataattagactaacatcttcttgctgcagaatttggttttaatcaaatgaatggtttttaacaagagggatactgagatgggggaaaggatgtaatcatgtcacatactgagggtaaaacaaggctgtagaaataactggcattttaaaaacctaatctccgaattaagcatagaacaagtcatcaagggcctcattgtcctggtaatggcctcgattaaaacataaaatatttttagcatttaatttttcctcgtgcacatgcatgtatgcacctatacatgaacaaatgcatgcatatacaacgcaaaaacatctaccatctttgcactaagaaaataaatgctagccagagtctctaattttgttcctagtgaaacagattgcatattataaaatttgacattgatctttaaatcacttgagctgacttccctctttactgtccccatcccccaattacagccttttccatttgcctttctgtccttagaagatgttctttggatcagaagcctgctaacttctttaggcagaagtgccaaagtgcaaaccaaacaaaaataagtgaagtcatggaagacaaaaagcagccaaacggcaagatagacaatggaagcccaggacagagtaagggttgatttttggtttctaaatcgcttgaatagatttggctcatttgggctttataaatgttgtccttgtgtatggtggcccttatccagagaattc

SEQ ID NO: 203156 - DNA, 1000 bp, Homo Sapiens
ttctggtctttacgtgtattcgcatatacttatctttacaaagtgtgaatagtattatgtataaagttctatatactgcaattttacctaccattttgtcatggtcatttcctcataactttccaaacatgaatttcgatgaacacataattttcctttgtggagtttgtattataacattttgattttctaagctcaagaaggcaagttatattgagaatgagatggctatctaatacctactaggataactcaagtgttccaattattacctgcaatatagagaatcaaaaggaaaagagaaatgttgaatctaaacacacagatctttaggtttttctctcctcgcagaaggaatttattggttagcattttcttgatcttaaatagtgaagaagattttagcaagttacctaaaggtcttaaattaaggattgattaatatttctatataacttttccccatctcatttcatcaatatggcactttaggccttttctctcttgcatcattatgcactgacctttccattgttaatgcgtctattctatgcctgagtagagagaattttttccctcttttcagagattagctgcaaagaaaaattatgtgacattcaaaggaattattttcagcctaccctttcaaatgcctttctgacatctagtgatgtaattgagctgcattaattttacgaagcatctatatttgcataataaaaaattattttaatgtacttcaaaattaatgcaatattttttgcaaagaatactaaaccacatttaattttgttactctgttattacaatatactttgcatttcacgtttgttataaaattctagttgatgtcaatattgtaaattttagtccttctatcctgtcaccaatatgcacatttgctcattaaaagccatttggtgctgttcagggcaactaacaccaccaaaaatatttttaaatagattatgtaaaaataacattctctaagcccaagctt

SEQ ID NO: 203157 - DNA, 1000 bp, Homo Sapiens
agtgagtgctttaagaaactcttgacaagtggagtcttagtgaacccaccctaaaggccaggctgagtgttccagaacaccagttcccaggctcttttgggaacttgaagctaggaatctatttagacaacaaccatccatgccatttctgtgcccaccaccatagagcagctcactgtcctcctccctctttccaaaccattaatccctgcagagccctgccagcatttccctcttagagtcttccggccttggccaaagacccagctccactgatccacccattgtttcattctggtaatacactttcttggtttgggcaaaggtagccttttagtgccaaacattacagagaaggagatccgcagatgatatggtctggctctttgcctctgtcacaattacagcttccaaacagaaaggaagttttctggtttagaagggtccaccagatggcgaagggtcctggggctgaagcttcttagttaaagtatggggttgtatcagtgtcctaggactgctgtaacaaattaccacaaaatgagtagctctaaacaatggaactgtgttctgtcacacttctggaaggcagaagtcaaatcaaggcatcagcaggctgcatctcctctgaggctttaggggaggatctggccttgcctcttccagtctctggtggctgccggcaatccttggcttcctaggcttgtggcagcatcactcccatttctgccactgtggtcacatggcctcctcctcttctgtctcttaaaaagacacttaccattgcatgtagggcccacccgggtaatccaggatgatctcatcttaagatccttaattacaactgcaaagaccccttttcaaaataaggtaacattcacagcttcagggggcttggacgtggctacatctttttggtgggccaccattcaacccagtataggggtcgagaagcagatttctgctgaagcccttgcattttgtacccacttaggaattc

SEQ ID NO: 203158 - DNA, 1000 bp, Homo Sapiens
gaaattctaccttggttttaattcttacagatttctctcaaaaaaaattttcccatataggtagattaatgtttaaaatttacccccattatttacaatggaaaactggttttaagcaaaaagaattgggggtcatccccttactgtatgtatcctcctaacttgaaaaggaaaatctcactgctctcagtatgattagtaaccagtaataataataacacattctgattacattttttgtttgtttgatttgaaacaaagtctccctctgtcacccaggctggagtgcaatggcaggatttctgctcactgcaacctctgcctcccagattcaagcaattcacctgcctcagtctccagagtagctgggattacaagcgtgtgccaccatgcctggctaattgtttgtatttttagtagagatggggtttcaccatgttgttcaagctggtctcgaactcctgacctcaagtgatctacccagcctcccaaagtactgggattacaggcatgagccactgtgcctggccacattttacattttttaaagcctttcatctagtcatatttgtctcttgaaacagtcctgggcaataaaaacgtgatagggccccatttcataggcaaataaaccaaaagctcagagattaaatatcagacacttttttttttttttttgagaaggagtctcgctctatcgcccaggctggagtgcgatggtgtgattttggctcactacaacctctgcctcctgggttcaagcgattctcctgcctcagcctcctgagtagctaggattacaggtgcatgcaccatgcccggctaatttttgtattgttagtagagatggggtttcaccatgttggtcaggctggtctcaaactcctgacctcgtgatccgcccgcctcagcctcccaaagttctgggattacaggcatgagccatcgcgcccggccataaggcacttttactcaaagactgcaaggtaggtaaaggatc

SEQ ID NO: 203159 - DNA, 1000 bp, Homo Sapiens
taattttttaacttttcttctgttttgattctgtatcctccagacattaacattgagaacttcatatacaattatgtatttaaaaatgagtcatgtctagtataatacaaaatatcagcaatgtaacatgacaggaacaaaatataaatgaagttgctttgtatagattcatttttctcattaaaacatttcatagcataatgcacttattcaaaagtattaacatatatatttaagtgcactatgaaaaacagaatcaagaaatggataccatattgatactaaatcctatgttaaagtatgttgaataatttgtagtttttcaaaagtaactcagtcatgtcacatattaataatgaatatatttatttttaggaactccttttaaataactattaggtatatagttttatgctgagttttatgagaaacacaataagcatatcattttatgtcaggaatagagagtatatttgtccctaggtcattttctatagctgtcaaaatgtttcaacatcttttaaaactccagaaaatgaggaagaaatatagaaatgttcctaggttgttcttgtaactttatctagtttttttctattcttaattatattaattcttcccaatggcttatttaaaaatgggtcttcaattgtctttcattaaaattctatggggtctcattacgtgtaagaaggttttatttcacaccaagtatttttctgttatgtaaaaggaaaataaagctctgggctaaagaaataactttttttaaaaattttccctattgggaagtagttgaatatatactttgctgttttcagctaaaacatattagaatgtgattctatttacaacaaaaatgaaataaggctgtgttacattggcaagctgtaatgggaaaggtatttgtcaccctaggcaaactgaaagggcagatatattgaattcagtaatgctgaataattaagccttcacttataacccttatattagagaattc

SEQ ID NO: 203160 - DNA, 1000 bp, Homo Sapiens
tactcaaggaaataatagagggctgaaacaaatagaaaaacattccatgctcatggataggaagaatcaatatcatgaaaatggccatactgcccaaagtaatttacagattcaatgctatccctaatcaagctaccattgactttcttcacagaattagaaaaaaactactttaaatttaatatggaaacaaaaaagagcccatatagcctagacaatcccaagcaaaaagaacaaagctggaggcatcatgctacctgacttcaaactatactataagactacagtaaccaaaacagcatggtactggtaccaaaatagatatatagaccaatggaacagagcagaggcctcagaaataacactacacatctacagccacctgatctttgacaaacctgacccaaaaaaaagcaatggggaaaggattccccatttaataaatggtgttgggaaaactggctagccatatgcagaaaactgaaactggatccctttcttacaccttatacataaattaactcaagatggattaacgacttaaacataagacctaaaaccacgaaaaccctagaagaaaacctaggaaataccatttaggacataggcatgggcaaagacctcatgactataacacgaaaagcaatggcaataaaagccaaaattgacaaataggatctaattaaactaaaggccttctgcacagcaaaagaaactatcatcaaagtgaacaggcaacccacagaatgggagaaaatttttgcaatctatccatctgacaaagggctaatatccagaatctacaaggaacttaaataaatttacaagaaaaaaacaaccccatcaaaagtgggcaaaggatatgaacagacatttctcaaaagaagacatttatgcagccaacaaaaatatgaaaaaaaggtaatcatcactggtcattagagaaacacaaatcaaaaccacaatgagataccatctcacaccagttagaatggtgatc

SEQ ID NO: 203161 - DNA, 1000 bp, Homo Sapiens
aatataggttgttgtttgcaagagtagaaattatggtcatagaaatatgaaaactcatatgcagcctaatgttttaatcagtagtgtcttcaaaagggatggtattgaaattctacaaattgtagatgggttttataagggctcttctggtatctgagcagacccaaatctcaggacccaaaccacattcataaaagagtgggaactcatagagtgggaaggaaggcgttaaagttttcatttttaatttcctttctgtagtaggaaatgttttgcatggtggcaggctagcctgtgagtacattaatctttggattttacgatgaatatctactaattcatccttttatgtcacacttacaatgttttgtttttcaaaggtatgtgtatattacatgtatgaagtgagttctttcattataaaaaaaaagtttgatttacccatctgataatttttgggtaaagattatttcctgtagtttcatcaagatgaagaacttgaatagttgggtttttttttttaatgttcataaactttagcactgttttgttcctgaactatctgagtagaaacttaagctttggagtcagacacacttgggttagattgtcatgtctgaagcatctcagtcacatggccttggacacgccagtctgtctgcagtgacaggatcatcatcctagcacctagcataggcctgttgagagttaaaaaaaaggagaggggcttatcctcaaacatagcaagcaaaaataattagctatttttattattaataaatggtaaaagtcctttaatgttgtgtcttattataaatttcattctgattttatctaaaatgtcaatactaacaaaattaaaaaaaaatttagctctgtatgtaccctactttgaacaagcaaatagttttcagaagcataaaacatgaacaaggcatttattgtgaaaacatatttttaaacctttaggtttcactttttaaagttgataaccaagctt

SEQ ID NO: 203162 - DNA, 1000 bp, Homo Sapiens
attatgtttattgttttaatagataagtcctaaattaagaaactcccttccagcatccatttggctttggcttaagttgcagtgaatattcgtatctgggagtaaaaggaaattaggttggaattctgccatgtttcattttactgcattcctgttgcttttggaacaattgatgaggaaagcctctgtagaaacagatccccacctcctacatggtggggatatggtacttaatataacagtttctatcgtaactgtgatggtgacaaatccctaaggaatttactcataatgatcagcttgcacacagcttctggagtctaggccaaatttctaacacgtgggcccaatagttccagttgccttcttgaacgttggcgggtccagccttttccagtgataacacccagtatctcttctagtacttatctctgaagtatcttgtgagttaatcgcctttcttttactgtcctactcccccaccccctgttatttgttgtaagtacttattttacctttacatgacatatttttaaaattcattagcattaaaatgtgacagagaacttccaaaaagttttttaatcaaaactggctaataattcagaactaaaatcccaataggaaaggaaatgggacttagtgtggagacgagatggccgataataactcaataaccagctctaactttagagggcagtgtcaggtgagttactgtattctatttctactataacagaaaaagttggaatagtcttaaattaaattttgaaaacgtctcctagtggaggggactgattaactgtcggaaatatgcaataccatttttacatgagtgacttttcttagaatattttaacagtatagcagtcatattttcttctgttttcataagaatggattttccatggcagtaaaatgtagtggctttctaaattttattcccaagaggattttctggcaccctaataatttttcaaagtctcctaatattgaattc

SEQ ID NO: 203163 - DNA, 1000 bp, Homo Sapiens
gtggggacatatttgtgatcacctccttatgaagacctgtcatacagcttttaaaaataaccttaaaggatgtcaaacatttgcaactgggaggtcattcctttgggaattgagattaaattctactgattcctttattccttatttaaaaagttgacgctctaagcatctaaaaccagaattgtttttggtcattccctgccgatgtgtcctccccaaacaggactttgtggttcaaaatacagtagggtcattgacagaacaccctgtaatacaagaacttttacaggacaggattatgttgaggcatctgcttagttctgttgtatgatggccaagtgcttaagctgtccataatggacccaatgctgcagctcgcccggggttacaagagggatgccttagaagaggggcgctcccctgaaagatggagagctggtgtgctttgccaggtgcatggttgttgttgttgttgttctgtttcgttttgttttttgagatggagtttcactcttgtcacccaggctggagtgcaatggcttgatctcggctcactgcaacctccgcctcccgggttcaagtgagtctcccgtctcagccttccgagtagctggaattacaggtgcctgcccccacgcccagctaatttttttcttttatatttttagtagagacggggtttcaccatgttggccaggctgatctcgaactcctgacttcaggtgatctgcctgcctcagcctcccaaagtgctgggattataggtgtgagccaccacacctgggccaggtgcatcgtcttgaacaggtcatttaccttcttaggccttggttttcttatgggagaaattaggggtttaggctagattagagaaggatttcggggagcccaaggagggcatggggatggcatcatgtgttggggggctctagtgtcctcttctcattcccaagtcaacagagagtaattctgctttgatctattttatgtaaaggaattc

SEQ ID NO: 203164 - DNA, 1000 bp, Homo Sapiens
tttttcaaaaaatacttcttcacagtctaatgtggttaaaaaataaagctctagagtaagacttcatgagcctataatattgcttagctgccgaagcagagttgtatcatgttgaacaagattcttaacacatttaatcttcttcctagatataaaatatggttaagggtatccaggtcatagggtcatcatccgtaggctaattgtataccttcagtaagaatccaaatgacgtccatagtacagtgtctggcatatagtgagagaccaatgcatgtggttttgtttttctttattttgttaattttctgtccttgttggtgttacagttgctgaactctaatctgcctaagtacccacccctggcatgtcactaacctcgttcaagtatccctcctgccagaagatgatctctggcccatcagtcagatctggaaaccctatttctgtgctccattaggatgacatattccccctcagccattatttttatgtactcattactcttctgtgaggattaaagatttttgctggaagagattatgcatgatatcttctttatattgccaccactagcagagagccggctcataggtgcttaatacattttgaatgaatacgtgtgaatggagtttgaatttaaggtgagaacatttcatggtatgcactattatagttaagggacagaagtgcattcatttggcttggtattaatcattgctgctaaatatcatttgactgtcctttaaatctctggaggtttgttgttgtttttgtgtttttgtttttgctctgccttgttttgttgtctaagcgtgtggcaaaggtttcctccgaggccatggccagggctgggctggccctctggtccatctcagcactaacatactagcctgtatcagctctttatttattatttatttatttacttgtttatttatgatggcctaccactattcagctttttaacttcttgctctcaatctttccaacttggatc

SEQ ID NO: 203165 - DNA, 1000 bp, Homo Sapiens
atctcttgagcccggaagtttgaggctgcaatgaaccatgatcgtgccactacactctagcctgagtgacacagcaagactcttgtctcccccaaaaataataataaaataaataaactaagcgctagagcagttatatcatttccgcaaggttacagtcacttgcaagtaagtgccaagtctggaaaaaaggcagaaccgggctttgaactatcagccccttcctagcccaccaggtaggaattccggatgagaaggctgtgccagggaaggaagcagtcacaggagtgggcagcctcttccaggtttctgaagacacaacagggtcctaggagagcaagggtggggcaaggagcataggggcaacaccagaagagtcagtgcgggtttgagagatgtggagtcctgggtttgaatcccatctttgtctttccccagtcacgtctacatcctgcagttctactccctgggatctacacaagagaactaacacagaatctcagaaacgtgcacatgaatgttcccagcagcattattcatagtagccaaaacaacccagataaatggacaaatctaatgtggtcatatacccacacaatggatgattactcagccataaagaggaatgaggtcctgctacattcttcaacatggatggataaaccttgaaaacctgatgctaagtaaaagaggccagtcaccaaagactccatttggatgaagcatccagaacaggcaaatccagagacagaaagcggatgagtggttgctgggggcaagagggaaagggggagtggggagtgactgttcataggcatgaggttactttttggggccatggaaatgttctggaattagataatggtgacgctacaaaacatcatgaatatactaaaaatcactaaattatacacttttattttttgttgtttttattttaattttttttttcagacagggtctcgctctgtcacccaggctggagtacactggcgtgatc

SEQ ID NO: 203166 - DNA, 1000 bp, Homo Sapiens
cagcaacgttagacagcaagctggcacaatttggggacaaagatctttcacgagaattttgcacatatcaggtcaggtgtggtggctcatgcctgtaatcccagcactttgagaggctaaggcaggtggatcatgaggtcaggagttccagaccagcctagccaacacagtaaacggcccccgcctccccccaacccccaccccctgtctctactgaaaatacaaaaattagctgggcgtggtggcacatgcctgtaatcccaactaccccggaggctgaggcaggagaatcgcttgaacccgggaggcagaggttgcaatgagccgagatcacgccactgcactccagcctgggtgacagggcaagactctgtctcaaaaaaaaaaaaaaaaaaagttttttgcacacatcacatatcccattgttggcaaatgggaagttttatcttttaagaaagaggcacatagattttgctgggattttcttgagaacagtggttaacagtaaaaagtgggcattctcattttttttttcccaaagagaggaaagaatcattaaatacatggggtgtattaaaaaagtatccaccttggaaagaggaggggaacatagcactatgttccatccttacaatacctccgtcaaggtcgtgtatgagtcaagactcagctttttttttgagacagagtctcgctctgttgcccatgttggagtgcagtggcgcgatctcggctcactgtaacctctgcctcctgggttcaagtgattctcctgcctcagcctcccaagtagctgagactacaggtgtgcaccaccatgcccagctaatttttgtattttcagtaaagacagggtttcaccatgttggccaggctggtcttgaactcctgacctccaatgatccacccaccttggcctcccaaagtgttgggattccaggcgtgagccaccacatctggccaaaactcagtctgtgtggcaagtgacagccaactcacg

SEQ ID NO: 203167 - DNA, 1000 bp, Homo Sapiens
ctcattaaaaaaaaaaaatcttgaatttattttcttaagctctagcattctaaagtttaaacatatgagcctttgaatactcctgtctaggaaagagccgtgtaaattctaagtatctctataattgacttttgatatgttacttgtgtttaaacccaatttgcaacaccccttttgttggctaattttgtcgctatgttgggtagcagaacttgtgacgatcacactaataacataaagtttcccacctttcttgttgctgttttccttgttagcatctcagacttcccaattctgggaatagtctctaggaggcaaggttttcagctttggaaatgcatgcgtgacacagtagtgtggtatggaaggcgtgtggacttgaagatccggctccagaaacacgctctgccaattaccgtgtgtgaccttttataaattacatccatgagctgtagttacctaaaatagtgatcctctctccttcactggctggaaggattaaatgagatagtgtttataggaaatgtactttgtgttccttagttgcctccccccgccactccccgtggtaggaactcttgagtacttgtcaaatctgaactctcggcatttttacctccttcagggaaaactattggacaggctcttactgaacacccgcttttgtgcagaatgcacttcctgatactctgggagtttcagaggctactaaggtgtccttctggccctcaaggagttcatctggagacagggagacgacacattttcttcaataactaagaaaagaaagggcaatgaagaccataaggaaataacagtgaagtttcttaggcatccaaacttgatggaggggacaaaggaggcttcaggaagttttaaactagaacaggacttcagcgctcttaacattttggtcagatacttctccgtggtgatagtttgtgggcagttaacagtggtggagggctgtcctgtgcattgtagcaagtttagcaggatc

SEQ ID NO: 203168 - DNA, 1000 bp, Homo Sapiens
aagtagtatgtcttctgtggtatatgtagactttctgaaatcagtaagaggctttttctaaaccattgtctcaactagggctagtagccacccagcaattatctgggaaagccaggcataaatactggcctcaccatgtgtaggggcacagaaaggaaaggagataatttaaaattgaagactatcttggagattcctaaagagccataatggttaattttgttattggaatggggcttggcacttggttatagctctggtccctggagtgcactttcagtagcagaaatccaaacgtgaggagaagtcagatacagcagaccacatcaaagtgatatttccatcagtcaaaaattaactgaaaattatgcgctgatctaatttagcacagtgaaaagttctatcctaaacagttgcacagtttgatagtacacatctgatgttttctttcaaaggcctatttcaaatccatcaatctatcattgaactgattcatggtcaactttctctttacttcttctttttctttaatttaggagtctggttttctgatctttgtctgacaccatccttctctttccaagtatgctgtcaaaacaggcttagccatcctaattgtcttgagtaatgatttccacatatacttcacaccaacatcttctcctcttttgtccaatagccactcctcttccttgttctatgtctggataacagcctatcacatttgcagagccagtgatagaagtattgctttttttgcctttttttttttttttctgaggtagagtctcgctctgtcactaaggctggagtgcagtggcgcaatctcggcttactgcaacctctgcctcccaggttcaagcaattatctgcttcagcctcccaagtagctggattacaggtgcccaccaccacgcctggctaatttttgtatttttttagtagagatggggtttcaccatgttggccaggctggtcttgaactccagacctcgtgatc

SEQ ID NO: 203169 - DNA, 1000 bp, Homo Sapiens
tgagaaataagaaattatcaaaatgttaaaaatctattattaaacactgaatactggtaagcatcataagcaacagcatagaggtgagaattagcatagtagggaaatgtaggaagtagttattgaagtgacaatcctatcgagaaaggattgtatgaggtggagactaatgttaaataaagttaaataaggcataacttacttattcttcacaagaaccctatgaaataggtactattactatcatttccattttacagtagggaattttgaagcatagaaaggttaaatgatttgcttaaaagaataataagtgccaaaggtggcaggtgaatgcagcaatcacgattcaaagtccaagctcttaaccttgacactatactgtcttcaagattttgaatgccagttacaagattttagtgttgatgagaagccagccattacagtgatgtataaggaagttaaattataatatgatttgggaaaaataattagacaagacagtttataccagtggttaaaagcatggattctagagccagaacggcctgggcttaaatttctattctaatgttgattagttgtatcacctgtgattctgtttcctcttctgtaaaataaggataataatgtacctacacctaataaggctgttgtgaatattaaatgagcagtatttataaaatgtctagagcagtgccttgcacagtttgttgtttgttaaatttaatagaaatctgatgatactgccataactatctctattaccataaatgagtcacttaactttacagatgatagttttctcatccatggggagaggtcttagcgtatgagctcacattattttacagttctcaggtttgatgatgagttccatttcgaatgtgctgtgcttgagtcaacagcatgacattcaaatccataactcttattagcaatttaaaatacggaagtagagtacaggtctgatgcaaaacaaccctgatgcagtgaattc

SEQ ID NO: 203170 - DNA, 1000 bp, Homo Sapiens
tgcaatggcatactggcatatggcagactgagattctatacctggaagaatctgatttctggacaaacactagggttaatgctgattcaactaagcactgatagaattccaaatggccactccattcaggaccttaactaaattttgtacaacatctataatgggattcttatctaagccaagatcagaggtagaaaagtttatggcataaaggacactgaagagcatttacggcaattatgagcagtactctacaatttaccacattcatattttccaatttatttttcacctttttttttttttaacgtctggggttttttttttcctccatcaatcattagccatgggcagggtcttactgatgacataaagcactgaaaagattggctacccttactctaaatctttgcttttgaaatctatttcagaaatcatttctcattttcatttcgaattatattaagaactgacagcctctctttttaaagagaggtccttatcaaatcatggtcctattaagaattttcaatggttcccccattacctatagaactaaaaaaaaaaccctcatacttactggcctggcatttaaagccctctgtgtatcaccctcatctaccttttaaattgttttgctgactattcttgaatgtgaaatactctactctggctagattagtctactacctctcctttaaaaataccattttcattcctatctctctgactttgttccttcctaaaaatatcttcttgtatcctctctgccaaaccatttctaaggctcagctcaaatcctgtatctccttatgaggctttctctaatcactgtagtcctcagagctcttccactcttttggttccctatgtctgtatcattgtcacatactatcttctgttgttcgatttatgtgtaattgttctctcttcctaacagactttatgctgtgctaactcccaatatactctcacagagatatgtatgcagtaggaattc

SEQ ID NO: 203171 - DNA, 1000 bp, Homo Sapiens
tggctatagtcaggaaaaagagcttaatgttatttgaaaatcaaaatgtttgttctcactcataagtgggagttgaacaatgagaacacatggacacaggcaggggaacatcactcactggggcctgtgagggggtcccctgccaagggaagggagagccttaggacaaacacctaatgcttgtggggcttaaaacctagataacgggttgatgggtgcatcaaaccaccaaggcacatgtatcccataacttaaagtaagattaaaaaaatcaaaatattttaaaacataccaaattatgagtttgaaaaaacctataattggagaaaatatactctgataaatgcacacagcaaaaacactctgaaatgctggacaatgggatgtctggatggctctcttgctccctgggacttcagccagtccatatggtcatctaataggaagcctgaagactgtgggtgatcttgcagaccatatgtgctgcaatacctaggaacaactggggcttggctaatgacgtggcaaaaacctaaatttagatttaacttgtttttattgagcagaacccaaacctcattggtatttttgcacattgcttgctttgtttatcaataactttgaaatgaggctgcaaaaatatagccctttccactgcagacatgcttcaaatgacctattttggaatgaaatgcctttcattctacagaaatattttaaaagccaaaagaaataatgttgttgcaattctccttgtgctgagaactaagactggagcccaccagtgggttggcattataattgcatctgtaaatgatccagggtacctgtctaaaccaagactatcctctaatcttagagctgacattaaagaaaagaaaacaaaaaccatgaatgtgtagttgctaggattctagaagtccctggggagtgcttaaactcaggaatgggcaagaagaatgtcaaaatagatggaaaataaagatctgatgagatgatc

SEQ ID NO: 203172 - DNA, 1000 bp, Homo Sapiens
ttggttgagtgaattaattaatgtagcactcggcctccaagatagcaccatatgaccttcaccttctggtgtccccacactgaattagggctggtctgtgtgattaatagggtatggtggaggtgacagttccttccaagggaaggttatgaagtttccaccctggcttcttgggtagctcacggtggggtaagccccaactgccatgtcatgaggacacacaagcagccctgtggagagcccagagggtgaagaactgaggcctcccaccagcagccaacacccacttgccagccctgtgactgagccacctagaatatggatcctccagtcccagcaacacttccaatgactgtagcctcatgaaagataccaagccaaaactgctcagccaagctacttccaagtttctgacccccagaaactctgagaaatagtttttcattgttgttctaagccactacgttatggggtaatgtgttacatgggagtaattaatgaacacagtactgtcctacagaaaagagcatcatgattaagtaagtttgggaaacactggattaaacagctaatgggatttctcagaggactcctcagagcttttaatatacaatactcatgaagaatcccatcctcatgtaatgacttactcctttttcatcttattaactctttccagtttggaaatgtagttgtaagtaaatctacagtcggccagcatcccaaataaaataacaccaagattgtctaagggcagcaggacaggaagaatttcttgaggatttgggcctcaaattcctactttttcctccttcaaaagtcacctttcccttgggaatcccatgaattatggctgcatctaccaagctggcatcagaagacgatgttctccccttcactacttggactcaaacacgggcacttttacttaaccttccatagcaaaattgagatcataatgactgacaaaattttgcaggaaacccagtgtagggaattc

SEQ ID NO: 203173 - DNA, 1000 bp, Homo Sapiens
ggttctgcttagaagctatattcaatttaaaacatcacatgcatactcaatgcagtcacattttcacattaggagaactgcaggaaaacagattcaagattcaaggtcacacctatgtgttgttttctccaagttgtagagatgataatgatacccacatgtccagactaggtgaggacagctccagtttatgtctgtcaacctgacataatttttaataggcccctttttattctcaaaaatagtctggactgggccgggcgtgatggctcacacctgtaatcccagcactttgggaggccaaggcaggcggatcatgaggtcaggagatcgagaccatcctggctaacacggtgaaaccccgtctctacttaaaaaaaaaaaaaattagctgggcatggtggcgggtgcctgtagtcccagctactcgggaggctgaggcaggagaacggcgtgaacctgggaggcgaggcttgccgtgagccgagattgcgccactgcactccagcccaggcgacacagcaagactccgtctcaaaaaaaaaaaaaaggtctggactagtccactcccaatggacctactcccacaccccatgcagtcacttctcacagtgagtttgggatggtcagagacacaaagtcatcggggaaatgtgacagaagtgatgatataccagttctgggcctacacttcaaaaagaactggcagtttctgtttccttcctctgggaatgtttgccctgaaccactgcataagccatcaggtcctactgcagacctcactggaaaaggagaggtcgtgagactacacagtaaccaagaaaaaaggcccagctgttccagatcacagtggagcaagcagatgacaccggcccccattagcccagaaccacaactgcccacctgaacaaatcctcaaataccagcagttgttttaagccattaaatctgagtggttcggtgcactttcctatgagggagaaggggacttctggaattc

SEQ ID NO: 203174 - DNA, 1000 bp, Homo Sapiens
tttgggagcatctctggctccaggaagaacccaccgagcggcgccaagcaggaaggctgggggtgtcctaggtcgggttccccagaaacaggcccagagccgaagaactgtgtgaaagtggctatcaggaagtgctcccaagagaaacgcatggtgaagtgggggttggagcctggaggggaaagagatcagagatcagaggtccaatatcaggtgaagtcccctaagggtaaatttggatctgtcggttgtttgtttgtttgtttgtttgtttgtttgtttgtgacagggtctctctctgtcacccaggctggagtgcagcggcacaatctcagctcactgcaacctctgcctcctgggttcaagcgattctgctgcctcagcctccagaacagctgagattacaggcgcatgccaccatgcccagctaatctttgtatttttagtagagatggtgtttcaccatattggccaggctagtcttgaactcctgacctcaagtgatctattcgcctcggcctcccaaactgctaggattacaggcgtgagccactgctccccgcctgggtccgtcttaaagggagcttgaggacaatgtaggtctcacctcaattatcccaatcaggagtggggagctaggatatttacaccccaacacccagcttcactggtcaaggactgaccctggagacccttcatggtctctgcaccaaacaaagccagctgtgccagcctgaaccaccagctttgggggatgcgcttctcttgtcctgaccactctttctctggaggtgtgagaggccccctctggcagaagtgctggtctcaattgaggccactgtgcagcctgatgtttctagggattttcagatctgaaaaaagcccaagataaaaaggtccaagatctgaaaaaggtccaagataaaaaaggtccatagctttccaaagctatggaaacctcgtcatcaatgccttgaggtcccccgaggaggtagcacca

SEQ ID NO: 203175 - DNA, 1000 bp, Homo Sapiens
gtgtttgatacatgtcatcttaacaaagatgcataaaatagagatttcataaactaacaaattatcacagcacactagaatacatactattgtaaataaaggcatgtagtcactgaattacattcattcaccagatatttcttgaaaacttcctatgtacaagctctgccccaggcgtgggggatacatctgtgaataagacaaatgcagcctgtgccttctagggctcaagtctagtggaggaaggcagacacataagcaattaccatcagagctccaacccacacaaacatttttaaaaacatattattgtagagacaggttctcactatgttgcccaggcttgtctcaaactcctggcctccagcaatcccctcacctctgcctttcaaaacattgggattgcaggcgtgagccactgcatctaacccaaaaatatgtttcaaaaagaaaaacaaaatctaaaacccactgcctctgaatctgtactatattctttggaagctcctcacaggtgacaaattagcattgtcttatatacaacccaaagccctctgagcagagcttgatgaataagtggataattaatatcttttttttttttgagacagaatctcactctgtcgccaggctggagtgcagtggcatgatctcagctcgctgcaacctccaactccctggttcaagcgattctcctgcctcagcttcccgagtagctgggattacaggcgtgtgccaccatgccatgcccagctaatttttgtatttttggtagagacagggtttcaccatgttggtcaggatcacaagctcctgaccttgtgatccgcaggtgcagatagaaaagaaatcccagattgagtgttgtgctgtaatcctagaaaacaatcgatcaaatcagaacagactccatgaataaaaagaagagattccaaccagaaattaatgtcagaaatttgaaaagggaatatcatttcagattcttcagcaccaaaagatc

SEQ ID NO: 203176 - DNA, 1000 bp, Homo Sapiens
ttggaaaacagtttatcatgatacagtaaagttgaagatgaggcagtcctgtgaccatcagtttcatttctaagtatgtactcgactgaaatatatccacatatgcaatgggagacatgaatcttaatgtatatagtagcattacatttggtaatttcaaattgaactaactcaaatgtgtgtcaccaagaagtgacaaagaagtctttgatatttgtacaaaggactactgtacagtaatgaaatgtaacaaatgacagcttcatataacaacatgatgaatttcagaaacaatgttgaaggacagaagcaagaccaaaagaacatataccgtgtgcttttatttatttaatgttaaaaaataagcaaaactaaagtgtagtgtttagggatacatacttatgggaagggtacaggtgattaaaaaagaaatgaacacttaaaaatttattacacattaattatatgttatatatggacatgtagtttgtatcaaattacagatttcccctcatatttctcaatatttatgcaatgactcttcagtccattcttttttatggggaacttagtgacaggggtcacatattcaaacaagctaaagaagtgttttttttctgcccatagccaacaggagttctcagatacattttctacttcattttcatcacatatcccttcagttccttaatcggcatcttctctgacacaggactgttaattcggtttgaaatattgactgtggatgagtgattacccaaatctcttgggatgtcttgataactctgtgtttataacacctaatatgttcgtgaagaaatgaaggactgcatttggactgtcattggtgataggttacaaaggatttgggctaaagtagacctcaggattgatatatgccttggggatagtatggaacattagtaaaattataaaaataattgtgataattcctttaaaaattgtttgtttgggtcaccattctgaagactgggaattc

SEQ ID NO: 203177 - DNA, 1000 bp, Homo Sapiens
gcctgtaatcccagcattttgggaggccgaggcgggcggatcacaaggtcaggagattgagaccatcctggctaacacggtgaaaccccgtctctactaaaaatacaaaaaaattagccgggcatggtggcgggcgcctgtagtcccagctacttgggaggctgaggcaggagaatggtgtgaacccaggaggcggagcttgcagcgagctgagatcactccactgcactccagcctgggtgacagagcgagactccgtctcaaaaaaataaaataaaataaaataaaataattttaaaaagtgttgtatatatttacatatatacacatagatacataaaggaaagacaggcaggaaccacatgccatgctcaagatctagggctttctcttctaagcaaacagtgaagctccagagacacatttttaggcaggtaggtgagatcagagcttccttctggaaggaaataaggtaggtcagaagcgaggcccactttcccttcccctggttcacagagaggtaacagtaccagcaactacccaatctttccatctgtaaggattggaccaaggaccctctcctgcaccactctcacgctatggcccagtccgggcaatgctgcctctgctcattctctcccacctgtccacaccttcccagccttgcctcctgtgcattggttaagtcacagttctccagccctgctaatggtgcataaggctcttctgtgacctctgccaccagcccatggccctccacctttccaactccacatcaaggcaaaatgctcacaccactccccttcattcacaccatttctgggacatattatgccccctaaggcatacgaagtactgagggctgtgtatgtattcaaatagtcactgaatgcctgacagtcactcaggtaccattccaggtgctgaggacatgacagcaagccaagcaaaaggaaaaaagtccctgccttcacagatgacccaatgcagccaggaattc

SEQ ID NO: 203178 - DNA, 1000 bp, Homo Sapiens
aacattctttagattactgttctagcagaactggtgcagtcttagttgataaaacatcatcattcaactgcctcatcctaattaaagaacatatagcactgcaattaccatctgtaacacagcactaaaattttctttttaaagtatcctttttattagagtcaaaataacagctaatctgaggttaaacacagtgctcctaaatttattatccacatatgaattttcttatataatatgacttacgacacttgtaaagcggcatttatttccttgagtagctcgttagtcttattaaaatctgcccgcatgatatttttctctctgaggtggtctgctgtcatgacatccaactctttttcaagtctcttgtttaaatcttgttcatgcaacctgtttgatttatttttagttaagaaaatgttattctgaagtcaagctttcaaaactttctattattctaccagatttgaaatggtttttggtataatatatagaaaatttatgtaaacagcctaaattaagctacttactttctgctataagcttctggctttgttaaagttgtctcctttaatgctttttcaaataacattttaaaaagaattcagttaattatatacaatttccaaagtgaatgaatacatgttacatcattcaagatataaacatttcatctgtgttctagattataacatagtcatcaaataaagtaaaaagaggtcttcaatattttactagagagccagtctagtcacaaaattagcatagattactaaatatcagcacaacagtttttcagatgacactgcatattccttctgttgtacttaatggcataccttatctgttggttagattcacttcgtattctgagaatttctttccccttaaattccagttctttggttagggcacttatattctcatgaaggtgctgaacctccttatccaattcagagatgtgatgctctctgtgtcttaattcctcttgtagatc

SEQ ID NO: 203179 - DNA, 1000 bp, Homo Sapiens
aattatccatattttcattaactcgaatgtttaaaaatatatattaatattttacagctaaattaaatcctctcatttgggctatgtattgaatccaaatgtagattatacatattagtgtgacaggagatacatttctattatgttgtcaacatcctaatcctacacagttatcagtgggattccatgtcattaattcattaagaaaaaagactgaaaaacttcgactaaaatcctacctctcctaccaccaactgaagtcaaaccctgtcgccaaatagtacaaagatccaaatatgttttatgtagcattcttgggaatttctctttagaaagttttggtggggtggagggggaaaaaatgacacaaatataaatggactcgtcaaatttatcaaattatcaaatttgtttatcaaattatttttatattttatactattaatatgcttattaacatgtttgtaccttcatgtgttaataaatttgctcttattttgagcctattaaccattttaagcctttcacgttgtcatgtaaacctttacctaaactagaatcataaaattttagatttagaaatgatccctttatcttaaaaatgagattcagagaggtcaagagacttgccactgcacgtaaagcaagagcctcatgtaacctagcagctgttgtaggcactactcaatcaccatgtactttaatcttaagggagagaatttcccatcgatttttttctgaattatagatacaaatgctatattttaagactattctttcaagggaaagaaaataagacagacttttaaaagttccctcaatagaaagaatgacaagagttactcaaaggagccaagtcttatacttcattaggtgcagcatctggcagacttgggccaggatcatgaatgcttcaaagccatgacacagaataagggaaaaagactaaagactaaagcctggaaaagagaaagaggcctcagcaaatactaagagaact

SEQ ID NO: 203180 - DNA, 1000 bp, Homo Sapiens
ataaacgtactgcacattgtttgtgctttaatgtacccacatgcctgccttttgtcaggttcaaaacaccagatccaggagataagtaaagccaagaccagcgctgcccaggatggagacacaggtgcctacttctccagtggtggctgcggcgaaggcagaagtgagagtgccccctacagaatacatcagggagaggcagcctggggtatcagtatgagcctaggcaaaggccatccattcattcactctgtggacaaccatttgtggaacacctactgaggtgtcaataagacaaagatcccatcttcgaggaagcgagatcagaataacttcctcacattacacatctggagagcaaccagtttttttcctcccggttttccgtggttcctcggcacactgtcacaactgcagccctaggtaggaggtgagacttggctaatggtcttccttacatccagacctccacttccctcttctactggtggagcagctggggaagggcaggatgagaattgggggagttggctctactcttcccaaggtcttaggactcaatgggacgcctctggatagttcccagacatgttgggtggtgtggcaaggagtgttaatgatttaatgatgcaattcaattatgccaggctgttaatgagctaagtgcagtatctttattatgcatcaaatactggaacacattaagtacctgtagtgtctcaggtcttccccacatgctacattaaaatcatgattctataagaagctcataacccctgcttgtctaacttcttcaatgatctgaccttaaattgatctgtaaaaccaactgtgacctttatcctagagcttcaagaaagtggcttaataggggattacaatattcatgtttcatgtcatcccaggaatggtctttggtccttattctactgcgttctcactgtagggaaccactgtagattcctaccacaccactaattccagttctggaaatgaattc

SEQ ID NO: 203181 - DNA, 1000 bp, Homo Sapiens
tattacttccaaaaacttttctgttcctcctagttgattgagactgtctcaattgacacatttttaaaatcgaccgtgatgccttcattcacctggttttcatagtctgttttaaatatcggatcttttaggaattaattatccttttgataagaaacttttatctgatgtttaacaattctttgtttcattttattttatttttcttttaaagtcaaatacaattaaatttaacatatcatacaggtaaaaaagatgaccgtatttaatgaaattgtttctgtatagtgtttgtttgtttgagatggagtcttgcactgttacccaggctggagtgcagtggcacaatcttggctcactgcaacctccgcttcccgggttcaagtgattctcctgcctcagcctccatagtagctgggattacaggcaggtgccatgatgcctggctaatttttctactttcagtagagatggggtttcactgtgttggccaggctagccttgaactcctgacctcaagtgttccgcccgcttcggcctcccaaagtgctaggattacaggcgtgagccacggcacccgaccaaaagtgtttgctgttaagccatgagccttggaatgtgcaggctggtggcatgggtcggttgcagactcagccaactctctgggttggagcgacagctgcatctgattgtggctcctaattctttgtaggatgttaccccacaaaatttccttgctgtgttgagaggcgatgcagaagcagtgaagggcataggatccggcaaagtcctgaagaggtaatgtctgtttatggatactacacttctctcaatggcttgggacccccgtatagagaattgaaacaggtgttgttctgtgcccctagcctgtttacctgtgagaaattacagagtggagagttttgttctgacttaggacaggtgcttagggctgttgtttcagtggcttctcttggtggcccatttctgcactgaattc

SEQ ID NO: 203182 - DNA, 1000 bp, Homo Sapiens
agtgccaaatggagagctttcttatacttccaaggccatagaggggccacaaacaaattctgcttccacatcctcacttgagccttgtaatcagagaagttggaatgccaaattgcaattgcagtcagaaacatccagttcaccagcttttactcagagcagtgaatcctctgttggctcagacaacatcatgtctccggtgccacttctttcaaaacacaaaagcaaaaaaggtcaagcctcctctccaagtcacgtcactaggaatggtgaggttgtggaggcctggtatggctctgatgaatacctagcactgccctctcaccttaagcagacagaagtattggctttgaagttggaaaacctaacaaagcttctgcctcagaaacccagaggagaaaccatccagaatattgatgactgggaactgtctgaaatgaattcagattctgaaatctatccaacctatcatgtcaaaaagaagcatacaaggctaggcagggtgtctccaagctcatctagtgacatagcctcttcactaggggagagcattgaatctgggcccctgagtgacattctttctgatgaggagtccagtatgcctctcgctggcatgaaaaagtatgctgatgagaagtcagaaagagcttcatcctctgagaaaaatgagagccattctgccactaaatcagctttaattcagaaactgatgcaagatattcagcaccaagacaactatgaagccatatgggaaaaaatagaggtaaggtggttttcttaacatgaatgatttctcacttgagttttggaagtattgctgggagaaggtcacactcctacactctattataaaatgtatggctatttttgataaatctgattctccaaagaaagaaaagaaaaagcacaatgatcaatgcatgtgacaaagagtatgaatcactaggaattgcccttgtcagtgcattagcttgatgtgctcctgcctggtatagaattc

SEQ ID NO: 203183 - DNA, 1000 bp, Homo Sapiens
acaccactgctctccagcctggcaacagagcgagactctgtcttaaaaaaaaaaaaaaaaaaaaaaaaagcacctgccacctgctatgtgccagccactgtgtagatctgaggagatggaagtgccatcttggaacttgtgtgttagtgctttaagatagaaagaaattaatttcttctttttctgcctttgaagtgtaaatagcacatagccagcaactagggaaaacatttgtttactgagatattaattgtatcctaatgcttcctaagttgctggctctttatctgctttattccaagaagaggagacttctgccagtgtatagaagttgacttgaaggagaacctaggagatagtgaaattgctcaccagtcatggtcatttcagcattcagtgggctagatagaagctagtggtggtaaaacatattgctgttggcccagcgagctctccagatactcattcaaagaagtctgctcacttttttgccattgatgcaattcagtcctttaaaaatgtaatcatccacaaatacagtgacaatgtaaattttgtcttactaacggtagaattagagaccacagagcctttaaagaagcaaaattcaggggattggttttattattgttacgttttatcattaacattagataatttattttaaatttttattatagtcgagaaataataaaagtgagataaaatgatgtagtaaacaaaggagaaaatttttatttcttttttgttgttgttgtttacttttttcattcaaacagattctgacagatatttcttaggtagtatatagccaaagtagacctggacataattaagtaattctatcagttattcttttactttcaaaaggaagagaaaggtacctttgagttggttttcagggccacgtttcaagccagagacattgctatgaaggttaaaggaaaagatattttttcctgcttttttcccctttatagtgatagctattttaaagctt

SEQ ID NO: 203184 - DNA, 1000 bp, Homo Sapiens
ttattcattcaataaacacttattccacacctcctacatgccagacactgccagctctcagtcacaactgaaaagattgataataaaaccagaaaaggaaccttatgcccagagtctttcaaagcatttggccacctttgatactcatgggtctttcacagactatgctctgtccaaagcaacacctttcctgctaaccagagcaagccataatcataaatctctacctttaaaactatgtttattatactacattacacaaaaactctcttcattaaaaaaaaaagagagagagagactctctagaagaatatttaagatgcaaaccagaaaagaaaaagtaatgagtaagaagcgatactatagtaagaatcagcactgttttaaatacacaaagaattcctttcctgcctgaaaggagggtttccctcagcaggtactctaagcagcgaagatgagagggggcactatcctagacagcaagaatacaatcgtaaatggacatggaatattgaccatttccctgacctcaaagatggaaatatcatgacaactgtcaattaccaagcgcctatcatgtgttagctgctactctaggcatttcacatatatcacctctaaaatgaatcctgcaaggtagacgatattatcaccactttacagacaagcaaacagaggctgtgaggtcatctgtccaaagtcactcagctcacaaggaaaattcactaaaattctaagatttctgcctagctcccaaacctatccctcttttcataactctaccctgctgaacatgcaatatctctgtgtctttatcttcagtctccctagcttcccatgtcacttctgtatttctgacctggccatacctccgtacaaccctaagcaagcccacctgcaaaactacttagagaggggaaaaaagaagaaaaaaataaatgtcaaaaatgttaacagatgggagaaaataaacaactatacgggacactatctcaagctt

SEQ ID NO: 203185 - DNA, 1000 bp, Homo Sapiens
cttagggaaaatagaaaagaacctatgtgaaatattgggggtgaatttccccccaataaagaggttctgttcttatgtatttccaggatttgtttcaagacatatagctccttttagcagttgttgtagtggtggcttggtagtggcgaattctcttcagtttttgtctgtctggaaaagtctgtatctttccatatgtggcacatatacaccatggaatactatgcagccataaaaagggatgagttcatgtcctttgcagggacatggatgaagttggaaaccatcattctcagcaaaataccacaaggacagaaaaccaaacaccacatgttctcactcataagtgggagttgaacaatgagaacacatggacacagggagaggaacatcacacactggggcctgttggggagtggggggctgggggagggacagctctcaagattcttcccttcctcttaactttaaacaaccttgtgacaacgtgcctaggtgatgattttttttgtgatgaatttcccaggcttctgtgtgcttcttgtatttggatgtctaggtttctagctaggccagggaagttttcctcaattttttccctgaatacgtttttcaagcttttagatttctcttcctcaagaaccctgattattgttacttttggttgttcaacataatccaatacttcctggaggctttgttcatattttcttattcttttttctttgtctttgttggattgggttaatttgaagacctgtctttgagctctgaatttcttctactagttcaattctattgctgagactttccagagcattttggatttctataagtgtgtctaaagttgcctgaagtcttgatttttttttcattatgctatcaatttcattgaattttgtcccttcacttcttgtatcatgttttgggtttccttgcattgggcttggcctttctctggtgcctccttgattagcttaataagtaacctcctgaattc

SEQ ID NO: 203186 - DNA, 1000 bp, Homo Sapiens
caaggtaccacatttgaaattctgtctactgttctgcctaagaaaaaatacaatattttctcaacatcatcaaatcctgtacagggtgctggagagcaagaaaatcaaaggctcaagaactgcccatgtctttagtccgtcttcctttcctcatctgtttcctgtatattttaatttttcctgttttattttctacaatcaagaagatttctattatagaaataaagtttatttgtttcaatgccatgatacagatttattgtccctggaaatatcatgcttagaaatgaatcacagacaaagcccatgctctggatcaacacacatgtgtaattatgtaggaaaaaaatgtatatcaggaaaggttgaatgctccaggcatgagaaataaattgacctccactcaacttactgccatgattatacagagggaaggacctggatctgtttcacatcataaacgcctaaattgccagagcagcacaagcccaggagtggccatgcaaactcatgatggaggtgctaaggctgtccacagcccaacctctgcagcagtactgttaaatgagtgtctagtacttgacttaccattttaatttcacataattctgaatgtatttttcggcttgaattcaaataacccacttctaactaccgaaaataaagtagaaaaatgaactcactaccagacttcaaagcttatccaaagcaaagatttcgtcttacagccagaggtgcatgattgcagagctggatgtaacctgagaggctaactactcctaattcagcctccttgaatgactggatgatgcaacctatcacaggtgttttaggttttttcatctctatttaatgtcccacctcatgcttgaaaatctcaaagtgaaaaagctccagtctgagtctttgggcaagcagactaactgaaatgacctgttagcctttgttgtatccatctgacaagatcagcttgtagaatccagaatggaggtgggagatc

SEQ ID NO: 203187 - DNA, 1000 bp, Homo Sapiens
ttgttctttcttgttttattattagttttttctgttgccaagcttttttttctttcaagaatagtcacatgttgagatcactgaattggtaaatttgaccgctactcttccaaaatacatcatttgctgcctgacttagacctaggattctgagttgttcattgggaggttctgaccagtcactacaaggtttatccatggtagcagaacctgagtccttctgtagatggacttgaaagtgttccgtgcaacatccagccttctggattatgaaagcccacagtctaacagtattgaaacatcctgctgtattagttcaaccacatatttatctcttcctgtgctaaagcagtctttattattttcatatttaattgaaacaaagagcagctagcaatttcatagaaaattaatttgttttttctgatgtgtctgcaactgtgtataatacagacatttcacattgtttccaaaagtgaagaacactcatttaatatcttcaatgttttaagttagaaggggtggatcttttcctttggttggtgattggtttggtttatacttgatgagttatgctagactgattgtttagagagagcagtctctttattacacaggctcagtttgttgggatgctcagggaacagagttttctggttagccagaaaacccctttttttcctattttaattctggttgaaaaccatgataaaatagactttcttagcacagtatggtagatataacttaactgctttttgattggggatcatttagggcttcaggatcacgatttctaaacatcagggatcatatggttgcagatgccgatgctataagtaatttggccggatgcagctcctaaggtaaagcagggtactttccctggaatttcctttttaaataaatatctgtttctttgctaaaaaaaaaaaaaaaaaaaaaaaaaaaaaaaaaaaaaaaaaaaaaaaaaaaaaaaaaggaaaaaaaaaaaaaaagg

SEQ ID NO: 203188 - DNA, 1000 bp, Homo Sapiens
ttagattttataataatttaggattatttgactttctgaagtatgtgcagggatacatttaatgaaaacgatagcaaaatgagaaacttaaaaacagaaagctaggactagttcaggttgatgaatgatttttaaaagcttatagacatctggaattacccataaagttatttactaaatgtttatttggttgcttggttattcaatgggcattagtgtaagaaatcttgctttcaagtttattgacagcataagtaagtactcaatcttcactttttaatatttacttaacagtattcaaagcatatggtgcaagttgctcaacttatggattccagcagctattgtgcaacatataactacatcaatggcaatgatatctatttgtttaaaaacccgttgggtaagtacaaaaattagctgggcatagtggcattcacctgtagtcccagctactcgggaagccaaggtgggaggatcacttgagcccggaaggttgaggctgcattgagccaagatcgcgccactgcactccagcctgggtgacagagcaaggttctgtcttttgtttgtttttgttttagttttttgagacggaggctcactctgttatccaggctggagtgcaatggcatggtctcagctcactgcaacctctgcctcccgggttaaagcaatcctcctgcctcagcctcctgagtagcttggactacaggcacgtgccaccatgcccagcgaatttttgtatttttagtagagatggggtttcactatgttggccaggctggtctcaaactcctgaccttgtgatcttcctccctcagcctcccaaagtgttgggattacaggcgtgagccactgtgcccggccaaggctctgtcttaataaaacaaacaaacaaacaaacaaccccctaccccaccaccaataaaaaccactgggtagatttaaactactctgctaaagataaacttttctcctgaaaattataaaagaattc

SEQ ID NO: 203189 - DNA, 1000 bp, Homo Sapiens
tcagcttctttcattgacttgagaccttcatgacatcctcttcaattttcaatctaaacagaagagctgcttcttatccgattttttgccccaaattccccactatattagggtcgatttcttttttaattagatcccttattagctttgtttttctgaaaataaaattttagtttgaactacatgaaattgccatttgcataaatcaaaattggtcaaataccagcattttaaatggaccatcctaatcacaaaacataaaaataaaaataatacatgtaatattatctctacatgaaatagagaaattttgaagaattcaaaatgtatggtggtaaaaataaaaatcacttatttcatggctggtcatggcggctcatgcctataatcccagcactttgggagtccgaggcggtcagatcacctgtggtcaggagttcgagatcagcctggccaacatggtgaaacccagtctctactaaaactacaaaaattagccgggatggtggtaggtgcctgtaatcctagtcactcaggaggctgaggtaggagaatcacttgaacctgggaggcagaggttgcagtaagcctagattgtgccactgcactccagcctgggcaatagagtgcacaaaaaacccttcaaaaaatcaatgaatccaggagctggttttttgaaaagatcaacaaaattgatagaccgctagcaagactaataaagaagaaaagagagaagaatcaaatagacacaataaaaaatgataaaggggatatcaccactgatcccacagaaatacaaactaccatcagagaatactataaacacctctacgcaaataaactagaaaatctagaagaaatggacaaattcctcaacacatacaccctcccaagactaaaccaggaagttgaatctctgaatagaccaataacaggctctgaaattgaggcaataattaataccttaccaacaaaaaaaagtccaggaccagatgaattc

SEQ ID NO: 203190 - DNA, 1000 bp, Homo Sapiens
cactccaggcttggagtgagaccctgactcaaaaaatacattaaaatttaaaaagacattgaatgagatcccaagaaaaataacaaacaggattttgttttggatctctatgagccatgtctaaagtcttatggaaaaattaataagaaaaataaccaagaactttctgaaaactcctgaccaaatagcaaacatactattggtaaagcattaccaattaaaatagttagatgctagtgcctgattagttccacaatcaatggaagagatatttccagatagacacaaacacatgtatgaatttaatactcagtaaaagtggtatttcaaggctgggtgcagtgactcacgcctgtaatcccagcactttgggaggccaaggtgggcggatcacttgaggtcaggagtttgagatcagcccggccaacatggtgagatcccatcgttactaaaaatagaaaaattagctgggcatggtggcaggcgcctgtaatcccagctactggggaggctgaggcacgagaatcgcttgaacccaggaagtggaggttgcagtgagccgagatcacaccactgcactgcagcctggccaacagagcaagactctgtctctaaagaaaaaaaaaaggccgggccggtagctcacacctgtaatccgagttctttgggaggccaatgccaggggatcacaaggtcaagagatagagaccatcctggcaaacatggtgaaaccccatctctactaaaaatacaaaaagtagctgggcgtgatggtgcccacctgtagtcccagctactcaggaggttgaggcaggataatcgcttgaacgcgggaggcggaggttgcactgagccaatatcataccactgcaactccagcctgggcctggcaacagcgcaagaatccgtctcaaaaaaacgggccgggcgcggtggctcacgccctgtaatcccagcactttgggaggccaaggcaggcggatcacgaggtcaggagatc

SEQ ID NO: 203191 - DNA, 1000 bp, Homo Sapiens
gcttcctgggaatggttcacacagttgggtgggctctgagatcaaggtgtctgcatgattcctggaaagagatgcagagtaggcatccctaacctgggccaggtgcctcaaatcataagattttaggacaggaattgtgtgctctggttcttgagaagaaccagaagagtgagaaaggatgcagtgatgcacaccaacacctccacaagggaaacacgtgaatgtgcctgtccttaggacagggcttagccgggccccccgcgcaaaagaagttcagcagcatgggtagtggaaatcagacaagcagccctgccctgcatgacagacagcccaggctctccatcagaagctgcaaaagtcctaatcactttccccacaaagtggacatggaagtccttcttttttttttttttttttttactttttctttttcaaattattctttcttttttgagacagggtcacactctgtggcccaggctggagtgcagtggtgcaatcatggcttactgtagccttgacctcctggactcaggtgatcctcctacctcagcctcctgagtggctgggactacaggtgtgcatcaccatgcccagcttttttttttgtattttttagtagaaatgaggtttcaccatgttgcccaggctggtgtcaaacttatgggctcaagtaatccacccacctcatcctcccaaactactgctgggattacaggtgtgagccaccttgcattttcttttttgcctttttttttttttttttttttttttgagatagggtctcactctgtcgcccaggctacagtgcagtagcatgatttcagctcactgcagcctcagcctcctgggtctaagtgatcctcccacctcagcagcctggtatctaggaccataggtgtgtgtcaccatgcccggctaattttttttatttttttgtaatgacagggatctccttgtgttgcccaggttggtctcacactcctcagctcaagcgatc

SEQ ID NO: 203192 - DNA, 1000 bp, Homo Sapiens
tggcttcctggacctgctgtcttcatgtctgtcttcacatctgttccaaggctgccccagccccgcttgtttatccttcagggggtccaagtgggtgtttcaacttcaattatgctctgactacagccaccacagataccaaaacaaacgtcctgggcgtcagaggtggtggaggctcagacaggctggtgccagggggcctgataaaggggggtctgcttgggcttggaggtgatgagagctgctcctagtgatagggccctggggagcaggggctcgtgggtaactggcctcctcaggtaggcccaggccacagaggggacagtgtcttggtcttagtacctctctctctgtctcccagcttctctccagtctcatgtaacagaagccttttttttttttttcagtggggacgtgacttgtaaaagccttccttcttcccagctgctggctaagtctggcctcacctccagaggacaaagatcttgactcctcaacccaggccggcctattgagatctttttaaatcccctctcagaccttgtggtcagtgtctgaggatggtagcagaagtcagggatcctggacccagctctgttggattgtccctgtgacttggagtgtggtctttgcacaagctgtgctttggtttcccctctctaggtcaattagcagaacacatttcccagtctgattgcccacaagggagaaaaattcaaaccttccaggctccctggagtccctggagaatacaacgaggtgtctcagggagcaatgggaagcaggacgtggtgcctgctaatgagtgggccctgatttccgtctggagcatcagaggatggaatgccaggcatccatgactagagagaggccccagctcccattgatctctgtggcaggaaccaggagacccagcagaggccatgctcagcagcccctccagctgcgcttctccttagtgggaaggagccctcttactcactgcaccctctctgaattc

SEQ ID NO: 203193 - DNA, 1000 bp, Homo Sapiens
gaatggaatggaatggaatggagtggaatcgactggaatggaatggaatgaaatggaatagaatggacttgaatgaaatagaatggaatggaatggagtggaatggaatggaatggaaaggaatggattcgaagggaatggaatgaaatggactcgaatggaatggaatggactagaaaggaagggcatgtaatgtaatagaaaggaccctaatggaatggaatctaatggaatggaatcgaatggaattgaatggaatggaattgactcgattggaatggaacacaatggaatggactcgaatgtaatggaatggattggaatggactagaaaggaattgaaaggaatggacacgaatggaatagaatgtgatggactcgaatggaatggtgttgaatggaatggactttaatggaatggagtgttaaggactcgaatggattggaattgaatggattcttctggaatggaatggattggaatgaaatggactagaatggaatggaatggaatggaaccgaacagaatgaattggaatggaatggaacggactcgaatggaatggaatggaatggaatggaatgaaatggaatagaacggactgcaatggaatggagtggaatggaacagactccaatggattggaatggaatggattcgaattgaatagaaaggaatggaaaggaatggacttgaatggaatggaatggaaaggcatagaatccaaaggagtggactggaatggaaaagaatgtaatggcgtggaaacaaatggaatggagttgaatggaatggacccgaatgtatgtcatggaatcaaatggaatcgacacaaacagaatggaatggaatggaatggaatggactgggatggaatggaatggaatggaatggaatggaatggaatggtatggaaggaaaaggaatggaatggaatggactcaaacggaatggaatggaattgaatggactcaaaaggaatggaattgaatggaattc

SEQ ID NO: 203194 - DNA, 1000 bp, Homo Sapiens
acagtctgacacttcctctcagcctggctagcccagggtctggcctaacacactcaaaaacggctgatggcattccattcctgtctgcagcatgaatacagccagttaactccttagcattaggcaggagttccccatctagttctcttgtggtctttaagcatgagatgaataggaattggaaatttctgatttacttctaagccaacacctacctagaagcgatctccctaagtggtttccttaaaaagttttaacattgaaatacttatcttgggaatcagtgaccattcattcacagacaggcctctgtctgctgcccaggctggagtgcagtggtgcaatcacagctcacacaacctcgacctcccaggctcaagtgaccttcctgctttagcctcccgagtagatgggactacaggtgtgcaccgccacgcctggctaaggttttattttttgtagagatggggccttactatgttgcccaggctagtaactttgtgttttttgaaagcatccctttaagcagcaaaacccaactttacattcaggtccagaaagaaaaccacagtggggcttacttgcaggtgtttcttcactccagaggtagggcacagtctgctccggggagctgctgtccagccagatgccaaattgctgtggagacaatagtggaagcacccatggagcagggctggcctctggggcagaacccacgactgagcgagagtctgacgcgagagcgcagacacaacattctgggttttataccacatgcaattccttacatttcctgggaaaaggccaacatttacctactgggaacattcaagagaacaatcacctcgtctgcctgaacctttgcaatcaagtccttaaacgcgggaaggcagctcagcctcaccaccgcctccgcctgctccacagtcaggccctggatcctgggggtggagccagcactcaggacaatctcatttcctctcaagaagtgctggaattc

SEQ ID NO: 203195 - DNA, 1000 bp, Homo Sapiens
agcacaggcaaccaaagcaaaaatggataaatgggataacatcaggttaaaaagcttcttcacagcaaagaaaactatcaacaaactgaacagacaactcacagaatgagaaaatatttacaaaccacacatctgacaagggattcataaaactacaatgagatatcaattcatctcagttaaaatggcttttatctaaaagacaggcaataacaaaggctggcgaggatgtggagtaaagggaatcctggtacactgttggtgggaatgtaaattagtacaaccactatggagaacagtttagaggttcctcaaaaaactaaaactaaatctatcatatgatccagcaatcctactgttgtgtatatacccgaaatcagtatatcaaagtggtatctgcacccccacacttgttgtagcactgttcacagtagccaagatttggaagtaacctaaatgttcatcaatagatgattggataaagaaaatgtggtacatttacacaatgcagtactattcagctattaaaaagaatgagatcttgtcatttgcaacaacatggatggaaccagaggtcattgaactaagtgaaataagccgggacagaaagacaaacttcacattttgtcatttatttgtgggacctaaaaatcaaagcaattgaacatagagatggagagtagaagatggttaccagaagctgggaagggtagtggagtggcagagggggaaaggtagggatggttaatgggtacaaaaatacagggctccccaaccaccacccctctccaaaatggccacagactggtactggttaggaaccaggccacatagcaggaggtgagcagtgaacaagcaagcattactgcctgagctctgcctcctgtcacatcagctgggcattagattctcacaggagcacaaaccctattgtgaactgcacatgcaagggatctaggttgtgcgctccttatgagaacctaactaatgcctgatgatc

SEQ ID NO: 203196 - DNA, 1000 bp, Homo Sapiens
caagactgcagtgagccgtgattgttctactgcaccctagcatgtgcaacagagcaagaccctgtcccccacaccccaaaaaagtttttcaaggaagcctaaaataatgaatctggcaagatagagtagaggccaggtgcagcggctcatgtctgtgatcccagcactttgggaggccgaggcaggcagatcgcccaggagtttgagaccagcctgggcaacataatgagaccatatctctaccaaaaatacaaaaattagcctggcgtgctggtgcacatctgtggtcccagctacttgggaggctgaggtgggaggattgcttgagcctgggaggttgaggctgcagtgagccatgattgtgccactgcactctagcctgggtaaccaagtgagatcttggctaaaaatgtttttaaaaattaaaaacagaaaagcagggaaatagtttagacaatttttggaattcagagatataggtagaccccttgtttctggaaaagtcagcatttttattctcttttcttttttttcgagatggagtctcactctgtcacccaggctgtagtgcggtggcatgatctcagctcactgcaacctccgcctcccgagttcaagctattttcctgcctcagcctcccaggaagctggaattacgggagcacaccaccacgcccagctaatttttgtatttttagtagagacggggtttcgccatgttggtcaggctggtctcgaactcctgacctcaggtgatcctcctactttggcctcccaaggtgctgggattacaggtgtgagccaccatgcccggtcagcatttttttattgaggtgacttttacaattttttttttctttaaatgagacacctgtcacccagcctggagtgcagtggtgtgatcatggctccctgaaacctcaagctcctgggctcaagtgatcctcctgcctcagcctcccaagtagctgggaccacaaatgtgcaccaccatgcctgg

SEQ ID NO: 203197 - DNA, 1000 bp, Homo Sapiens
caccaccacacctggctaactttttgtacttttagtagagacgagatttcaccgtgttgctcagattggtctcaaactcctgagcttaagtgatttgcccacgttggcctcccaaagtgttgggattacagatgtgagacaccacatccaacctcaacatatgaattttagagtgacccaaacattcagtccatcacagtctcctgcaggattacagatgtataatcagtctgtaatccacaaagttctaagcaaaggaaaagaagtaccaatatcactattgctattgttattatcagcacccaagaccttccccagtctcagtgagtggaatattaagatgatcccaaagacgctcgacttctctaacccgtaatactcacaggttccacccctttgattgtgggcagaacctgtgaatattatgatctgactgccatggttaccttatatgacaaaagggagattagcctgggtgggcctgacctaatcagagagccctcaaacaggactggctttttgttttttgttttttttttgagaccgagtctcgctctgtcacctagactggagtgcagtggcatgatctcagctcactgcaacctctgcctcccgggttcaagcagttctcctgcctcagcctcctgttggctcttactggccaaggagattcaaagtatgagagggattcagcgtgagagagattttccattgcaggctttggaggtgaaggtggccaatacaggaggcctctagaagctgaaagcagccccccagtgacagctaggaaggaaatggggacctcagtcctatggccacacggaactgaatgaccttggaagtggatttgtccccagatcctccagacaagaactcagccggaccaacatcttgcatttcagccttgcgatgagcagagaactcagccatgccagactctggaccaacacagctgtgagctcatacatggatattgttttaagctgctgggtctgggatc

SEQ ID NO: 203198 - DNA, 1000 bp, Homo Sapiens
gggaaagtgtttaattcttgcagccttgatagaaggaatgagtaaaggagaatggggttgggaatggctgtccattaagtattggtttaaatgtcacttcctccaggaagcctctcttgattccctaaaccaggtctgataatcctattacatgctctccttgtagatagtacctctctgtcatacccttatcaccacctatagttttttttttttcaatttttttttttttttgagatggagtctcactttgtcgcccaggctggagtgcagtggcacaatctcagctcactgcaacctccgcctcccgggttcaagcgattctcgagtgtctcagcctcctgagtagctgagattacaggcgtatgccatcatgcccagctaatttttgtatttttagtagagacggggtttcattctgttggccagactggtctcttactcctgacctcaagtgatccacctgccttggcctcccaaagtgctgggattacaggcgtgagccaccatgccctgtctaaaacctatagtttattaatttgcttgtataatcgattaataggcatctgtttcttcttggggctgggagtttagttcatgagttcactcctgtttctctagcccctagcattgtgcctggcacccagtagggcctcagtaactatttctggtctatactaactgctgccaagtaattcttcccggagcactgagggaccatgaccttggctggcccaggaccccctctgactcccaggggaaggacagacaagaacctcctttaatcaggtgcctccccagcagtggccaagccttgctctggcaagctttctatgccgcccaggtttctggaatgggtccatcagagtttcaattgcacctctgttggccacagcattgataaggagaggaagcttgtatgcagatcagttctgagatactgcacagaaaggaagctacttctgttgcgtcaccctgtgccctgggaggattgaggatc

SEQ ID NO: 203199 - DNA, 1000 bp, Homo Sapiens
aaataaagggtgataggagctatgatggaaacctgtgagagaatgcggttatggacgtaggcacaggactgagtgattctacctgtgtgtggggttcataaacagctctgcagtcagccgctgaggaaaagtttcccaacagcatgcaatcctgtggacagaaaaggaggggtggaaaaaaaagaagacacaaagattcactgaagccagatcatcaagaatatggaacaccatgcagggaagtttgggttttagcccataatcagtgaaaagccaccagagaagttttaccagtgaaacgaaacaacttgattgactaaaagtgaaggcaaggagactggttaggatactattgcaatagtcatgatgtgagttgctgggagtaatggggatggacagaagaggccaaaacatgttcaagaaatagaatcaacagtacttggacaccgactgaatatggggagggcatttggctaaggaaagaaaagaagccaggataactcccagctctctgggttgtgcatgtatggataggggagccagtcaccaagatgagagtgaaggagacagaaaaggttggaaaaaaacagagattaaattcattttgggatataatgattttaagtgtctctgggacagccagatggagatattctgttagtaactagagttagaagccagtcagaaacaatggagcaaggtcagggatggagattaaatttgagactcatattattatacatctgctcatggaaagcaataaagaggatgaaatcatcccacagagaatttgtagaatgagaagagagccaaagacagaaaccctgcagattcccaacattgaggggcaggtaatgaaaagaggaaaaataaaatctactgagaaagagtggccagagatgtaagaggaaaaccaagtgggtgtggcatcatgaagccaaagtacagacagaatttcaaaaagaagaggcagttcaaccatgttcacttctgagaattc

SEQ ID NO: 203200 - DNA, 1000 bp, Homo Sapiens
atgcctgccagtgggcatacagctgggtaggaggaagcctgaggggcaagagaactgagcagcatccacagtgggtatggagagatggtagaagtgattcacaaatcagggatttcaagaaagaaaataagctggaaagggtttagaaaacatttcgaatgaactcactgagcagagataatagctttcatataaagataaactaagtaattacaattctttaacccagaaaaatgaagctaacaatatggtaaaagttaaaatcatgaatgaaaagaatacatatgatgaatctaatatgtaaattttttaaatggatcggtgtaatagaaaataaaatattgaccgggcgcggtggctcacacctgtaatcctagcactttgggaggccgaggcaggtggattccttgaggtcaggagttcgagaccagcctggccaacatggtgaaaccccgtctctaccaaaaatataaaaaattagctcggtgtggtggcacacagctgtaatcccagctacttgggagggtgaggcaggataatcgcttgaagccaggaggtggagtttgcagtgagccaagatcgtgccactgcactccagcctgggctacaaagccagacttcgtctcaaaaaaaaaaaaaaaaaaaaagaaaatgaaatattgcaatcattcttctgacttccccttttatctcgtatcacagttttatttacagtttttccatttcttccttttttgctttccacacagggaattgcaacccagtgaagaagttacctggaagtaaagactggctagattatcgaatgttcacattttaaagttctgagagaaataaaaacatgaagaatctgaaatgtctttcttttcatacaaaggtagcccttctggtaacaagcatacttaaaaaataattattagggcccagcgcggtggctcacacctgtaatcccaacactttgggaggctgaggcaggcagatcacctgaggtcaggaattc

SEQ ID NO: 203201 - DNA, 1000 bp, Homo Sapiens
ttcctttacctacccaaccccccaaaagtgtttcttggatcagtttcaacttaatatttactatgtctttctatttcaaatcagtacactattgtatctactaccttattaacattccacaaggtacttttgctctgcatctattaaataattactggccttcttataatagtacaatggttttcaaacgttagcctgcatcagaatcaatcagaggacttattaaaacacaaattgcttgaccccccacccctagagtttctgatttagtaaagctgcaatgggtcttgagaatctgtatttctaacaaggccccaggtgatgcagatgttgtcgttgttgttggaccatagaccatattttcactatatgaaaatgcaattttaagaattattttttttctattcctctatataaaaaccgtggtacataaacttttgatattattataattagggttttaaataaaatagttttggcttttaaagcaatcaaaatcgagtcgtattgagaggttaacttcaactgcataaagtcatccttacacaatttatttagcttctggcttctatagttagtggttctttggcaaagttttacatttcttttatgctatgactgactgaaaaagtacaattgggaaggaagccatctcctgcagaggtgtgcttgtgttttgtttctttgtaagaacattgactacttatgttaagatatggatttttggagtttgggtgctgtcttaagtgttttagtaaatcactttgcgtttatgtatgcctattttttgtgtgatggtttgatattttcatattttttcataacagaaaaatagaaaaaatttcaccagaaaattaattcataaccaaataacagtattatttttaattccttggataattgatcgtggggaaataatttacatcacaaaatgttttgtatcctactgggctttcagttaatacaaaatgctaggctgaaaattcaaacctttgaattc

SEQ ID NO: 203202 - DNA, 1000 bp, Homo Sapiens
ttcaccatgttggtcaggctggtctcgaactccttgcctcaagcaattcactcaccttggcctcccaaagtgctgggattacgggtgtgagctacagtgcgtggccatttatttgtttgtttgtttgtttgtttgttttgagatggagtctcgctctgtcacccaggctggagtgcaatggtattatcctggctcactgcaacctccactttctgggttcaagcgattctcctgcctcagcacccccaagtaggtgggaccacagacttgcaccacaacacccggctaatttttgtatttttagtagagatgggtttcaccatgttggccaggctggtctcgaactcctgacctcaggttttccacccaccttggcctcccaaagtgctggagttacaggtgtgagccatcacgctcggcctatttgtttatttttaagggttgaggtcttgctctgttgcccaggctagggtgcaatggtgtcatcgtagcccactttagcctcaaactcctggtctcaagcagtcctcccaccttagcctcccaagtagctgggaatacaggtttttgccatcacatctggcttattttattttattttattttatttttgtggagacaggttttcttgctcttttgaccttgcttgtctcgatctcttggtctcaagtgatcctcctgcctcagcctcccaaaatgttgggattacaggtgtgaaccaccatgccattattgtattatctttttgatgtgctgttggatttgatttacttgttttttgttttggatttttgtgtctgactttattagggatattggtctttagttttctgcttttattatatctttgcctggttttggtatcagcatattaccggcctcataaaatgagttagagagaataaactcctccttaatttttttagttttgggaggacttgtatcagtatgttgtttttatatttggtagaatttggcgtggatttttcacggtcacttt

SEQ ID NO: 203203 - DNA, 1000 bp, Homo Sapiens
ggtaataaaagtggagaacgagcaaaaacaaatccatggctttttgacatgttcatggtctgtccttttttgtaaaatatttttctttaacattatagatcctgaaggggttcaactgtccaggcatacttcttcagtttagggatgcggaacacccagaaaagttcaggacaggctccggactgcagtccagggcagaggcgacagcacttgctgtcggcattccagtaaccagaggcagcaacagggcacacacctcagttctagtggacccagaaccacaccagactgtcccacggtgtctctttcaaaaattaaatatcttacacagattttatctataaagttagaagtttccatcatgtgtcaagatgattcttgcataatatgttgtgaaattttagtagcaagtaattttctgtttttcttttcaaaagtacttgagaaattgctatttcctattgcttattcagttattctctttaacatatttaattaaaaatggttttacttttaaaaaatattattggctattttttcgggtaaatttttaggggaaaaatgtcttttgtaaagatggcaaggtttccaacccgtaatgacttatgctttttcttgatctgagacttagatttctatcactgttgtagcaattgtttctctctgcctctttctttagttactcctgcctcagtaactcaagagatggagctgaaagattactctggattcttacctgtggaactgcccacatcagtactagtgatctcatctgagtttccttcttggagggttttccaggactggggctgcctggtgaagtaatagatttgatattaatttttatttacatagcacctttcttgaggaacacagagcagtctatgggcattattttaatagtccaggaggagttaagcaagcctggagagctgaacaataaagtcctgttattctaagcattatttaatatttttatgatttgtccttcaaagaattc

SEQ ID NO: 203204 - DNA, 1000 bp, Homo Sapiens
tttaattaataatacaatctacttcagaataatactttattctagtaaaatatgtaggaactttgctcttgtctctccccaccccatacattacatttaagtatgttataaacccaacagaatggccgggtgtggtggcttacgcctgtaatcccagcactttgggaggtcaaggcgggcagatcacctaaggtcaggagttcaagaccagcctggccaacatggcaaaaccctgtctctactaaaaatacaaaaattagccgggtgtggtggtgggcacctgtaatcccaactactcaggaggctgaggcagggagaatcacttgaacccaggaggcggaggttgcagtgagctgagatcacaccattgtactccagcctgggcaacagagcgagactccgtctcaaaacaaaaaacaaacaaaacccaacaaaacatgttacaattattttatacaaccattatctttttaaaaagttggcaaagaaatgagaaaaacatttatttattatattcacctacttaccatttctgttctttattttttcagtgaatttgatgttgctttccttcctcttaaaggggctttctttggggctttctttgttacttatcataaggcaggttgctagcataaagttctctcagtctttgtttttctggaaatgtgttcatctcacattcatttttgaggattaatgctacatagagaatctgttgacagtttctttctgtactttaaatgtcattccattgcctctggtctccattgtttctcatagtgatctgttaatttgtgctgttgttttcatgtctgatgaataatttttatcttgctgtcttcatgatgttccctttgcctttgactctcaagagcttatatatatatgtgttatttctttgtgtttatcctatttgagggtcattgaacttgagtgaatttgtggttttctatcagatttggtaagtttttgcccattattttttcaggtggaattc

SEQ ID NO: 203205 - DNA, 1000 bp, Homo Sapiens
agcacacattcctgatttaaaaagcactgaacaaagtaggaatggaaggaagcagcctcgacataataaaagccaggtatgaaaaacccacagcaaacatcatacttaatggtgaaagactgaaagcttcttttcttatttatttatttatttatttatttatttatttattgacaaagtgttgctctgttgcccaggctggagtgcagtggcatgatctctgctcactgcaacttccacctcccaggctcaagtaattctcctgtgttagcctcccaagtagctgggactacaggcacatgtcaccatgcccggctaatttttgtattattattattattattattattattattattattttagtagagatggggtttcactgtgttggccaggctggtcttgagcttctgaccttaggtgatccacccaccttgaccttccaaactgctgggattataggtgtgagccactgctcccagcctgaaagcttcttttctaagatcagaaacaattcaaggatgcttgctttcacttctgttcatcacagcactgaaagttcaaggcagagcaattatacaagaaaaagaagtaaaagacatccaaattggtaagaaataaaattatctgtttgcagatgatgtgatcttgtatgtagaaaatgctaaagagtccacgaaaaagctgttagaactaataaatgaattcagcatagtagcaggatgcaaagtcagcacacaaaaatcagctgcatttctgtacactaacagtgaacaatcccaaaaggaagttatgaaaacaattccatttacaatagcataaaaaatactttggaattaagttaactaaggaagtaaaaatcttggaccacaaaaactagaaaacatgatgaaagagattaaagaagatacaaataaatggaaacacatctcatgttcatggattgaaaaacttaacattgttaagttgtcagtactacccaaagtgatgtctggaattc

SEQ ID NO: 203206 - DNA, 1000 bp, Homo Sapiens
agagttctctcaggaaacgggggtagcaggtgccagtaagccccaccctgctcccatgcacttggcaaggcagttctcatacctgcagtgttctgctagcagcaactaggtaagtttcaggcagtctacactcaaaactcaaaactgccccaggccatatgccttcacaggggagacaacaaccttggttttcaggccattcccctcccagtttgctcaaaaagccagggtatccagctcctccagacatggctgcagcacacttcccactctcccccacattctggcctctctcccccacaattctggcaagaggagttcatcatcactcgagattatattgcaaatttcagttgggagtttctctcaaactacaaccactgcctgcgttagctagcagacttccataaaatctcctgtgaggaagaatcagaaatggcttcccttagtctgcactggagactgggaatgcacacaatgctcttcctgctgctgctccttatatatttttcaccactccctaaatcagttccagccctcagtagggttaaggccctccctcaggacttggattgtcagattccctggtagggatctgtatcttggaggcagtctttcaccctctaacactctggggacttacagatttttgcctggctcacagagtaggctgtagtctgctacttctttcaaagggtctgtggtttccttcagtttttttgttaaattcctgcattgcttcttggaaaaaaagttcatagtgtgaatctctacacactattttgtctttccaagtcagagaggcatgctaacactgcctccaatccaccatcttccaatctagtttttttaaatctttatcaaagtaggtcacaagatgcatgggggcagaaatatctagaaaacttcttgtagcatcaagaaaggatctgggtggaggcaaagaatttggggacaatctggtagaaaatagcttgaaattgataggttgaaaaagctt

SEQ ID NO: 203207 - DNA, 1000 bp, Homo Sapiens
tctcagtaggcatttatagagctgcgtctaaaggttgaatatcctttatctgaaatgtttgggaccagacatgtttcaaattttgaatttctttcagattatggaatatttgcatagacataatgagatatcctggggatgggatccaagactaaacataaaattcattcatgttttatatatacctaatacatataacctgaaggtaattttatataatattcttaataattttgtgcatgaaacaaagtttagactgctttttgactgtgacctgtcacatgaggtctggtgtggaatttcctacttgtggtgtcacgtctttgctcaaacacttttcagattttggagcatttcaatttttggattaaggattgtcaactttactattgcttatgtcactgaagtaaaactttaaaattgttaaaactcccctttcaatttcttgagtcggcctgcaatcaaacctttgtaattaaaccctcaaagaacctgttgaaattattccagactagttattctaaaccagtttttactctccttttcaaatgtctagtacataatggattctcaatgaatgtgatagagatataacagtttagttcacatgcaaaatcatgagaaaacctatgaaaaacttaaggtctatacccaaagaatgctatatcaagtattatcccactcacaccaaatattcagctattaaatgattgatagtctgtgttaaggaagtttagaggctttttttcatattcactctaagattatcactgtatactatgaaatacataggattggctgggcacagtggttcacgcctgtaatctcagcactttgggaggtcaaggcgggtggatcacttgaggccaggagttcaagactagcctggccaacatgatgaaaccctgtctctactaaaaaaaaaaatagaaaaattagctgggcatggtggcatacaactgtaatcctagctacttgggaggctgtgacacgagaattc

SEQ ID NO: 203208 - DNA, 1000 bp, Homo Sapiens
aaacagactttaaaccaacaaagatcaaaagagacaaagaatgccattacataatggtaaagggatcaattcaacaagaagagctaactatcctaaatatatatgcacccaatacaggagcacccagattcataaagcaagtctttagagacctacaaagagacttagactctcacacaataataatgggagatttaacaccccactgtcaacattagacagatcaacgagacagacagttaacaaggatatccaggacttcaacacagctctgcaccaagcggacctactagacatctacagaactctccaccccaaatcaacagaatatacattcttctcagcaccacatcacacttttccaaaattgaccacatagttggaagtaaagcactcctcagcgaatgtaaaagaacagaaattataacaaactgtgtctcagaccacagtgcaatcaaattagaactcaggattaagaaactcactcaaaaccgctcaactacatggaaactgaacaacctgctcctgaatgactactgggtacataacgaaatgaatgcagaaataaagatgttatatgaaaccaaggaaacaaagacacaacataaccagaatctctgggacacatttaaagcagtgtgtatagggaaatttatagcactcaatgcccacaagagaaagcaggaaagatctaaaatcgacactctaacatcacaattaaaagaactagagaagcaagagcaaacacattcaaaagctagcagaaggcaagaaataactaagatcagagcagaaccaaaggagatagagacacaaaaaacctttcaaaaaaatcaatgaatccgggagctggttttttgaaaagatcaacaaaattgatagaccgctagcaagactaataaagaagaaaagagagaagaatcaaatagatgacataaaaaatgataaaggtgatatcaccaccgatcccacagaaatacaaactaccatcagagaattc

SEQ ID NO: 203209 - DNA, 1000 bp, Homo Sapiens
cagttgtatatataaaaaaggattatagttgtataaaaacaggatctatagaaatagatttatttttagccaagaggcggcaatactcaagctttccttctcagcgcagggcttatttctctttctctatttaaatattcaggtctattactatactgaactgagatttggtttattctggtagaagtagctaaataagggtacacacttagcaactcataacttcatatgtttaagtgctggaataaggtgtaagttaaaatcgggctttttgattttcactgtagatagagttcagaaatactgtcatagttaaaaaaaaaaccaaaatgtttcagctccgggagaaaatgaaactctgtgatacaatagacggtgcttgtgattttatttaacagtttaatctttgcatacaaacaaaaccacctgaacagaagctggtttcttaaaaacaagagcagcgagtatgataataaatgccctgaacacatctctgctcatcctatggaatctctttcggaattcgcatgtagctttccctaatacggagcaaggggctttaagtcacactgccattcccaactgctgtgcctaaattgcttctagaagcaccgagcccctccgatgctgatgcagatttagctttgggctggggagaatgtggggagaagtcatttgcattaaaaaaacactagctgtctattcccattagaaaaaactctcggtgttttagtacaaattattttaaaagagcagataacttatggatgcagaaagggtaatccacaaagatgtatgcaactttgttcagttgatgtcctcagggcgaaaacatcaaggataacaagtgtactaaatacaaacagacacaatcataaaatatgacacccatgattaagatacccttttcaagggtccttcgcacttaggagggaagctgccttgttaatatcagggcccgttatttactacgattcagaggcaggttgaaacaatgatc

SEQ ID NO: 203210 - DNA, 1000 bp, Homo Sapiens
gcattaccaataccaactggagtcccgggagcggctctgcccttgttactgagaacaacaggcccctgtatcgttgacacaaagcatgtccttggctggaaatcagcacatctgagctacgtgccgacgtccacgagcctgctcagtgggcatggagccctgtgggctcgcgggccctgagcaacaggttcactctgaagacgcctacatgtagggaatctcatccttctacggcaaacctggggtgcggtgagggtaaccggactctgggaaatggaagaaaggctcgccgctagaaaagctgcatttctccacatgaaatagtaagaaatccacatgggtaatcttttattactctcaaatagaatagtgtagcaatgccaaaaaacggaatatatgggaataagtgattttaaagatctcatctcacccaaaagagggcaaagtgctgactggttcgagcactctgctgggcccaggaacactcatgtacagtgttctgttttgttttctttgagacagagtcttgttctgttgcccaggctcaaaaaaaacccaaaacaaacacacacaaaaaaaacaggccgggcatgatggtgtgtagtggcatgttcttggctcaccgcaacctccacttcccaggttcaagtgattcttgggccttagcctccagagtagctggaattacaggcacgcaccacgatgcccggctcatttttgtatttttagtacagatggggttttgccatgttggccaggctggtctccaactcctgacttcaagtgatctgcccgcctcagtctcccaaagggttgagattataggagggagccatcgtgcctggccttttttttttgagcttggctctgttgcttaggctggaatgcagtggggtgatcttggctcactgcaacctctgcctcccaagctcaagcaatcctcccacctcagcctcctgagtagctgagactacagtgcatgtgccactatgcctggcta

SEQ ID NO: 203211 - DNA, 1000 bp, Homo Sapiens
ggtggaactcatgatggaattggagcctttacaagggaatgaagagacaagagctctctttatgccacgtgaggatacagcaaggccccaatctgcaagccaggaagagtcgtcacgagaaccagaccatgcaggaactctgatcgtggacatttcaacctccagaactgtgatccagtaagtgttgtttaagccacccagtctttgttattttttatagcagcctaagcggactgagacacgtgaaggtggactgagacacatgaagcagtcagtgtggggctgttccttcactatctggtgctgaagctttaagtccacggggcaggaagttgggagaaaagagggcgtgaaatagagaggggttcgaacaatctggaactcttgaggctgagctggttcccacaaggaccaactgggacccattagcccctcttaccacctgttagcctccatctttgattatggaatcgatttgctggagaagctggagcttttcctcatggagctaaatctgctgctgccatgggtgtgataagctgaaggaggggagtgggaaggagctgaggagctgcactaggctgctaccccagccaaccagttgaactggcactgggacaaccatgtatgctgtctgaagcacagcctgacgcccctgtggacctttatagaatgcaaagagtatggctgctacttcacttttacctttcaaatcttgtgcaaattcacttatgctccacccccaacccagaactctgcggataaaggaattctgggaaatgtagttccagtttgtctgaattgacctattgcaaatccacaacacagcaccagaatattacctaggattatattcgacctgtttcagtgctacagaatattttatcttctcagaaaccatgtagtctccttagaacatcacagtgagtgcaacctcccacagagctaacctgtgtaattgaaaccatttagggaacaatgtattcacttgctaaagatc

SEQ ID NO: 203212 - DNA, 1000 bp, Homo Sapiens
gcagggaaggaagtctggcaagacatctcaaggaggagagggagctggaaaagccagagtcaagtgagccctgggcaaggcaggctatgaactatgaaagaacatgtgaattgggcctgggcactgccaccattttcctcaactttctggccatctgctgattgtggggcatcttagaaataaaaataatattccttggatgttatttcataatactgttcctccctttaaagcaaaggcagtgtgttgtcctgggagtgaatttacaaagaatagcatcattttattttgaaacagtcaccaccttagagttcattttacccaagcttctttttttttttttttccagggtcttgctctgttacctggcactatcatagctcactgttgcctcaaactcctggacttaagcgattctcttccactctctgtcccccacctcccaactacctgggactacaggcatgcaccatcatgccctcctaattatttcagtttttgtagagacaggggtctcactttgttgcccaggctcatcttgaactcccgggctcaagtgatcctcccacctcagcctctcaaaatgttgggattataggtgtgagccactgggctcagccccaagcttcttacttgtagtgaggaaactgaggcccagagagggacagtggcatgcccaagcccacaggaccaacttactcgtcatcccttggaacggcctgcttgctgctgctgtgaatgagagcatgccaggattcttgctatgaagcctttatttttaaaaaaaaaaaacccaacaaatcaatatgctttatataatttttgttcatctcttggaaagatgcaatgtggcagttaagtccactgtcaatatttttatgaactctgtggaaaatatgatgttaaaggcttttggtaaccacttcattaagcttggctttttctaggccaccacaaaaggtaaataaaccctaatgagtaatatgcccagattgagatc

SEQ ID NO: 203213 - DNA, 1000 bp, Homo Sapiens
ccatcagaatgcaggatctgaaaaatacctcaaataccaatcttaggtttttcaatactaatctgtaggtgcaaccggggaggttggaatcttgtggcctctggctgtatgactcctgagccataatttccagtctgtggctaatgtgttagttttataaaagcagtctggtccccaagcaaggagggagtttgtttcagggaagagtctaggtaatcatctttgtttcatagttaaactatgaactaaattcttcccaaagttagtttggcctatgcccaggaatgaacaagggcagcttagaggttagaagcaagatggcgtcagtgaggtcagctttctttcgctgtcagatttttctcactgtcatcatttttgcaaaggtggtttcattcatattccgcattgtatctaactgcgtgctttaacatctttatttcctaatgggaaagaatacactcatgagcaagctcaatgggctctctctacgaggtaattttaaacagcatttcttttctgaagtttgattattgcagttaactgtatgaaaatctatacagaactcttcaactacaaaggaaaacatcgatttttattgtttatttcagttttccagggtaatacacagagagctgcaacatgtaactggatttagagaaactaattcctatgaaaaccaattaggaaatacagcacctctgcaaaattctctgtccatccagaccaattctcagcagccaacatttgcaaatgatattttagagcactgtggtctttaagctccttgacgcaagacaagttattgcatgtcatgacagagagaacgtaacaagtccaaaatttaaggaggaggtagctgtttgtttcacttttgatagtagactcgaatctgccttcaaaaaaactaatgagaataggaataaattgcagacttttggctcttttctggctgacagggtttaagtaacaccaacatgccacactctggagcagcaggatc

SEQ ID NO: 203214 - DNA, 1000 bp, Homo Sapiens
aaaggcataggtactctgcatttaaaacctacagcaaatcagaagacacagcttttggtgcgggcagacaccaatttaggcaacatattgctgaatgttctgattccacccaatatgccatgtacgcgaacagggaagaataacgttcttatcgtctgtgttccaaatccaccaattgacgagaagaatgccaccatgccagtcaccatgttgattcgggtaaaaaccagcgaggatgcagacgagttgcacaaaattttactggagaaaaaggatgcctgaacacgcgaagttggctgcggaattattgccaagttgctgcttcttccaccgccccttaaagttagtcagtttttcttctcttctttgacattctaagaacttatagataacctaaaacttttgtgagaaagattaatgtggccaataaaacctttaaatgttaagtgtcaaaaaaccgcactctcccttcttaagaactgcctaaagtgtaaaatacatttgaatgcaatttttggaaaaaaaaaaaaaaaaaactaaaatgaattttaatacacctactttttaacatttcaatattttttcaaatacattaatattcttgaaaataaccattaaaatacatttatacaggggcacgctttttcctttttgcctcagaagtaatggcagtgtggcagtataacatcctgtctttaagttttggatatttcgtttgtcatggaatttgtgcgttcattttggccttaaaaaatattgtgttggccaggtgtggtggctcacacctgtaatcccagcactttgggaggccaaggcaagcggatcacctaaggtcaggagttcgagaccaacctggcctacatggtgaaaccctgtctgtactagaaatacaaaaattagccaggtgtggtggcaggtacctgtagtcccagctacgtgggaggctgaagcaggaaagtcgcttgaacctgggaggcggaggttgcagtgagctgagatc

SEQ ID NO: 203215 - DNA, 1000 bp, Homo Sapiens
ccctgtgtacagccttctgtgaaaggttgccattggcatttgagggacttcatacctggcttaccagagctgccaggaactggagagcaggcatccagcctgacgtccctccacgcagacttcctttcaccagccatgccccctcctacctctgggccttgaaacatattctgcctgccggaaatgctttttctcactctctctcaaagctctatagaggtataatttatacataaagaatcatatatatttaacatgtactacgtgatgagtttagacatatctgaacacctgtaatatcatcatcacaatcaccacaatcaagacaatatgatttaaagagaaaccagagtactccatcaagacaatagacatatccaacacctcctgaagtttcctcatgttcccgtttttgtttgctagtggtaagaacaccagtattctctaatgcttatcaataaaagaatgtctctgaagccctacatctttcaaaaacattttaagaagaaatttttgaacagcaacatatagtagcatctaacaatcagaaatgcatactttaaagataaacatatactcaaaattcggaaagagcagaagaacatattttggcaggtgagtagatgttcctgtctgtcttgcataatgcctctggataacatttggtcaatctacccctttattattttccaactatgttttttattattatataatgttaatgagcatattagaataataaatgaaattacttaatgtattttggcattacattttaactgtaagagaaaaataaggctattaagggtgttctagacctttaaaatcatttttttctctttcaattctggtaactaaggactgaattactcaaagctatatctcaaaataatatacacagatctcactcatgctcgtgctattcaatctgcctgaataaatctgtcacttttaataatgtgctcagtattttaacgttaacaattatttccagagagta

SEQ ID NO: 203216 - DNA, 1000 bp, Homo Sapiens
tgaccatgcccacaggattcatgtgacttcacctggatgagagagctgaacctgccacacaatagtgagggccataaggggggcaatattcacatgactcatagggttccaaagtctacagtttttacacaatacaaagagtttagcctgcctaatgactataagggagcacatgatcagagtgctaaggtctgaatatttgtgttcccccaaaattcatatgctgaaatcctaaaccctaaggtgatgttattaggagctgggactctggggagttgattaagtcatgagggtagagccctcatgaatgggattagtgtcctttcaaaataggcccaagaaagatccctttccccttcctccatgtgaggttagagtgaaaatatggccagtgcccttatcagacactgaatctgccagtgccttgaccttggactttccagcctccagaactgtgaaaaataaatttctgttgtttatagactacacagtccatggtattttgttatagtagcccaaacagactaagccacatggtatccatgtgaccaacagcagtagagtacctgtggtgcccacataattatgagggcctcattgccacatgaaagtaggaggccacatgattgtagtattcacatgagccatagcattagaagcctgcaatgttcacttgcctggaagggctatttctgcctcatgacaatagagttcattggcagtagtgtcctagtgttctgcatgcttcaggggtctatctgattcatgacacatggagatccgggattgcctatgttcctgggctccacagtgaaggtggtgcctccaggtggccttcacagcacatgaacttcgcctttagctaccccatccctttttattgtgatcatttaatatgctgttttctactaacacattaaatttaatacataacaaattaacacataacagtaaaataggtccttcataaaactataaccacagtcataatatagggagt

SEQ ID NO: 203217 - DNA, 1000 bp, Homo Sapiens
tatatatatatatatatatatatatatatatatttatttatttattttgagacagtgtctcacttcatcacccaggctggagtgcagtagtgtgatatcggctcactgcaacctccagtcacacccttccctccacctgcccacccattcccaccccggaccccaagctcaagtgatcttcccacctcagcctcagtctcctgagtaactgggaccatgggcacacaccaccatgtggcctggctatttttttgtttgtatttttagcagagacagggtctcgccatgttgtccaggctggtcttgaactcctggactcaagagatccacctgtctcagcctcccaaagggctgggattacaggcatgagccaccacactcagcctacatcctattttctttttttaaatgttggctccaatccaataagttgactttacaacctactaatggattatgacctgaagttagaaaactatggtgtagaagatctagagagagaccttcgattacaagtacatataacacaagctggatacttggatactgttttagactcttcactcatcttccacatccagcagccttctacatgtgtaagctctgtctcttacatagccctccagtccatcctccaagctgcagccagtgatcattctaaaatatgcctctgatggaaagtctgtaatagtcttcacttgtctacactataaaagaaaaaaacaataaatgcatctaattccttagtcttgtctggccttgatttctcctccagggtcatttctcactaattctgcttttgtatctcatgttgaatcaatgttgagtcatgcacaagtccttgaatctttcatgttctttcatatgttgggcctttgcttttgaagatttttctgcctggaattcccatttcacccaatactgggctcattccaggatcagctcaatcctttgtttttctatgtagcctttactgacagcctccttagccatcatcccc

SEQ ID NO: 203218 - DNA, 1000 bp, Homo Sapiens
gatcctcctgcttgggtctcccaaagcgctgggattacaggtgtgagccactacacatggccaattttttatgtttttaacattttggcaatgttcttcattaataattcctcagcaattttataataataatatattttccttttttcatatttatgttgattgaatttgtaaggtcgtgtatgtaaatacacagttttttattaacatacacacacatatacattttctcttaaaacgtttgtaaaggaaaaaaaaatgttatccactcttcaagatgagactgtttagacatcttcatttttcagttttgagatataccaacattaaacagcaattttcagaggtgatacgtgtcttgttagtactgttccatttatacaatggatcagtgcatccccacaaaacctgagtttaaacttccacactgcagttgagacagacatgaatatttggattattaagaaacataaaaaactaggccacatcaaaatatttgggactagttcataaaaaataaaagtaaagcaaacatttacagtttgttttaaagcaagttgctggggaaagtctttctaccagctttgttttaacacagctcatggatatagatgtttctgtcaaaattaagtcattggtaactccatctgaggagctgtctattccatttttttctcgaggaatgaagacaggccttttggggtgaagccctttggactggcatcctgccatgtaggattttggctgtgaagtatctcaacttttgaaaagaaatatccattttggccttggctttaaaatgtgggacttcataaatgtgaaactacataattttatttccgtcatagtaaaaggcactaaaatttacaaggaatgccacgctaaactgtaggttccttgaggagaagggacaaggtcacatttattgctttactctctggcattaggaatacatccgatatatagttggtgctcagtaaatatttattgaagtgaattc

SEQ ID NO: 203219 - DNA, 1000 bp, Homo Sapiens
ctatcctccctaagtagagaatgacaggggatgataaaagttacagattccttttgatatctccccagtccagttccacagctctttcccttcactggctccaagcctgtagctaaactcactgaggcccctcccaatcccaggacaatctacctctgcccttgatcctgggtcacaacgatgacaagggatgagagcaaattagcaagccccacccctgcccacacacatgtgtgccttcacgcacatacatacacacaaacatacacacctgggaacacagtaatcgaagtggatgtggcagccttgggtggagggcatgggttggatcaagataattaggccctcaactcagagctggatgggtccatccattgctctattttcttattccatctatacaatgactttgcattttgcatatggaaaaactgatcttaaagaatgaatcactttgctcaagatcacacatctgggaagaggtagagctgggatttgaattgagatccatctgattgtaaaacctgtgctttatctccaaatgagaaagtctttatccaaggtagccacaggaagggtgactttatacagtgaaccctcatcatgatataaagctcatgtatcatgatcacagctagggagaatgcgtgaatatcaagtcaaagggtgaaatggagccccagtgggaagaaggtagttttttcaaaatacagggatatcaagagcacagaagcatgtaatgaaagtattatgctagaggaagagactcagaagttcacacactgcttgggggaatggcacgggagcagaggtgatggctaaagaaacctgacaggctaaacagcttccatgctaatcatgtctggaacctagagcttccagggatgactttggctgctctagttgtttcctaaggcccagttcttcctgcattagattctaccttattgacctgttcggtgttccagtcccctacggactactggaaagctcagaattc

SEQ ID NO: 203220 - DNA, 1000 bp, Homo Sapiens
aaatataggtcaatatctctcatgatatagaccaaaattcttaacaagatattaacaaatagcattcataaacaattaagaagaattataggccaggcgcggtggctcacgcctgtaatcccagcactttgggaggccgaggcgggcggatcacgaggtcaggagatcgagaccatcccggctaaaacggtgaaaccccgtctctactaaaaatacaaaaaattagccgggcgtagtggcgggcgcctgtagtcccagctacttgggaggctgaggcaggagaatggcgtgaacccgggaggcggagcttgcagtgagccgagatcccgccactgcactccagcctgggcgacagagcgagactccgtctcaaaaaaaaaaaaaagaataattatagaccataaccaaatgggttttgtttcagggatgcaaggttggtttaattttcaaaaatcaatcaatgtaatccacttattaacaggctaaagaataaaaatcacagaattacatcacccaatataggaaaagcatttgacaaaatggaactttcattatgtaaaaatgcttagaaaaataggaatagaaggggaactttctctactagataaagacctacaaaaaactacaacttactcatacttactggtgaaagttgtatgccttctttctaatgtctggaagaaggtagggatctactctcaccactcttatctgacatagtgctggaggtgttagctagtgcaataagactggcaaaggaagtaaaatgtaagcagatcagaaaggaagaaataaaatgatccttacctacagatagcatggttacctacatagaaaatctcaaggcacctacaaaaaaaaaaaaaaaaaaaaccctcccaaaactggtaagtaaattcaggcttacaaaaatctattgtatctctatatgctagcaataaaaccatacattctgaaattaaacatacaattcaattcatagtcactcaaaaaaaggatc

SEQ ID NO: 203221 - DNA, 1000 bp, Homo Sapiens
ttttaaaaaattcttctaaaattttcatgagtggggacaaaaatcttaatcacattttaatttcttactcagaaggaccagggttgtttgctagaattgggagattaaacactgtttcagatgtgaggaatgggggtaataattggcatttaacaaatcctatttagggtaaaaacaggtgtaataaatttctaacaaagtcacctgtattccagggtatcttatagacattttaagaaattttgaaatcaatcaaagcaaatcagacaagagaaataatgacaagatgaatcagctttcttaatctaatctatcttgaacacctgtaatatactaattgtacaaaaagacaacccattcatatatatccatgatgccattttttatttaaaaataataaattagaactgacttgcaaatacaactgccaatctactgggaagctattgttcttctcacatagttactatttcatgtgcaaccctttctattattctacttactcaaaaaagtggctttttcagttttattactatcttttcttcatccctatgcagaggaactttagagtagccacctatttcttggttgaaaaattagcttagttagaccatatctcatggtaaatatgaaaagagaatacacaaaaatggttagtaccttgcccaaggtcagagttacaaggattatattaaaacattttcatattctgtggctgtctaaacatctgtatgttgacctgattattcagtaccatgggcacaaacagtccaggttcctgtagggattctggtttcaaaaaaccagtatctgacaaaaaaatataacacactgtatgattacccgttacacaaaatgttaactggcaaaactaccctatgatggtgggggaaatgaggagttagtggtaactggaagaagtcataagaggctttccaggtcaggcactgtggcttatgcctgtaatcccagcactctgggaggccgaggcgggtggatc

SEQ ID NO: 203222 - DNA, 1000 bp, Homo Sapiens
ttttgactgcatgttttccaaatcgagcactccacgcgtttccccaaaacaacaccaacctgcaagaggtctggagctgggtcatccaggggtccccactgtgtattcagggtatcctaaattggaaactgcctttgccttggggctttctgttttataaagttaattttcaactttattcattttcttagtcttggatcccacagatgagtcgtctttaagaaagcagcttgtgactgggaaccttgtctcactcccctttgtgaacctcaggctgtcctgggcttgatgtataataagagctcaacaggtgctttctgttgcagtcaacaggtgctttctaaacagaaagagcatgagactcactcgtgtggaaagaaatgctggaagaggcaaggattccacacagctatatcgaggtgtgaaacaactaaaatacccagcaggtggtctcagcagtgggaggaaaagcagtcaaaggatcctttgttctcagctctaccacatgttagttaggtgacactgagcaatgtacttaaatgctctgaacctcagtttcctcatctgcaaagtaggattaaataatacctctctcacatgtgagctatgtaatgtgactaacaaatgtttgcttccttttcttttccctggtgaatactgagtgaactgagcattgtttatgatgtccgataacaataaatgcaatatatattatatataatacgtgtaacagcatatttgattcatatataacatacatataatgaagaccacttcctactttccagtagtctatattcgacaggatgtaaggtaaacagttgttatttattcttttctttcagttgttttttttaatgccaacaacttgaaagacacctggtacccgcgtgtgagtgaacagcatatatttctagccaaagcaaagcagtgacatttttaggccattcaggaccagtgcaatgtattgtttatattacttctgccaaggtgggaattc

SEQ ID NO: 203223 - DNA, 1000 bp, Homo Sapiens
tctgtttttcacaggttttctgttattgagagaatatatttaaagaaatctcaatttatccactaacagatcaaggaaatactaaaatgtgctttttatcccctaatatataacaaataggtaattattatgagcattttataagaattattaataaattaggtgttatataaagagctcttagcaggtattctggcaggtaataagcacacaataagtaaaagttgttattattttatttaatattattataacaaaatggcacaacttaaaaccatggaggaaaaataaagaataacatggatggagataataaaataagctggaaagtttgcttaaatgtatttataatatatacacacacatgtatcacaaaattggatctaagttttccaggcatcaccataaaatgggaaacctttcaattacacaatcactatgtccagtcaacaaataccaatcactgtagaaggtagaactatcatgtttagtaagacctggaattcattcctctcatgggtcctcataaagagtagaatgtgtacagtagaaaacaatctcaatagcatccttgcagtagggattgctatgagaccaatttcttatgcagtgtgatagcaccacatcaaagtataatttagttaaaacattctacggaggtggaggtggtggcaactgcacatgctccagtacctagctctttccaggtcatgtttgaccagaaagaaaaactggataatctggaggaatgaataattttttcataatgaacttcacattctacaagcagttcttcctaagtaatgtctttctctgaatttttgataaatgttgagcaataaggttaaataaacaaataagtacatgatagacacagacagatgagaaagagacagaaagagaaagacaacattttacatcccattgcatacagtttcccttattggctatttctaatccccagcaacttgttatcaagaggaaagtctaacttgaattc

SEQ ID NO: 203224 - DNA, 1000 bp, Homo Sapiens
gaatcagggtgactcaacctaaaaatgctttttggtcataaataacagaaaacccaattcaaactgactttggaaaataaagtcagtttattttctcatataagttaaagtccaaagaaagggtggtttgatttaaaaaaaaaaaaatgttcactgtcggcctggcatggtggctcacacttgtaatcccagcactttgggaggccaagatgggcagatcacctgaggtcagaagtttggaaccaggttggccaacacggtgaaaccccatctctactaaaaatacaaaaattagctggacatggtggcaggtgcctgtaatcccaagtacttgggaggctgaggcacgagaatcacttgaacctgggagggggaggttgtagtgagctgagatcgcaccactgcactccagcctggagacagagaatgactccatctcaaaaaaaaaaaaaaaaaaagttaaaaattaaagttctctgtcttcaggactggggttctatttctctgcccactgtgggtcagcttctttcttaggttggcttccctcaatgaatcaaaaggcctgcagtggatccagcctgacatccacacaccaaactgtccaggtgaccccgcatttcaagcaaagttgctgagatccactctgttggatggacttaagtcacaagcctgctcctggtccagttaccatggccaggggcatggaatgtactgaccatctcagcctcagtcacagctgtacccctggagctggggtagcatcagctgtttggaatagggaaacgaacgcagccactgtagatctgctgtacacaggaagcggatgcctggctaggcctggtgaggcctcacgcatgatatcatcagtcatcaatacacaggagcattggctggaagaagctcctgattcttcagtgaaaagtgttgtgaccaagaggtcagaagaggttcccagcttttgaaaaccaagaggcaaaaacctgttcttcaagaaaaaaaa

SEQ ID NO: 203225 - DNA, 1000 bp, Homo Sapiens
gatgagtggggtgaaggcagccattaaagacaagcacaaaaaccaaaaatacaaacaggcagtgggatggttagaataggattacagaatgtctgttgcttttttttcttttctttttttctggagacggggtttcactctgttgcccaggctggagtacagtggcacgatctcagctcactgcaacctcagcctcctgggttcaagcaatcctcctgcctcagcctcctgaatagctgggactacaggtgcacgccaacatgcccagctaatttttgtatttttagtaaagatggggtttcaccatgttggccatgctggtctcgaactcctgatatcaagtgatccacctgcctcagcctcacaaagtgccgggattacaggcatgagccacggtgcccgacccaccagaatatctgttgcttttgatgggctcagttttgtggagaattgtgaaagtctatgtggaggaaggatctcaggtggaaaagaggaagaaatgacattggcgagctggctaggactgagggtacatgatggagagagtatgcaggagttgactgaatccagaaaagttttggatttggcttaattcaggcaggaagtcagcccctgaagcagacgtgtgactaaacgaagtgtgaaatgcaggagaggctcagggcagagatgacattgggaacccaagaaaggggctggagagcccagatggcaggcagtggaggcctttcctgggtattcccactgggaaaaaaaaggaaggaaataagagactcaagcgactttgaggagagagcgactgttttagtgtggagatgctgaagaccagcatttcaagcttggggagctggatgggtgggaggtggcggggtcaatagaggggaacctgtggaatgagatgatctggggggaaacacctgtgcgaatggcaggggataatgtgtaagaaggacagggtgcttgtccctcagggactctggtctaatggagtctttccagg

SEQ ID NO: 203226 - DNA, 1000 bp, Homo Sapiens
agaccatcctgggcaacatggagaaaccctgactctacaaaaattagtggtgtgtggtagcacacacctgtggtcccagctactcaggaggctgaggtggaaggttcacttgagcctggggaggttgaggctgcagtgagccatgatcacgccactgcattccagcctgggtaacagagtgagatgctgtcttaaaaaaaaacaaaaacaaaataaactagctatatattcctctgttcaagatgcacaccaaaacaccaaaataactggagtaaattgatgagaaaagatacataaagcaaacaagtaaccaaaacaaagctatactacatatttgtatctatttttctctctacatatttacatagcctatcatactaaatttaacaataataaaatataattcaaaactacagtaataaagctatataaatatatatccaatactaataatactgtattagtataactatatatatttatatatacatcgtaccaggaacagaacaaaaatattgatccataatatagcaagagtccattaatataaaagtcatgacatacagcaaaggatagtctagtttgctgtctttttggaaaagaatgaaattagattcctatctcatgttatatataatttttaaaaagagaacatttatggggatagtgaaggtatttgtaaaccagatacaaaacgtataaaccacaaaggaaaaatactgactatagccaaataataaactgtaaaaaaaaaactatcagaaaaaagatagactagaaaataggtgtaatcataataaacatcaacaaaagaaaactacaaataactccaaagaaatattgacaattcacaaataagaaaacccaaatggctaatcaacatgctaaaagatgcccaagtttactaccaagcaggaaaacataaataggtataataactaaagaactggtaatcctagtgaggttgaagatagatatatcacacaaccaaatgattcaa

SEQ ID NO: 203227 - DNA, 1000 bp, Homo Sapiens
caaatgttgaatgaaataatgaattaataaatgctctctttctgcccccaacccccgacaggctgcagtcttatagggtgcaaaaagatcacctatcaggttcctttcccacatcatatctgaggaatcaccagctggtgtttgctgagaattccttattggatacttaaaatgtctttaacccagaactttgcttctgtgaacatttgctgttttccccgaaagcaaatgtttcagagaccaacttttagttttgtaactggctttgtctgtctgaatgtgcaagctatcatctcagttacaggacagtatgttcacataccatcacagggccatttctgaggccagatctcctagggaacatggcaaacacagtacattccatatgaagaccacccaaagacaacctacagtcatactatgcccaaagagagggcactgtcagttctccagaccagacgtctccagattctgcaaaatgagttaatttgttttctaacttgagccacccaggtgtgcctgatccctatttgtcatctcctcaggagggatgaggcagaattagatttttggttccagattaagctatatgtaaggagaagttgctttatcatgaagatgagaataaagccagttcctgctactcaatggtgttctaattcctgcagctcctggtccataaccacagtgagcactcactgagtgcctagtctgggttcaaggtattcagcactttacacctaatatttcacttaattttcctaacaatcctgtgtggcaggcatttttattatccccattttacacaagaggtaactgattcattgagaagatgtaagtaacttgtgctagtcactgggggacctgggtttcagactgggcaatctggctgatcattttccagtgttaaattccaacttatgcacaggtcagacactgaaatgacaggaagcccacttacccttcatgtgattttttaataaagtgtggagaggtgatc

SEQ ID NO: 203228 - DNA, 1000 bp, Homo Sapiens
ccttcctttttttttttttcttgtttgggtccaagttttcatcttctctgcatttccaaacagatgctgaattctcgtttgtccctaatggacacatcaagtgtactctagtcgctgtgtctgctttgctgtgagtagtttgcaattcctatgattaaatatgcaattaagatttaaatacaataaagcacatgaaattttgcaattaggatgaggctgcactgctcatgacagatttaaatgtcagcgcctccagttggaattgaaagtgagattttgctctctccatttgaatttggaaaaccctccattacacattactaaccagaatcagttgagactgggagttggtatactgaaagtggttcctttcaggcttataatgcattgatcctaaataatttttggagagatgtgtaggctgccagtgtacaaatgatgcagtgcaagtgatattattttagtttgataatcaacgtgtcatagcttctctccccgcttggtacgttgcattgtaaatccgatactcacaggcaaagtccctgtgatccactatactgccttgagttgcggcaacgttattatgaaaaatacattcatttgtctatatggaagggatttaaaggttgctgcattcattttttaccgcagtctaagtacttaatcttatggacattgctcaacaagaaaatgatctcttcctctctacccccattagcaacattctttcagtctcaagaaatataaatattggggcatattaatgaaaatgacatctactgctgatatattaaaactcaaatgtgtgattaagtattctgttaattaactctttttgtcagaataattgtaaatgcgttctcatacttcagagcaatttgaactgccaggagaaggttagtagactgccctgagatagttggaaatcagacatcattagtttaattaaattccattaacataacaaaaacagtttcttcgattttttttttaaaggatc

SEQ ID NO: 203229 - DNA, 1000 bp, Homo Sapiens
ccaatcagttaaggccaaggctcagggtcagaacatgttcaacagatagttaaggaatagattagggccacaccctcagcaagtggcctacgatgggctgttttccttggatagccaccatccccacccaaccttatagggactggcagagagatgaccctctgaaaatgctggtagtgaggatgaagatgtcctctgttggttagtttctctagactaagatggagaaaataagaaaaaaaaaaatctctagggtgagatcattttttaaaagattgtcttttgcttgtatattacagtaacctgagttctcttttgttaataatgaaatttgttctcttttcttaataatgaaatcttcccaaatgtttagccagtatttgtgaaaaacatggtttgtgcctcctcccaccactgccattcctgcaagggaacctgccctttgctgaagtagaataggataggttaaatgaatgaggatcattagataggataagttggaataggatgtatctccatccccaatcctttgtggtttttttctcatagtgtatctttgcctgtgcagaggcccgtgatctccattgatgaaccctttgatagatttgattaggaaaaacgtggtggggaatagaacaactggaaaagggatttgagttaaaatgtaaagacctggctttgaccactgcctctccccttattcactgatgaccttacacaagtcatctggcttcacaagagcactagtcacctaacttgttaagcaaaggtaaacatgatactttctgtacagcgttctcaagttttcctaaagagcaagtgaaataatgaatattaaaatgtcatagaaggccaggcgcggtggctcatgcctgtaatcccagcactttgggaggccgaggcgggcggatcacgaggtcaggagatcgagaccatcctggctaacacagtgaaacaccatctctactaaaaatacaggaaaaaaaaaaaggtagccgga

SEQ ID NO: 203230 - DNA, 1000 bp, Homo Sapiens
gaattatccatttgtaaactgatttccttggggcgttgttcccataaactttttgcaaagcatcaatgattgcaccattcttccacctaagctttgccataaatttgatgtttgttcttgcttcagttttagcagaattcatattgttctgacaggggctctatttaaactgatatccttcttagtgcctcaaactagatcctgttcagacatgttataatgatgagtttattttgttgcaaagatttttgaaatctatgcataatttttttcataatatgcattttccatcaactttttgaagacctcttgtgtgttaactcacattcattttaatagtctttaaagacgggcattcctgtttacacaaatgagcacaaagaaatccaatcaacgaaacatctgagatcccagagctagtaagcagagatctgacacttggactcaaggaatctagattcaatcagtgcttttcatttttattttttttgagatgggtgggagtctcgctctgtcaccccggctggagtgcagtggcacgatctcggctcactgcaacctccacctcccgggattacaccattctcctgcctcagcctcccgagtagctgggactacaggcgtccaccaccatgcccagctaatttttttgtatttttagtagagacggggtttcaccttgttagccaggattgttttgatctcctgaccttgtgatttgcccgcctcggcctcccaaagtgctaggattatagacgtgagccaccgcgcccggcccagtcagtgctcttaatcacttgcctatcttgagaacagtgtttttaaaaaagtttatccaataatctcatccatagacatttcagtgttatctttgctgcaaatgaaattgagctacgtacacttgagaatatttattgactatatttgcaaactgcatcatttctccatctttaaaatataccccttccccatctgttaagtttgttaagatagaatgatc

SEQ ID NO: 203231 - DNA, 1000 bp, Homo Sapiens
gttggttaagacataagtggtgcaagttaaaaccatccaatgtacagaagcacctaatccagacaggtctgaggtcacattaagtcttcagattcgtgtgagaataggtaagtcacctacaattggcgtggatagccacataacttttagagaacttctttctatttttatcacttcccgagtcagagttaagtaattttaaacattatggtcaaatctgtaggtattggcctactgacttgttgtacagaaaaagaattctaattagcaccactcctttagagaacaatatggcaatatacatcaatcactttaagtgctaatattctttgacttagcaattacatttcttactgtttggtttttttaggaaacagggtctcggtctgtcacccaaggtggagtgcagtggcacaatcttggctcatttcagccttgacctcctgggctcaagtcatcctcccacctcagcacccacgagtagctgggaatacaggcaagccacaatgcccggctggtttttgtatttttttgtagagatggggtttcactatattgcccctgctggtctcgaacacctgagctcaggcaatctgcccaccttggcctcccaaaatgctgggattacaggtgcgagccaccatgcctggccagcaataacctttctaaatgtctagcctaaggtagtaatcctacatattgaaagaggaaaatgctttatgaacaaatatattcattaaatattttatataattttaaaaactagaagaaacatatttaataataaggatttagttaagcaaactatggtattttgtataaactaatttttattgctacgtaatatttgtacatatttatgaagtacatgtgattttattacaagcatgaatgtgtaatgatcaagtcagagtgtttggggtgtcccattgagtatttaccgtttctatgtgttgggaacttttcaagtcctttcttctagctattttcaaatgcacaa

SEQ ID NO: 203232 - DNA, 1000 bp, Homo Sapiens
tagacacatgatttcctcacccaaaccagcccttgtttccagtttgttatacctcaataataaccatctgattgactattttagtctaatctctttgagtcatctttcacttatttctgcaaatcaatgtgagaaaaaaataccaatggctctaccttataaatagatctatagtttgattgatactcaaaagctggaccactacttctatgaatccaggcaaccatcatatttcaactggactactgcagaaaccttctagttgatgtcctgtctttcatctttattctagttagtgttttgactgtcccagagtgaaagaaatacttttacatgtaagtcacatcatttctcttctttcttaacctaaactttgcaatggttttccaattcactcggaatgaaagttaaataacttgccatggccaaaatggtcctgccagatctggctcccattaaccagtaagaaattctctcgtctcaatatcatcttactcgttccagatttgcaaaagagaagccttttatattcttttttttttttttttttgagatggagtctcactctgttggccaggctggagtgcagtggcgtaatctaggctaactgcaagctccgcctcttgagttcatgccattctcctgcctcagtagctgggacttcaggcgcctgccaccacacccggctaattttttgtatttttagtagagacggggtttcaccatgttagccaggaaggtctcaatctcctgacctcgtgatctgctctcctcggcttcccaaagtgctgggattacaggcgtgagccagtgcgcctggcctgatattctttataatgattctcttctcagaataattatcttctcagaacctctctgtctattcttcttcctacagtggaattccaccttaaatatctgtagctatttctcatggtatggtcaaataacatactcagtggtactttatcagaaagaattttccatgacatcaatacaa

SEQ ID NO: 203233 - DNA, 1000 bp, Homo Sapiens
gcagtcttggctttatcagtactgcacaaagccctcttcggcataaacactaccctatacaatctccacaagcctttgtttctttgtagtcagcctccactgacttgcccattgtctccctggcaaagtattttcctactttatctaataaatctgccattctttacctacaactgtcttggtaaattcttacactcccacaccactggcccagatagtcaccactcacccatgacatttctgggtccttctgggatctctccgtacaggggaacactctcctcatggggaattctcttgcctctctctttctctttcccaactcgggaacctcggtggacagcgtctaagcacagagacagttgcaggtctccggctggggctatactcccgtgggactgaaaggtgcttgtgtggaaacgtctgaccgccactgcccaggtcaggtgagggacctaagtccttttctcttttcgtctgtcggctgccgtttcttaatagttctttggtaattgagggtaactggcaagggccactgtccagcattgcctgaaggccaaagagtgaatggggtcagctgccctgcccggaaggggaaaaggctcgcctctcttttctgattgtagtccctacgtgtgctgcaattgacatggaagcccattcagggcaaattcacacacgtttcgggtggctcagaccctctgtctcagtccaaattctagggagtcacccagccgtcctgttccagatgttgccaaattaggtaatttcagacagcctcagaatagtgagtcttcccctccccgttccctttcctgggctggcacccgtggagatcttcttgtacccttccttcctcatacaatacccaaaatacaatctcaaactccaaacatggttgatcacccagtgtgagtgagaacctggactggctgtccacccgtagggccccctggatgatctttactaataggtgggatgcccctttatacagtgcacc

SEQ ID NO: 203234 - DNA, 1000 bp, Homo Sapiens
acgagcattcactcatgtccttcctctgcctgtgacaatctccttctggaatggcatcaccttccaacaccccaactcctctctgcccatcaatattttaatcctctgcaagtcctgattcaagcaaagccatcttctgaacattacctataaatgtgtgcaaggtgtctgctggctactataattattattgctatgattattctcccccctcagcagtggtttctcttttctgggaaccttataggccctctccacagctttcctggctgctgacatggctttcctaatactgatattgcttgtatacctgacctacatctgtcctggactataaacttcttgagagccaggaccaataatattcatttgtgtccccctcagcccctagcccaggaacctcagtaaacacctgttgaacaagtgaataaaggagtgagtgaatgaacgaatacagctaaactcactaggacatggctatgtgacacagacttggctcttctgagcttcctgttctggacggtgaccacctaagagttccctgtcattactcccggctctcctgacatgtgtccaggtgagctgggacgtaagtgtgcaggctgtatgacaggtgtgtcatccctccagagtgagaggggagtgtggcagagttcagccttcccaactcatcaatcaaagggcacttactgacagctcctgagagccagctctgggctctgctgctagggagggatgagcgggagatgagagctgccctctgggggttccccgtcttgctgatccttgcagattgggcctgcttctcctgtgactctcagaccaggggaactcaaaggactgtcatggtcactgatgggcaggtggatggactgggctggccctttcctcccagctgccctgcaatgctacttaatccagaagtggctttttcacccttttggtctagattgactaccccgtccagacttggggtaccctgttgcctcctgcagaattc

SEQ ID NO: 203235 - DNA, 1000 bp, Homo Sapiens
gtattctgccaacacttacctcacctgccatttaagcttcggctatctggcctatgtggaagtgtgcagggtccccctgatgctatagccagttcctctttagaggctcccaggagtggcttagttaggatgctgggtgggcatcagggcatagacttagttaaataagagaaagccaggggcctagttaccagaaccagatagaagttaattttttgtcttagaaggcaggaggtagtttctggaattagggccgaagactggagagagacagcagaagagttgaactccatgagtttgctcaaggactgaaatagagcatccacttccatctgtctatggtgggatagcttccggggctgagttcggtggagattaggagatgccagctgtggcaaatagaaaatcatggactaacgacaaagtcaaaatctctctgcttgtgctcgttactgactttaattcttgagatcctttgtgtccttctctaggccagtgtttccacagagcggctagagaagtacttgggaggggatgacttggacacatctgccattcgacatgactgcaattttggtaaataaatttggaagttgcttcccaaacttattcgcagtactggtgccagaattttgataatacaagagcttagtagcagcaaactgagagagagtgtggagatttgtcttgagcctatgcttgcataagatacaaactgttcttacttgaattatgtttacacttagagcagattgctcaactagattgctaagtaaagctgggccagctcttctgaggataagcagggaatcctgcaaaagatccagaaagcagaagtcaggatagagccaagtgtgtgggattgggaaggtagcctggagtgaaagaatactcagattctgaaggtttaaagattgggggccagccatggccagagtgggcataggactggaatccatagtggggaggatttatatatggaggtggaattccgcggatc

SEQ ID NO: 203236 - DNA, 1000 bp, Homo Sapiens
gctcaaaaacaagagtccttggtaaaatacattgcccagattctactgcaatgaacactaggaaatgtagggtttaagatttaattaagagaagacactggctgggcgcggtggctcacacctgtaatcccaacattttgtgaggccgaggcgggcagatcacgaggtcaggagttcaagaccaggcaggccaatatacggaaaccaaccccctctctactaaaaatacaaaaatagccaaatgtggtggcgtgcgcctgtaatcccagctactcgggaggctgaggcaggagaatcgcatgaacctgggagacagcggttgcagtgagctgagatcgggccattgcactccagcctgggtgacagtgtgagactctgcctcaattaaaaaaaaaaaaaaaaaaagagagagagagaagataccttctcttataggaggaaggcccttgcaaagaaaacacacccagtaggacaggtgcttcctgctgacctgtcagatggggagagacaggttgagtgacattttcctgactgtacacatctgctccagggtgaaacccaaaggaggaaatcactactaagtgtcagagcctgagatgatttcaggaataatgctcatggcgctcaagggtagagtgttggataaaagagccctcctggactccatgcttactgccagccttgggaaggaccacacccaggtggtataagcagagcagaatgtcccaatgtcatcttttacaatgaagggaggactccttggagtctaagggtgttccttttgatctgagccccaaacctgaaggagtaggttgtaactgaaacctaaggtgaaatgtagaaaagaatttccagactgcagaagcatttagaggaatttgggaggatcctcttccctttagtctccatcaacacagatttcaggttccccaagccaccgcctggacgtgtatgaagggactcctaaaatcctcaacactgcagggctcctctggaattc

SEQ ID NO: 203237 - DNA, 1000 bp, Homo Sapiens
gggggctgtggttgggaaagatgctacttcccagtacagaccccctgggttctggagaaagtctgtgccttacacaacagagaactacaaaccattcaaaaagcagccctgatgcgctcctggaccctgctagaaactgtctgatggctagaacttcccaagatgagttcattctggccggacgcagtggctcatgcctgtaatcccagcactttgggaggccgaggcaggtgaatcactgaaggtcagtggtcagtgaccactgaaggtggatcactgaaggatcaccagcctggccaagatggtgaaactccatctctactaaacatgcaagaattagccaggcgtggtggcaaggtgcctgtaatcccagctacttgggaggctgagacaggagaatcgcttgaacccaggaggaggaggttgcagtgagctgagatcatgccactgcactctggcctgggtggcagagcaagactccatctccaaaaaataaataaataaataaataaataaataaataaataaataaaagagctgattctgctggacccaccaagtcttcaggtcaggtggacccaacagtaacccacagtgagatggaagtggtacatctgcagtacagcatggcaggaccagggggcgcaatgggctgcacagcaggtggctcagacacccgagtcatctgctagtattgtaccaacacctctccctcagctacacctatggcctcatagtgggaggagggagatgatgagtatcacatccagcctcaggacatctgcagcagccagggttcaggtcttgaattctattgtgacagagagctgcacaattcacatcgctgttgggaagaccataaacggatgctgctgtgcccccggggcagcacaggtgaaagttttagccactgcagggctcggacacttcagggactgtcaatattccacctgctgggtcctcactaccattcagccagtgagtcacccttaaggaattc

SEQ ID NO: 203238 - DNA, 1000 bp, Homo Sapiens
aggacacaaaccacatttatggattaagtttgccaccttctatgggtgctgtttttggtgccccaaaacaattacagtattaacaccaaagatcactgatcaccataccagacataatgataacaaaaaagttgtaatgttgcaagaattaccaaaatgtgacatgaagtgggtacatgttggaaaaacgatgctgatagatttactcaacacagggttgccaccaccaccaatttgtaaaaaaaatgtggtatctctaaagcacaataaagccagacacaataaaatgaggcatgcatgtatttgctacaataaaaagtcaatctttaaattaaacaactcactcttaaacaatcaatggtcaaagaagaaatcacaaagaaattttaaaaatatccggagacatatgaaaacacaacataccaaaactttacaggaggcagtgaaaggggtactaagagggaagtctatagtgatcaaagttttcataaaaagaagacagatctcacatcagcctcctaactttatacttcaaggaactagaagaagaagataaaaccaaaagttggcagagcgaaggaaataataaagattagagcagagataaatgaagtggagaatagaaaaacaataggaaaaaaatcaacaaaaccaagaattgttttttttaaaaaagatcaacaaaattgaaaaacccttagctagactaacaaagaaagacagaaaatttaaataactaaaattagaaatgaaaggacattacaacggatataacaaaaacgagaaggactataagagaccactgtgaacaagcatatgccagcaaattgggtgacctagagcaaatggataagtcctagaaacacaaagcccaccaggactgaatcataaagaagcaaaaaatatgaacagacctagaactagtaaggagactgaagcagtaatcaaaaacctcccaacaaagaaaagtccaggacccaatggctgcagcggagaattc

SEQ ID NO: 203239 - DNA, 1000 bp, Homo Sapiens
accttagaacactagtcaaggtccttccacaagactttcatgagtttcaaggtcttcatttcttttgtatttaatattcaatcttaacttagttctaacacaaacctccgttttaattatattgaactgaacaatcctgaacccatattatttcatgtttttcttcccagatcatctcaaattttgacttggaatgtcaaagcatttatctgaatctaaaattccatattcccttgtatatgcaagttgataaatgcctgaataaagtaattaagtggctatgtttagaagaaacataagtagaaacataagaaataagaaaatgaggtgaagttacaaaaattaacatttaaaataaacattggatgcttgctttttaaatgtctatttgtgaaacaactaaattttgaatttttaaaatggtcctgatacaccaaattaatctaaaactttgccacttaaaatataaataggctactactgatcttaaagagctgtaatcaggacaaattcttacattgaaaatgtttgtgggcatttactcagaacagctgccacccaggatgactaaaataacacaaattagatgtaattgagttaagggaccacaccaggtttgtaattcaatttgtcctatgtggtttggatttgggttttctttttcccctccagcaaaccacagtttgaaaacttcatcaaatgggaagtacaaaggaataggaatatataatgcaaatgtttatcatgaacaatttacataaaatccactttaacagtttagacatagttttttgtgtgtgtgtgctgtctgatggcagcaaacatcacttcaacattgtttaagtttcctttgagggtcctattcactaaaacttcttgctgccaatttctcattttatcacaatttatcctagctgtaaagtaaattttattttgttctaatttcctaactttgcacactatttacctacaaggtcaaagcagattccaggttgaattc

SEQ ID NO: 203240 - DNA, 1000 bp, Homo Sapiens
aactatcaccatcacctccactaggctttgaagacataatgattaacaaaagacaaggtccttgccatcagggagcttacacactgtcatcacctccttcaccatcaccatcacatcagcaacatcatcattaccattatcaccaccatcaccacatcaccaacattaccaccatcaccacatcaccaccagcatcattaccaccatcacatcaccaccaccatcactaccatcacatcaccacgatcattaccaacatcacatcaccaccaccatcattactaccatcacatcaccaccaccatcattactaccatcacatcaccaccaccatcattactaccatcacatcaccacatcaccaccaccatcactactaccatcacatcaccaccatcatcattatcaacatcacatcaccaccaccatcattactactatcacatcaccaccaccatcattattaccatcaccacatcaccaccagcatcattaccaccatcaccacatcaccaccaccatcattactaccatcaccacatcaccaccaccatcattactaccatcacatcaccaccaccattactaccatcacatcaccaccagcatcattaccaccatcacatcaccaccaccatcattactaccatcacatcaccatcatcattaccaacatcaccacatcaccaccaccatcattactaccatcaccacatcaccaccaccatcattactaccatcacatcaccaccaccatcattaccaccatcaccacaccactaccagcatcattaccaccatcacatcaccaccaccatcattatgaccatcacatcaccacgaccatcacatcaccaccaccaccattaccaccatcacatcaccatcattgccaccatcacatcaccatcgtcagcatcacatcaccaccagcaacattaccaccatcacatcaccactaccatcattaccatcacatcatcactaccatcaccagatc

SEQ ID NO: 203241 - DNA, 1000 bp, Homo Sapiens
gatctgctgccccaagagggctgtggtgacaggtgggcatcagggcatcaccgggaatggcacaaatacagcagacgtcttaccacgtccgtgcctcgctcccactggcccagtggtcaggagtggccaggctgccacttccctcttgcgtttctgtccccctcaacccctgcaggctcctgagctgcccctgcccacttcagggcatctgagcagtgtccttggccctcggtcacatctgcagtgtcgtcaatcggggtgggcgcttgtggtcccatggaagggcctcccggctcgggcctgttgccctgtacccagcgctgctgcccctcagacttccctcgtatctccccaacagcttctggaggccagcagggtgccccagggccctgcccactcccaaaggaccaggcccctagaggtggaggtgttggggggaaggtggctccaaatactctgaggagcccacatttccaaaagggacccaaaaaagacaggagacacagccgggaggagtgcgcaggagtggagtggacggaggtgcctgacagtgaaatgcagtgttaggactatgttgtaataaaaatgcaggcagaaagggccactggtgtagacccagagaatgttaacatcatcacaacggctggcgtctctctcgctcgctctcttacacacacacacacacactcaccacctcccccaacccctgccccaggctcatttaaccctcacagtcccaaaaggtgctactgttagctccactggacagatgagaaaaccaaggctgctgagcaggtgcggggaaggaaggaagccccatggcgttctttgccttggagcagatagggcctgccctggcggaggcgcggccactctgaattgctcgtgggtccaaggactgggttcaacatggaaacgtccagtccagcctgcccggggctttgggtcatcctgtttcttggcttccgccatttcctgagctgctggcaccttcttgttt

SEQ ID NO: 203242 - DNA, 1000 bp, Homo Sapiens
atatttaaacaatccccagatatgtggaaattaaacaaaacatccaaataatccataaataaataaatattatttatcacaataaatcacaaaagagtggaaaatagtttgaatggaatgaacatgaaaatacaatatatgaaaatttatgggatgcagctacaaagggaaatttgtagatttaaatacattgtataggacaaaaattctgaaatcagtgacctcagtttctaccacaggaagctagaataataagagccaaggaagaaaataataaaaaagagtggaaatcaatcacctagaaaaggtcagaatatggaaaccaaagccagttatttgaaacaataaataaaattggagaacctctttagaataagaaaattaccaatatcatgaatgaactacaggatgttattatagttctgacaggtattaaatgcataataagaaaatattatgaatggctttatgccaatgataagctagatgaaagggacaaattttttgaaagtcacaattaccaaaattgactcaaggagaaattgaaaacctgctctatataaattaaataaattgaattcatagttaaaaccttacaacacaataactccagattcagatggctttactggtgaatattatcaaacattcaagaatgcagtattatcaattctacacaaatgttttaaaaaataaaacaaaagaataagaaacacttcccaattcattttatatgatcaacatcctctcatacaatagccagacaaagacaagaaaagcaaactatgcactgatatccctcactaatatcaacacaaaattccttaacagagtgttagcaaatttgatccagctaaatatcaataggatcatacctattccagtgagatcacttgaatcatgtgggatttatatttaaattgtaaggttagtataacattcaaaaatcagtgactgtaattcactgaatagaagattttttgaacacacctatatgatc

SEQ ID NO: 203243 - DNA, 1000 bp, Homo Sapiens
aagaagttctggattctaaattgagccctgctgtgaaaactaatctttgctttagatctccaccttgtggttacatgtttaaaatgtaaattcttgtgattttatgatcctggcttatagattctttcaaaaagaaaggtagaatggatgaacattgtctgaaaataacttgagacttatgattggatatttagaaatttataattcagattcagtgcacttcagaatgttttctctctgagacccttgtttaccactttttgttcaactaccttgaaaaattagttttgggtttcttaaggattgaagagactttcagagaccatcttttgggttagtgctagtacagaaggggctaataggaggaacctcattagtgtatctttagtaaacttgaatgaagggaacatatgggtttagaacttacaacttcagaacgctggggaaatctgtaagaaatactccaacatttacctaccatcatgtggtttttaaaaaaagaaaagaagaactaccccaacgtggggtttaccttggtccaagaaaagaagacagttttcaactataacatcctgtgacttcattttccaagtttcctcatcacaatatagaaaagctatatgatgtccgctgggtatacagcagtgctctgtgtagcttaaagaacatgtagttccagcatgaagttctgcaagagtgggcctggtgtgctgtgtgtgaatcaactctagagctctttggatttatataagtcttgatttacagaatttagttacaaagcacaataatattttattatgttcatttgcttatatattatctttttttttttacattcaatagcaaatattggtgactccaccttacaaacagactcagaatctaacaacttgtaatttcctttcatagcaaccagctttatcctattagaacatgaatcagattactgttattcccctgcttaaaaacagggattttccgtcactcagaggaaaagctt

SEQ ID NO: 203244 - DNA, 1000 bp, Homo Sapiens
ggaataaatcaaacaatgtttatgggaataaatcaaacaatgtttatcagttttgatgtcctggtatgatttttttttttttttttttccgagacggagtctcgctttgttccccaggctggagtgcagtggtgcaatctctgctcactgcaagcttcgcctcccgggttcacgccattctcctgcctcagtctcctgagtagctgggattacaggtgcccgccaccacgcctaattttttgtattttagtagagacggggtttcaccatgttagccaggatggtctcaacctcctgacctcgtgatcctcccgcctcggtctcccaaagcgctaggattacaggcgtgagccaccatgcctggcctggtatgataattttcaataaatgagctttagttttttaaaagacattagagcaaatttgagaaagtacaaaataaaaaaaaagcagcctgccatcccacacaaccacttttatttaattttgtttgtcttaaaaaagaaagaaagaaagaaagaaaaacaacaacttttaagggtgaatgtactgtccagcactctcttctttctaattttcctgtcccaagcagcttccaaacactttaaggaggtgcatcagttaagatagattaattttatactttttaagacttgtagggaattcatttatgtattttgaaacttgcgtggaaagaagtaaatacaaatggttctttatcaaatttagaaattttactcttgataattaaagtttttataagaattttgcctaaagaacttttcttgaaactagcctgtatataatcaggatttcttgatatggaatacaatctgatttgtcttttaaaacaacttgtacaggttactatttatcctgtgtggtaactaccgctcctgctgtgattcaaatatttcagcccttaagcagttatattaggcttggggaatagtgtaatttgaagcccttggaacatctttttgaattagaaaaggaattc

SEQ ID NO: 203245 - DNA, 1000 bp, Homo Sapiens
acagattgagtttctgtttgtaagtccaagagcctgcggggttatatgcctgctgcgcatgtcatttagggagtggaatttcaattgacttccgtttttcctttttgtaaaacactgtttgtaattttaccacaaatgcacatttatgtaataaaagcataattataatgttcatttaaaatgattttttccatctaattcacattcacttagcagtttaaaaagcataagatatgtttactgcaaattgcatctgaaatgcttccctatgtttgagaatgaagtttcagctagaacagtgactcctgagatgtactctgctcaggtgtttccaaacttggtgaccacagtccctctcatcctgcatgctcctccaccttctgactttgcagctcctcctataaggatgtggaatctctttcccctccccttgggtctgggcctccttgtgacttcctttggccagtagaaggcagtgggggtgaagctatatgatttctgagactaggccttaagaggccttgcagcttcttttgctctcttagaagtcagccatggtgtaaagcagtccaggctctcctactgtagaggccatgtggagacagaaaccctggaggatgggaagccatgtggaggggaataagccagtgaagccctctctcactccaccctcgtcaagctcccagctaaatgcagccacatgaatgacctcacctgctttgtggagcagaagaaccacccaggtgagcctagccaacccacagaatggtgacaaataataaatggttgttgttttcagccattaagcttgggaggtggtttgttaggcagcagtcaatcatttgttcttatgacagacatttgtttgctggttagattggatgtaacctgggatcacatgatcacacattcacaatgtcagaaatgtccccaacaacagacacttggcaatttggaattaataaacccagcttcagagaatccctgtttcccagtcact

SEQ ID NO: 203246 - DNA, 1000 bp, Homo Sapiens
actatggatgatcagaaaggttgggtaaatattaaaagtaataagagaccaagcaaagaaataaaagaatcatgaggccaaaaactgagagaagatggaaattcagagaagaaagtccagagtttggcccactcttcccctggggaaaactgtcattgtcttggctgggcatggtggctcatgcctgtaatcctagcactttgggagttcaaggtaggtggatcactttaggtcaggagtttgagaccagcctggccaacatggtgaaacctcatctcactaaaaatacaaaaattatcctggcgtggtggcacatacctgcaatcccagctactcaagaggctgaggcaggagaatcacttgaacccaggaggcagaggccgcagtgagccaagattgcaccactgcactccagtctgggtgacagagagagagagactgtctcaaaaagaaaaaaaaaaaaaaggaattgaaaatttaaaccaggccgggcgtggtggctcatgcctgtaatcccagcactttgggaggccgaggcaggtggatcacgaggtcagaagatcgagaccatctggctaacacgatgaaaccccgtctctactaaaaatacaaaaaaaatatatatatatagctgggtgtggtggcgagcgccgtaatcccagcactttgggaggccgagtcgggcagatcacgaggtcaggagatcaagataatcctggctaatgtggtgaaaccccgtctctactaaaaaacacaaaaaattagctggatgtggtggtgggcacctgtagtcccagctacttgggaggctgaggcaggacaatggcgtcaacccggaggcagagcttgcaatgagctgagatcacgccattgagctccagcctgggcgacagagtgagactctgtctcaaaaaaaaaaaaaaaaagaaaatttaaacctgagcattttgctgctggagataacctgaccccatggaaatgatattctataagagaattc

SEQ ID NO: 203247 - DNA, 1000 bp, Homo Sapiens
cactattcacaatagcaaagacttggaaccaacccaaatgtccaacaatgatagactggattaagaaaatgtggcacatatacaccatggaatactatgcggccataaaaaatgatgagttcatgtcctttgtagggacatggatgaagctggaaaccatcattctcagcaaactatcgcaaggacaaaaaaccaagcaccgcatgttctcactcataggtggtaactgaacaatgagaacacatggacacgggaaggggaacatcacacactggggactgttgtgaggtagggggaggggggagggatagcattagaagatatacctaatgctaaatgacaagttaatgggtgtagcacaccaacatggcacatgtatacatatgtaacaaacctgcacgttgtgcacatgtactctaaaacttaaagtataataataataaaaaaaaaagaaaagaactgtcaacctagaataatacatccagtaaaagtatctatcaggacaagggtgatattaaaacatttatgcaaaatggatccactatccaaaaatggatggagcttataactagcatgccctcactaaaggaatttttaagggatatgctcagaaaagaaggtctgagatgcccgaaggaatatgtaagcaaggaaaactataaatgtggataaatctaatttaatgttcattgtgtaaaggttgaaaacaatgactgattagtgaatttttaagaaatcaatgtagaaaagtatggataataatgtcatgttaagccaggcttagaaaacttggattctaattacatatattgtataaaatgagggaaaagatattaattaactttagaccttgttaaattaatacacatgtttaagcttctaggttaactactaaaagaatagaaacagagtgtttaagttaataaagaaacaaaataggccgggcgcggtggctcacgcctgtaatcccagcactttgggaggccgaggcgggcggatc

SEQ ID NO: 203248 - DNA, 1000 bp, Homo Sapiens
aaagaaactttacttttggagtatggcctctgcattgaagatctgtaggattttttaaaattaattttcaagtctttccatgacctctctgttctaagaaatatcatctttgtaataatttgtgtgaatactttacaaatcaaaaattgattcacaatactgtactaccataatcactaattttaagtctcttaaacattttctatattacttttcttgattataaaatgtcaataatatgggcatgctcttaatataacagaatatttaattatattatttttcccatcaacccaccagtcatttattaattacattggccatttccattgattggcaggaggctcttccatgaacatctcctatcatttccactgtatcatttttcttgccagacttagttcattttcagcctgaagaatcacctcttttatttgaacaccttgaagttggtcttctaattttttaacatctggttctgctttaaccatagccaatttctcatctgcaatctgttctgtatactttctatgtgctgctttttaaggggtttgcttaagaacatcaaggatctttgtgtacaatattcttagcctcttacattttagcagactgattttagttgcttgtcttgtgtggactcttgcatacagccaatcccatgaggccagtggtcttcttcagcacacctgccatgacagcgccaatgagccagtcggatcttctttaatttctttcaacaatattttgtaatttttagagtatacattttttccaagaatataattatatacatattgttttatatgatttctttgaaaaataggagaagaaataagaaatatgcacttaaaactgccttttataattatataattacctttatcagtgctctttgttctatcatgtggatttgaatttccgtctgtatttgcttgctttcagcctagaggatttcttttagtatttcttgtaaagtgggtctgctagcaatgaattc

SEQ ID NO: 203249 - DNA, 1000 bp, Homo Sapiens
ctagtaagcctgagggtactgcaggagaccagggcgtatctcagtccttatctagactgcataggacagacattcccagagcggctgtttatagacctcccccgaggaatgaattcctttcccagagtattaatattaatatcccttgctaggaaaagaatttagcgatatcttccctacttgcacatatgtttacaggctctctgcaagaagaaaaatatggctctttttgcccaaccccacagtcagtcagaccttatggttgtcttcccttgttccctaaaaatcattgttattctgttctttttcaaggtgcactgatttcatattgttcaaacacacatgttttacaatcaatttgtacagttaacacaattatcatagtggtcctgaggtgacgtacatcctcagcttatgaaggtaacaggattaagagattaaagtaagacaggcataagaaattataaaagtattattcaggaactgctaaatgtccacgaaatcttcacaatttatgttcctctgctgcggctctagccggtccctccgttcagggtccctgacttcctgcaacaggtgtctgccaccaagcttggctaattttttttaaatttttggttaaatacaaagagatgggcttttgtcatgtcagccaggctggtcttgaactcctgacctcaattgatctgcttgccttggcctcccaaagtgctgggattacaggtgtgagcccccatgcctggccaagggaaatctttttttttaaagatccatttgtgttgctatgaaagtaatctaagccatttctttgaactcatgcctgatattttatggtattttatgatgtggctttactgatttttacctactcattcttccaggcatggttgtcaaagttattttccatctctcccctgactccccagcactcgctccataaaaagaaatatagcaatgaacatccccaggaatgtcctctgataaaactatatgagaattc

SEQ ID NO: 203250 - DNA, 1000 bp, Homo Sapiens
ggcagtaatcttcctttctaaagctgacagtaactcccacagtaataaatggaagcctgtttaataagaaatatttacgtgtgtgactgtgagcacagctgaaaacgtggtgttcttcgtaaatttagaactgcattttctaaatgtcgagtgtttattacctggaaaaaagaaaggaaaaacaactctacattttagacgtgttccacagcttccttgatgagacattttaaggaccattagttgtctaaatagagattgtattttagagtggagactatgaaagagtgttctctagtttaaggttatatcctttaccttgtgatagagtcaagctgtaaactcaaagcaagcatctggcactctggttattctaagtcatctttctttgctctcccttttaagcatctttcttcactttaaaaacaaacacaaataaaagcacctatcacagggagggcctcaaacgagggcttaataggtgttgctttgcttcctcttctcttttctttagtaggcagactaaattctatgactctgatctgagggttaacagtagtccatctatggattctatggacttgatgtatcttatactgtggttcctggaaattcattttatcaggagtgagtgatcttttcagaaaagctgctcaagcttgagcctgggaggtggaggttgcagtgagctgagatcatgccactgcgttccagcctggacaacagagtaagaccccatctcaaaagaaaaaaaaatctgctccagattttcagaaaggaaaataagattttacacacacacacacacacggtttttgtgtctggtaaactagcaaactgtctcatctgatttctttgccatcatttctgctttaaattagaactctagagaatgtaaatatctaattatctactggtcagcttcagagatttcaggcttcaaagaagttcagtgtggtttttgtgtgatggtttatgatatggattattcaaggaattc

SEQ ID NO: 203251 - DNA, 1000 bp, Homo Sapiens
actggtttgccaactttgtgctttttgttctaatcaagttctaccacttgcatggttattggcctctttcaactgattcatgctcttttcttttaactttgggccattctttgcagtcatatctgtgaagtcacacagactgaggcaggatatgtatttcctaatctatattaaaataaatagataaccactaaaataaacagtattcatccaggtaccacctacatcaacaccactgtggtaggcaaatcactttggggaaacactaattatgctttgttccgaaaattgaaacataatcaagtgcatcaattctgtaatttaagtcttttagtaggatttctgcaaacacagtcagcaatactgtcttttcccagaagaaagtgggcactgtgggtataaatttttctgtgtaccggccaggcaaggtggctcacgctggtaaccccagcactttgggaggccgaggtgggtggatcacgaggtcaggagttcaagaccagcctggccaagatggtgaaaccccgtctctactaaaaatacaaaaaaattagccaggcgtggtggtgggtgcctgtaatcccagccactcgggaggctgaggtaaagaattgcttgaacctgggaggcggaggttgcagtgagccgagattgcgccactgcactccagcctgggcgaaagagtgagactcatctcaaaaataaagaaagaaatttttctgtgtaccaattgtttaattggtgaagcacaatgtgagctgagagaaggaaggatgttttgtcatctcctcagatattttaattaagtagattctgaacttgagaaagcatttggccattttagcagtcagtggtaaagatttcctcaaatcttgactgtcccatcttcctcatcccctcacccctaatgtgttccccaagtctgcatagtctacctggaaaaggactcttaaaaatcctccagaagacaaatagacaaactgcacaagcagatgaattc

SEQ ID NO: 203252 - DNA, 1000 bp, Homo Sapiens
acgatctcagctcactgcaacctctgcctccagggttcaagagattctcctgcctcaccctcctgagtagctgggattatgggcacatgtcaccacgcctgacttctttgtatttttagaagagacagggtttcggtatgttggccaggctggtcttgaaatcccgacatcaagtgatctgcccgccccggtctcccaaaagtgctgggattacaggcgtgaaccaccgcacctggcctgctaaatgattttttttttaattcattgtacttatttaaatgagacactaacagatatgtttatgttttttaagcctcagaaaaaagattcaatgccaaagattatctataaaatccaggggtccactagcagtgcataaattacattgtcaaataattcatcattccaagtgactaaaacaaacaaatgctactatcacataaaatagaacatacaatttttggccttttaaaactttagtatttttccactcttgcttttgcttaagaaataaatacaactctcagaatctatagccaacatacaatatataaaacatggacatagccccaagtttatattatcaagtaattcagcagacctaaaaagtactttgctctagctaaaaattttatcaatttccatgatgagagcaagaagggtggatcaaagtatgatctttctctacaaatttctatcagtagggtctctgaaagaagtgaatgctatttaattaataaatgccaatcactctattatttaatattttgtcaattaatttagattcatacataaacacatacaaagagcaaatgataagaatccatcaagctgaaatgcatcgtaaccaaaaacaattttcttacccagattttgctttttcttcctcagcttctacctttatgttgagggattcatctaccctagttgtgtcatcatctttgtcatccagattttcattgtcttctggttttttaatgttaacttctttttcctgatc

SEQ ID NO: 203253 - DNA, 1000 bp, Homo Sapiens
gtgtgtggctcatggtaggcctgtgtgcatgcttactggatggatggaataagcggttgtatccagctacctcttcttttctcgcttcttcttaacttggtacagttgtcttcctttgccctcctcgcttccatccttccttccctgcttcctttgtactcatttttactcctcagcactctggcagagctagcatgtacgtcgagtgctttgggggttaaaagtatacacaagacaatcataaaacaccctatgcaagccatctatgtgaggggttcctccagagctccccactcttcctccttgtctcttctgcccactttgtctagggtagctgggaatgttttcactgtcctaggggaatttgctgttcttcagattgaatttgaccccgttttcagcctttatttcccaccagagcctgatggtgtttgtattggcaagccagaagactcctggcttggagagaattagagttagtacagcctgcctggccctgtcttttcagcctctatctgaaggggcaaaacaaatttttcggccttggttaattgttacttagcccctctgatccagcctgggcaactttcaggtagctcaggcactgactagcctgaagtctctgttgaaacagggaagattaaagttgatttgattcatttgaagtaaaatcagcaggcttttgatgatttcattaatttcctcccttctgaacaccctcctgttagcagtaattggaaaccctgactctgtttctcatttcccccccacccctctgctttaatctgagacaactggaaactgcactcagctttttcatttactggaagaatggtttgaagatggttttaatgactggctttgacactgtttccagaagctgagactgttgccgtgcttaagttcacacctacctgggggcctcagttttgctcaccttgcttctataaaactgcttagttcttggtgtgcaggtggaagagggtccccatgagaattc

SEQ ID NO: 203254 - DNA, 1000 bp, Homo Sapiens
actgtactccagcctggttgacggagtgagactttgtctcaaaatgaaacaaaaacacgcacaaaaaaaggtctagttcttcaaaacttcttttcttgaaatgtcaccatggtcttattagacaggaaaagcctctgtggcagtttatttcccaccctaggtaaccataatatagcccatatttcttttcataccattatctaaaaacaacaacaaaaaataataatggagataaacctaaatggataaactcctttttaaacactcatttactgttattattttgtgggagaggagtggggtcttgctctgttacccaggctggagtacagtggcgcgctctcatagctcactgtaacctcaaactcctgggctcaagctgtcttcccaccttagtctcccaagtagccaggactacgggcacacaccaccatgcctggcttaattctcaaagtttttgtagagatggagtctggctatgctggccacatttacttaagtatatctttttattaaattcaaatacagtttaaataaaagggacaaatttagggcctttgtaattagtaaacggtttgtttttgtaaagtttttctactgtttttaaatgtgaggtaaggtcataatttgcttcatattaggttggtgcaaaagtaattgcagatctgcctctgaaaagtacaaaatctattcgctgttacgttagggctctattttgatagtttatttttatttagtagtagtctattgggccttcaaaacttgtttaagcatatttatacataattatgtgcatcgtcttgtgctttctcacattcataaagtagataggaaaactccataggcatcaagtgtaaacgaaggacttaatgttgaatttgttgtggaaattggcacaaatctcaatatagaacattggttaattattaatcttaccaaatgcttatctcactttccctaactcaagttatactcaagaaatacaaagataattgaattc

SEQ ID NO: 203255 - DNA, 1000 bp, Homo Sapiens
ttcttcagcttttacagtcactgtcatccacttatcaaccacctaacatctgcaaggcactggtaatacaataaacttactagacttgctcctggattctcatgcattcagtgaatccattcaacaaatattaagtacctactatatgccaggggctgcaaataaacaaaggacatggtgtctgcctgcctgcctgccctcaaggaccttacagtctaattagactgtaatacaagtaaatggactattatagtaccgtgtgttaactgttactgaagagatccacacaggctgctgagcagccgcaaagattatggcgaatttacactctacatgagaagactggacatatacagaaaaagataacagccaggcaatgtgacataggctaaacactaaatgagtgatttgtttcccaaattacactggattaattcacacacttcaagataagatactattatggaatgatttttatatatacattcaaccaacatttcctaagggcccactatatgccaagcaacccgcttagcacttttccaacagtgtctcattcaattctcacattttatagattaaagatgtgaatctgaaagggtgaagtgacttgccgatgtctacatattaagctgcagagacgggatttagaatcatgtcttccaactccatgtcctttcatgggacattttttgctttttcattcatcctatggaatacaataaagtgttctgcacaaatgagccaccaccaactgccagcctgatataactagatgcttatccacattctgagacgggaccatatcagatcaaattactctggtgcctattatagatcatgtgctgaaagaagtgcagttggctgaagatgagcaactctttcaagttatattttaacagtgtttttgaccactatatccggtcagttgttccagtgttcagtaataaatcaaaatgattgttcgtttcctttgacagttaacagtactaatgaattc

SEQ ID NO: 203256 - DNA, 1000 bp, Homo Sapiens
tggcgttagaggtgagagtactggttgcctttggggtatcaactggaaggaggcacaaggagaggcctctagggggctgggaacattctgtatcttcagcacagccgttttgtaacgttgggtctgtaaatgtgtataaattcatcaaactgtattctaaatatttgcatgttactatttgtgtatgacaccttaaaagttttttttaaaaagtctgagcagatcacctggctcaaaatcaaagttaaatcttcccccttggaccccttagggcctgagatgagcaaggggaaagggggctgtgcctggtgccatctccttccccaaacctccctcggctcgctcagcccacttccacccatctagaaccaccaccgggaagggagaaagggagaagtggggaagggctccaatcccatctggattggcagagggtaaagctgaccctgtctctcctgggaacattcatgggctcctcggtggttccctgctgctttgtctcctgaagtccccttaactcaagcagatgtgccactgggtggatgcttacctggtggctgtggaggggaggggccctctgcccttcctgagggacttttggacaggacctaaatggatccatgggtcttgtgcttgctcatccacccagctcacatctgtcctcaggaaacactggcacactcctcgccccaacattagtgaacaggtgggtcccagcacagcagcatagctctgcctctgaaacagcacatgagcccttcctgccactgtgccctccaaattgagtgccaaatattgagctctctgagaaatcccttggaagccaccctcacaggcttaaagtgaaggaaggagtgcctgtcctctgtgtcccctggcaggatcacctgaccaaactttctcttccactctcatcttttattcctgagtgtgggacagattcccaaacatttctcttgacaatctgcccatggcgatctgacatagcatttgagaattc

SEQ ID NO: 203257 - DNA, 1000 bp, Homo Sapiens
ttctaggaattatattagatggttaatttgagatctttctaactttttgaggtaggcgttaagtgctataaactttcctcttaacactgcttttgctgcatcccagagattttggtatgttgtatctttgttttcatttatttaaaataattttttaatttctgccttaactttattgtttgctcaaaagtcattcaggagtaagttttttaatttccatgtaattgtgtggttttcagagatcttcttggtattgatttctattttattccaccgtggcccaagattgtggttggtatgatcttgattttttgaatttattgagacttgctttatggctaagctagtgatcaatcttgatgtatgttctgtgtgcagatgagaagagtggttgatcagtggagtgttctgtaggtgtcaattaggtccagctggttgtgtccaatttaagtccagaatttctttgttagttttctgcctcaatgacctttctaatggggtgtcgaaaacctccgctactattttatggctgtctaggtcttttcataggtctagaagtacttgttttatgaatctgggtgctccaatgttgggtgcatatatatttaggatagttaagtcttcttgtttaactgaaatctttatcattatttaatgcccttctttgtccttttctacttttgttggtttaaagtctattttatctgatataagaatagtgactctggctcttttttttgttttgttttccatttgcataataaatatttatccaatcctttactttgagcctatgggtgtcattatgtatgagatgagtcttttgaagtcagcactcggataggtcttgttttttcaatccaacttgcactctgtgcctttcaaaaaaaataaagataggatctcactttgttgtccaggctggtctcaaactcctgagctgaagcaatccacccacctcagcctcccaaaggatcacaagcatgagtcactgtgcctg

SEQ ID NO: 203258 - DNA, 1000 bp, Homo Sapiens
ctggtactgatcatagtttgcttcattttgtttgaaattgtttttcttgtgtagattgaaaattaagaataaacattttcgtatcaaaatacactccagagtagacaaagactgaaatgttttaaaaaattgaaaaacacagaagaatatttttttataatctgaaaggcttttctgagtatgatgcaaaatccagaagccatcaaagaaaaaaattgtataacagtagacaccataaacaacatctaaaggccagtgatacatttgcaacacacattatagacagagggcttacttcattgattttcaaagcttctacaaatcagttacagaaagaccatcacatcagtgtgatatgtaaataggcaaagaatataaacatgatttacagaaaaggaaataacaaatggtgtcttcgcatatgaaaactcataagagaaatggaaattgaaagtacaatgggattttttttaacttaccagtttgaaaaaataggaagtttgaaaatatgctatgtggccagggtgaagggaactaggcattgttatatattgttggtcagactgtaaaatattacaaactctttggaaggcagtttggcaatatctttaagaatataaaaattaccctttgcttcatcagtttcattgccaggaatatttcctatagagaaatattcaaacaagaattatctacaaggatactcacagcagtgtttgcaaggtaacaaaacattagagacaccattggtgttgaggagtagggtgctagtgaaatcatttatggtgcatccgcataacggagtaccctacagctgttgaatgaatgatgcagtgtcagagatacccgtctctaaggtacatttacatgaagagagcagagttcattactgtgtgcatagtagagcacacacacagagaaaaacatgtaagtgctatgcatacataagacatcgcttcaaagagagcaagtttccacagttgcgctgagaggagaattc

SEQ ID NO: 203259 - DNA, 1000 bp, Homo Sapiens
acagtgtggtgattcctcaaggatctagaaccagaaatgccatttgacccagcaatcccattactgggtatatactcaaaggattataaatcatgctactataaagacacatgcacacatgtttattgcagcactattcacaatagcaaagacttgaaaccaacccaacggcccatcaatgatggactggataaagaaaatgtggtacatatataccatggaatactatgcagccataaaaaaggatgagttcatgtcgttgagagtgatggaactacctaatgtagatattgggctgatggatgcaggaaaccaccatggcatgtgtatacctatgtaacaaacttgcacgttctgcacatgtatcccataacttaaagtattaagaaaaaaaaagaaaaaaaactcaccatgctctgtctcatttaagtctcacattgatgttgtaaggaagatactgtttttaccctattttatagatgaaaaaatggaggcctagggaaattgagaacattgcccaaggtcacatggctagtgagtggcagagtcaccattccaaccacagaactgtacagtaaagtactagcttctcttgaatgagaggcagtgcagtgtctaactaaagagatgccccaggcaaggaggcagaaggcaaggtttagttccatgaatgcctctccacctcaattcattcaaccacagtgtaaaaagaaaaagaaatgcctgttttggttatctcacagagtatttgcaagtctaatttatgaagtcctgtgaaggctgagaagctgctttctgctgtgctagtttgggaattgttcatccagactagttgatttctttctggcctccagctggttaaagttgggggctcccttcttctggtccttgggagggatctcctctgtcagagtcaggtgtggagtgtgtgggccatggcccacgttgggtaagctgggtttctcagggtgcagggagagtaccaggaagaaacctgatc

SEQ ID NO: 203260 - DNA, 1000 bp, Homo Sapiens
tatcagcttaaggagattttgggctgagacgatggggttttctaaatatacaatcatgtcatctgcaaacagggacaagttgacttcctcatttcctaattgaataccctttatttctttctcctgcctgattgccctggccagaacttccaacactatgttgaatgaaagagggcatccatgacttatgccggttttcaaagggaatgcttccagttttaacccattcagtatgatattggctgtgggtttgacatgaatgaatagctcttattattttgagatacattccatcaatacctagtttattgagagtttttagcatgcagggctgttgaattttgtcaaaggtcttttctgcatctattgagataatcatgtggtttttgtcattggttctgtttatgtgatggattatgtttattgatttgcatatgttgaaccagccttgcatcccagggatgaagctgacttgatcatggtggataagctttttgaggtgctgctggatttagattgccagtattttattgaggattttcgcatcagcgttcatcagggatattggtctaaaattctctttttttgttgtatctctgccaggctttggtatcaggatgatgttagcctcataaaattagttagggaggattccttgtttttctattgattggaatagtttcagaaggaatggtaccagctcctctttgtacctctggcagaattcggctgtgaatccgtctgattctagactttttttggtgggtaggctattaattattgcctcaatttcagagcctattattggtctattcagagattcaacttcttcctggtttagtcttgggagggtgtatgtgtccaggaatttatccatttcttctagattttccagtttatttgcgtagaggtgtttatagtattctctgatggtagtttgtatttctgtgggatcagtggtgatatcccctttatcattttttattgtgtgtatttgatc

SEQ ID NO: 203261 - DNA, 1000 bp, Homo Sapiens
tcaatatgtgccgccagtgtttccgtcagtacacgaaggatatcggtttcattaagttggactaaattatcttccttcaaaggattatccaaggcatctgctcaatgaaagaccatgatagttctttgtacataaaataaagatttgaaaaaaacaacaacaaaaaatactttttaatatattaaacagaggctgggtgcagtagctcacacctgtaatcccagcactttgggaggccaaggcgggtggatcacctgaggtcaagaattggagaccaccctgaccaacatggtgaaaccccatgtctactaaatacaaaaaaattagccgggcatggtggcagatgcctgtaatcccagctatttgggaggctgaggcaaaagaattacttgaacctgggaggtggaggttgcagtgagccaagatcacaccactgcactccaatctaggcaaaaagagcaaaactgtctcaaaaaaaaaaattaaacagaaatcctggaactgaccaatatatctgctgaactgaaagatgcattagaggttctccacagcagaatggataagcagaggaaaaaaataattgagcttgaagacatgctatttgaaaatacacagaacagaaaaaagaaaaaagcatgaaaaggaacaatgaacacctacaaaatataaggaataacctcaaaagtgcaaatctcagagtcattggtgttcaaaagggagtttaaaaagaacaaggggtacaaaccttattcaaagaaatgataacacaaaacttgccaaacctagagaaagatatacccaggtgcatagaggaaaccacacaagccaggagggagtgggataacacattcagagtgctgaaggaaaaaaaaaaaaaacaaaaaaaactgtcaaccaagaatactatgcccagcaaaactttccttcagatatgagagataaaagctgagagaattcatcactattagttccatcttacaagaaatgctaaagagaattc

SEQ ID NO: 203262 - DNA, 1000 bp, Homo Sapiens
gttggccatgtaacagaataagggtagtgtttttaagtttttgaataaactctgtgtcacagatgttaatcactttttcatagtttgtgggtttaatatttacagcgttaacgctgtcagaagttaccatccctctgtagataggataaataagtttctaaagactgttttttctactatttctgtattttactcaagtccatttcacacaggctctttaaggcggtgatagtttaatggcaaaaacgtgatttgagagtgagtagaagatctagaactgccaggtttattgtggaaacctgagcacgtctcttaacctcgttgaacttcagtttctttcctctataaataggaaatttatgttaaatcactttataactttataaactgaaccacataaaagtaatattgtggtatggaactttttaaaagaaaagtaaacatttggaaatttcatgtctgccatgtaactaatgttgctgcatttcacataggtattgggaaatgagagagcagcgcacccccactttgaaaggcaagctggttcagaaggctgatcaggagcagcaggaccctctggaataccttcagtctgatgaagaggacgacgagaagagaggggcccagcgccggctgcaggagcagcgggagcgcctgcatggagccctcgcgctcatagagcttgccaacctgactggggcgccactccgacagtagcttggacactgactcttccactgtacaaaagtactgcccagcatacttaaaaagtagatccttgggcataagctaagcaccttatttgcttatcataggctgctattctgtagaaatttatgaagaatgttattgccccagaatatggggtgagagagaactgcacttttttaatatggaaatgaattcatcgtaaagtttaaaatattttgtaaatatggactgcacagtacagggtagaaaactacatattgtgggaagctagattttgcaagtttaatgc

SEQ ID NO: 203263 - DNA, 1000 bp, Homo Sapiens
ctctgcccagacacacttttcattgattcttcggagggcagttccaagagattctctggggctttctctgcatcatgagacacagtgcagttctgcccttgaccttcctgcagtttgtcgcctcttcctcatgatctcagaggaactttgtctcaggccagctgtttgttccttgggctctttcatttcccctaaaaatcatttgctgtcctgccttcatctccatctcccgtttccctgagaagagggtgctcattaagcatcagtcatctggcccttcttgcagtctcattttttggctggctcccatgtttatgcatgttaataaggttctatgttttccttctcctgttaagctgtctgttgttagtacattgctgcagtgaacttttagagaggagagtggaagctttccttccacccatacaatagaactataaagcagaaaagtttagaaagaatttcttatttaagtgctgaaactttatacttcagtttttgataaagagcagagggcttaaaaaaaacgtatttttgaccaaaagctctgttgacattctattaaacaaacacaaacctatttaattttttaattaaataggttgaattaaaaatttaaaaaaattttaaaaatctgccataatttaaatggcagatttttcataattcttatgctaataaatcatttcctgattttttaaataaaacccaatattcataatgaagtccagaaccacaaattgttttaaataatttcttatttgtgattacaagtccacctctagggaaagttagtgtactcacaccaaggctagttttgcagaagaaaatggcaagtttgtaaattcccagggacacaacaataatgataagcatccaaggaattccaaaaaagtcaggcccgggatgaaaatgcccaggcagaaaattgacgatatggaatactactagttgacataatgagaaggctcaatgacatttacaatatttcagttacaaa

SEQ ID NO: 203264 - DNA, 1000 bp, Homo Sapiens
acctaatcaccttctaataccatcacctctggggttaggctttcagcatatgaattttgggcagacacaaacactcagaccatagcagaggctgaatggagagagagaatacaaatcaaaggacaaaagttctaatgaagataaagaacagctagttctcttcccctctctggacaatttgcttttcagagtattgtaaatacgtggacttatcttactgtttctctgagtggtcctgtctgtactgagtcctttcctggccaatgcttgggcctgacagcatcagatttctgaaaaagagaggaaaaaaaagtcatgggagaaggggggctgggcagaggaaggaagctctcagcctcctcctcaaaaataggtctccaaggacactatagccatttcaaactcttttagctaaagggaccacagctgtgggagcaagaacttatatatatatacatataaaaaaataaaaatatatatatattatttttattttagtattttggagacggagtctcgctttgttgcccaggctggagtgcagtggcacgagctcagctcactgcaacctctgcctcctgggttcatgcaattctcctgtctcagcctcctcagtagcagggactacaggtgtgtgccaccatgcccggctaattttttgtattttagtttcaccgtgttactcaggatggtctggatctcctgacttcatgatccacctgccttggcctcccaaagtgctgggattacaggtgtgagccaccgcgcctggcccaacttaagtatatttttaagaacagaaaaaacccacttgctgtgctgagtcctggctgaggcatgtccaacatagcaatagtcctgactttagttagagctgtcctctttcctttattttttacattacaaaataattcatttccatcctggcatggtggcttgcacctgtagtcccagctactggggaggccaaggtggaaggatcagttgagcccaggaattc

SEQ ID NO: 203265 - DNA, 1000 bp, Homo Sapiens
ggtaatttataaagaaaagaggtttaactggatcacggttctgcaggttgtacaggaagtatagtagcttctacctctgaggaggcctcaggaaacttgcaatcaaggcagaaggcgaaggagaagcaggcatgtcttacatggccagagcaggagcgagagagaggaaggaggtgctacacactttgaaaacaaccaggtattatggtaacttactattgcaaaaataacaccaaaggggatggtgctaaaccattcatgagaaatccgccccccatgatccaatcacctccagccaggcccacctccagcactgaagattacatttcaacatgagatttgggtggggacacagatccaaaccatatcaaatgctcagtgccattcattcttgcctgcctatctctggttccccacaggatgcctgacatgtagggatcactcaaaaattgaattcaatgcatgcctatgaagtgaaaggaattctatagccactagactgaggtctactcccaactctgcatttaactctctgtgtgaccccagacaaatcccttcaacttgctaagcctcagaggctcctccctaaaatgcagggcaagttaccatctcaggcatcctcccagtctgaggttccgtggttccatgaattaggcaacccatgcaagggagcctgggtgtggaacagagaaactcctgcagaaatctagataaagaccaagacacccacccagaggctcagaactggccagaggcatgccccccagcacatgtcactccacagatccactgagagcctcccagaagtcaggctccctgctagaccatgagaatacaaaaatgaacaagatcccacaacctactcacgtggctgggggcatcagctccgtgaataggtaatggtgcaacacaatgaccctactccttggaaagctgaattaaaatctaagtggaaacaaaatttcagtgttggggattgaaaggaattggagccttgatc

SEQ ID NO: 203266 - DNA, 1000 bp, Homo Sapiens
agaaaaagaacactttaggtataattgatggaaattgtgccggctcaacctttctagttaaaagcaccggcaaagcagctgtctcgggcttaatacatatgtatttgtatttctgcacctggtcctggcacacaagatgagtgtctcaagagccaaagactttatgtgcttgcatccccaaactatgtaatagaccccattaaattggctggagtttatattaggtgtggataggaggaaatgccattgtgttcagtggactgatcacaatctctgtcaagtcaggagagagagaagagtgtttgctttaaaatgcagggaaagctttcagattttctggctttggttgatgaaaatctagagtaatttttgacacacaacaaaaacacatggatgctcttcaaatatccttttggcccctctataacgtttgaccacatattactgaaatggttcaaaacttggatttcaaacatctagggtgttgtcatgttatagctacattaattacaacactaagtagacagatataaaattttaagcattctttctagactttttctgtaaacaagtagctaaattctgaaagattgttcataataataatatgcacatattctactcaatatctttcatctgtaggctgcgacttcttagcaaaatggtgattatactttatagaaagggaaattctatgaatttacctcttgtatttacagaggagtgtcatgctaaaggcaggaagtaaaggggccttgcctggtcctcataggcctggtcaaacaaagcatggaatatttttggccactcctagataatgaaccttgaaatataacattgccactagtcccaaataatactgtggccttcctgtgatgcttcagtctcaggtggtctgcctgagaggggacactctatgcaattaaccttctgataggtgctgaggactcattcagtgctctccctttgtgctaggggttgtggtcaacacaagatttct

SEQ ID NO: 203267 - DNA, 1000 bp, Homo Sapiens
tgctatttagaatagaatgtgaatcttacatcgatggcactaaggaatatttggattacttagacaagttttttcttttaatgtaagttaattttgtaatgcttgtgctgcaagtaatacaggaaatatgttctttgttttatacttgattaggtagttcagctacaggaatggatgattaaaagcatcaataataatactgctatatgtgtagaaggaaaattgatgtaagtatactatttcattattcttttaataaaactttagttatgtgtaagcacttaagagttaatgcatgagaaatagcatcctccacaaagcaaagacctaacaaggttatgaactgaaggcaaaaaagtaaaattactgtgcaggtcctagccatgttgattgctaccagctttcttgtttttgcatgtttactcaagtttttcttaaaataatgacagttcaaatttgtatagtggtttatttttttctgaggtgctaataagtggactggtattatctgcttaattatatatgatcagttaatatttactacatgcatttcagtccagattctcacatctaaattgggacaaccagatataaattactgatccagaaaaggaatcaaaattacttaaaactttgccatacggctacatattaagtaatcattggcactttctggttctccctaaagtgagagcatcaccaggtaagtgggctttacctaattctgctactctattagcaccatttcctattcttcaagaccagtttcttagtgctacaaatatttgtaataaaaggttataactgttctccagcctgggtgacagagcgagactctgtctcaaaaaaaaaaaaaaaaaaagttataactgtttaaggtactcatatgtaagtttataagtgaatgtgtaaaatctgtattgtccattctttatctgtctgctttatgcccatttccttactattaaagatgcagtgtagattgcctttgttggaattc

SEQ ID NO: 203268 - DNA, 1000 bp, Homo Sapiens
tacaggcatgaacgcactgtgcctggcctgcctttgcctttttaaacctctttcattagaagctttgatagcccttttcaggagatgttaacattcctctgaggaatgcagcttttcacaaaggagaagagaatttcaaaacagtgggatcgagctcaaacttcttggcctttgactcttatctttactgagaataattaaattgaatttatttatgttttcaggattatgcatatcctgaaggaaaataaaaaaggtattttacatgtcaatatgcatatgtaaaatttatgttatatagtatataataaaattttatacacacaggatctaaaaggatagacctcaaatgattaacaggaattacctttggggaatggggttagatgttggggacaatatttgataatttatacacttttttactatttgagatgttcgtcttttataataaaaaccacaattaggttgggtgtggtggctcatgcctgtaatctcagcactttgggaggctcaagtgggagggtcgcttgagctcaggaatttgagatgagcctgggcaacatggcgacactttgtctctacaacaagaaaaataaaaaacaaaaagagggtaggttaagaaaactggcacagcccaatgaagacttttcagtaagcagggtggaaaggagcaaaacagaagtcttaaagcttacaatcatcacttcactctccactccactaaaagctctcagaaaacaaacaaatttggaacaataaatcattttgctttaacaggtttttgtttcaaagctttcaatcagcccggcactgtgtctccctttttttttcttttcttttttttttttttttgagacggagtcttgctctgtcgcccaggctggagtgcagtggcgtgatctcgactcactgcaatctccacctcccaggttcacgccattctcctgcctcagtctcccgagtagctgggactacaggcgcccgccaccaagcccgg

SEQ ID NO: 203269 - DNA, 1000 bp, Homo Sapiens
gcagccgctccatggccacaggccctgagaggcccctccccactgcctctgcttctctgatacaaagaaaaggggaggaaatggagtttggtgcaggcaatgggaggtgggaaggaaggagtaggaggaggacggagggagggagaaccgactatggactctgagccagaagtgcaccctccaaggctgcatcccagcagtgggcaccctgccctatccctcacccctgggagggctgatggtgcagactgggaaggggcctgctgagcacctgaaaatgagtcaggcattctgtcacagtcatctagggcctcctctactcccctgcctccacctccctctcctccctccctctccccctgggctggccacactctggcactagataccacccagtccgggcttacttacagtagaagctactcggttcctttctcctaaagttctgctgggttttatgtgggcctgatgaagagctttcagtgtatcaatgtttccatcattgacactgatatttctgccaaggtgtcttagatggttgtctattagccatttttgtttctaatctctctcgcttcctcaatgacattgtttttagttggatattttgcagagtaaatctgctgtgagaaagctttgcctgtgcccttatttctcgtcaaaatatttttattgcatggtcaggaaattagatatgaggtcactgaaaatgtgaaaatataagttattgtcttgcccgagaaaacgctgcagaggtcacttgcagaggttcctctagactccagtcctgtgctcaggcaagtcagctgggaaacttccttcagttttaaaaacttgggactttacagattcttgctctggatggagtacagatttggagaggacaaagcgtgggcagctctgccatcaatcaaaggacagcttttatgagtgtgccccagatcaaactcatccatcataaaccagccaccccaacagacactctcaagctctcaggatc

SEQ ID NO: 203270 - DNA, 1000 bp, Homo Sapiens
ttttcaaatccacattagcttctttcctctacttcaagagagtcaggtcagtatttacaatagcaaaagcataacaaaacaaaaaagcaaaataataacaaaaaaaaccccacatacaaaataagcatacttgaaactaccttttggtaaagaaaatgaaaatctgtattaagcaaatgactaatttcatttagaaatgtttgtcacccaaatacagcttacagcttccaaacaaagctagctgctgctctaataactaacacattatctccactgagtcaagatgctctcatcctgctgtcgtgtaaatcctgaccccaacatcaactagctgtgtcactgtcacagaaaagcaaacagcacaagatcaaataataacaataaaggatttttttccttcccttataaaggacacatttttcacttaagacataaattcatttgagattagtttcttaaatgttcacacccaatctttaatggatataggggttagctcctggggaattccaggaatactgtggcttgatccctgtagaggtgtgggtaccatcttctcgcaattcccttttacattttgatccaaaccaaaggcaaatacggaaagggatatggtgagaccttaaatttaaatatccgccaaagtaaaataaacactactctgaattcctgaactctttgagatggagtctcgctgtcgccaggctggagtgcagtcgcagtcttggctcactgcaacctccacctcgcgggttcaagtgattctcctgcctcagcctcctgagtaactgggattacaggcatctgccaccacacccagctaattttttttttgcatttttagtagagatggggtttcactatgttggccaggctggtctttgactcctgacctcaagtgatccacccaccttggcttctcaaagtgctgggattaaaggttataagccaccgcgcccagcctcctgaactcttctccagcactaaggagcattttcaa

SEQ ID NO: 203271 - DNA, 1000 bp, Homo Sapiens
cccctacccccacagaaacaccaaattttaacaactaactacacactaaaagtaccgttacaagagacaaaaagcaggtgagcaatcatagtgcctggtttggacttcatatcactgaaagagacactgaagaagataggaaaggcagtctggaattgccagtgctaccactcccccatcctccctgcactggtggtgagaatttgcatgcttgggagagggtgagcacagcgattgtcaggatttgcattgaactcagtgctcccctgtcacaagggaaagcagaaccaggctgtactcagctgacatatgccaacaaagggagcatttgggtcgaccctagccataggggaattgcccattccagtgattggagactgagttccagcaagcctcaccactgggggctggagtgctctgggccccgagtgaaatgagtggcagtctaggccacaaggactgcaattcctagacaagtcctagtgctgagctgggatcagagacacctgactgcaacctacgagacaccagccagggcagctaagggagtgcttacgccacctctcccttagctcccggtagcagccacctggtatggagaaatctgtgtgattgtgagagggggagcacagtggctgatggacttttcattgaactcagtgctgccctgtcacagcagagacctggcaggtttcatcacctgcctgctcaagagcccctgggccctgaataaccaatagcaatacccaggtaataaatacaccacggatactgggctctgagacatgctggctttaggcgtgacccagcacattccctgctgtggtaactatggtgaaagactgctgcttgagaaaagtagggggaaaggtaaaggtgactgtgtcgtgcagcttaggtaccagctcagccacagtagggtagagcaccacgcaggctctcggggtccctgagtccaggcctaggctcttggtcagcatttctggacctagtctggatc

SEQ ID NO: 203272 - DNA, 1000 bp, Homo Sapiens
ttacaaggaagaaaggtattttcttatccctctcttcccttcccacccaaacatagcttcttctaagaaaagaaactgaggctgggcaaggttaaaagctagctcctggtacttttgcatccacactcagtttacctgtgccttaaaccagacttcatcaaacttcagtcttcacaagtcacttcaccatttttgctctacctacttactgcctgtgatagaaatcaactcagtttgtttagcggtataaacttaaaaggaactttagatcaatcacttgtcttagaaggtaaccacaaaaatacaaagcaataaaaataaaaacatgttaacatgaatttcagttgcctgaaagctgtaagtctgcttttttaaaagagaaattggagttaagcagacttttcattttttgatcatgaccctgaaagagaaatatatttgacatcaaaactcagcacatatccttggtctatatatacacgtgaaagtttcataaaacaatacactgatattttccatgctgtattctatttcattttttaaaatgctggttgtatcccattaaactggtttcaaaataaatataacatgtacacaacaacaacaaaaaaaaacactgggttagagggccagtaagctcagcgagtatcagcaactgagacttcatccttgtctcacaaggactaaaaagagaataatgttctcattatgtggttcaatgccacacccatgtatctgagatatacatgtcacaatctgggagaagcctgtcctcaatttactttaaatacccaattctgcctagaacatgacttagacacatagtaagctcttgagtgaagtgcagatgataatgacacgatcacataccacttaaaaatatcttaacacctttacttagatctcatctcatacttgtagcatttcttcaaatttactttgaaaaaagagcttcactgtgtgtggttgtcatacacattcttctacccaaccatggacc

SEQ ID NO: 203273 - DNA, 1000 bp, Homo Sapiens
atgcatgcacaaaaattttcattctgatttttgtaaacatttcattgaaaactgggcgtggatgtgaattggaacaggatcacactactgaaacttacataggttttgcagtctcacaaaaggcaggaaagtcaagctctcgcttttcacctcaatcactacctttttaccacaccgccatgtgacgttgagcacatctcctaggtagtttccttgtctgcaaaatgaaatgtggactagatgccccatctggctctaacagtctcaatactgtaactgatgcagagcacctatttccttcctacttgaaggaactgcaaaagaactaaacattagaaccacaaagcaatttcatgaggcagccaaattagttctgataaggaaaattatttagcatgagttcatgacttgaatcaatcccaatctgttagagatatagctgaatcagatttaatagcctccctgtaatcaataaaggagaacacactgtctggactaggcaaggaaggagaggtatcagcatctcttaatagcctttattcttctgcttactctcactcctcaccctccttccttgaacccaagtttgagtatttaatgaaagtttcagaaaatgaatgaatgggaaatgagggaggtgaggagatggcaaaggagttgtcagctgacagtccacatctttgtcctgctgctgtgctgagaaggtagtcaaaggaatattacttgtagaatatttgtcactgcatctcctcagccattagtgagctctgatttcttggagattctagaaagctctgcacaactgttgtgatgtatctaatattatttcttctatagttgctgatgttcaattttttttttttgagatggagttttgctcttgttccccaggctggagtgcaatggcatgatctcggctcaccgcagtgagaatcgcttgagcccagaagacggaggttgtagtgactaagaaatggtcaagcaacatcacacagaattc

SEQ ID NO: 203274 - DNA, 1000 bp, Homo Sapiens
tatgaattgcagcccagagcaaagattcattttcaaccgtcgagatagctcatggaacctcagtggcaaaggtttaagataggaacatcagaaaaggtgtccttcataaaaataagggaattctttccatcaccacattattctttaacattcaactctaagtgggcacacactttagtattagaggaaagtggctgtgcacttgctgccacctctaacaaattttcctggtcccattcatactcttaatgccttattctaagaattaatcctaaaaattaatcccgttcttcatttctgcattacaggataacataaacatagaggaagctgcccggttcctagtggagaagattcttgtaaaccaccaaagctttcctaatgaagaaaacgatgtggacaaaattaagctagatcaagagaccttgagagcagagaacaaatcccagtgttgctgatatatggcttctgcttctcttgtgtgtgcctcagctctgaagaagttcctgagaatgggttacagatgtcatgttagctgggagtcttcccacatgtggcacttcaaaaggcagcaccactgggcgcctgcacttatttgaaaatggaactttgggagaagtatccctgctagtggctctgtaacttaacagatgacaattaggcttttgtcattgttgccatcatatggaagataatgtttacatccttttaaacatttttatatgacaattcctcaggatttggtaaggcttccaagttgtagcttttagtgtaagtgctggggtggtaataaaatgttacctccagtcttatggtcattttgagtcttatttttgccaccttattgcatcctcgctttttaggggggtttttagattctattagccacgaaggcttgaggtttctctttagcgattttctattcaaaactttggaaaggccaggtatggtggctcatgcctataattccagcactttaagaaggtgaggcaggaagatc

SEQ ID NO: 203275 - DNA, 1000 bp, Homo Sapiens
caacatggttgattgtttgatgatccagaaataaagaaaacattggttgccacaggagacagagggagaatttctggagtagtggcctgagggagtgcaggaggatgttgcctatgagtaggggcagacgttggctttccaaggagccccagtggttgtctgtgataagaggagggcaggcacagtgggtgggcacagatccagagaggtgggtccaggtggctaatggtgggagctggcacctgtcccctccagtggcttctgttttccactgtaatagaaagcagtatcatgggctgacactgaagataggggaagtgctggaggtttggggagggcagtgaaggtctgaaatagaggtcacagtgagaacgggagagggaaaacaaggcagtttggtattaatgcctggtggccttgaggctccacttgatgtcaatttgacatacccggattttctccaggtacgttctgctgtgtggttcagtcacacagtagacagttggatttagtcaggcctatgatttagctaagtgaggaaacaaaggcagagggcggcaacagagcgagagtgtatgtaggggagaaatgataacacttgactatggaatttaagcaggggaaattataaaacatttatcttaagaagttgtaatactcagccttgtatacacacagtacacaagttcgttatctctttgacatgttgataacttccagtgggtcacgtgtcagttcatttattgagaagtcctattccacgccttcctctctatgtctaatatggccatgtggctcaggccttcacctcctccttcacggattatctccacagagtcttggccatgactcctgattccatgtgctcccatccaaacaatgtgcaattgttttggccaggatcatcttgagacaacagctttatcatctcactgctctgtcccaaaataaagaatagctctgtatttccaattatatcatatcacaagtcctctgcccg

SEQ ID NO: 203276 - DNA, 1000 bp, Homo Sapiens
tatagggaatcctttcctcattgtttgtttttctcaggtttgtcaaagatcagatagttgtaaatatgcggcattatttcagaggactctgttctgttccattgatctatatctctgttttggtaccagtaccatgctgtttggttactgtagccttgtagtatagtttgaagtcaggtagcgtgatgcctccagctttgttcttttggcttaggattgacttggtgatgcaggctcttttttggttccatatgtactttaaagtagtttttttccaattctgtgaagaaagtcattggtagcttgatggggatggcattgaatctataaattacgttgggcagtatggccattttcacgatattgattcttcctacccatgagcatggaatgttcttccatttgtttgtatcctcttttatttccttgagcagtggtttgtagttctccttgaagaggtccttcacatcccttgtaagttggattcctaggtattttattctctttgaagcaattgtgaatgggagttcactcatgatttggctctctgtttgtctgttattggtgtataagaatgcttgtgatttttgtatattgattttgtatcctgagactttgctgaagttgcttatcagcttaaggagattttgggctgagacaatggggttttctagatatacaatcatgtcgtctgcaaacagggacaatttgacttcctcttttcctaattgaataccctttatttccttctcctgcctaattgccctggccagaacttccaacagtatgttgaataggagtggtgagagagggcatccctgtcttgtgccagttttcaaagggaatgcttccagtttttgcccattcagtatgatattggctgtgggtctgtcatagatagctcttattattttgagatacgtcccatcaatacctaatttattgagagtttttaacaatccgagtctctgataaaacagactttaaaccaacaaagatc

SEQ ID NO: 203277 - DNA, 1000 bp, Homo Sapiens
tcagcattttttagcaataaaatattgctaagcacatgctgttggaaaactggtgctgatagacttgccacaaaccttcaatttgcaaaaatttgcaataaagtgaagtgcaataaaatgagggatgcctgtttgtaatttcactcattttatgtatttgatatgtttagacacatgcatatactatgtgatcttttgagactggcttcattcactcagcatgtgttcgagattgacccatgtgttacgtcagtagttcattcctttttattgctaaatagtattccattgtatagatgtatcacagtttgtttatccatttattcattgagggattatttgggttatttccaattttcactgattatgaataaagctgctataaacattcatgtataggttttggtatgagcataactttaaacttctctgggttatatatttaggagtgggattgctgagtcatgtggtaaatgtatgtttaactttatatttaactgccaatctgtgttctggagtgactgtaatattttgcattctcaccagcaatgtatgagagttccacttgttctgcatcctcattaacacttggtattgtcactttttgaaaattttaactattcatatagataatatagtggtacctcattatggttttaattgatttctgtagctttataataggtcttaaatttaggacatgtgggccgggcatggtggctcacacctgtaatcccagcgctttgagaggcagagactggtggatcacttgaggtcaggagttcgagaccagcctggacaacatggtaaaaccccatttctactaaaagtacaaaaattagccgggcgtggtgttgggcgcctgtaattccagctacttgggaggccgaggctggagaattggttgaaccccagaggtggaggttgcagtgagccgaagttgccccattgcactccagcctgggcaacagagtgaaactctgttaggacatgtgaattc

SEQ ID NO: 203278 - DNA, 1000 bp, Homo Sapiens
tttcttctctttgcacgtgaacattttaggttatggcttttcttctaagcaaaattgggtttagctcattccttcacattttggcttttcatcattattaagctctaaatattttaaaattttcatgatttttttcttttgacctattaagtatagatttaaaataattccaaatatattgtttatttattggactatagtgataggcagaccctcccccactaccaaaatatgtccacactctaatcccaggaacctgtaaatctgttactttacatattattatttttaatttttaaaattattttttaaggctagtcaagtgaagcagtgggagtggagaagaaacaaataaatttataactggttgtgatcaattagctgtaaacaccagtgcactcaggccaatatgttactctacatggcaaaagtgagttgcagatatgaagatgatggatcttaaaatagggaaattatcctgtattatctgggtggggaaaacctacttaaatatatccttaaatgcagataattttctctggctggaaacagagaaatgtggcagaagccagagagattggaagtatgagaaggactcatcactgctgctggattgcaggaggtggggcacatggaaagcatgagagggagtacaggcagcttctaggagcaaagactggctggggctgacagccagtaaggaagccgggacttgggtcctatacctgcaaggaactgaattagaccaacagtctgagtttggaaacatccccagggcctctggaaaggaacacagcccagctgaacaccttgattataaccctgtgaaccagatgattcatgctgattcatgaaccagctgattcatgctgcacccagatatctgacttacagaactatgaaataataaatgggtgttgttttaagccactaaattagtggcaatttgttatagcagcaatagaaacctaatacaatcgtatttttgcttattgaattc

SEQ ID NO: 203279 - DNA, 1000 bp, Homo Sapiens
ctgttatagagtcataaacctaaagagctacaaagcagatacaaagaaaactacaaaaataacatacaatttaacaacattaatttgatgtgatggatgatgctcttgtcctgtaactaagttatctcttgcaacaaggatcagtattgactgccgcagcacaggatcttttgggtctgacagatctataccaacatgtgctttgtggtggctgcttctcctattactcttctatgtacaaatgactgtgaaactttccttcacacagaatacagggacatgatctaggcttcccttgtgagggaggcgtaatttacatagtaagtctctctgtgttcttttcttattagctctggacaattaatgtaagacattttggtgcctgtcttaccataaatccaggtacaaatatggaaactaaaattgcagaacagtatttagttctagttttctaggtaatccagaatatgcttagtttttaagatgataatcgaagtgaaatcacaaaataaaattcttgttgaatgaccaaaggtccacaagaatataaccctaggacttcagtctgagaaacgctgccatgttttcaacttcagtaatgattccaacctgagagtctattttagttgtctttgtcagaaagtgcacatagacacatatacacacacacagacacatacacacagtcactctctgataccttctacttatcttgacctgttatatggaaaatatgcatgttcatctctagaagagttgtcaatcaaattaaagtgccacttttttgcccctttggctatggcaaaaatatgaaaaatatgcaagtttttcttcctaactctttcaataacaagaaacatgtattccatctataaattacaaaaatagaaagtactgtgattaatttaaatgaataaattactttaaaaaagtttataaaaattttttttctaatctgagcctgtgcatatataactttatacataggaaatgagaattc

SEQ ID NO: 203280 - DNA, 1000 bp, Homo Sapiens
aatatttgctgttagttgcacacaagtttgaagaaaacagcttgaattctagcatggaatttatggaatttattcaactgtttgaattaaagtctgtgagcatgttagtggggaatgaaaagaggatggctaaagtttttttttcttttaaatctctaaatggtttggtagaaatgtgcacacatgtcctgattaagaaagaacatttaaagctccaaatcataatcactaaaattgtaatgaatcagatatacaacagaagaaatcaaagtgttaagaataaatacaccatatatatatatatatatatatatatatatatatatatatatatatatatatttttttttttttttagatagagtcttgctctgtcaccaggctggaatacagtggcacgatcttggctcactgcaacctctgcctcccaggttcaagcgattctcctgcctcagcctcccgagtagctgggattacaggcctacaccaccacacccagctaattttcgtatttttagtagagacgggggtttcactatgttggccaggatggtcttgatcttctgacctcgtgatccgcctgcctcagcctcccaaagtgctgggattacaggcatgagccactgcgcccggccgctacaatatactttttaagatgtcctgtcttaactgaatgaacacttaaatcaattatcacttcaggcaaggtttcaagtacttactgagtgctctcctaggtgctgggaatacagcagtgaacaaagaggcaaaaattctgccctcatggtgcttacattgtggtggggggaaggagcaacctaagtaaaattatgtcaaatccaaagaagcaaaataaaacagcgaggggagacaggatacgtgtgcaggagagaggtttgcaattttagatcagttatccagggaaggtctctgagaaggtataaacacacaaaggaggtgagagcaagaatcttttgtgattatcaggggaagagaattc

SEQ ID NO: 203281 - DNA, 1000 bp, Homo Sapiens
cttggaatgggggaaaaagagttacaaagatattactgggacaactggcaaaatccaaacatggcctgtggattagataaccagattagataatgaaattagataatagtagtatcaatgttaaaatttcccaattttgatcactgtactatgttcatgaaagagaatgtccttgtttcaggaaatacacaaaatttcacctagatagtgttacatagaaataattatctgtactcttcttgcaactcttttttaagttcaacattgttagaaatgaactgtactaaagccaagtatcttctgcccccgagattttcacatactttctggatgagaaaggctgtcttaggctggctgccgattttgcagtggtgagctgagaaatatttaacaaccagctctctaggggtgaggaggaaaacttgtagcatcgctaatttttgtggtatagatactcctactacagctgatatttacctaccaatgtggcatcactaaattttcatacatgctcttattgggaagaaatacatgctttcattgaatggctctaggacaccaccgacattatgctcaaacaatagctaaattcatttggtttagggactgggggaaataactagagaaagcctttaaaaaaaaaaaaaacaagccaatagaatagtgaacaaaacaacagtaagtaaccaaacagacagtagtaggcgaatagttactcaacatgaaaagaaaaaactggcttttattttaggatatttacaaatatcatttagttattatatagttattatagatgacaaattacacaaaattgctcaatcaagtatttcctgctcttttaaatttagaacataatgttattacaaccagctttcaaattctttaagactaaaataaatggcttctcgtttattttaagacgtcaggacagtacttagtttttgtaatgtaatcaaagttccgaattgcaaatccagatacctacgatttaaataagctt

SEQ ID NO: 203282 - DNA, 1000 bp, Homo Sapiens
gatgcccttcaggcgttactcaggcgagtcaggcctggcctgcctctgccaaggcgtggggcactctgggagaccacctgggggtcaggatgggctgtaggttgagacaccctcaaggccagtgcctcccgtgcatccaggccttagccctgtgctctgagctggcctggcctggccaaggggtggaaacagccctgtgcccaccagctcccaggagagcttccaggggaggacccccccagtgaaggcaggtgtcctcggcctccctctgggtgctgccgtggcctgtgggtgccagagccattggcatggctggtctggcctctgaccgcacagcttggtgagccatggtgatgggggagggtgacacagctgctcctggcaccaagcagtgtagttcaggccccacgggccttgccagcagctctggccagatggaggctgctaaggggcccctaggctgtccctcaagtccaaggtctgcagccacacgctggtgtcacgcccggagctctgaagacgcctgagggccgcctgcacgccctgagtgaaactcgtctgtgcttcatctccagggtgtctctggccgagcctctttttgtggaaaacgacagcagcagcagtggcctggaagacgccaccgctaactgaccccaacctggccccgctccagggtgggactgccgagtgtggcccggagctggcccgggacagccagggcggcagggagggcccctggccgggagccgcagcgctcactcatttctcctgcgtctgtgtgcataggacatgatactaataaccacacggctggcgtgaccttggggctggggctgggcctaagctggtgccctggtgcggcgtggtctctcccaggagacctggggcatgagctgggcccacggctcccttcccatgtgtaacttcctcacgttgtgtgcgataacgtattttattgtacatttttttaaattaaaagtttatatgccttaaaaaaaaa

SEQ ID NO: 203283 - DNA, 1000 bp, Homo Sapiens
gaaggaagtcttctaattccttaaaagcattatctcatatttgaagagttcaagtttgatgcaacataaactgataaagtttgaaataaaaagagacaggttggtaggaaagaccattcatatcctatccccaaactggcttaagtccactcccactgcccccagctaccacctttttactttattctacctgctatttctttggccaccggaataataagcctgatgtaaattctgtttcatactcccacaggtcaactttttttggagtttgacaataattattccaagtcaagtaattcattgattttagtggaagattgttttccaggtgttattcttccatgcgcctcacccccatctcataaagtagaaaagagatgatttaatttatgggtctagaaaataaaaatgtaaatacttgcttgttaaattaatttttttctaccttcatttttacctttaatatttcaagataatattggacttaattctctgagacacacaaacatcctgcataagtatattgacaacatacattttatatgtaagtgaaccatatgggtgagcctctgctttctccctgacagcgctgttctttaagaaattaaggctaaccaggtctataggttttaatgggagatgtctcctaacttttcaaagaccagatgttcttgttatactgataaaaacttattaaaaaaaaaaagaaatagggattgatgatgttcaacattattctctttgaacaaatacatcatttgttcatacttggtttctcagtatttcaacaataaagcatgttttaatgatttgtctttagaggagtgagcactcctctgggggtatattacaactgggaaaaaaaatatagtttgaaaataaaataactgtttacccttaaagaaattaactctatggtgccttaaggttacatttgcaataaacttttttacatcttaaaaaaaaaaaaaaaaaaaaaaaaaaaaaaaaaaaaaag

SEQ ID NO: 203284 - DNA, 1000 bp, Homo Sapiens
gtgggcaaaacgagggccctggagcagacacggcagcaaggggagcctgcagcgctcccagcggactccgccacgtcctgctggtggagcaaaggcgggctgccatgttgtgagtggccaagggtcgctcactgggcaggaacattgtcaaggccattcatgcttggaatagggtctctcttcagctctgaggcaaatctgttctctaattttcagatgacttcaaggggaacgtgtaccaccacccctctggtgcgtcacattgcttaggaagcctgctgtgtttatcactgggtggctgtcagggctgagatggagagggccagggcctggcgaggtggagcagtcggcccaggtgtcccagcaattgttgctggaacagggtctggaacccacaggagaggcctgaaggacccagggccctctggctggatgcgtttgcctatcaggacccagaattacttacagacctgtttagggctaggcttggcctctttcttgagctcatctggaggggtgtggcaacactcattcttcatccttattctccctggctgtgggcaacactggtcctcagtgtcaccagatggtcctcctctgtgcccatgacccctcagcagccaaggctggccctgccagataaatgtgtgtgcccatgatcacacccaggggcacaggccacatacgtttccctgaaaccttgggctccagcctccatcccgtccatgtgggagggaacttgggtcccagcagtgtgtctttcagcaccaagtcatgtttaaaagaccagagagacaagcattttgccaagatcttccagggaagatgcatgtgtgacacattaacattcaaatcaggccagcgcggtgctcatgcctgtcatcccagcactttgggaggccgaggcgggaggatcacttgagcccaggacttggagaccagtctgggcaacacagtgagaccccatctctacaaaaagtcaaaaaaaaaaaaaaaaagg

SEQ ID NO: 203285 - DNA, 1000 bp, Homo Sapiens
ggagaagcctctcgggaggaggcgacacagccatggggctgctgagccccccagggagtgggtggtggttccagcaagatgttttagggggagccatgctttgggagcctcacccaggacatcgtgccttgcagagcaggaggggcccgtcccaacctttcctgggccgcccagctgccaagaaggatgtgcttgcagtcacctgcacgggggtgtgctgcatagggccgcccccaggagcacacctgaaattgtgtctcagagctggcatcctgcatgttacgatttgagttgggcaccaagtcagcctcgtcctccctcatctgtcacctctgctaggtaccctcctagcccagctcttggcagagactgagctggtggcttgtccctcaggtggtaggaactgcagaggatcacccaaagggccctgagtgatccacgctaagggactctagctctccctaaagagctagatggccacccctcccccaaggctcaggcagtcatccgtgggagatgtaggtgcacacaggtgcacctcttcctgccccagagcagcagggtcccggccacttctgtggcagagagaggatcacaggacctgcatgcagcagcctgtgggcccgggcgtctcccccagcagacagcagcctcagctttgctggttcaggcaggagaggtccacaggccagacgccacctttccccaggctagcccagcaccggagtcagaagtcagtggtttgaggccaagctgggcaggtgacttgaggtcgggtatttgagaccagcctggccaacatagtgaaatcccatctctactaaaatacaaaaattagctgggtgtggtggcgcagcctgtaatcccagctactcgggaggctaaggcaggagaatcccttgaacccaggaggtggaggttgcagtgaaccgagattacaccactgcattccagcctgggtaacagagcgagaccctgtctcaaacaaaaaaaaaaaaaa

SEQ ID NO: 203286 - DNA, 1000 bp, Homo Sapiens
ctgaacttcttgcagtctctagaacatactttctcatacttctatgcctttgcatatgcgttccctctgcttggacgttcctctccaactcctgccttagaaattcctgctaggtgtcaaatacctacatcaggcgggactgctttgactctgccttcagaagactctcagcccctatgtcctatgtgttgccatagcacctcttcccatcatcatattgttcttacacataacgttttcacatgatgttatcatttgtttgtattatcatcaccattctgaccaccatcacgatatgagtctgtatttgaaaggaatgctatcagaaaacacccccttcattacaggcaacccgttacaaacttgataacaaatcaaacaagacatgattctgtctagtgttaagaatgaaataaacatgatgggcagtggtggggtggtgttctgtgatatcctgccaccttcaagaggaacaatgttgaaggatcgctgctaaatctgggctaccaacactgcatgggaggcatctcctcatgttttggtcaccacaaccccatgaaggaagtatgattacctcccatttcacctatgagaccgagtttcagacaggctccatgatgagcacaaggcactcagcagcaggtggcagagccagcctttgagcccacgaaggtctgactccagggcccatgctattgcactgcctctactacttttcttagtctcaagtagctgatgcttcacctctcctgggcattttcaggacagatcagtaaccccagaagtcacatgtgtgagagcctatgaagaggagctacaacaaggctgaggaatgccaagtgctaaaccccataagtgaccagtagagaaggacctgttgaaaggtcttcccttaagggcatgtgctggagaaatccaccccttcggagacagtggcaccattgttcagataagttacacaaacatgagcaagaactagatcccaccagcaagagaattc

SEQ ID NO: 203287 - DNA, 1000 bp, Homo Sapiens
attgatttgtatttattagctaatgaaattaaagttgtaaaaatgataacagaaacacaataaatctctcccacaactggctgtttctatgtcactatggtgcattcctcactttgattacttcaaagtctattattttgttttcaattattctgtttttctggcactggagaaaatcaatttgttttattttctcttattcatgcactcaattatgctcttcgggcacatttaatcactttgatgtttccattttatggcccgtctctaggcacttcagctgcattgctgccaatgggcaagcaggactaatttgcatgtcacaatagacttgaaattctaactcaatttagaaatctttgtgaaatctccctccaaaatgtgcttggagctgcaaagaggcagaagaatgttggcaaaccaggagcctgtaaagatactttcctttctcaaaagactgtgagctccttcatgacccgaccatggcttggggaagtccctgtccaggtacagcagaaaaccatgggatgggaggtctgcagaccctcctctggaactctgtggtgagaatcctgcagcagctgcccctcagtggcaaggccaaggaggctaggcccacttaccctggcagaaaatgacccttagcactgctggatttggtggctgtgctcaagacagcacctgaatctcagttgtctaaagagcctccaggtagactgacaaagttgtcaacagttaggcattccaaaaccctgagtggtttaccttatttttcctaataatttccaaccttccttctaccccttgatcattttagaactagaagctggagggaaatgagcaatacaatcgctttgggcatgtacttcgggcacacaagaaaaaaatgcttaattaaacgtattagaggcctccaactactctttgaatattattggtttgtttatgcaacaatcagcagctctgccaggcagaaggaaaattccttatttcctcttct

SEQ ID NO: 203288 - DNA, 1000 bp, Homo Sapiens
cggtgaaaccccatctctactaaaaaatacaaaaaagtagccgggcgtggtggcaggcgcctgtagtcacagctactacggaggctgaggaaggagaatggcgtgaacccaggagttggagcttgcagtgaaccgagatcacgccactgcactccagcgtgggcaatagagcgagactccgtctcaaaaaaaaagaaagaaaaaaagcaatggcagtccacagaggtaacaggatttacttgatcactgtcatagaactatttattaagtggtagagttagggcccaattcccagaggtcttaccatgacaccagggctttttctctcagtttggcacatttcccttctcacttctctctctcaaccgtaaggtttcatcacctattactaactattccattcttccagtttctacttgcttagaaacttcctacacgtcaccattcaaaaatctaaaattattccttataaacaactgaattggctaatttcctctgtttggctttccatacacgaggcactcctcactaactacatataccatgccatgcccacaagtgactccacactttgcctcactctgctctctcacccttcttccacccaacttattacatccttctcctcctttaaggtgcaatgcaagtactaccttcttcaagaagcctgttcttctagcacttcctcttgatctctcccttcattaactccttttgcatttactacctatcaacggaggcttgctacttagccatcccagggtttaaatatctgtatgggacaatttaataatatattgaatgtaattaatcactaattcttccatatatatacatattatctccccaattaagctgtaagcaacctggggttgggaatggtagcaggacttctttcataccaaacagcaagtaacaaagggttaggtatgtagtaagtgctcaatatatatatttaaccaattgaggggtagagtatgaaaatataattcaggaattc

SEQ ID NO: 203289 - DNA, 1000 bp, Homo Sapiens
cacacaaatacttatgatattttaaaaaattggcaacaatctgatacctaacaatagagggattaaatattatggaactgttaaataagatgcttatgaataccatgcagtaagatgggcaatatttatgccataagctttaatgaaacaaatgggtattaaatgtatgataaggttataaattactttttaaaagattacagggaaaaaaattgaaagatatacactgaaatgttttttgctcacagtggtgacaaggtttctcagcactggcactgttgacgttttaggctgtatgtctttgctgtgggaggctggcctgtgcactgcagggtgtttggcagcactcttggcctctgcccctagatagcaatagcagtcctccctcaaccagcccaattttgacaaccaaaaatgtttccaggcatcaccagatgctccctgggtgagagtgatgaaatagtaggggattttccccttcttttcttattttctgtaattccattatattactttaataataaagaaaaaaacataaaaaataaacgaatgttattattctacgtcagtttggatgtttggactccattttggggttctttccattatatcacttggtctgctaaacattctacggtttggtaaggtgaagtgattcatgaaattttggttttatttttttcctgatactaaaaataaaacattctttcacttggaaatttggacacagaacaccaaaaaaaatccataatctcatctctctttttctgtcttttccttccttttttccctttaaaaacaataaagagtgaaacctacctgttctccctctaatttaattcctaaatataatcactgtcaatatcttggacatttcctgtgtctaaacacacacacacacttttttttttcagcaaaagtggatttctgctacatgtagtgttctgcaacttactttctatgtgtttacaaaatcagtacatgtacatatgctgaattc

SEQ ID NO: 203290 - DNA, 1000 bp, Homo Sapiens
actctgtctcaaaaaaaaaaaaaaaaagtctaaataatcttgcaataaggggcctaaagcagtaatgtagtaagacagacattttaatttgataggttataaaaaattccaaaatcttagaaattccaatatgttcaaaatagtttgattttattacccaagtaattcatatactaatatagacatgactaaaaaagaaattggaaaagatcttactccttatagttatattttacatagcaaagactcaaagccacaaaaatgcaatgaggacccaaaatgtttatgacaaaatgtcaaatctcacattaaaaagtcatgcatgataatgattatacaatcaaatctgctagattagagaatcctaaacctatttttctaggtgatgacagtgttaaggacaatttcttttaatgaatacaagcagaataaaatgtatatatttcattagaattatgtcaaaatgtatgtaatgcttagtataatagaaaagaaggctacatcatttcttataaggtgtatctttttcagaaaagtaagttatttcagatgaaatatttaataggaagaaaagaggaaataaaatattccccaccaacccaatgctgtgtccaagctgcatgttaaaaggacatctctaattgttaccagaagatgtaagagagcggcatgcttgaaagtcatttctctttcatcaattgtacctaagtaagcaaaaatgtattttaaaacatagactatacattacagttttagaatatgtatcagaatctgcctaataatgggagctaacatttattattgagtgcttactatatgccaggctgtatataagctggctatttcattgaatctataacaacaatcccatcagacaagtttattatgatccaaattttatgaatgaggaaatagtattaatgaagttaagtaactgtccaaggtcagtgagtgagtaaatggtagagctgtcatttaaactcagctaacctgagaattc

SEQ ID NO: 203291 - DNA, 1000 bp, Homo Sapiens
ggtaggaacctgaattctgtaagatgcaggcataaactctaaccagtttttgcttttataatctgcctttttgtaactgcttactactccagagtcacatagccagtggtcacaagatttataacatctccaattgtcactatagataatgtcactattgtaaaacctaaaactagtgtttgagttatttttcagactttacattctgatggaccaactggtgccactgggaccagtaacccatagcaaaaaatggactcagttgatcctgtgacccccttcaagaaccgattcaacacaagaagacagtttcaacagccctatgatttcatccctgacccagccaatcaccattccccattctctagcctcctgatgggcaggaggctagagaggttcaaagtttttcatccttgaaagactgtagcctccaaattctcaggaaggcagatttgagaattatctcttatacttgcttggccaccctgcaattattaaactctttttctgctgcaatcctgtcgttctcagtttattggcttttttctaggcagcagccaagaagaacccacatggtaacattctcctgattagactgaggttgtgagtttttaggaagcaccccacaaacaggttgtggctttctcatagtgtgatatcagatggcatgatatcaacatgactttttactggttaattgaccatgattacatgtattaaattaactgaaatttgtcctgaggctgcctccctacctttagggccgatgtaaggactgcaacctaccttggtatgtaaacaaacaaagcatagcttgttaaacttttatagctggctgagtcagccagttacagaagctgagctaaagccagttacaggctgccaactaatcagaccatttccaaataaggccaaagttgagctgtaaccagtcaagctgtttctgtagagcacttctgttttctgtctgtaaatactccctgcccactttatagaattc

SEQ ID NO: 203292 - DNA, 1000 bp, Homo Sapiens
aatgctaattttgatgcagtagtaaagggccttccaaagttaccggccaaagcatcagagctgcgcaaggtggcaagataatttgtgctggtttgctgagctgaaggcttttaaagtctatagcaaaaagctaggtaccacaaacaaaaaagagaaagggaaaaaagttctgaagcattggaaggcagggctgcggaaataatacgatcacagtccgctaaaaaatttgacacctctgatgcagtttctttgagtgaaatttctacaaagttgcaacaaaaaagcatagcatggtaagtcagcacattcttgattttgtttaatctttttgatcttttcaattatcgctatttgaagatcaatagtcattttttcctactatgcttagaagacgcgcagcggtggtttaatatgtgttaggaccatttgctttaaaggaacacatccacaagtttcggtaggttttgttttttttttaagttagtcatgaaaaatgttatacagtaaattgttctgaattcttttacatatgggtgtttttaatgatctatattggtttttgtatccccccacctccaaaaaaaagaattcagcaagataattaagctctggatgttgccaagaattttgagagtactttcagttggcagaaaactttggagtgaagtggtccctccaagtttatctaaattcagcgagtttcctcccctgccttctctgaatggcatcagatagctattaaagcgtaatttcactggagaactgcaaagcattactttcaccaacttaggtgaagttctttggactattgaaattgcctttatgtttgctaagtcggcaaacaaaatatcaggctttgttcttttgattgaatgccggggtttgggggaaaaaaagaagagtaagaaagccctgccttttttttttaaacgccccctcccttttgtgggggggtgggttgttgtggaatcgggggagatcccagttattgtgctcttcc

SEQ ID NO: 203293 - DNA, 1000 bp, Homo Sapiens
gtcacttaatctgtgcctgcttggggtgattactgagaatcatgcttcccctcacttggtcattgccagttgtgaggcagggtcagaaagccagctccgactcttcacccacagaagcaactccactgactcgctgcctggagttcttgtgccatttttacactaaaaaatagggaaaagccgtttttaactctctgctacccagtttctggaggggacacaaaaagaacaaagccgggttcagagagtgttcagttcatgtttaattcttgttctatcttggttctgatttctggttagaacagaggtttgcttctggaggtactccttctgcttggcttctgatgctggctctgtccataaaggggactgtggcattcatcattcaacacatacttctgttgtaggcactaaggatacaagcaggaacaaaacataaaatccctggccacgtggaggttacagtttagagggatatgcagaaaaaaaaatatatatgcacatatataatatgtacaaaagtgaccattgctaaggggaaaaagataatgcaggaaatgctgcagacatcaaatattagagaggtgactagcattcaggagctttctgcgtgcctctgtacgctgctttttgtgttgtcagaggggctgacgtctgtctggaagccccagagcccagcactaagcatatggaaggggcccaagagctatttttgaatgaaacatcaacgtacttcacacgtgcaaagcatgatgataatgatgacagtgatactttaaaggtaaactgcaggctggggcagtggctcacacctgtaatcccagaactttgggaggctgaggaggggggtagatcacttgaggtcaggagttcgagatcagcctgaccaacatggagaaaccctgactctactaaaaatacaaaaattagcctgtcatggtggcaggcacctgtaatcccagctacttgggaggctgaggcaggagaatcacttgaattc

SEQ ID NO: 203294 - DNA, 1000 bp, Homo Sapiens
attgagaatgtgccttatcgctttcatatttaaaataattgaaaaaataaaagacagtttaaaaataagaaataactaagaacacaaattaacaaataatgcctctcaaaaagaaaagcaacagcacttaagataaaaatagattttaggtcaatttataagaagaaacatctcctatctgctttatataaatggaagtatagattataaagtaaggatctagtgatatattcccttaaatattaaaaagttgagctctaaaaagtttattttagagaaaataattcttcccaaggtttatttgtaggcagctctagttctgttaggtataaaaatatgacaacagtttcaccactgcatgttgagtggtgtaagttcttttcagtagagtggtaaaagtgcttttttagtacaaataactgaggtatggtatcagcttatgccacaaaattattgctttttaaaatgacttaaagcttatttaaatatattatcttaacagtaagagaaactaacactttatgtaaacataaaataagatgatactcagcatgctgtggtggcatctcttactaactttagctttcatgtattagtactttgattttctttgtcatgttccatttcacttattaaaaaaaaactgtcatggctaagttttcttctcccatgaataatctatgaactgcttcacctctagagatggacctattttaacttgcttgtgcaggatatgttttaattctggttactaatgagctagtctctctgagttgctgttttcatatgtagaaaaaaatagaccttctttctctttggctgttttcttccatctttgtgcaaacttggcctttgccttcaaagaatattatagcacactcccaaatcatgattggggcagaacttaactttaacaaaattctattgacagagaagtttacttttgagaaggctggctaatgtgatttatttcctacagttgctagtcatctagaagctt

SEQ ID NO: 203295 - DNA, 1000 bp, Homo Sapiens
cagggaaagctaggcaacccctaggaggagtcggcaagaaggagaatccagaagaggcactcctggcatcatgaagagcaggtgaatttccacagcctggtgagttggaggagccctgagcagtttgatacagcatgaacctagaggaaggtggcggggaagggaggggaggcagacaggcctgtggggcccagatcatgaacagacttgtttgttatactaggaagtttgaactgtatgctgaaggcaatgggaaccaagcaaaagaggttcaagcaggccgatggcataatcagatgtgcattttatgaggctctttctggcagcagcctgtaaaaaagatatgcatggaagtgagattagaggccaggtgaggcaaatatatcaagatgtcctaggggtggtccaggaacccagcaccaaatggctttgagacaatgcaaaccatgtggcctagctctagccatgggagcctgggaagctgttttcactttctttctccctgtgccaggtgagggggtgggtgccatctagatctagtttcataaaaccttgggctccaggagaaggcaaagatttcacgcaatgacatcttgaaaccctgattgggcttcatgttctgccttttttcaccaaccaggggggttcctatggggatggtggagccctgaggaactgttaccagaagccagtgctgaggcataggccaaggaccttgaggtccaactgaaagggaggatatttgggaggcccaggtgccaggtcgatcatgttttaaatgaagtgtctagggccttagcatctgaggggtggccagagaggggactttcagggtatgtagacaaggcagctgcatttcagctgattggggttggcattctccaggagaatcagctgaaatgcagctgactggggtgcatccttcccaggagaggccaaggaagagaggggagatgtcaggaatgggtatctgtagcaacccaaatgtcaacaggagatc

SEQ ID NO: 203296 - DNA, 1000 bp, Homo Sapiens
aggacctccttgcgggacggcacgaggcaggagccggctccaggctggtctcggcctggtaataatttcacaccaccagccggtcattgttcaaagcactgtagaccattttactaatttaaccctaacgatcgccgcatttcgcagctgggccaactggtacagggttgacccgaagggccctgcgtggcgcttggcaagtatacagcaggcactaaatggctgccgacaggctcggtggtaattttgaaagttggctctgtgcagtgttggggctgcggcatctgctggtggcgagtggtattacagcccagcgctggcggaccccgttgggctggggagggttgtgagattatggcctgagagccaagggggtcggttaggggtccctagagactgtggaaggcggggtagcataaaacacaatgggggactgcggaggaactaaaatttcgagactacatggttttgttgtgcaccagaagttcattagagaagttccttaattgcttctccgcccgccgcgatggcactcgaccccgcggattaatttaacaactctgatggttgctctgtgaaatttaaagaacagtggtttaagcaaagaccacaagaaagaagaattgagatcaaagaggagtgtgtgccatcgctgtggaggagtttcggttgtgaatcatgaaatgtcctgtaaaccatttcaaggagtttgatttttataccaaaaacaatgggaagacactacaggtttttggagcagcagctcagacgtgtcgaaaaagatgttttgatccctaaaataatgagagaaaaggccagagagaggtcctctgacaagttcaagattttaccaaatgttgcaagaactctggaatccttatggtagtaaaatgctggaaagaaaattctgcattgaaagaatgtcttaacagctcactataatgacccagccttttatgaataatgcaaagtggaaaacctgaaggaaaaggaagaattc

SEQ ID NO: 203297 - DNA, 1000 bp, Homo Sapiens
aattaggccccatttttcaggctacagctttctttgccctactccctcaccccttttcatggagtttccgattgccttttctttttctttttcagaagacccttttccataccaccaagcttcttactcactctacccactactgaatgaaactgacttttccttaagaaattcttacagccagccaactttctattctaaatggaatacattttccagcctgctacacagctgtcctcttggttgtcgtgcactaggaaatcttccttctgatgttcatcctcatttcgctgtattatatcttcaaattacctcctcagaaagggtgcatgcaacatgaatccttgggtctctaaaattgtcatctcttgaccttgtatctgacttgatagctttgctggatcaataactctatgtttacagtaatttctcctctcaaagcattgttttattgtctctaattatcccctgctactgaagaaaagtctcattcaggtctatcattctttccacttgatggcctatcttactgaaacttttgggttcttcagccctggtgttttggatggctatctggtacccgggtgccagtctctgtgggtggtccctttcttaaggagtatggtctaaggtagccatgttaccttcccaacagtaacatgtgtccctggattttctgctcagaagactggggacaaacttttagatcagctgctccaatgctccaaggagggtgagcagtgccaagggtcaccaacacctaatggctttactgctcaccacccatagattccctctctcttcaaaacctttccttcagccctccgcccctccactgcaactccttcacaatgtataatccaaagaggttttattcctctctctcgtacctcctgagtctccttctatttgtctgaatgatgcttttactctgccactgggacctcttaccctctgacatggtttcgctgcgtcctcacccaaatctcaacttgaattc

SEQ ID NO: 203298 - DNA, 1000 bp, Homo Sapiens
agcaaagtgctaacccagttatggaagtctaatatagtgttacagagtcacaggcttagctaatatgtaaatcagcaaacatgagcaataatgatttatatttgcatggcattctatagattatgaaacatttcatatcaatctcatttgatttttccaataaccgtagaaagtagacaagtaggctgggcattgtgcctcatacctataatcccagcattttgggaggatcacttgaagccaggagttcaagaccagcctggtcagtatgacaacaccctgtttctacaaaaaaaattttttttttttaattagccaggtttgttggcgtatgcctgtggtcttatttacttgggagggttgaggtgggaggatcacttgaacctaggagtttgaggtaacagtgagttatgattgcactactgcactcaagtcagggttacagagcaagactctgtccccctgtctccctgtccccgacccccaccccccccaaaaaaagggccggcgtagtggctcatgcctgtaatcccagcaatttggaaagccgacgcaggtggattacctgaggttgggagtttgacaccagcctgaccaacatagagaaaccctgtttctattaaaaatacaaaaattagccaggcgtggtgttgggtgcctgtaatcccagctactcgggagactgaggcagaagaattacttgaactcaggaagcggaggttgcagtgagccgagatcgtgccattgcactccagtctgggcaacaagagtgaaactcaaaaaaaaaaaaaaaagaaagaaagaaagtagacaaattatgaaacagattcagcgacattgcgtgataactcagagtgaaaaggaactcagatttaatgtcttcagtcttttagcagctaaatgattattttatctctggaaaatggttaccttgctaaaaataaaaaaggtgagcggttattaacgtttatcattctatgatgcactgacttggaagatc

SEQ ID NO: 203299 - DNA, 1000 bp, Homo Sapiens
tattagcaaatcaaatttaacaacagaccaaacatattatacctcatgatcaagtgagacttatccctggcatggaaggctagtttagcatatgcaagtcaatcagtgcaagtcaatcagtgtgatacataacattaacaggtagaaagacacaatccacatgatcatatcaatagatgcagggaaagcattcaacaaagttcaacatctttttttgataaaaactcttaacagtttaggtataagaaatttcctcaacataataaaggccatttatgaaaaacccacagctagtatcataatcaatgtgaagaaactcaaagctttttttctaagatctggtacaaggcaaggatgcccactctaacttttgttccacatagtactgaaagtactctcaagaaataaaaggtatccaatccagaaagaaagaagtaaaattatctctatttgcagatggcatgatcttgtaagtagaaaaccccaaagactccaccaaaaaactattagatctaatacatgaactcagtgaagctgcaggatacaaagtcaacatgcgaaaatccatggcatttctatccacaaatagtgacccagctgaaaaagaaatcaagaaaataatcccatttatgatagtatcaaaaaaatgcttaggaacaaagttaaccaaggtggtaaaatacctctacattgaaaatgataaaacattaatgaatgcaattggagaggacacaaataaatggaaagatagtccatgcacatggatgagaagaatgaatattgttaaaaatgtccatactatctaaagcaatatatagatgcaatgcaatcttgatcaaagtctcaatgtcattcttcacagaaatagacaaatcctaaaatttgtgtaaaatcacaaaagatcctaaatagccagaacaatcctgagaggaaaaactaagttggagatatcacactttttgatttaaaattatgttacaaagctatagtaatcaaaata

SEQ ID NO: 203300 - DNA, 1000 bp, Homo Sapiens
ttcaagatgagattgggggggacacagccaaaccatatcagtctctatcaagtaaaaactcattttcttcagaaaattttattttggaagacagctatctataataacattattattttgtgcacatccaataactacccatttatatctggcattctgtttgtttcctagggctgctggaacaaattaccaaaaaaggttgacttaaaacaaaaatgtattatctcacagttctggaggtcagaaggctaaagtcaaggtgttgacagccatgttctttttgaaggctctaggggaaaatccttccttgtctctcccagcttctggtggctccaggcattgcttggcgtgtactggtatcactcaaacctctgcctccatcttcacaagaccttctcccctgtgtttctcctcttcccaaatctccttctccttattaagacactagtcactggatttacagtccaccctaaatccaggataatctcatctagagactcctagctacatctgcaaagacctatttccaaataagtttatattcacagggatgaaaggaatggttaggacttggatgtatcttttttggatcacacttcaacccactacaggcataaaactgcctgcattattaacaacctctgttagaaagtactacttctgtgctttgactgttaataaatttatattaatatgtaatagtagtatgcctgttgtgcagtatgtcatattttctcttatagctagatctaataagatccatttgttttgcagccagcaatagaacatcagatagccaatatgatgctttaattactagcaatttggtacctatgtatgaagaattcagaagtaagtatgaatttagagtattaattttaaaatagttaagtgactccttgaacttccaaactaaacacatatttttttaattgcaatttgttcctgatattaagggtcattttgttctaatggtttaaatataggtataggaaggatc

SEQ ID NO: 203301 - DNA, 1000 bp, Homo Sapiens
attgttttacttacttcttttaaagatggcaaaggaggtggtaggagaaaaaagcgaagatcactctcttcgcttcgtgccaaaccaataagagttttcggatcacaggcttgagcaattatcctatactggtaatctattgaaaaagcattttcttttgttaataccaaaactagctgacagatgtcataaagattaactgaacaaacaacttgaaagcactctaatttttaaactgctctgcaaatttgtaatccaaaatttcccaagtgcaactacatttacaacacctataagctagatacgtttccaggactgatctcacaattctcctcaacatatatatggagaccgggtcacagcctaactttttggaaaaaaggaagctcaaaggtggaaactggtaagtcagaaccaatttaacttctttttaaaacaattccagcattcaaaagatgttctgaccactactcaaaacacatgaggtggcatttaagcctactgctccgtggtgatgatatggtgctttggtattcatagtgtccatgaatatttagtctgcagttccagatagcagtactttgaattaaacatgccattctttatatatcaaaaacaaaattccaaccatgaaagcaaacattattttcaataatggcagtttataacctggggttggccagtcgccatggttcaggcctgtaataccagcactttgggaagccgaggcgggcggatcatttgaggtcaggagttcaagaccagcctggccaacatggtgaaaccctgtctctactaaaaatacaaaaattagccaggcgtggtggcaggcacctgtaaccccagctattcgggaggctgaggcaggaaaatagcttgaacccaggagacggaggttgtagtgagccaaggtcacaccactatacttcagcctgggtgacagaacaagactgtctcaaaaaacaataataataataacctgggtgagtacttctggatc

SEQ ID NO: 203302 - DNA, 1000 bp, Homo Sapiens
ctcggccccaacgcattactttgatttaatatttggatcattaaaaataactaaagatgtatttcctcattttttctctgtctgccttactcgcaatattaaaagtagagaatttcagaatattatagtaggaaatgacctttgacataatgaatcgggcccttcattgaacaaatggttcaagtgtcagcaaactacggcccgtgggccaaaggtagattgtgagctaaaaacttgtttttactttttttaagttaaaaaaaaaatcaaaagaatattttgtggcttgggaaaattaaatgaaaatcaaatttcgttgcccaggttcttagaacctagctgtacctactctcatttgtttacgcatcacctggctgttctagcactacaatggctgagtcgaacagtttcaacagaagctattggacctagaaagcctaaaatatttactatctggcactttgtggaaaaagattgttgactcctggtttaacagattgtgatttttggccgggcgcggtggctcacgtttgtaatcccagcactttgggaggtcgaggcgggcggatcacgaggtcaggagatcaagaccatcctggctaacacggtgaaaccccgtctctactaaaaatacacaaaaaaattagccaggcgtggtggcaggcacctgtagtcccagctactagggaggctgagacaggagagtggcgtgaacctgggaggcggagcttgcagtgagccgagatcgcgccactgcactccagcctgggcaacagactgagactccgtctcaaaaaaaaaaaaagagattgtgattttttactagagccaccaggaaaaccaggagtagactccatatttccaaatctaatgcctcttctatttcacattgagaatcctagtgagaatctaatgatttgggtgtgttttctttaacttaaacttgactttttaaagggtaacatatacgtatgttataaaatccaaagggagtacagtt

SEQ ID NO: 203303 - DNA, 1000 bp, Homo Sapiens
cagatacttcatgtaagtggaatcatgcagtatttgttcttttgtgactggcttatataacttagcataatatcctcaaggttcattcatgttgtagcatgtgtcagaatttccttctttattaaggtggcatcatattccattgtatgtatattccacattttgtttattcattcatgtgtcaatggacatttgggttctttcaaccttttggcttgaagaacctgatgtaatggtcatactcattattgaatatgatgaataatgatgctatgaacctggatgtgtaaatgtctttgagattctgctttcagttcttttggatatatacacagaagtgggtttgctgcatcacacaatggttctatttttatttgttttagtaacaactatactgttttccaaagcaccattttacaaccatagtaaccatgcacaggggtttcaccttctccacatctctgccaacacctgttattttctgttttttttttttatagtagccgtcctaaagagtgtgagatgatattgcgttgtgttttaatttgtatttctctgataattattgatattaaccatcttttcatatgcttattggacatttgtatatgatctttggagaaattttacctgtttgttaattgggttatttgatttttttgttgttgttacattgtaggagatctttatatattctggatattaacaccttatcagacatatatgctttgcaaatattttctcgcattccataggttgccttttccttctgttaattgtgtgtgtgtgtgtgtgtgtttttttttttttttttttgaccagattctcactgtgtttcccaggctggagtgcagtggcacaatcatggctcactgcaatctcaaacttctgggctcatgagatcctcttgcctcagcataccaaaattctgggattacaggaatgagccactgtgcccagccttgattgtgtcttctaatgaacaaaaatctttaagcct

SEQ ID NO: 203304 - DNA, 1000 bp, Homo Sapiens
aggccaataatatctattgacttggctcatctcatagctacaattcatgttccaagattattggatatcaaggaagaacatctctcattattatgatttagtttcagaaagatgggggtagttggctttcttcgccaacagaggtattggctctaaagttccttaaagcctgtaatctgaggaaggtgtaaactggggtcacaaatggaagcatggaaggttaactggagtgcagtattatttatttcaattttctttctttcttttttttttttttgagacggagtcttgctctgtcgcctaggctggagtgcagtggcgcaatttcagctcactgcaagctgtgcctcctgggttcacaccattctcctgcctcagcctcccgagtagctaggactacaggcacccaccaccacgcccggctaattttttgtgtatttttagtagagatggggtttcaccgtgttagccaggatggtctcgatctcctaacctcgcgaactgcccacctcggactcccaaagtgctgggattacaggcgtgagccactgtgctcagccttatttcaattttcacatgtatttgttgcattctatcaccgctaagataaagtttcatgtgaaaatattgaatcgactacctttgttaggcaatatctaatacattatatttctacctataggtatccagaagttgtggcatttctctaaacactgactcagaaatcttacttgttcttaaaagattctttaaagggcaactcttttattctcagaaaagaaaaatggctttttagctaaagtactctctttagcaagacaggggtatgaaaataatccaaaatgttaaaaggagccaggtgacttctactaattgtatgggaaaggactgaatgtaacagaaaatcactggaaattctctcctccttcactgattacttgacttctttttgcccttgacaaagaaacatgtcaagtatgagtttttaatgactgaattc

SEQ ID NO: 203305 - DNA, 1000 bp, Homo Sapiens
ctgcccccacctgctaagcttccctgcctatctcctgagggattcctgggcaacatggataagaacaacaccagtagaacatcagaatccaggagactaaaacagctgcttgggaagataaagaagacatggcagggcaggcatggtggctcacacccgtaatccgagcactttgggaagctgaggcgggcagatcacgaggtcgagagatcgagaccatcctggccaacacggtgaaaccccgtctttactgaaaatacaaaaattagccgggcatggtggctggtgcctgtagtcccagctactcaggaggctgaggcaggacaatgacttgaactcgggaggtggaggttgcagtgagtggagattgcaccactgcactccagcctggcgacagaacgagattccgcctcaaaaaagaagacatggcaaactgcagtgccacccagcctgcccctgctgtctccacacctgctgagactccctgcccgggccacctacacttcacagatcccagctcctcctcctacctctgacttggcccacatggctgctgggcccctcaccctgcctgtccctccaccttcgcccacaccaagaattgagtaaaaattgatatccataattcctaactctcccctgggtcttcctgctgaccttgcccccattttgggggttccacctaatgagaaaggaggctgccctcattcagctgcagcttcagcacctctgacctctcagccctgccccatacctcctagccccacatctttctccttccagcttcccttcagaagggagcctcctacacccatatgtgttttcctctcctcctctttcctccccaactcctcttccagcaccttccaccgggatcgctgctatcactcatcagcagttgaattccacagcagccatttccaccatcacagcaagggcatctgcccacctgaccttgcagcctccttgagccctcagctctttgctatggacatgactt

SEQ ID NO: 203306 - DNA, 1000 bp, Homo Sapiens
ttattactcccattttacagttgaggaaattagtcacacagctgctaagcagcagagttaggatacaaaaggctccagagactgtcctcttatccattccaccttactgcctcactcagatgggttgcttccatttggaaaagccagtcctaatgttttatagacacttctcagttggctgaatggagaaaacatcagtgaacataaaaactaaagtggtttggggcactaaccctttgaagtgatcttttttttaaagctgtggacccctctagctatctggtaacctatggacatggtcccagaataatcttgtcttttagataatgtggtggtttttttttttttttggagagaaggtcttgctgtattgccccggctggagttccagcgatgaaatcatggctcactgcagcctcgaactcctgggcttcagcgatcctcctgcctcagccttccatgtagctaggacaacatgcacgcaccaccatgcccagttaaattattttttgtagagatgatgtaggatctcactatgttgcccaggctggtcctgaattcctggccttaagcaatcctcccgccttggcctcccaaagtgctgagattacaggcatgagccaccacgcctggtctagaggtttggctttttttttttttttttgagacagagtctcactctgttacccaggctggagtgcagtggcgtgatcttggctcactgcaacctccacctgccgggttcaggcgattctcttgcctcagcctcctgagtagctgggattataggtgcacgccaccatgcccagctaatttttatatttttaatagagatggagtttcaccatgttggctaggctggtctcaaactcctgacctcaggtgatccacctgcctcggcctctcaaagtgctgggattacaggcatgagccaccgtgcccggtctagatgtttttaaatgcataaaacacaggtgctctgcttctgatcacagaattc

SEQ ID NO: 203307 - DNA, 1000 bp, Homo Sapiens
aaaaaaaaagatcctggcgaggttgcaaagaaaaggcaatgcttatgcactgttggtggcagtgtaaattagtttaaccattgtggaaagtatactgattcttaagccaaatagttataaataaatgtgagaaaataaaagacattatgctacctacaaattcagatatacatcctgtatgagtattagctttcttgaatatttgtgctcagtatattttagagcacttttgtagacattgctgcattagattctcaagacatacctttacatatggatgtggaagcctggatacagagatattaaggaattttgtcaatatcacaacgtgaaatttcacagcagtgtaactagacagaatgcagatcttcttccaaataatatagggtcaaagacagtatatagtacatttaattgcatggggatttttgtgttttttaagttaaatgacaatttacattatatattgagaacattttaatctgtttatgaagaataattaaacatttttaatgacactaacttatctgctatcattgagcaatatctccgttttctaacaaataaaagaaaccaaatcaaacaaatgaacaggaggaaaacaggaagggaaggagggaagaggacaaagaaggaaagaagggagttgaagaaggggggaaacctagatcctttaagcagtagagatttatttttagacaaaagaaggtatttttctttcttgtttgcacattttcttacaaaatactacaatcccccaaatccactgctaatatgacattggggactaattaaagttataaaccaagaactctatagaatggattgatagggcttggactcaggtgaattgacaaacaaaagaaaaacaatcaaaaaccatgtctcccctgttccatttaaaatgatttattcattaaaggattctagatatggattaaccttctctgatttttttttgtccctgccttgaatccaaaagtgctttgataaatggatc

SEQ ID NO: 203308 - DNA, 1000 bp, Homo Sapiens
tgactcttcttggtgtttctttgctatcccagccccgtttgtgtggtgttgaggtgcgtgtctgtgtttgtattctctgctagactgtaggatcagtaaaagtagggatttcatcctgtttatcatcattgtattcctatcatctaccttagtcttgctaagtatctggtaatctataacttgcaaggataaagtggctactctccagcatattcaccaggactttctgttttcggaaacctccctggaagctccaaaaaattaagaaatatcacagaaattacttgcaaaatccttgcactagagcagacatgcttgactatggagccactgagcttataaacctgagaggtggatacctagaggaagatattttgagaagatggaagtgagttccctgaaaatccatggtccataacaccttatccatttttatagccacaatcgacaagaatgctcatcctatttgctttccttgcttgacaatataatttcagagactggtgaaagatgttttcagcactagaatcaatacttcggattacagctgcttttgtgctcgtctctccccagtgaaaacattgctggggaaatgggaagatatatggaagctccatatctcctgatattttagctctcaagaatctgtctgttctaatcaattgctgcatttattttgaagaattttgaaggcaggggtacagggtaagaggagagaaatgataactttgaggcacttgttctaaagctgttgtatctgaacaaataaggagccatacgcccacctctgattcagaattgcatttcttttcctacagatcccaagccaagggcatcttgtaaaagctcttagtgtagttgggaaatgcctccatatttctcttaatctatactttcaaggaattctcattcaagatggaggatagaccacctgcattgggagaacgggccatcacctcccttgatagccaaatcccacagaaatgtccatctcaggcca

SEQ ID NO: 203309 - DNA, 1000 bp, Homo Sapiens
tcttaaatgtttcttcttagctaatttaaaaatctaatactttctataatttctgtctactcttttcacagttgagaaagttctgtataatattgtcgggcacttaaaaaaaaaaagaaggtataagtatatttagaatggtcctgtggcttagcaggggagtttgattccttgcaatggcaagaatctggagccagtttaaagatgataagagaatctctctaactctttagtgacccagtggtgacttgaagatacacaatgattctttccctggttcttagggaagtagcagaaacatagccagttttgttgctaaggaatttctctagatatgtggtcattcctttttattatcagttcaccggtgacaaggatgggagtatccactgagtttctgatggatttttaagatggtattcgcctactacaaaaaaggcatgattttttttttacctgccattgtaagattgctagtgtttttggatgaaaggcacctgagaatcataagtattagagatttgggcaatgttctccacaggtgtattcagtattgtcgcctagtattaattatgtgttcattatgcatttgtaccaatgtaccttaatggaatttaaaaaagaagtctttgaagtgactttttatctatcactagccaaaatgatcgtctcaactcttcctaatcagaagagtcactggtcaaataccacaaaattggaatcttaatcatttttaagcctaagccagtggctcacttattggaacaaggatcatactacagaaggatttgaacagctcttaaagttagaaaatagagaatttgatccacaaaacattttggggtggatatgccaaaaactaaaccaaactgatttagaaatttttattttgacagaagcgatccaagcagcggaagttacagcagaaggccttccgcaagaggcagctgaaggagcagaggcaggcccggaaggagaggctcagtgggctcttccttaa

SEQ ID NO: 203310 - DNA, 1000 bp, Homo Sapiens
agcagaggttatcatactagtagcagatagagtagatcttaagactagaagcattattagagaaaaagaggccaattttatcaagataaaatgataaatcagaaatatattccaattgtaaatggctattgtcataggtagatttatggtccctcaaagttatctatgtcctaagtccccaaaaacccatgcaaaaggaatactcagtggtgtgctgtgttgtttgatgaactgtgcatagtaggcagtacccactcatgttcagtacttgctcagatgtcctgctctgtcttcctacagaaatgtacttcctttcacttttacttttcttcacatctgaagctgctccataagaaatgaagcaaaatagacagatgttttgcttattgtattagttctaacaccaaacattaaaatacagctatatatagtcaataatataataccctctacatagcatttatgtagcacattcatttaagaggtacaaattagcatttctgaatgatgaccatgccatatgtccatagtagaagcagccataaccagagtcaatgtctcagacaatgagatgtctcatagtggactctggccatgtaaatcccaggactaacctgtgaactgatgaagttcttggttaaatttagaaaagatttggccttgagagctgaatttgaaaaccaggtcgttgtgatgtagaaaattgttcatgcgctggttggagattttgctaaggttgaacactgctttcaggtatgagtccagggtactggaatagggaagatggaacaacatgttagtgggtgacacagttattggcaaacaattaccttccttttgtcactgacctgtccaactggatgctgccctggtggctgaaggcacacttcatgatgctgtccagggtcatcagggagacatgttgaaagagctccagacgtgagttttgggcaatgtgttcctcccatttgttctggggcaggggatgaatatcatgatc

SEQ ID NO: 203311 - DNA, 1000 bp, Homo Sapiens
taaataacagattgaaaaaaagagtataaaagttatcacaggcactgagaatattttaaatgatagatattacacaaataactcttctctagaggtaagggcaagtcgtgttggcttctttccctctgcaaatagaacaatcaattaatttttttttttgaggcagggtcttactctgctgcccaggctggagtgcagtggtgctatcatggctcactgccacctccgcctcaagtgatcctctcgccttagcctcccaagtagctgggactacaggcatgtgccaccacacctgactaatttttgtattttttgtagagacggggttttgccatgttgcccaggttggtctccaacttccgggctcaagcgaaccacccccacggcctcccaaaatgctgggattataggtgtgagccactgcactcggcccaattcaatttttgaggttttgagaagcacactgatatgcttttgggatatcctctgtatcctaatcagattagtactgcccatgggctcagaaaaaaaaaaaagcagttatacccaatagcataacaatatttgcgtaagacaaaatccaatagtttctttcttttcttttctttttttcttttttgagacaaggtctcactctgttacccaggctggactgcagtggcatgatctcggctcactgtaacctctgcttcccagctcaagcgattcttcagcctcagcctcccgtgtagctgggactagaggcacaagccaccaacgcccggctaatttttgtattttttatagagatggggtttctcgatgttgctcaggatagtctggaactcctgagttcaaagcaacctgcctgcttcagcatcccaaagtgttggggattataggcgtgagccaccatgcccagccccaattcaacagtttcgataataaaaaggccctatcagcagcagccatattggggcatgctcaacatgcaactacagaaatacaaagccaagaattc

SEQ ID NO: 203312 - DNA, 1000 bp, Homo Sapiens
agttttatgtgttgagatgaacgttgttcttattttaaaaaaacaggaactgaggctgaagaaggctatgaatgatagagtggacagcagtgcatgaggacagctgggccaactcttcaatatcacaccttcattactcattctcactagaaggccatattcctcccaagtaaaatgggtgtcagtttacctagattatatgttaatttgttcctttttatggctgaggagcattccatagtatgggtcttccaccatacgcttatctattcactagttgatggacatgtgggctgtttctagtttttggctatcattaataaagctgcatacaagtctttgagtagatctctattttcattttctttgggtacacatctaaaaagggatttgatggtttgtatggtaagtatatgttaaactttataagagaaggttagagtattttctaaagtgattatatcattttgcactcccactagcaatgtatgagagttccagtcacacatagactctgagatggagcaaagacccctcttgggggcctgccagggatgaccttccccacaaagcatggaaataaagaaaaatcttgaattccttcaagggaaattccaggcacctagctagccttgagaagtaaatgaacaacttgataagcaagaagggaatggtagcttaaaacaatagccaaggaagttgaagtcacaggatgtttggtttcctttagaaactgaagataacatcttaacatatatccctgagttgtttttcagaaacccagacctccatcaaatggctcctctggcacgcagacctcagataagggggaaactgaggaatgaatgctggccaccattctttgttataaatttcttcctgaagggtgtggagggagcatgcccataaaccagagctaacattcttttctgctgatcctaaattttttacaaagttttccctccttaaccaattgcaaatcagaaaaatctttgaattc

SEQ ID NO: 203313 - DNA, 1000 bp, Homo Sapiens
atggaaaggcaattatggaaataactgcaagaatgagaaaattagcccatgttccagttcaaacttggaaagggtggtctccagattctctctttggaggcttggtttttatttttctgagggttcaagactttaataggagtggttctggccatattaggaagttgcctaatactcccttgtctcttacctctccttgttagaagcattcaatcgagtatagaggcaatagtagctaggcaaactaccactcagctaatggctctgcataaatatcaacctttgtctaaataagaaaactcgtcccttcaggcagaactaagtaatagtgatgccttctattaaacttcttttataaaaggcatcaaaggggggaaactgaggcagaaatttaaaaataaatatgcattcattcactccaagaaaagtaacagaaaaggcaagggttaaaaagaaaagaacaagttttcctctgcctagcagaggaaagtgcagcaagctcacttcaaggacagtaataagataatactgtttgagaaaccaaggccaaaggaatggactccagataccccccaacaccagagcaaggttgaaggaaaaaaaagaaagacaaattcttttactgttactcctttcccagtcttcttaagcatgattatgttttacaaatgtctgtatttagccggttgttgtttttctttcaatgcagctacaaggccaccacctatgcaaggccacaagttatgctatgctatagattatatgacctatcatttggttaactgcttttgttttatttattgtaagtccacttataaaaacccgattctgtctttgtttaatgctcagctttgtggatgtgagtccgctgagccagtgtgtacctaaaataaacaatcctcctatactctcatatcagtctctctggtcctcagtttcccacaacaccataagtgaaggctgttgctgtgctttgaatatttgcatgcctcaagaattc

SEQ ID NO: 203314 - DNA, 1000 bp, Homo Sapiens
gggattacaggcgtgagccaccacacctggtctgttaagctcttaatattatttggtggtgaccatcttatgaatttaggcatggtgacaccttagcaacaaaacagactttaaaagaataacccatatgtgagattccattttacttgtcatttttcatttctaaaattcagacacatttagatgcacaaattaaagtgtcagttcccatggtactattgtcaaaaattggccattcaaattctaaaacttggtagacctctccttactgttaaattatcaacaaggccctccacctcctgaagtcatcgggaatgttttatttacataaaaaggcagactcctgaaatgcagaaaaagatcttttgttttgacaaagtccgagttactgcccaagtaatcttgtagcttcaaggtaaagacacatgtgtatcaccatcacaattgatggctctgtgtttcttttctgaacagcaattgcccccacatgtgcgcatctgggattctgtgacattgaatactctccacgtcattggaataggtttttttgaccgagcagtcacctgtattgcattctcaaaatctgtaagtatgtgccctgtggatattgctgtcttcttccacaggaagtagagaatcaactcagggttgaagagggggagttgacacactcgatacctgcctgggtgtatgtacagatttggactctgaaacattcctgcttcccagaacccctcagtcagaggtcatatgcatgtctcatcagggacacacacttccttccaatcagacatctccagccacatgggtttggtgatgaaaacaggcccccagagatatcgtcctcactttccttaaggcagtttatgtgctctggccttgaatttcacctgcttctttcaagggtggctccagcgtgtctgtctctgccatcctgctactggaaaggggtcccgatccagaccccaagggagagttcttggatctcttgtaagaattc

SEQ ID NO: 203315 - DNA, 1000 bp, Homo Sapiens
aagcatcgctgtgtccctggggtgcttgtccttttcccccaggcctcagcgtggtttctcccttgaaagcaagccagccttttccttctaatctcagagaagcagaaatgaggatggttggtggaggggcagtggcctggtccttacccaagaccctccctcaactctgcctctggcactttggtctccagggaagcccccagcctctgccaccagctttctcgttgcagtgacctcccctgggccactgggccagaccccctccctcgggtttgagctgcactgcctcaaggagccaggctggggaaagggcttggctcccaggggccccactttcaggggctccagcctgctcccactccccccactcaccacaacactgctcccttggctggctcccactcattcccgctggagcctgtaggctggccctggggacctggccaggagaatgggcaaggtgggagggttgagggattgaagagacagaggcaccttcctccaccctccctgcctctggcacaggggaccgagagtctgtcgtgcattcaaaccccagctctatgcctataagcaagtgaccttggcaagtcccttatcccctcggaggacctgtttcttccttctgtaggatgacgtggagctcgctggaggttcccctgacatgatgcagcacacttcctgagtgctcagcagggcagagctcaagctgtcactggagctgatgtggtgggagggccagtgggggatccttgaagaggccgaatttcagccagggcctcggaggaccaatggaaggcctcaggtggcaatgaggtgtggtcttacaacaggcccctacttggtccctggggacaccaggaggacaggcccctactttgctgagactagacctgtgcttcctggcaccccagcccctccactccggcctctccagcctctgcccctgacccaggtggaggatggctcctcggggtccattccttcagccatggaattc

SEQ ID NO: 203316 - DNA, 1000 bp, Homo Sapiens
gggattcatatcagctcagaggccccagttctggctcatcacaattaatgaaagatgagcgctatataagtttctcctctggtcttctgtgtagtttcccttccactcagatggacacccaggctctctttatttttgtttgatgtgtgttcaggaaatataaaaagcttattttaattctaactttaagtaaacaattagaaaggaaaatttctgtttgttgttgcaggaacccctccccacctctatcccctgcctcccaagctctacaatctgttcatttgtttttaatatgcaggaagtgaattttaggttctccatgtttttatcccttcattagtgtgtataattaagaggtaacaggatttgatgtggttttccaaagttttatgtaacatgagaagcacacttagtgagtggttcatatttttgaaagattgtacagtatttgaggggagattttcttttaccggaacctcattttccaagttcttcattttgctgggcataatttgataagacttagtctatccttgtcctttttacttgagggcgatgcagtgtgtattttgaatacaccagtgcatgatcctgaggggcctttctttggtgagtgtatcttcagaaacagagataatcagtatccatcttcaggaattttctttcttcctgaagactcatttccacatgtcaagtataaactaggcctataaactctagtgagtggtttcatttaaccatccaaacagtttctatttcagttccaaaaaaggtaatttttcccccccagccattaaatagctggggttttttggttgttgttgttgttgttttcttggtggggggtaggggggtggagaatggggttttccactgctgctgttggttctctttggtgataggtgatgagatgtttcagaaatcaagccatcttcatactagttgtttaaaactcaatatataatactaatgttaggtttttacagagtttggaaagctt

SEQ ID NO: 203317 - DNA, 1000 bp, Homo Sapiens
gtgagccgagaccatgccattgcactccagcctgggtgacagagtgatactccgtctcaaaaaaaaaaaaaagaaaaaagaaaaaaaaagaaaactgataagggaaataagaattgcctgtagtattgagagcccggttgagttggagactataaatttatggtggcataagtctgtgctgccatgtgatttaggcagcaaggctcagtaatactggcatgttattgggaaaggcaactggttgaatcaatccatagctggggtttttccaggtagtgttacagactaatgggttcttcttgcccactgcacagaaaagccaatacaatgagatagcagtgttgcagcagagagtttaattatagcaaggcaactgaatggaaggataggagatatttctcaaatctgactccccgagaactcagaggctagggttttgaaagataatttggtggactgggtttagggaatgaatactgctgattggttagggatgaaatcatagggacattgaaattgtctttgtgccctgaatcagtttctgcatggggggtgtcagggaatcacaggacccacagagtcagttctttggcatgggtcacaggtacagttagcatctgccaggatgccaaagtctgaaaaatatctcaaagaccagtcttagattttacaatagtaatgttatttataggagcaattagggttacaaatcttgtgacctccagctctgtaactcctgaagagtaaacaattatagaaaagcaagctagggaacaatggcttgttatcgtttaactgtatctacatcttcacagaattcaggccactcccataattctaaccttgtggactttcattagctttagggaggtagttttggttcctgaacaataagggttagttttaagaagggactgctgtcatccttgctttaaactataaactaaagtcttcccatagttagcttgaactatgcctgggaatgagcaagagtagttag

SEQ ID NO: 203318 - DNA, 1000 bp, Homo Sapiens
ggatttttcttatttaatcatgatgcttcctagtataattgccctcactgggttctcactgtacctgagatggagtcatgctcctggccccagaggaccctgccttcctccactaacactaagtccctatggacttcagctcacatcaaatcactggcaggcttctgaatgggacatgcaacgtcccacacctgtgcttttgcataggctagtgccatttttattctattattattttttgggacagggtcttctctgttgcccaggctgtagtgcagtggtacaatcttagctcattgaagcctcaaagtcctgggctcaagggatcctccttcctcagcctcctgagtagctggattacataccctcatacccagctaatttaaaaattttttgtaggcatagagttttgctgtgttgcccaggctggtctaaaactcctggcttcaagcaattcacccttcttgacctcccaaagtgctgggattacaggcgtgagccactgcacctggctaccagtaccattttaaaaatgcctttcccccatagtacctggggacccccaaatcatccttctaagattctactctgggaagctgtctctcctctcccaggcataatgagcatctctttgtctcagggcttctcagactgtacagtgaccactgattagttgcctgcatccctaactgctacataggaagttctatgaggcagggatgggcctgtccaactctgaatcctggaacagggatttcaggtgcaggactggcatgaagtgggtactcagcatactttttcaatgaatcaaagaaggaatgaaggggttagtctagcctgtggtctaatgcaccaacttactatgttctctgtggtgtgtaagtcattccaattcttccatggctttgtcagctgtagggtgaccttgactgagtactcagggaatattatagggctgtcgttttcttcaatagtgtaataactagttaggctggaattc

SEQ ID NO: 203319 - DNA, 1000 bp, Homo Sapiens
gttactcttcataaggaacatttgcaaaatagaaaatattcagaagatggtgactggaatggtgaggggtctgaaaccatgccatctgagaaatatttaaggtgacatgagacatttagatgtgaagacaagacttggagaggaggaatggagataatggctgtctttgaatatctgaacattgtcatatgaattagaaacagctttatttttatcttgctcctgagggcagaaatcaagtctaatgaaagcagacttggggcttaatacaaggaagaaacaactcacaatgaggactgtctcaaaatggattaaatcttctggcaaagcagtgagccccttcctgaaagggttcaagcagaagctgggtgaccatctgttgggttgttagagtgagaattcctgccctgggtaggatctgggaggcaatgacctccaggcttcctccgtctctaaaattccatgatttcgtgcatgaaggaggggtgaaacagcagcccggagtttgtttatgtccaagggctcagcacacttgttaaaatgtcagtgctgtctgtatggcatgtcccatttgggggatgtgatcaggccactgggggattccaagaaagcctggaaaattcattgcttccttgtttaagatatttctttcctcacataagtacattctatacctccaaggctatagctgaattgagtattcaaaagatgagtagatgaggaagcagtcacaagagactttatcatttatggagagttttagggcacctctagaatgttataattgggagagatggcagaggtcattcagttcaactttgcagtcaatttaggaatcccttctacagaaggaaatgggcatttcccttctgacttgtatgtattcgagctattccattaagttatatgtaaggaattaattatgtggagttgcatctgcttccctataatcttcagctatgtgcctggcctgttttctggatcagcacagaaaaagatc

SEQ ID NO: 203320 - DNA, 1000 bp, Homo Sapiens
tgcctggctcttcccctctcaccagccatggaagccagcagtatcaagctcacagtgtctgaattcacccagcatgtcttcaatgccaagaacatgatggctgcctgtgaaccccgccatggcttatacttcaccttggctgctgtcttcactggtcagatatccatgaaggacgtcaatgacaaaatgttaaatatgcaaaacaaaaacagcagctactttgtggaatggatctccaacaacgtcaagaacagtctgacatcccatctcatggcctgaaaatgtcattcactggtattgtcaacatggtcatccagaagctcttcaagtacatcgcagatcagagaaagggatcaagtggggaaaagagaccatccttggtccctaagcctccagaaatgtcttaatccccaccttttcttatcccgaaaaggaattaacatccctgactatgtgtgatggtgtatactgccacagtgtttgaatcaatccccagaggagaggggaaccctcctccatcttttctgcaacatctcatatcttctttttgctgttgcttcccctacccctacacttggttttgttctatcctacatttgagatttctataatgtgttaaacttgctgaaaagatgacattgctccaatagccaaaaataaatgggatttcttaaaataaaataaataggtgcggctattctctcagagactcagtttcagattcaatgggtgtggaatggaatccccaaatccaccttttaaacaagttcctccagctcttggggcaggggatctcagaaccacactttgagaagcattgtttggttgccaatctttgggcattaatttaaagctggtttcatttaacttgcactataaggaacagattctctagattaggatccagcattgggaaactgggagggtgaagtgcataaggagccaagaggcccttccttccaaatattatggattgaggtttgcttgagaaatcaagaca

SEQ ID NO: 203321 - DNA, 1000 bp, Homo Sapiens
attatctggtaggtcaagacacctttcctgttttttgaaaaaactatttatttattgttatcactcatttatctttccagatgaatttataatcctttacattttctccaaatccttctaggttttgataaatctataaataatttatggaaaaatggcattttataatgttgattctttttgttcatagtgtgtttcttcatttgataaaggcttttaaaaaatttgtcaagattcatgattatttctctatttcttccttacatttactggtgaaggttactctggtatttattatttgttgttgctcttgtttcatcccttaatagtcttttaaaatattgcttctttatattttattcttaaaaatgtgaaattatacaatactgaaaataaacttattctatgaatcaatatctttaggttcattctgtagctgaggagtttttttactgttggaagactatgtgctgtccattggggtatggatccccttggctattagtgacactggttacttttcattatgctgtggaagtttcctttcatttgtggttttctatattagaaaaaaatcagggccgggcgcggtggctcacgcctgtaatcccagcactttcggaggctgaggtgggcggatcacgaggtcaggagatcaagaccatcctggctaacactgtgaaaccttgtctctactaaaaatacaaaaaattagccgggcgtgggcgtggtggtgggcgcctgtagtctcagctactcgggagactgaggcaggaaaatggcgtgaacccaggaggcggagcttgcagtgagctgagatcacgccactgcactccagcctgggtgacagagctagactccgtctcaaaaaaaaaaaaattagccatggatgttgaatgtgatcaaatgccttattaacacttattaaagtgtttaatataacaatatatatagaaaaaaatatccttactaaagcacttctgaaagtgaatcttacaaa

SEQ ID NO: 203322 - DNA, 1000 bp, Homo Sapiens
tgtgaaatattaactagttgtagatacagacatgagtgtgcttgtgtgtgtgttgtagtccttcatctgggaaagctattgggtatcattgcagttcggttgctcccttctaagtttctgaggttcatggggaaaaaaataacatgtaactgttatatgttaatatctcgtcatctcccaagtaaaatataaaaagccaattacttttgagttattatcacagcctctgaatttagaagatggttaatttgtttttagtggttccacagctttgttctaagatatgtgttttcagtgttcgtgagcatcttcgtgagttttctgtttgttttccttatcagaaaaggcaccccgggaatggaggggacagacggctagcaccagggccgtaggttttggagcgggaggtattcagaacggcctcccatctgtggggcctgggcactgataaaacttgcagtggctgtctggcttctccagagcagccgtggcctgtttctgcgcagaggtcactgggccttggaagactgccctggctatggagcggtcccagtgggttgcaggcactgtgcggtgggcaacataagggtcagcaccaggcacagcattggagggagccgccggctgcagactggattgcctagcacctctctgtcactctgcagttagccaagtttatgttttggatttaaagaaagaaatcaactgtgatttaaaaaaatagtattcagtgaattaaaagaccttgtaaatcagtctaaaattcagatgccttctgtagggagctgaatgtttatcaatgagccattttaggccataattgtatatatatgctttcgcttttttttttttttttaagatggagtctctctctgtggccaggctggagtacagtggcatgatctcggctcactgcaaactccgcctcccggttcaagcgattctcctgcctcagcctcctgagtagctgggattacaggcaaccgccatcatgcctggc

SEQ ID NO: 203323 - DNA, 1000 bp, Homo Sapiens
ggcaagaataatggtattgtttgtagagctttattaattggatattttttaaaagacattttcattcacaggtcattactatggttctcagcgatccaaatatgtagatcattggtttttttttttacctgaagtagcttaagagtacttggatcagtagaataaatatttattgaatcaatcagtcagccaattaatatgatgttagtgatagacctgcctccttttatggaagaggtaacagatccagagaggtcaagtaatttagttgtagactgaaaaatatatcaaagcctttgctgcaatcatatgtaacaaaaagaaccaaaacaaacactttttagtggcacctgtggatttacaaagggttgcctctctgtcattccacaacttcagaaggtgtgacaggttttccctatttatcattaccaataataacaagtattgagagttttaaaatttctcccagaagataaactaacaaggatggaaggggagggcaaaggatatctaaacatgagaataaggacatgttagagggggggaaacagttgtaacaataaggaaagagaagagcaacagtggaagagacaggttgtgtgcccctaaagattctgcacccccagtttggaaacactgatacattttaggacacagagcactcctagatctctacgaaattttagaatgaataatgtgtaatttataggatcagaacgtatggttattaaaacttggatcaagatatgcccggtgtatacattcttagcacataggaatggcactgccatactggagaaggtcagcagtaaataggcattctgtacataagcctcatggaagggtaagatggagagactggcagaagtagcacctactctgctgggagcacttctctgagtacgctttagttcaattcaaatcactgtattctttccccattgctaacctaatatatgaaacaagcttagctgtctcagaagtttttcaagagatgatc

SEQ ID NO: 203324 - DNA, 1000 bp, Homo Sapiens
tttattagagatggtgtttctccatgttggttaggcttatctccgattcccgacctcaggtgatcctgccttggcctctgaaagtagtgggattacaggtgtgagccaccgcacccggccactatctccctcactttttaaggacagttttgcagaatagaaaattcttggttgacagatttttttttttcttttagcactttgaatatatgacctcactgacttctggcctccatactttctgatgaaaaatctgctgatcattttattgaacatcccttgtatgtgaccagtctcttttctcttgctgctttcaagatattctctctttgtctttgtcttttgacagcttgattataatgtttctctatgtggatctcttagttcatcttggagttctttgagtctcttggatgttttatattcatatctttcatcaaatttgggatgttttaacactttattctgtctgcttcttcctctctttttttttttttctgagactcctacagtgcagaagttggtagtttgttctcttgacatgtccccatgtcccacagtttccttacattctttttttttctttttaatggagtttccctctgtcacccaggctagagtacagtggcgcaatctcagctcactgcaacctccacctcataggttcaagcaattctcctgcctcagcctcccgagtagctgggattacaggtgcctgctgccacattcagctaattttttgtatttttagtagagatggggtttcaccatgttggtgtggctggtcttgaactcctgacctcaagtgatccacccaccttggcctcccaaagtgctaggattacaggcatgagccaccacgctcagctagtttccttacattctgttcacttttcctcattcttttttctttttatttctcagacttgacaatttctattgtcctatctccaggtttggtgatttttctttctgcctactcaaatctgcctttgaattc

SEQ ID NO: 203325 - DNA, 1000 bp, Homo Sapiens
tgtgatgtctccggtttcatttcgaattgagcttatttggattttctctctttttggttagtctcactaatgatctatcaattttgtttatcttttcaaagaaccagcttcttgtttcattgttcttttttgtttgtttcaatttcatttagttctgctctgatctttgtgatttcttttctttcaatggctttgggtttagtttgttcctgtttctctagttccttgaggttgtctatttgtgctctttcagactttctgatgtaggcatttgatgctatgacttttcctcttagcactgcttttgttgtattccagaggttttgataacttgtgtcactattaccattcatttcaaagaatctttgaatttccatcttgatttcattattaatccccaaatcattcaggagcagattatttaatttccatgtatttgtatagtgtttacagttcctttgggagctgatttctaattttattccactgttgtctgagaagatacttgatatgatctcgactttcttaaatttattgagacttgttttgtggcctatgttggagaatgttccatgtgctaagaagaatgtatattctgcagttgttgggcagaatgttctgtaaacttctgctaagtccatttgttttagggtatagcttaagtccactgtttgttggctttctgtctcaatctatttagtgctgtcagtggagtacttaagtccaccactattattgtgttgctattttatttgttgggtctagtagtaactgttttataaatatgagagctccagtgttaggtgcatataaatttagtattatagtatcttcttgttggattgatccttttatcattatataatgaccttgtcttttttcactgctgatgccttaaagtctgttttgtctgatataagaatagctacgcctgcttgctttggttttcatttgtgtagcttatcttttccatccctttaccttgaatttatgtgaattc

SEQ ID NO: 203326 - DNA, 1000 bp, Homo Sapiens
ttcctctgcctgaaatgctttgctctcctcttaacctaactacttctagtcatgctttaattatctcttaaagaagatcacttcctcagtgaaaccttcataacccatcactctaggtctaacccccctctaatccctgtgtttcaatattacagacatttatcaagaacctaccttggaggcggggctcggtggctcatgcctgtaatcagagcactttgggaggcgaaagcaggtggatttcttgagtccaggagttgaagaccagcctgggcaacatagtgaaaccccatctctacaaaaaatacaacaattagttggggatagtggtatgttcctgtagtcccagctattcaggaggcagaggtgggaggatcgcttgagcctgggaaatcgaggctgcagtgagctgtgatcatgccactgcactccagactgggtaacagagtgacatactgtctcaaaaaaaaaaaaaaaagaacctaatatggacgaggtactgtatctggaactagggatatatattagtgaagaaatacagacataatgccttccctcacatagcttagagccgaatggaagagacagaaattatcaaataatcacacatgtacctacaaattttaagtataaaaagtgctatgaaatagaagtacatgatgctttgaaaggacttggtagcacagaaaagtcatccccaaggaaatgatgattgacctagaccagaagggtgagcaggagttaatgatgaattggaagaaggaaattattttctttcttttttttttttttttttttttgagatggagtctcgctctgtcacccaggctggagtgaagtggagcaatctcggctcactgcagcctccgtctcctgggttccagccattctcctgcctcagcctcccaggtagctgggattgcaggcatgcgccaccacacctggctaatttttgtatttttagtagagacgaggtgtcaccatgttggccaggctgatc

SEQ ID NO: 203327 - DNA, 1000 bp, Homo Sapiens
attgaaatgacactaaaggcaagaaagataagtcaatagaacaattgattctatcattttcttatatatagatctgatgaagcctctgtattttgtcaaaggtcaaaagttttatatgcttaacaacaatagcaataaaaagtagattgatagtcatcattttcatagcagcttgccctaccagggaagaaaaaggtgctttcttctaaggaaaacattatcaggtaaggaccttaattcaataaattgcttgttaattcacagacacctgtcttagcagctggctagaatactgctagaacactgagactggatgatccagtatctacatctacctttgtgcatttttcttttacagcatggaaagaaatgttcaattgcttagttgtgtgaagacatgaagccccatcttgatactttctttccctaatgaaacatttcttttttcaacaaaattattttttggcttaaagaagtaattcctatttctagctaggcagtccctatatgccttcataaagaaagcattgtttggcaacatacaccaataaataatactagacttgaaaaattagttgtcttgctattactttttttgtgttttcttaaaagtaatctcacatatttttggatgtttacttgggaatactgtgacacaaagccagattagggcagtggcagtatcatttgactgtgtataaaacatgtgtggaatttattttaaaatttatttcataaacatacatccagggattctgatttggtacttcatactaagggtgaggtccaggaatctacacttaacaaatttcctgaaaatttgggtataggcagtctttggaccttgctttttgaaactaagttaaggagtagttcacatacattttgagcatctgataaaatgatttgtgcctatctaatgagattcactatctttatttctgtgttacgcctagatttccttttttctctagagcttcattcatttaagatggaattc

SEQ ID NO: 203328 - DNA, 1000 bp, Homo Sapiens
tgtgagcaggtggcagagccaattacaggaacaggactgggcattctggctgaccttggcagaagcttctcttccatcttccttttatttctagcagctgggggaggagggaatgaagccctaattgctttcaccttgagaaaaatctgcggctgaccatgtgcagagagaatcattctgtcacacagcaggggggctcgaaattagatcagatcaggaaggctggcgttttccctgaggctctcgactaacgaccaaggggaagagaggcacttggcctaacgcccctcctcactctgccctaccagtcacacagtgatagctgagctcttctcttctgcccagaactccacagggaactccccatgcctgccccctccccacccaggctgctgtgactaacgtgtgccttcactaggtcttgcccaggccacaactcaggctgctgggtgagaactagagctattctcacaggcccccaactgccaggcagatgcctctgtcgacccagccagcctgtccctgccgagttcagacaggaaggcgaggctggcccctggaactaccagggagagacatcggccagccacatatgcctgattctgcccagacacttctaacaattgaggcagtgggtgaactcgcatgctttctccatccccgatgaaaagcaagttcaaaagccacatactgtcctcaagccctgggggaagccaggaccctgacaaagaggaggcattgtaactcgatagagcagtcttgagtgatactgatgcagtagagtcaaccaccacacactcagcattggagccaccgagaatcatccagagcgcatgtgatactgacgttaagcaattaatggcatacaaagcttcagagcactagctggtcacctactggatcccgagtagaaattttctgtaagaaattctggggaaggccgggcgcggtggctcaagcctgtaatcccagcactttgggaggccgaggcgggtggatc

SEQ ID NO: 203329 - DNA, 1000 bp, Homo Sapiens
gcagagagataagaaaagagagaaatgaacagaataacacctttcattgccttttgtgacatattcccaagctgacctttctgaagctgaaagaaaactattctgtctgaaacaaaaggaaatgaatagtcagttcaaatagcatagttcttaggaggagctccagctgtagatccagacaggcatggctctgattcccagttctgccattcactggctgggggaccctgttactaacctctgtaaacctcagttttctcatccaaaaagtggagataataatgtctccttcctcgcagagctattgtaaacattcaatgagctggctatgaagatggcctcacttctaataagaattcaagagatagaagccagtgctactttttcaatgcaatgtggttggaactaaagggcaaattcaaagtgtaaggtaatttgctgactttcatgagttcacaatccaactgaagaaacggaacacaaaggaaagataaaccacaatgtaattcaaggaaagatcagtgtttttagaacatgccacatctataaattaccccaaagagaaattgtccacttggctctaattaatgaaaaataaaacctgaatgtaaatcttggtaattacaacaacaaaaagaaaagattagtgttataaatgatagtcatggtcaggactctgagacaagagaaatttgtgaacactgagggaggaagtccagatgctattaagggcaaataatttttttattttaaaaaaatagtaatttttaatgtaaacaattcctatgcagtgttcatcatccttaaagtttggaggcagtggaaaattacataagatttagaaggattaaatctgtgactacacatattaaaattggcctgagtcttagtcttttgccctaatagctataggagtcatatcaaaagggaaaactggaataaactgttaaaaagattattttcaagggggttatgaggttgctcgccccattccatgatc

SEQ ID NO: 203330 - DNA, 1000 bp, Homo Sapiens
agagaaggagagagacatggagcaagggaagaggatcatgcagggtcaatgtaaattctgtgtatcaaaaaccacaacacagactgagtcatagtgtagaatgacttgagagttgagagaaataacattcacagagcactatcaggaagttatttttcttttagaacagggatggtaagtagatttcaactcgcgtgcccaatctggtccacaactaaaatgccaaggctcagcatcaagacggtcatgacaatctgaagtccattacaaggtggggaggggaggagggttgtgaatatatttatttgttatttcagctgaaacaattacatttcatccttggactaagcaagaccaacagagaaatgcacacctgaacctagaagggtttctcttggactgcactcagctgtcacatcattcacctgcaccgaggcagtcgtcattgttttacctacagagatgttgtcggccactctgtgtggcattatctttatgagtactctgaagacatttctctgagtcttgaatcatgatcaaccctgcttcttctaagtaactggtgtgcttttatcttccagccaccgtaagtcatcaacggagcatgttttccttctggtactgattgctcagaagctcagaggtaagtctgtgggaactgccagcaaatgaatagcctctctcccatgaactggggacttattttatctctgacttcaccccacttttccttccccacagatttcctcccttacttatttttcttaattgcattattttacacctatgtttaaaggccatctcaaaaatctttgaagacagctacatacatcagatcaacagtaattaacataagaggaaacaaaccagatggtgagtggaggaaagttttacaaatgctgccatgcagtggcagccacagggtgatggccttgaaccaggaatagccctgggccaacccatcaagtcagcaaatatctcattctccccaccctggatc

SEQ ID NO: 203331 - DNA, 1000 bp, Homo Sapiens
gcctgggcaacattgtgaaaccctgtctctacaaaaaagctactctggaggctgaggcaggaggactgcttgagcccgaggttgaggctgcagtgagccgagattgtgccaccgcactccagcctgggtgacagaacaagactccgtctcaattaaaaaaaaaaaaaaggaaatttctgaagtgatagtaatgttctatgtctcgatagcaatttgggatacaaaggtataggcatttattattattaaaacttggaaatttacacacaagcacataagatttatacatttcattgtatacatattttacttcaaaagaaaaaagtcaacaaatatttaacctagtcaatgatatacatgctgagttatttaggcggaagtctactgatgtctacaatttacttttaaatgcgcccaaaaaaaaaaaaaacagggattgacgaatgcttagagaaaggtacagacatgtgataagccaactatagtgaaatgttagtggtagtctacatggtaggtatatgctgttcactataaaattttttcaactttgctctgtttgcaaattttcacaataatatattggggaaatgtctagaaatgtgatgctaccctaggtcagcaggaactgtgaaagattagacctgtattctggttcccagatgctagagcctttattttttttgggggggtggaggtggagtctcactctgtcgcccagcctggagtgcaatggtgtgatctcggctcactacaacctccacctcccgggttcaagtgattcccctgcctcagcttcccaagtagctggattacaggcaccttccagcatgcccagctaagtttttgtatttttagtagagacggggtttcaccaggtttgtcaggccggtctcaaacttgatccacccgcctcggcctcccaaagtgctgggattacaggcgtgggccaccacgtccagcctgctagagtcttttatacttgatataatttcttgaattc

SEQ ID NO: 203332 - DNA, 1000 bp, Homo Sapiens
cagtctgcccagccgtgccctgcccctggacactcatgggctgctgtactgaacagggcaaaggcaagtgcagggacatgggttctggccccaggtctgatgccaacttggccacacccgcaaagtcattggacttctctggacttcagatttttctttttctttttcttttctttttttctttttctttctttttttttttttttttttgaggcagagtctcactctgtcacctaggctggagtgcaatggcactgtgttggctcactgtaacctctgtctcctgggttcaagcagttctcctgcctcagcctcccgagtagctgggattacaggcatgtaccaccacgcctggctaatttttatatttttagtagagatggggtttcaccatgttggccaggctggtctcgaactcctgaccttaggtgatctgcccacctcggcctcccaaagtgctgggattacaggcgtttgccatcggcctggtccagatttttatttttcaaatgaaatgagaagcttgggtttcactctaaacgttcttttcaactctgaaacccagcaattctgaatctctctacttctgggcaactctgtttccattcttccggggttcatgggagagaaccttcttcagagaggctgatgcaagagctccaggggaggggcactgagggcacatgaattgtggaacagaaacagcgatggttacagcagctggcagagtgaggaagcagcggtctcgggagtcccagcccgaaggcagatttcctggccacaaaagcaccaacggacaagactccaccaacggtgccccttggatggtggagtccagctgccaagctcactcaggggacagtggctcttttctcagtcactcatcatggcactagggattaagtgcatttaataacacccccactctgcatttaataaccctccaaaacccaaatgactctcctgcacattgaagctgcttaaaccattgactgtgatc

SEQ ID NO: 203333 - DNA, 1000 bp, Homo Sapiens
ttttaatgtccttaaaaagcagcatcataatttagagttggagaggacttaatgaatgttctaatacaatctccacattttgtagctgtaagcacttgagggatgaggagattggcctgagctagtatcttatacatgggaaaaccagaaaaagaactgaggttttcttactacagccctgtgatcctttctctgtattatcagcccttcaccttctgcagcacattgcagttattcatccatatgtcttattgaagagactgtttagaggcttatttttaattaaaaagttaacatttttaaattaaagtttcaggtttagaaaatttccacttttaagtgaagcttgcaagtgttatactatttataaaattaacaaaccattacttttaaagcgactttgataaatatgatatttaaatagtatgatattaactgatatacacattcaattaatatactcaatttcatatttaagcacttcaattttctatttgactagccttcctaagtacttaaatcttataaatttaaaagctaagtatataaaaagtgaatctaaaaattctctttagctgtttcaatattacttacaaatttagtaacatttccacttaaaaatcccaagtttaagccattaaccaaattaaacatttaaaattataattataagcctgatagtctctcaatagaccatattctttcgatcataatataaaataacaaatattcaagtgccttgtcacaaaacgactagttctatgattttgctttatttatttcttcattcaataattatctaaaatatacctgtgtgccaggcaatactctaggctctagataaacattagcaaacaaaataaaaatttctattcttgtgaggctcaaattctaaggaaggggcaaatagtaagcaacataaattagtaaaaaacataggccaggtgtggtggctcatgcctgtaatcccaccactttgggaggctgaggtaggaggatc

SEQ ID NO: 203334 - DNA, 1000 bp, Homo Sapiens
gatgccacaggcatgaacaaaatatggcagaagggttgagtgagtgaattaatacattttcatgattatttgacttcaaaatattttctaaggccacatgcagttactccctcactgtgggattcatccaccttcataatactcaaccccaccctcccacacacacagcaaggcttcctaggacaggctgagcatcaagcttggggctgccccatctccagcttcccaagccctgaagctcagacatgaatgctctggtcctgcccagtgtctcccgggccctgatttgcaccagtcccaaacaaagccctgcacctcccggcccttcccccgggcagttccctctcccccatcagtggacctcagcaccgcgccagacatgcctgtgggagccctgtgtgcagccaaaagcagcccaaccgtaggaatctgagttcttcctgccttgggtcatcgttatcgagcttttctgggaaatttgggatcttagtgtctggcaaaatttatattacttatttaaggcaagtgttgcaattttccatttcataatcaagtaaaagctagacatattcttactagccattaagagaaccacaaatgatttgctaatttttttcaaagaaatatttttatttcatatgttggcacaaaatgtaatagttatttctgggtttggagctttccctgaataagaattctggatttaaaatgttgaagactatttcaattttaaaactaaaagaaaatatgcagaacactatgaaaagtttaatactgcataacttaatgttattaaaatgtgtaaaacttgcagcatattaaactataagagaaacccaaactcaaaaaaagctacacaaaagtggctacaactaaaatggacctaacataactcaaaaatttctacttctggccataaaacagtagatacggtctctgaaaccccaatgtggccctgataacagtcagtgtggagttgttagcataccaagaggaattc

SEQ ID NO: 203335 - DNA, 1000 bp, Homo Sapiens
gtttttcataaggaaccaaaaacaactgagccatgtggccctctgacaacctccccagggccctgcagacagcagactcctgatcaatggtcactaactgaccagcttatgggatctgggccaaaggagagccagggaggtcagattgtttcttgaggtcacccagctgtgaaagaacttgggcccatccttggccaaacctgcacatcatcactcagacctggggcttccttctgtgtgcagagctgatatttaaacaccattgatgtcaatgcatctattcactcagaaaatattgggaccgtgcttgctctggctctctgtgttgaagatgatacagttcctttacctcaaagaggtcacaaaccaatcagggagatgagatatttaccagagcagttcctcagcactggagccaaaggttgggacagtcagagaaggcttcccagaggcgctggcacttgaggcccttgaaagattcttaatcacttatttggtgtaagctgtttaagagagctttgctcatcttggttagtccaagatgtgcctgtgacctgtttgtggtcctggttcacaaggaggagggacagtagtggctatcccctgcatcagcaccccctgttccatcactgctaccgagggctgcaaagccacaggactagctggcagtgagagggcccgttgcctgcgtgtagacaccgggatcagagattggctgagacacaccagaggccccacagtgacccagggcggagcagggtctagaacctaatagtcctgattcccacccctgtgctctctccgtggatgccaccacccagttgcctttacgaggccagtgccttctgtgggtcagtaccttgggctctgggctgggtgctgggtgtagctggggtggtccttaccatggtcccccttttcacacgatgggcattgaaaggatagcccagactgagacccttgtcagaaggaggtggggtatgaacaaagcctaatgatc

SEQ ID NO: 203336 - DNA, 1000 bp, Homo Sapiens
gccagtgctaaagcaatatttagttatagagtgaccaagcaccagcgagcagctagaagcatttaacatgaaagaacacgacgggaaatgacgtctgggtttcacgagtggttgaggtctttctcagaacaatgccaaatacaagcctgtgacaagttggatacagcaaagccattttttttctgtctcatggactgaaatgttctttgaaagaaaactataaaaaagcacaagtattgtggctcttttgatgtccaaataaattcaacaggactctgagcgctacatctagattgggaaatggattttagagagatgcccacagactgccctaaggggaaagggactgtgaagaggaggtgagagatgagaattttgggacccaaatgccgattggtatcatttcttcctaaagaggagaacgctcaggtttagttggaagaagggatgcagtggctgatggggcaaaccactcacaaggcagaactcggtgccagctctgaaggtggttgtcgtgtccagagacaacaggcctaaaacgtctgcaaaatccaagaggattacataggggaaaatgggcagaaaacaatgagttccaggatgaagtgctttcttagctcttggtaacaaaacagggatgagagtgctccttaatggggaactctggaagtttttttgggtacaggacccaggtctgtcaaacactgattctcactggctcagcacactccagtccctgcctccttgtgtccctgcctgctcctgctgtcttttggcatagctctgtcttccaaagggcactgtggttctggatgggatggtgggctggatcctaaaggaagagtaggaaagatttgcaaaaacttaagggtcaagttgaaatttataatcaatgcttgagtatcttttctttaaaaaaaaaaaaactcttgatgtcaggccgtttttattaaactgttaaagtgattctgagaaagaatcagataaggatatctggatc

SEQ ID NO: 203337 - DNA, 1000 bp, Homo Sapiens
gtgataacacagttttcaatctgtggttaaatgaggctgacctattgtgtacaagtctcatctgtaatttttgttggagtatagtgtgcatgggggaaggtcagttaagtcctgcccatgttttcccgggagtcttagagtcagttctggtaggctggaaacccacatgatataaaggcatatgaccaaggccgccaggcgcatttcactggcccctgaaagctggaaacgactaagagatctttgcctcatttattgaggcccagagaggggaaacgagagccagtgtcacccaacagacctgggactggaactcgggtctgcttgctagtatgtatcaggcccctcccaacttcaagtgtaggtagaactagtatttgagccgaggtcagtgagtattctttccatcacatctctgccccatcgtagatattctaaccatggactgcaagtcaaggttgccagagtgtgaatgagcacagctctttgtggtgggtggttttacactctgggtaaatctcattggcattcagtagttccaggctattctggccttgacttcccttttgaccttcaagtaggtgggcactggaacaggaaagtaccagggaggaaatgagcccagaaactgatatccctttgtggtacactctcattctcacttggtgccaggcccctctcctgctctattgttccccttcatttcctgtcccctctcccactccttcccagtagtggagaactgctcaaatgtgttgcatatacatttttggacttttttttttttttttttgagacctcgtctcactctgtgccccaggctggagtgcagtggtgcaatctcagctcactgcaacctccgcctcccgggtcaagcaattctcgtgcttcagcctcccgagtagctgggactacaggcgcctgccaccatgcccggctaatttttgtatttttcgtagagacggggtttcactacgttggccaggctggtctagaattc

SEQ ID NO: 203338 - DNA, 1000 bp, Homo Sapiens
actcccctgttcccaacacctccatcctccgcttccccttcccacgcccggtcttttcttgctcttagtttgagagcctgtgccacagaaacaccttcatctgctaggccagtatctgcttttcactgtccagtcttggacacacattcatgagctcacatggaatagcttttagcttagagctccagggagccagccagatgcccaaactggtgcaaaagggaaggaaacaaacatttgaggggctgaggtgagccaggctcttgaggttgcagggaaggaagcttggaggtacctcttctgcattcagatggggacctatgtcttaatggacctgcagtgggcgcccacccccagagtggctgccatccgctgttctcagctctgctggagccctgcacaattaaacacctaagtggattttaatgacgatattttgcttcagcgctcaggcttctcagcctccatgagtatgtagtcttttccaccttcaccacactggcctgaagtcagcaccactccctatggccttcagcactgtaggcctagaacttgcaaaaattactgtcttcctgaccccctcttgccactccagatgtgctctttgtgccttgtggcctatgatgaggacagactttcagttcagatgttggaatcacagcatgaagtttgaggtgggcatctgataagcacccacctacatacagacgtttccaggttgtcaggctacacttaacatgcgtttgactgtattcaaacttttcttaaaggcccctggtagatttttgaagatgttggtaattttacactaaggggaggaagtacaaagtgctccaaatctttctggttttattagtttcctagggctgctgtaacaacataccacaaactgggtggcttagaacaacagatatttattctttcacagttctggaggctagatgtctaaggcaaggtgtcggcccggccgtggtttctctgaaggttctaggggaggatc

SEQ ID NO: 203339 - DNA, 1000 bp, Homo Sapiens
atttaatttaaaagaaaattgcttgtcaagagacccagcatattgatttcctattagggatcagcggtctagaagtacatcttgaacattcacagcttgtcctgaatttagctgtgggaatgtctaagggtactttgaccagtccatactacagagaccctttcttcatgatggtgtggtgtgcaggagggtgttcaggggtgacatgatgttctttttgtcaacttgggactttgatttcaccagagtaaagaggatcgtagaaatcttgctaagtcaaggaaattcttatttaccgccatagactttgctccatcacagcggttctcaaactgtcatctagggatccctagatcatagtcccttcctgggagtttccaaggcgaaaagtagtaccatggtaaaaactgagacattattgtcttcattttctcacaaatgtgcagtggggctttccagatactacatgatatgtgatattgcatcagattgaattgagttatgagaactgtgttgactcccgttaagccagatattaaagacttttgcagaagtggaaagcagtgccacttttctcacagttttttcaatgtgtaaaatacaattttcataaaaattttatttctgttaacatgtaatgattgtataattttctaaatgaattaatatgaaatttgttttaatttctagtatggtaaatatcaatgtgtatatgaaacccaggtaaacagtagcttttttgagtcctgaaaatatgcagtacacttctatgcagcctctcctaattgcagaagtatcaacccatggtgaattttgtttcatttacacctttactctaagtgaagcaaatctcagacatttttttggggggtggaaggtggagacagggtggagttcagtggtggtgccatcatagctcactgtgacctcaaacacctgggcttatgcaatactctcgcctcagccttctcactagctaggaccgcatgtgtgcaccacc

SEQ ID NO: 203340 - DNA, 1000 bp, Homo Sapiens
aaaagtacaaaaattagccagacatagtggtgtgcacctgtaatcccagctactcgggaggctgaggcaggagaatcacttgaacctaggaggtggaggttgcagaggggctgagatcatgccattgcactccagcctgggcaacagagcaagactccatctcaaaaaaaaaaaaagggaggggggtggtggaattttagctaaaaaagaaaatatttaaaattctatggagggtgtgaaagtaaagataacttattgactgatcagagagggaactcattttcttccacgtatttgtcatattttgtcatattttaaccccatgcttttaaaaatagatgcctattttgattgtattctggttcttttttttggaagattaccagaagaagggcaaaggattttttatgttttgttactgtgctatatttctttgttcttagcagctctagggaaaggtttggtagcaagaagtatgaaaaatactggttagaaagagtttctagccttctacctaatacttagtgttacaagtatagccaggaactgagtgtaagtggtgaagaagacagcacacagagattgtgatctaattgaaataatttttgaaaaatgctatgacattttccagataacctacatttaaagcaatgttcctcaaatgggatttgaaatagaaagaatgtctgaatcacctagggacattttcagaatacatatgctcacccctgcaagtgctgatcaggatgtgaacagaaggatgagatgctgaggcagtgggcgtacacattctgaaaacactactcctcatgtagcttggctccccttccatcccccgataagaaaaagtacaagaaccattgatttaaacacatctaagttacctttcatgatattcatgatctaaataactccatgatattacggggttatttgtttcttaaaagtcactttgaactaaactatagtaagtcagtcatttttaaggatataattttaa

SEQ ID NO: 203341 - DNA, 1000 bp, Homo Sapiens
ccatcgaccctacttggaataaagggactacccagcaaagccctgctcagatttctgacccacagaagagtgaaatgcaataaaatggctgttgctttaggtcactaaattttgtagtagtttgttatacatcagtagatgatggaatggtgagaagtatctgtgtttgtgcatataaacatttaagtaactactgcaattaaatccttcccttttacaccaccttttgaaaaatgtgtcaatttttataggaccatagatgatatgccagattttgcaatatattttctaaagaacataattttacatgaagcgtaacaccaaccttatataatatttaatcaattttaagtttagagcaataagcacgaccacattgtgcccaatctatgtgttatttttacaagttaatgctgaagttctgtcatcccaagcttctatacacaggaattatccttctcgaatacctaaacttttttcattatccctgccttgcagagtatttaacattcctgcatcaacagtaaagaagggtacctttgcttcatataaaaatcatcacttagctcagtgccaggcatctattaatttatcaatatatgttagctgtaatgatgattcattcaatatgtctttaaagaacatataattcaacagtaatatacacatgtatggaacaaggagaaactattatcacaatggactataatatagtttctgactccctgtaaatagaatctgctctaaattaagcagatgctatagccatgcttcaatataactctgttttcaacttcgttatgaaatcctttaagggtgaggccattttacaaaggacaaagaaactggtgcttcaggaactaaacttttttggatgaaacccaaatgtatctggcatatcttgaattgtcttttatagtcaatcctgttttagggacattaacaaaggtttattattacataatttgagagtctttcaaataaaaggaaagggcagatc

SEQ ID NO: 203342 - DNA, 1000 bp, Homo Sapiens
ctcgatcagaacatgcaaggggaaaataactgtctaatctaggaaggtaagagtactggcttcttctggaaaacaaaggatgtttgactacccccattggagcaagggaaatatatctatagacacgactgggtaacaaaggatagacatcacatctcataggacttctatttgtgccccaactgggcttatttttgtctgtggccatgagtaagtagaagtcccacctcataaccactcctgactccctggggagctatctgttcttttaggagtagcttttccttgtatactaaaaactagaaatggggtgaatgtatactggccatcattgcccctctgggagtcaccatctataatcccataaggcccaggaatatcagaaataaatgagcaatagggttaattctggcaggaatcgagacagtaataggactagtggccccctggggtggctttgtctcccattagtcaatcctaaagaacttgactcaaaccctagaatcactggccaccaatataggccaggcattaaacagaattcaagagttcctagactctttgacaaatgttgtccttgacaacagactagcattggattattggattatttgctagctgaacaaggtggagtctgtgcagttattaatatgacctgctgcatgtacattaataactctggaaaatcgaggttaacattaggaaatctatgaacaagctacctggttagatagatgtaaccagggcactgaccccagctgtatctggtcacttatcaaaagtgccctcccaaatcttgcctggtttttacctttcctaggaacttgctagctatcctgttactactaatttttggcccttgcttgtttaaccacttagtaaagtttgtgtcttccagattacagtaaatccatgtaaagaatgctggcacaaggcttccaacccatcctgtattctgacctggagaatgaaaatatcctgcccttggttccgttagatc

SEQ ID NO: 203343 - DNA, 1000 bp, Homo Sapiens
tggttttgatttgtatttccctgatagctaatgatgttgaccatcctttcatatgcttattatccatttgtatatcttctctggaagaatatctattcagatcctttgcccattttgcctagtaaactttattttgtagaacagttttagatttacagaaaaatggcaaagatagtacacagaattctcattatcctgtattcagtttcccctattattattattattatttttgagacggagtctccctctgtcacccaggctggagtgcagtggcaccatctcggctcactgcaacctccgcctcctgggttccagcgattcttctgcctcagcctcccaagtagctgggactacaggagcaagccaccacactcgactaacaatttcccctattattaacatcttacactggtatggtacatttgttaaaattaatgagccaatatcaacatattcataattaacaactaaaatccatgttaatcagatattagttttcacctaatgttctttctcagtttcaggatcccatccaggataccatattacacttagtcttcagagaaagagtctcgctctgtcactcaggctggagtgccgtggcagcatctgggctcacgccaccacacccagctaattttgtattttattgtagagatggaggtcccactacattgcccagactggcctcgaattcctgggctcaagccatccacccaccttggcctccctctctccctccatgtctctccctcttttttttttcaaagttgagacaaagtctcactctgtcgcccagattggagtacagtggcacaatctcggctcactgcaacttccacctcccaggttcaagagattctcatgcctcagcctcctgagtagctgggattacaggcatgcgccaccacgcctggctgattctgtgtatttttagtagagacaggatttcactgtgttggccaggctggtctccaactcctggcctcaagtgatc

SEQ ID NO: 203344 - DNA, 1000 bp, Homo Sapiens
gagtgaaaccaatccccactttttaaaaaacttgcatattattcataacaaacaagaattatcctctcagatgaaattatgccttaccctagaaacacacaatttgtccaaacaaattagcgaacacattttcagaaacacaccagacctaatttacccaaatgagtatcttcattcaaagtggctgccctggaaataatagaatccaacatttattgaacacttactatgtaccagacactctcccaaattctctatgtagatgagcattttaaattcttattataactctatgaagtagaaactctaattatctacattgtaagacaagaaaatttcatcaaagagactaagagaggtttaagtaactttcccaggggtaaccagctggtaattatgggagattaaacagtaacccaggcagtctaactatctgctctcctaactgttgaacaatactaactaccgctcccagaagctgtgtacctatttaaaatgaactgtcatccagacaaatttttggaattctatttcagaattttgttcaatgtacaatataatcaatatcatgatttgtaaatacacattattctttactcacaaactggtgttccaatcatatgaccaaatttcaccctcaacaaatgaaaccttacaaaaattgagactactgacatgaatgtgctgcacagaacgcacatcagcagcagatgagcctggggggtggctgtggcaaaagaaaattaaatgcaaaggtgcctgtcaccggttgagttgtgtcccccaaaattcacaggttggagtccgaatccccagtacctaagaatgtgacgatgtttggagatagggcttttcaataggtaataaatttaaaataaagtcattagggtgaaccccaatccaatatgactggtatcattataaggagagatgtggaaggccaggcgcggtggctcacgcctgtaatcccagcactttgggaggccgaggtgggcagatc

SEQ ID NO: 203345 - DNA, 1000 bp, Homo Sapiens
tggctaattttgtatttttagtagagacggggtttcaccatgttggtcagcgtggtctcaatctcctgaccttgtgatccgcctgccttggcactctcaaattgctgggattataggtgtgagccactgcacccggcttgaagctgggaggcagaggctgcagtgagctgagatcaatctctttttctaaggcattgcacacctacacatgtgtaacccaggagggtggcacgggaaatatttccaacctggagacatcgtagagagaggaagtgctccttcaggaggacaaatggaaacatctgctgcagcttcttagcactctcctggcttaccttttcagttgctcaaccctaaataaatttgctcaaccatagacatcagggcacactacgggaacattatgggcatggcatttggcaagcatttattcacagttcacaaatatggattgaaccccgactgtgtgttagatagtctcctggatttgtgggctgtgggtatgaataaggcagccaccctccctccttagggcacaaacagaattaacttattcttctccaggagaagtaagctcatgataagaaaccaaatttatgaattacttatttttttgctaggctccgtgcaaagacactttgcataccttaattcacttaatactcaggaaaaccctgtgagaaaaattttagagctgtggaaactctcagcctttgaggatttggataacctgcccaaggccactttgaatctaataaatgctccttggtccaatcgaagttgcttctcactattacacaccctacactcctataagatgctaatggaattgatcctgccatgctctaggtgaggggaagagctgaaatagcagagtttaaaaatctctacaccaaagtccatctctgctactgtttcccactgcttccttgaatggttgggtacatacttgtctgggccacattgctttctctttatgtggggcttgtttggaaagatc

SEQ ID NO: 203346 - DNA, 1000 bp, Homo Sapiens
gtaattattgaatggtcatctagtaaaacaccaaacactaatatgtgcaaaacccctagcaatacagttgtcactgctgggacttgtggaaggtgtctctgtcagggttaggccttttattggcagcataaaggcctagagtgcctccaaaacacccactctgttacatttgtttagaatatacttaagtgcagattccagaattaaagagaagaaagtcagtttattatgagtagagattaaatataataatgaagaagcaagatgtagattcataaaaaggcattgttacgtagtagaaagaaggcagactttgggattcaaacatttctaggtttgttaccccagttctcgttattgtgggtcagatgaattccttaatccctcagagaaagtttcctttatacaattaaaataatactacctgcctaacacattgtaaggatcgataattaaagcacctagcatctaattagtgttgttaatttcagcactattgctcagcaagtatatttcctgatgtttccttccaaaatgtctattagaggactcaagttcaaaccatgttgatgagtttgaagataatctgctgattgaatcagatgtgatagatataactaaatatagagaagaaactccaccaaggagcagatgtaaccaggcgaccacattggataatcagaatattaaaaaggcaattgaggttcaaattcagaaaccccaagagggacgatctacagcatgtcaaagacagcaggtattttgtgatgaagagttgctaagtgaaaccaagaatacttcatctgattctctaacaaagttcaataaagggaatgtgtttttattggatgccacaaaagaaggaaatgtcggccgcttccttaatgtgagtataagggctgagattcctatttctgaacaactgtttttttctatgctacttaacaaaattatgaggaaaataaacagactctaaagtcagaccatctggttagaattc

SEQ ID NO: 203347 - DNA, 1000 bp, Homo Sapiens
tcaatgcaaaattagtttgtaggcttaatttatttctttagctgcactaggggcttttctatattcttacagtaccttggttattttcaaattaatgattactttttatttccctttctcagagtacttaaacaacaacaacgtattttgcaatcattttagacttatggaaattttgtaaagatagtacaaagagtccacagagtcctctaatttttcttttcttccgagacagggtctcacctgtcacccaggctggagtgcagtaccgtgatcacagctcactgcagcctcaacctcctgggctcaagcaatcctcctacctcagcctcgacaagtagttgcgactacaggtgtgcaccaccacacctcgcaaatttttaattttttttgtagagatggggttttaccatgttgcccaagctggtctcaaactcctgggctcaagctaaagtgctggggtgagcccccacacctggtcttcctctaatgttaacatcttacataaccacagtacatttataaagactaagaaattaacatggcacagcattatgaactacactatcgacttaatctgggttttatgttttttcactaatgctgttttcctattctaggattaaatataagataccatgttgtatttagctgtcatgtctcctgagtcttctctaatctgtatcagtgtctcagtcttttcttgttttccatgaccttcacactttgaagagtactggtcaggaattttgtataatgtcagataagcatttttaaagcctagactaccactatgattctctagttcaacaaacttcctattaaagagacaaagctatgggctgctatagtgcacaggaggcagaagtgacccaaagagataacctaatccaacattatcattttgcagatatagaaactaaggcatcaataatgtttttaatgataaagacataaatgccaaacttttaaaatcctgtttggtaagaacagagaattc

SEQ ID NO: 203348 - DNA, 1000 bp, Homo Sapiens
caggcgtgagccaccgcgcccggccccctgtgttttcttgagtgcagggggcagaatccatcctggggaatttgagcagaaagggacatggtgagcagtgtgacagctcccagctccttgcaggactagaggaaaggcctccaagcccagctctgcactggctaatgagcttccttctctcagcttccctggaaacatctttctctgcacacccaggagactccatatcaccggctcgtcctcaccgtgggcccagaacctgctgtgccctgccggcctggggaggttgcgtctccctggcagagctgcatgcgtcccagcagcaaggaaggctggggatgtgggatgtgggactgccgtgcagagagaagacaggattcatgttgtggggagctgtcaaaacgtagaaaaatagccccacttttggggctcccatgaaagactggggtcttattcatatgtttgagcccctttggaatttgaaatgaagccgagttcccttcctaacgacacagagctcgcagaagccgcctcttctcttgggcgtccaccgtcagctctttctggactttgttcttcctgtatgtgtgcggcttcctgccgttatcaaagtccaagaatttcatcagtttcttattttgttttattttttaacattttattcatttttttttaagatacaagatcttgctatgtttctaggctggcctcaaactccgaggcttacgtgatccccccacctcagcctcctgagtagctgggaccacaggtgctgccaccgcacccggcttcttgattattttatcatcatcattattgattgagcaatggaaatctgtaacttatttggtgctttttttgggttcttatttcttcaagatttggaaaattcttccctacgtgcagatttgctggtgggttgagcgccttcttccagttggggattaagacatgacttccagtggtacaggccgtaaggaaacagccatccagagaattc

SEQ ID NO: 203349 - DNA, 1000 bp, Homo Sapiens
agaaagtagcagggacttgctctttattaggtattatggcgagtttcacttttgcaagatacagaattctggggactagtttcacaacagtatgaatgtacttaacaatactgaactgtacacgtaaaaatggctaagatgaaagttttatatgtattttaccttttttttttttttgagacggagttttgctcttgttgctcaggttggagtgcaatggcgcgatctcagctcaccgcaaccttcacctcccaggttgaagcgattctcctgcctcagcctcctaagtagctgggattacaggcatgctccaccacgctcggctaatttttgtatttttagtagagacggggtttcaccatgttggtgaggctggtctcgaactcctgacctcaggtgatccgcctgcctcagccttccaaagtgctgggattacaggtgtgagctaccgtgcccagccatgatttaaaaaaaaaaaaaaaagttgataacatgggctgggcgcggtggctcacgcctgtaatcccagcactttgggaggccgaggtggggggatcacgagatcaagagatcgagaccatcctggccaacatggtgaaaccctgtttctactaaaaatacaaaaattagccaaacgtggtggcgcatgcctgtagtcccagctactcgggaagctgaggcaggagaattgcttgaaactgggaggcagaggttacagtgagcagagattgtgctactgcactccagcctggtgacagagctagactccatctcaaaaaaaaaaaaaaagttgataacatcacatctatgcaataaattatttaaataagtacataattatattgagaaattaaagacataaagcaagctaaaacatttaaatcatttattattggtacagcagattttcaaatataggactaaagattcagattactggtcaggcgcagtggctcacacctgtaatcccagtgctttgggagactgaggcaggtggatc

SEQ ID NO: 203350 - DNA, 1000 bp, Homo Sapiens
ttttgatatgacccagtaaagcattgttggtgatcaatatacaaagcaaccaatgcagccacttaaagctgttagcattcataagtggttgtgtcagcaagacctctgtttcattttgaaaatggaattatatgttatgtggaatgctgaattgcagttatgactatcttataaaatctaaaagataagcaatgaatcatatccctcaattggcaaggaagagtcagaaaggccctgaagacgtttggaagatgttgcagacagacacaaccttggcacagtgggaagagtatgggctttagggtcaggcagcattttctcccagtccctgtacttgacaatttacaaactggtgaccttgggcaagttgcttaacttttctggaccttagttttcacaagtttaacatgtggataattagaaggacatataatacattttgtgaatcaaggttcttcaaagagtgaaataggggagaggggtactgttaataattaaaccagcacaacaggattaaccaagactgtgagacagaggcaagccaggatgtatggccatcctatcaggataattaaaaatcggtgcctacactgacaacactaaatgctggtaaggatgtggaacaacagaaactctcattcattgctgatgggaatgcaaaatggtgcagtcactttggaagacagtttggcagtttcttgcaaaagtaaacacaattttacctgaagatccagcaattgtgccctttggtatttacccaaataaattgaaagcttatgtccatataaaaatatgcacattgatgtttatagtagcttcattcataattgccaaaacttagaaacaactaagatgtccttcagtagatgggtgggtaaactttggtacatccagacaacagaagattattcagcattaaaaagaaatgaggtatcaagccataggaagacatggaagaaacttaaattcatattactcagtgaaagaaaccaatctgtaa

SEQ ID NO: 203351 - DNA, 1000 bp, Homo Sapiens
gcttactgtagattacagtggccaggtggatcacttgaggtcaggagtttgagaccagcctggccaacacagtgaaaccccgtgtcactaataattcaaaaattagccaggcatggtggcgagctcctgtaatcccagctactcaggaggctgaggcacaagaattgcttgaaccaggggggcggaacttttagtgagccaaggttgtgccactgcactgcagcctgggtggcaaagggagactgtctcaagaaaaaaaaaaaattacatacatgactcacatttctctctccctttccctcccctcccctccccttccctccccttccctccccttccctccccttccctcccctcccctcccctccccttccctcccctcccctcccctccccttccctccccttcccatcactttttttttttgatggggaggccaaggcaggcagatcacctgaggtcacgagttcgacatcagcctggccagcatggtgaaaccccatctctactaaaaatacaaaaaattagctgggtctggtggcaggcacctgtaatcccagctacttgggaggctgaggcaggaaaatcgcttgaacctgggaggcagaggttacagtgagctgagatcgtgctagtgcactgcagcctgggtgacagagtgagactccatctaaaaaaaaaaaaataggctgggcacagtggctcatgcctgtaatcccagcactttgggaggctgaggcaggcagatcacttgaggtcaggaattcaagaccagcctggccaatgcggtgaaaccccttctctactaaaaatacaaaaaaattaggcatggtggtggatgcctgtaatcccagctactcgagaggctgagacaggagaatcatttgaaccggggaggtggaggctgcagtgagccgagattgggccactgcactccagcctgggccacagagctagactccatctaaaaaaaagaaaagaaaaaaaataaaaaaggatc

SEQ ID NO: 203352 - DNA, 1000 bp, Homo Sapiens
ccagaggctatttctgaaatatgacaaaatgaaactaaagtccagctaaaggaaaactattaatgcaaaaggataaaaccctaacagacaaagagatgtgttatatagctaaacaatgtggttcaaaaacagagagacaggcaaatgtacctaatgagtgaattcagaaatacacccaagtatattagggaatttaaaataatactttgatcacaaacttctgactttgcaatgttgttactaaggacattttgtccagaataccagaaaaaaattaaaattagtagaaataatatattttcaaaaatgacaaaagttaggccacacatggtggctcacacctgtaatctcagcactttgagaggctgaggcgggaggactgcttgagcccaggagtttgagaccagcctgggcaacatagcaagaccccttctctataaataacaacgacaacaaaattagcagggcgtggtggtgcatgcctatggtcccagctactcaggaggctgaggcaggaggattgcctgagctcaggaggtcaaggctgcaataagccatgatgactccattgcactgcagcctggtgacagagcaagacactgtctccaaaaaaaaaaaagtgacaaaggttaaaaccgcacatgcataatttgttagagcaaaaatatcatctgaaaaattacattttcttgttaacaatgaaatgtggaaaaatttgccagtgatctagaccttacaatgtgctaaaatgacaatgataacgactaaaactatacccaggaaacctggattcgggagaaataatggccctttcctgggcagcatcaccagcctaccttggtttaccttgttcctgctgccaaagataacctgtctctccacccatgtaatcctactcattcctcaagacctcccacaaatgggaatgtttttcagccccttacacctcataaagaagcaagacttttcattaaactttttaaaacaaaattttgaattc

SEQ ID NO: 203353 - DNA, 1000 bp, Homo Sapiens
ccaccacacctgctactttttgtatttttagtagaggtggggtttcaccatgctgatcttaaactcctgacttcaggtgatccacccaactcggcctcccaaagtgctgggaataaaggcgtgagccaccacacctggccttctaatgtctttaaagtcacatcaaagggccgggcgccgtggctcacgccagtaatctcagcactttgggagaccaaggtgggcagatcatgaggttcaggagatcgaggccatcctggctaacacggtgaaatcccgtctctactaaaaatacaaaaattagccaggcgaatttttggtggtgggcacctgtagtcccagctactcgggagactgaggcaggagaatcacttgaacccgggaggcagaggttgcagtgagctgagatcgcgccactgcactccagcctgggcgatagagcgagactccatctcaaaaaaaaaaaaaaagtcacatcagttctacaaattactctttctgaacacagaactttaaatattcccttcccatttatgacacgcttataataaatcataaaaagtactctaaacagaataaatggaattcttacattttaaaacattttcttaatataaaggataacaattcaaatcatattttacatttctacgtcttcatattgcactaaaattattttacatggaagaactagttgatgcatcataataccttagaaacattttttgatattcacatctatattaataaatatttcacagtctacttaaatattctactatagagcaaatcatctaacaaaaacaaatctatagtgttactttttttttaagagcaaagatattcagtatttttatttctgcctctgggaaacacactgacattttaaaacacatgtaagtcactcatagtacctcataataacatttgagcaagacttagtcgttcattcatttattaagtggggtttcatgatgttgcataggctggcatggaattc

SEQ ID NO: 203354 - DNA, 1000 bp, Homo Sapiens
tgacttaacagtcaaggattatcaggcacatgaagaaaaagccataacagtctaacacagacagataaaaagaaaccaagtgaagaaataggaaatacaggttgcataagaaaagctcaaatttgaaaaaacaaaaaagcttgaagagctaagagaaaatgcatgacataaaagcaagaaggtataaagtaggggtccattcagagaacaagaaagagctcttggaaaataggattgcaggacaaattttcaataggaaaccaaggaaatcttccagaaagtagtaggcaaagacagacaaaaagagaaagacaatgcctgattggcttcttgactgaaacatatttaggtgggaagaggaagtgtggaaatgtgaataaggactgtatactaatgataatgaattaatattaatttttgcttaagtgtgataatagcactgtggttatagaggagaatgcccttaggcttagaagatgcatactaaaggaactgtcatgatatttgcatttttcagatggttgtgtgcacacacgtgcgctcacacacagtgggagagggagggagaagggagagcggttatgtacaagagagacaactaaagcaattatgatataatattagtaattgatgatgaatacaaaaacaaaacagaagggaatactttagagttaatggattggttcaggagctccaacatctgcactgttagatgttctagagagagaaaagataattgagaggaaacaatattaaatcaacacattaaaaatgttcagaactgaaaatcacaaatctccacattgagcagacccactgagtgcccagcgcagggaataaaagaaaaaatagattggtacatcacactgagatttcagaacactgagaatagagaagatctcaaaatcctccagtggaaacaagtcaagttacagcagtggactgagaatctgtatgacactagaatctaggtgacagtggagcagtgtcctcagaattc

SEQ ID NO: 203355 - DNA, 1000 bp, Homo Sapiens
aaatctgacttttaaatatcgaataattattttgctgatcatgaatatctcttctgctgaccaaacaggaccagatatcacattccaacctattctatccctggctgaccacaaactccctcttctttgtcccccaccaaaagtcaggtaaaatgagctgtttctatcaaaggctgtgtcttcaggcctggccatttcccactcaggtctccagggctatccaattttctcttcacctgtacattctagtactcatggaaggctccagtatacaaaatggctactcatggggccccctccccttccaccccaccaaagatatttctaaccttcaatgtagagtaagttagaattgacatatacattgtcccttaaaggccaggaacattaagcttgagcagagggtaggtgtagcctgggtatagtctagtcatagcctagctaaagaaagatgagtcagctgaaggcagagggtctgcattgggcacatagactggcagagagttgggctcagttggcttaatcctctgactaatgaccagttaattctgcttattctctcttaactcaaggtatttgctgccttaagctactttttaaatacttagtggaaataagtcatctattttcattagtgtgtgtgttgtgtgtgtgttggttggattttcctggccaggagcctctgccttctgaccaaaatgacattgatttcccagccttctgccttagcagttcatcccatctttaactggttcccctctatctcttttctctagcttatatgccttgctggctgtgaaaggaggacctactgggtggtctatgaatctataccccgtatttcttttttaaagatcttaatttttctccctatttttccttgtgggaaggcattaaaaatgggactcaaggtctatgtgacactatatgaggtgccatttcctatacaggtgcacctctgtaagcagcatacagttaagagggcaatgcaaagaagctt

SEQ ID NO: 203356 - DNA, 1000 bp, Homo Sapiens
ctaatattctaggtttggttttttcttttttgacaaatactactgattttttttatagtcctggcaatttttatttttaattatgccacaacatacctataggatctttaactgcacattttttaaagacacttgagcacgcaacattaggaaacaccagaggagggcaaatgagcaaatataaaatgctctttgtcattttcagttggcagatgctacaggcataataagatttagcccttttctgatcagaccatatggctcttttggacagaatgttcagtaggaaaatgatttaagagattcagctccaacccaagtttaggatgcttctagtacctggtacagagtagaaaccagtaaaatcttgtttagtcagtgaatgtaaaaaaaaccaaaaaggtaaaagtaatggagaagggtctgagttgattctcagattacactatgtgtcttttaaaaaatgaatatatttatcaaaatattttgagatagctttcctacaagtgcttatttgttagttttaagatctattttcattgattcatgattttttcattggatacaaatttattgaatgcatgctatgtgcaggcttgattcttgttactgggcttaaaacagtgaacaaaatggataagctctggcctcacagagcttaggaaaacaatacaacactaaaaagaaattacatttttaatggtaatcacagcaacagtcatttgatgaaactacccagtagaggcagaatgctaagtccctcccttccagcccgtacaccagtgaaaatgtatagggtgacttgtaggtaaaacatgaaatgcaagcacagtgtgcactgcttattggaaagtatcaaggtccatcatacattttacctaagggtaccctttaaatctaacatatgattattttggccataaattataaaacaaattgaagaactaaccattgggtcctagtttggacataaatacgtttgtccatagccaatgaattc

SEQ ID NO: 203357 - DNA, 1000 bp, Homo Sapiens
ctgtaacccaggagtgtggtaggggacagcctttggtgtgaggaggttcggctcattcccatggccagtgacatgaggcggctggaggtcctgcatgttcagcacctccctccccgccccccaatggccccgctgacccgttctggtttcgagctctccagtgtctagatttatgcttgaaccacccacatagtgatgtcagtggcctcggcacttgaattttactatgaactttcattcaaatatatatatgtaatctaagtgcatatgtatatgttatgtatatatatgtaactggagggaagagtggtcttgtggctggatcccagtttaatttactggtcatagacaattcctctctcacattggtgcttgtgcgtgtgtgtttgtggcaggggggctgtcgaactcaagtcccggttactggcaagaacagtcccgagagcatcattaaagagccacgtgtgttttcatgtgagggaatcaggagagcctgtgcatgcaaccccacagggcaggtgtgggagtatcgaaaagcctccttccgagcctgccatatggcagccctagagatggggaggccctgccaccgcagggccctggacagagcagcctgggggccggaggtgtcacaggaggagccggcagcctgggcccctcagcagctggagccgttggagccgctggaacctctggtgctcctcacttctgctgttcttctccgagcccctgcctggcctctcccagcctcctcctcagatcgctcctgcgggaggatgagaagctgccgcctgcttcgtgcagctggtgcacatcttattcccggcaggagaggaagtgggagtgtctggctggctaagcagcaggcccactccctctcatcggctcagtccagagaactcttaacactcctcggatctagtattttgggttttctgtctggagtatcaaataccatgtctaatattgtttgtggaggaggaagataactcttgaattc

SEQ ID NO: 203358 - DNA, 1000 bp, Homo Sapiens
tcacgcctgtaatcccagcactttgggaggccgaggagggcagatcacaaggtcaagagaccgagaccagtctggccaaccatggcccgcatggtgaaaccccttctttactaaatatacaaaaattagctgggcgtggtggcgcatgcctggaggctgaggcaggagaatcgcttgaacccggtaggcggaggttgcagcgagccgagatggcgccactgcactccagcctggcgacagagggagactctgtctcaaacaaaacaacaaaaacaacaacaacaaaaacaaaaagctactttctggagcaggtgggcttcatttgcttgtatgttaattttcagaatctatggtagacatgagcaggtatgtaatgttgtagtacttataattgaactgaggtcaaaagttggtaggactataccatgaagagatcaaaaaggacaatctttaaagcgaaagggccttggctgggcgcggtggctcatgcctgtaatcccagcactttgggaggtcgaggtgggtggatcacaaggtcaggaggtcgagaccagcctggccaacatggtgaaaccccacctctactaaaaaaaatacaaaaattagacgggcatatggcgcatacctgtaatctcagctacttgggagcctgaggcaggagaattgcttgaacctgggaggcggaggttgcagtgagctgagatcgtgtcactgcactccagcctaggcgacagagtgagactccatccccaaaaaataaaaataaaaaattcaaacaacccaacaaaaacatgcaaaggacactgatcacagaaaaagaataaatatatgaggagatacagaaaaaaaaaaaaaaaaaaaagcgaaagggccttaaagaacctgaggcccagaagtcaggaattcagaagcctttggtggccaagctatgtccaggggcattcgtcttgtgagtggtggggtgtggcctattgataaacacaggcttcagatcctctgg

SEQ ID NO: 203359 - DNA, 1000 bp, Homo Sapiens
aatggctaaataatattccattttatatatggaccacattttctttacctatccatcttctgatcgacacttagattgatttcataccttagatattgcgaagagtggtgcagtaaacatgggagtaccaacaaatgtctatttgatataccgatttcctttcttttggatatatacccagcagtgggattgctggattatatggtagttctatatttagttttctgaggaacctccatactgtattccataatctctatactactttacagagcacattttgtatgcattataaatacaatataaatctaccttatttaatttattctgaatatcaattaagtctatatttgaacatgtcaggaccttttacacaatactttatccactcagattctcattattgacactgaagaattaaaatctccaatataattttgattgtatcaatagcttacatttctaacaaacacatatccactgaggttttgacatctggttcacattcttctctgcctaacttctaccactttcctaggtaacttatacattccacttcttagcctgagagttccctaacctgtattccaattattactttctttcaacaggccactctcccagccacatcctcgaccttgttataattcaggactcctctacttttgacaacttactctcagaacacagcctcctttccttcccgtcattctgactcacaaggcagcagattcacctaaccttctccagcctcagcgctgtcctttcttctagttgggtttatcccattttgggttctctttctttttttttgagacagggtcttgctctatgtcacccaagctggagtgcagtggtgcaatcatggctcacgctaacctcaatgtcccaggctcaagtgatcctcctgcctcagcctcccaagtagctggaattacaggtgtgtgccaccacacccggctaatttaattttttaatttttttttatagagtcagggtc

SEQ ID NO: 203360 - DNA, 1000 bp, Homo Sapiens
agctgattcagcaccacggcatagtccctgctcactgaggtcaggcggtgcaggaagaaaatcagttcctggagcacctgggtggggacataagggaggagatgaatgaagacagggcgagggccacaagggcacctgcagtagcaggtacccactgtgtactctgtgtactgggtgctaggggtgctacagtgagcaaggcagagtgacgaagtgaaaagacagggatggggagacacaagagccaggtggttagagaaccaaagacaaaccaaaatggaaaagggcacaagatgccctgctactctagggttctaggctgctgattatgttggcaaaaacggcagagagcatccctgggttctttcatccaggccctactgtcccaaaaaccagttgtagggctgtgttttgagatgttcaggcacagacacctggatggctgggaaggggctgacagggactgggtttgtgtgtgtattatacccaatgagcctgccttagaaagtaaattctaggtaacagccaaaaatatagccacactgcaaatacctactgtcaccatgaccctagttctctgagcccttctgaagccttctgtgcccaggacttctctgtagctcttgcaggggactctggtatgtgatgggcgctctgcctccttcatccccctttctcccacaggcccagccaaaaatggagctattgaagctcttaatgttttatgtaataatatctccatatccttttgtgtaaaaaagagagtggcaagatcacacatttgggtttgcttatatttgcataagggaacacgggaaagatacataaattaatacaagtagttaccagtaaggggtgtgtgggggaccctgggggaacagagatttgggtgagagcaagaattctcagtgtataccttgttagagcgttttgatttgtgaaccatgtgaatgtattacctatttaaaaaaaataaaattcaattttaaaagcaaaactc

SEQ ID NO: 203361 - DNA, 1000 bp, Homo Sapiens
tcccagcttaatatgtcagagcagatgtgtagtcagaagcatgggcttgggaatcagtcatgagttggaaatagaacctatcacttaccagctgtgcgaccttggacttcttacctcagttgtctcatatgctctagaggataacagagctcatctgaaaggggcattgtggcgattaaatgagatagactgtgtgtatacatctctagcacctggaacagagtaacccaaaataaggcaacaaatctttgtaggtgttcccatgtctctaccattatacatgtcctaactcatctattatcatctgtccaaatgcctgtcctcatcactacatagtagcaacttaaggccaggcacaacacttctttatccatgtagctccagagtctagcctagcagatactagccattcaatacattttttctgaatcaataaaccaatgggtgaatttgatagttttggagcatgacaatttattgttactttccttgtctacacttaacaaaaatgctctctgaaaattccaaattgggaagtgttcagggtctcccattctcctgagtaaaatgcttgatttggctttggggataactgactgtctcttcccctagcaccagagatcgtcttaggctacagctgtggagtagatgctgttggtgtcctgcccacatcacctttgccaggcaggtgccacatcaccttcgctgggcagcaatccacagctactgtgaatggctactggaagcacacagctgtagctttttggagatttcccctctattaacagcagcctcttgctcacaggcattgggaggttagaccctctctcccagtcaggtagtctgctgtagccaatgactgactgatacaggcatacaaaagcctgacccatttgggaacgtacttaaactaaagccaggtcatcttgataggattgtgaagctggtcagtcagtcacgaagctctcaacattggggctgcatgtctcagcctttgatc

SEQ ID NO: 203362 - DNA, 1000 bp, Homo Sapiens
agtagtacctacctcttagtgttgttgtgaagattgaattacatatattaaatgagttaacaccttagactgctaagcactcaataacagtaagctattcacaatttagaggcagcttctccatttcctaaaatatacttattcatcaagaagaatgatgtaatagtgaaaggtaggagttttaaaaattccgttgattggatgtaaaaagtagattcttagaatttcaaataacccaagaaattatttataccattggttcttaaccagtaatatgcatcagaatcatttatgagacgttgtaaagatacatttatctaggccctttcttctcatatctaccaagtcagaatgcccacaggcaattccagtgcagtcttcctgtcaagaccattgaaataatccaagtctttagattttataatgaagaaattgagactcagagaaagtaaatgacttgcctaagaccccatagagtaagtgagatccaggttacctacctccttggtaagcgatcttcctattcttctgtgttgccaccaaatatattaacttttaaagaacctaatatgagaacttatccttctgtcagttatatcaggaagaataatataggctttaaaacttacttcattcagcatttaaatcaaaataacaaaattccggccaggtatggtggcttacatctgtaatctcagcactttgggaggctgaggtgggagaatcccttgaagccaggagtttgagaccagcctggacaacatagtgagactctatctccataaataataataaaaaaactagccaggtgtggtggtgtgcacctgtggtcccagctactggggaggctgaggtggaaggattgcttgagcccaggagatcaaggctgcagtgagccatgatcacaccgctgcactccagcctgggaaacagagtgagatcgtgtcaaaaaaaaatttttttttaatttttacaatttattcagaggactattgcacct

SEQ ID NO: 203363 - DNA, 1000 bp, Homo Sapiens
caggccacagcatttaatgtgagccacagagagcagctgcagctgtcagttcattacagcagccacttactcagagatttcttccagcatgctctctaccccaagcccctggctaggagagataggaaaaagcctgcaagctcagaaaagctggccccaagcagtaaggccatgtgttttatcccaggttcacagtcctaacttcagttcctcacaagttactggactgcaagagattaaaaaagcagaggaagagggtgagagagtggaagcagagaagtagagaccaaaaaaaaaaaaaaaaaaaagatgaattgaggtacaacataaagagaagggacaaaatgcagagaaaatgaggaaacttgtaggaccaataaaaggcatgaatgtaaaaatgtgctgtcattttcttttttctttttttgagatggagttttactcgtcacccaggctggagtgcaatggcgcgatcttggctcactgcaacctctgcctcctgggttgaagcgattctcctgcctcagcctcccgagtagctgggattacaggcacgtgccaccacgcctggctaatttttatatttttagtaaagacagggtttcaccatgttggccaagctggtctcaaactcctgacctcaggtgatccgcctgcctcagcctcccaaagtgctgggattacaggcatgtgacatctgcctaacctgtgctgtcattttcatgtgaagaacatgaaataggaataggtcacttctgattttcttttattggcactggacttcctacttgggctcctttggtgccacacaggccacatggtactgggccaagtggctggtgaggtaagtaagcaacctaaatccagatcaaaactgttacacatctataggtaggccatgatctagtctctacgctatcctgcccaaagatcaatgaattaggaagttacagaagcaggagcttgctgactttctcatataaataatgaaatgttgata

SEQ ID NO: 203364 - DNA, 1000 bp, Homo Sapiens
gattccttataaaagtgggatcatgcaatatttgtgcttctgtgtctggcttgtttcactcagcttaatgtcttctaggtccatccatgttgttgcaaatggcaggctatccttcttttccagggttgaataatattccattcaaactcatttatttctgtcttcctcctgtgtgccaaaaacataatccatgatgctgacatagccatgtcctcctttaatctcagccataattgatgttgtagacgttctccgctgacacatacgggtaacggactacaagagagagaatatgaatctgctgctgccattatgagaccttatttttacatggaaaccaaatcatattgagtgagatgcaaactgcttagatgaaatgtttataagaaccaatttaggtcattataaacagaatgaataacttgattatctcgaagcatattgtttcagaataagaagttaactctcgagttctgtgtctttttcctttgaaaatgataaagtagttcctcagctctgtgattcacttcctgttttgggggacaggatgttggataaatggtaaggcccagacatgtctactcttctagctttgcaaatgggtcaaatttcccttgtttattcaaggaaccagggataaagttgcctcttgtcaaactagaggaaacttcttagaacagaaggccatgctttagggatgttttaatccatatattctttttattctgtggccttggctttactctgtttctataattttcccttttggtttgtcttctctatgtcttctttctgtaatgacgagtagcagttgatcatatgttgtctataagaagatgaatgattcacagtaactatgcatctcccctattcccttcctaacaaaattttggaggcatgcaaaaatgagtcttttaaatgagatttaaaacttttcaggccgggtgtggtggcttatgcctgtgatcccattactttgggaagccgaggcgggtggatc

SEQ ID NO: 203365 - DNA, 1000 bp, Homo Sapiens
cccaggatgttacacgtcctggcctcctccctgcagaagatgaggcttattcccagtcggcagactggacttcttcataagtgaaaaatagttacataatggttatctcattggtgtttagatttctgaacaaaacgatgatccaaaatctgagtgtggagaaacggatccccagtgaaggaggagggaggggccgtgtgcatgctcatgctgtttatcccaagcctgttttccaccctccctgccctcccatgcagaggccccgccctgtgtccactctacttcttaggaacctggcaaccccagggaattttcctgacaagtcagtgtcattttatgggttattgctgttttcccagaatagccaattagtattgagggagtgtcacctgctcttctccatgttcagccccttcctgagcacactcatcaggtttaaggagccagctgtcccacctgctcagctgtgcacccctacaggctgggatcttgtgagattcatacctactgaggagggtgcttgcgttcagtcatggttgagatggggctcttccagcacagccccaaaatacttcaagaggcgcagaggaaactcggcctcccgagtgagcatccccttgatcccagcaaggctggagggaggcagtgctgtgggtagttagttggaggaaccaagggcatggcctcttttattctagtgacattcaagggcaccagctgttttgactcccaggaagctgtttttcccatgctgagtagtctcatggcactgtgtgccaccacagtgctgcccagccctgccaccctggactgaccgatagaggggagaccacagcgtcagctgctaacatggaaggacttgattgtgcaagagctgggtttcctgggaagtcaggcaccctgctccttcacctccccataacagctgtccccatggcagtctcatgacaataacaagccagccttgctattttggaaagcagtgagggacgtggagatc

SEQ ID NO: 203366 - DNA, 1000 bp, Homo Sapiens
aacctgcacgttgtgcacatgtaccctagaacttaaagtatacataaaaaaaatgtttgtgcagttggccactctgtttcctaaggtgttctccttcagcctcatgtgttctggcttttgtcacatcttccctatgtttcctgtgtttcctcctcttgcctcttgaatatttgtatttttcagaatctcccgtagaccatattctcttctcactccacaagactctctttcagtcatctcattcacctacacagtttcatttgcaattctgtactaatgatttccacatttctatctgcagaccagaactttctctcgagcaccagagctgtagatcccactgcaccttcccttggatggctcactgatatctcaaagccaatacgtccaacacggaagtcatcatctcatcttaaaattgtgtaacttttattgtttcttatctcagcgaatagtaccactatccaccaggggccaaagacagaaaacaagaggctaatatttatctcttcctttcctttacataggctttcatatccagctaatcagcatgcaccatagatctcttgcatctgttcactttgcagcatctcattcatagtaggcatgcttcagtatgcataatagttaacattaggtgtcccttttgtctccagtcttgcttaactccacttcagcatccctgtgactgcaacaaccctttctcaaacttgcagccaaatggatcttttaaaaaggcaacctgattcttttactcctcagcttaatactttttagtggtcccattacttctaaggcaaactgtgaatgtccctgaggaggctgcttttgtaagctccagtgttttattaaagtaaatgcatggaaatgtttaatgtatgaataacattataatttacttagttaagtctcttaaacttgccctcaaaccttttaaaatcttcaagtgaaactgaggcatcagcagtgaacaatatttgtccagtggcatgaagaattc

SEQ ID NO: 203367 - DNA, 1000 bp, Homo Sapiens
gaggacgccactggtttcatccactatgatatcctttagaatctactctttgcagaagactggttattggatctagataaatactaaaaatataaatacctaatgtttaataaggcctaattatgaatcagggactttatatttacaatgttatgagttgaattttatctcctcaaaattcatatgttgtaatcctaagtctgagtacctcaaaacgtgaccttatttaaaaacagggtcattgcagctgtaattagtaagttaaggtgaggtcttactgggtagtagagtgagctcctaactcagtaagagtggtgttcttataacaagaattccacgtgggaagaaagagatggatactgagggaaactgatgtgaacacagggtgacgacggccatctacaagcacaggagataggcctggaacagacccttccctcgcagtctgcagaaggagccaaccctgcccacaccctgattttggacttctaggcctccagaactgtgaggcaatacatttctgttgtttaagccacccagtttgtggtgctttgttaaggtagttccagcaaactaatacatatatcatttcattgaatcttcacagcaaatctatgtggcaggctttcttattatctccacttcaccaatgaggagacagatacctagaaacattaactaccagttagtaatgacctgactgggctgtgatgctgggttccctccctgcctccaccagaagcagactcatctcccttattactacagagatttttttttttttttttttttgagacggagtttcattttgtcacccaggctggagtgcagtggcatgatcttggctcactgcaagctccaccccctgggttcatgccattctcctgcctcagcctcccgagtagctgggactgcaggggcccaccaccatgcccggctaattgttttgtagttttagtagagacagggtttcactgtgttagccaggatggtctcgatc

SEQ ID NO: 203368 - DNA, 1000 bp, Homo Sapiens
caccaaactcaggaagatggctgcccttgaactgaggagaaaaataggatcagggaggggtgcgaaggaggtttcaaccagttctgcaatgatttatttattaaaccaaacaaaaagatctgaagcaaacatggcaaagtgataggaattaacaaagctgaattatgggtgcatagggcattgcaatgttgttctctagacttctctaaacttgatatttaatttaaaaaaaaaagctctcatgtataaacacacatacccccgggtcccagagcatgccacaagtcgaggaaatgtggagtggagcagagcccaggcaccctggcctgttccttctgccagtgccctgtccccatgaccactccagctgttttttcttggcattttaaagtcagttcagaagtcagagagtcccatgttggaaggtcatcaagatgagtctagccccgggaatagattcaactggccatccaaagaatcagccccaggggactttttgggaccccccccccccccccccccccccccccacagctgtcacaagccaccagagcagaagccagagaaggtcattggagacaaagaacagctgatgccagaggacatctaactctgaatttcctggttccaggtgtagatgtaggcgggaagagtgcggtgtggcctgcaggcatttggggctgggagaactccccactcctcattccatagtgtggtgaacaggtacaggcttcaggctagatagggcctgtgatcctcctgagctcctctacctctttgagcctcagagtcctcttgtgtaaagcagggagactctgccactcagctcaaggactgcatgagggttgaatgggacagtgtaactaaagaacccagcccacagctgacttttagcaaatggtaactactaaatgagatgggggggtggggaggcttcacgaacagttcatggaggaagctagggctgaattagacatgggacagagtggagaaggaattc

SEQ ID NO: 203369 - DNA, 1000 bp, Homo Sapiens
ccaggctggtgtgcagtggcatgatctcggctcactgcaacctccgcctcccaggctcaagcaatcctcccacctcaacctcctgagtagctgagactacaggtgtgtgcgataccacgcttggcgaaatttttgtatttttgaagtgacagggtttctccctcttgcctaggctggtctcaaactcctgggctcaagttatctgcctgcctcagcctccaaaagtactaggattagaggtgtgagccaccatgcccagcccaaatattttctttctttccttctccttttctttccttcttcttttctctcctgctttcttttcttttctccacacccgcctccagccctccctctctttcttttttctttttttttggtgacagattctcactctgttacccaggctggagtgcagtggtgcaatcacggctcactgcagcctcaaccttctgagatcaagtgatcctcccacttcagcctcccaagtagctgggatacaaacatgcaccaccacaactggctaatttttaaaattttctatagaagtggggtctcttgatgttgcccaggctagtctcgtattcctgggctcaagtgatcctcctgcctctatctcccaaagtgctgggattacaggtataaaccactgtgcccagcctctgtatctttttcttttcttcttctttttttttttttttttttttttaaagaaggggtcttgctctaccatccaggctggagtgcagtggtgcaatcttggctcactgcaacctctgcctcccaggttcaagcgattctcctgcctcagcctcctgagtagctgggattacaggcatgagccaccacacccggctccatatcttttttaattttggatttttaatcacctttacaggcagcggtaattgatgaagtaagtcctgaccaacataaaaacacatttttgcaatgaggtgctaaagagtcacacaacttcttttgcaagctagttgaattc

SEQ ID NO: 203370 - DNA, 1000 bp, Homo Sapiens
actctcatacattgctagttaatacacagaatggtgcagccactttgaaaaacagtttgacaatttcttatatagttaaacattgtctttgcacatgacacagcaattctactcccaagaaaaatgtgaagcttcacatagaaacccgtagaacagtgttcatagcagcttaattcataatcaccaataattgtaaacaccccaaatgtgcctcaaattgcaaaaagattaacaaaatgtacatattcatctgatagactaataaccagcagtaaaaagtaactactgatacacataacaacatgggtgaatctcaaatgcattgtattaagtgaaagaagacatattcaaaaggctacatactatatgattgcatttgtatgacattctgggaaagaaaaatctgtaagacataaaataaatcagtggttgccaggtaattgggatgtggggacgagttgactacagcgcacaggggcttttttgggtttatgaaaatgttctatgtcttgattttagtggtggttatatgactacatacctttgtcaaaactcatcaaagtgtacactaaaaagacagaattttagtacatgtaaaaattgtttaaagtgggagtgacagagggacagacagaagatggagagatggacagttaagtttctaatgtcaaagagatgttttactaatgaagggagaagcttgaacatgtttataagccatggccctgagttagtaaaaaggaaaatgttgaagttatctatcttaaaatataggtaacttgaaaatatattttaaacttatgaatatataactgtccacaatgagttacaagtagaaggaatatgtggtttgtaatcttttgtactttcttgtgaagttgatttaagtattgaagtagtgatcagcatatgttaaattataaggctgtaactattaatagattccctatcctttgctcttgatacttatgtgtacttttcttgctgaatgaatgcccag

SEQ ID NO: 203371 - DNA, 1000 bp, Homo Sapiens
tggagccaaataatcccacccaagaacaaattatttcaggcagcatttggcttagaaagagtagactactatagggtctgcagtgtttcattactgggactcaaggagcaacaaagtttcccttaggaactgaaaactggggcaagtggcatgaattccctttgcttacacctttggaaagatcaggggaaaagccagtgaaatgagaaggaaggaaggaaggaaggaagacgggaggcagggaggagggaagggaaggaaagaaggaagaaaggaaagaagagaaaaaagaaatagggaggaagaaagaaaaagagggaaggaaggctcgtttattgaacccaggctgcatgccagacattacttttggctttttcatatatgcaatgccacttagttctaaagagaaccccaactgtgaggaaggtgtagcgggctacacatagtcacctagctaataagtggccaattatattcaaaccatgtgtgtctgattttaaaactcctcccttcctctcttgacaagttgtcactaccaactaaatatgcatccatatacacatgtgtatatgcatgtgcatatgtgtgttttataacatcgatgcttcttcatactgcccttatcaccaagcaaccaaacaatgagggtacatttcctatttctgtttttcatactcttctcagactaaatgagttttctcccttcagagttgccccttatgttgttttcatatgtttttgtctgtatattattaaagaaaggagggaaagaaaagggggtgaggccaacggaaataatttgtcctgtttctgttgcctagtgagcatggccgggggggtaggggagtgggtggcgaggggatgccaccattttgccaaccctgtaccacctgactgtgggaattctcagatctgctttagataaacagtttagtcctgtttttcccacaatcttctgacagttgaaatttcccctgttactgtaagtcaaccatccttg

SEQ ID NO: 203372 - DNA, 1000 bp, Homo Sapiens
catctttcttttagggataatgctgaaaatgtaaatttttaatagattgtgaagtgaattttttattttttttaatggaaaaaatttaaagtagaatagtataatctgcttgtactcctctcttagctttacaaacttaaataattacaaactcataggcagtcttgtttaattccatttactctccgtcttctattggcccctttgccccaccctgttttggattattttgaagcaaatcccaaatgttttgattatgttttttgaaaatttgtctttgcacaaggtgagacacggtgatggaaattttagacaggaaaacgttaagagtatgtgttaggttgtttttattgtgtgttgtatgtatgtatttaagtgttttaactaatagatatggaaatatttctaagagaacatgaaaaatatgaaactagtaggattcaagtactgtagaatctttgctaaaaatgtattaatctttcaagtatatgtttttaggctgaagccagtcacaagttgtaaatatagcagtcccctcttatccgtggtttcactttccgcagtttcagttacccatggtccaatgtggtttgaaaatattgagtggaaactttcagaagtaattcataagttttaaattgcatgccattctgagtagtgtgatgagatctcctgctgtccagcttcatccacctcatcctgcccaggatgtgagccattccgttgtccagcgtgtatccgcaatgtatacactactcgtgcattcgtcacatggtagctgtctaggttatcggattgagaaaacagtatttattgggttcggtactatctgtggtttaaggcatcctcggacggggcttggaacataccccttgtagataagggggcactacatttcagagcttttttagcatggggagagaggaatggtttgatgatggatgttaattttctttttgaaatttcaattgaacagtgcttttttccttagagatttttt

SEQ ID NO: 203373 - DNA, 1000 bp, Homo Sapiens
gtaagttagaatacagaaataactgctgcagtgttgtcaggttgaaacacgttccccattgattggtggtctcttgcactggacacagttgtatagcttctttttgcctgtggacccaatatcagctgcatcctcctaatctcacttttgagtttattttggaaacaaagattggaagaagattttgctctttgttttcatttccattatttagctgatatttttcactcatttttttttactcataattgattccttatctaaggattaaaaagtaatttcctcagctctactcatagtcttgtatcattgtaatggttttactactgattttttttaaaggcagagatagatgaataaaaataaggatttttacaaactgtgcaaccatgggtaaattacttgacgttgagtcaagagggatcaatgttctcacctgaatcacaggagtagtaatagcacctgactcactgggttgttgtggggatggaatgaagggcattatgtaaagcaattagcaccttgctagaagtagtaagtgctcaatagaaggtagctattattataattgctttatattagattccgtttcagtaggtcaggggtggaggctgagaaccagtaccttgggtgatcctgaagcaacccatttctgctctaggcattattccctatcttttttaatattaataaagtaaaaaagattcatagactcaaatatgatagtggttatgcttttcacatccagtgattaggaaacacataatggcaaagttgccctgaatgtattaatgctttgaaataaatttgtatcttttagttcagcataatagttatgtttgaaaatagtagtaggtatatgtcacggatattgtatatttagcccaaagacaatgcccatttggtatttaaaatctattttcataatgtatggagagattccttttggaccttgtgcctgccaggtcagaagtcagactacttcattcccaaagaattc

SEQ ID NO: 203374 - DNA, 1000 bp, Homo Sapiens
ctgtaagttcccccaataaatcatcccatacccacaaattggatttgtctgcctccttctttggtttttcagctccttcaccatttgggggtcgttttgcacatatggccctttcacagaacaccatgttgttgcatgtatcaatagttcattccttttactgctgaatattattccattgtgtatgtatacacacataaacacacacacacacacatgcacattctctctttccacaattcctgtgcactagtgacagacatttgcattgtttccagcattggttgttacaaataaagctgcttgaatatttgcgcacaagtcattctatggacatattctttgagttctcttgggaaaatatctagaaatggaatggctagttagtatggcaggtatatgcttaatttttaaagaaacagccgaactattttctaaagtggttgtaccattttgcaatatgaccggcagtataggagagttccaggtgcttcacattcttaccaatacttggtatgatcagtttttgacattttagtcattctaatggtatctcactgtagtaatttggattcccattatgactaatgctgtcaagcatattttcaggtgcttatctgctattctttgataaaatgttcaaatcctttgtccatttgtctatcctctttattattgagttataagaatttctgatataacttgagctatacaccttttggctattgtgactaatgttgctatgaatgtagaagctatttgggtatgcaaatagaatgttttaattttgatgaaatctaatttatttattattatttttttgagacagaatctcactctgtcagctagtctggagtgctgtggtgtgacctcggctcactgcagtccctgcctcccaggttcaagcgattctcatgcctcagcttccggactagctgagattacaggcacacaccaccacgcctagctaatttttgtatttttagtagagatgggtttt

SEQ ID NO: 203375 - DNA, 1000 bp, Homo Sapiens
caagcacccttagatctcatgatagttcacacatattatcaaattactttcctaaatcattataatgatatatgccatgaccagccacaagggaaccatcactagcactggttcttttttttttttttcttttttgagatagagtcttgctctgtcacccaggctggagtgcaatgactgcaacccttcacaccccgggttcaagcgattctcctgcctcaacgccccgagtagctgggattacaggtgtatgccgccacgcccaacaaatttttatatttttagtaaagatagggtttcaccatgttagctaggctggtctcgaactcctggcctcaggtgatccacccaactcagcctcccaaagtgctaggattacaggcatgagccatcatgcccggccacactgggtattattattgatttttatttataataattggattgatttttagggttgatccttctacaaatacctatccagagaagcagtgggctgagtttagctggatacagggtagggccaaccaacccaactagaatggaactgaaggcaggaaagggcctctcaggtcagggaagactgataagaaaactagcaaggatatgaccattctcaggtgctcacagcaggaaggagtggagccataagatgcacactgaccccgcatcaggaatgctgcagataaacccagataagaatgagagacttctgaggcctgaatagtttgttcaaggaagaaagaaaggaccagtggcaggcaagaaaagctcacagaagcccagcccgtgttgcctggcaggagaggtgataaaaggaagggtccccaaattacacctttctgcagaggaataagaagaagaaacctgttgggaaatccagggacacgataccttataaggacttctggtcaccggaacttggtacttttctgttgtttaagccactcagtttgtggaacttcggtaggcggccccagcagacaatgcaaaggtcctc

SEQ ID NO: 203376 - DNA, 1000 bp, Homo Sapiens
acatatttgctgtgtcccttaatgaagtcatgggttttgacctctaatttttttctttcattaaaacaaatccaagctgaaactttccaacatgtcctctcaacagggctggaataagacttttagaatgcctaagcattgaaagtatatgtaatacagactaaaaaaatattaaaacataaagtaagtataaggaggtccaagaaagttctgatttctcatattatatctaatgttttaaactctcagatattatgtctttcctaaaatgcctttcctcatttttttggtgacttatctttactagtgctttcactgaatgcttaatctgtcttttgagtaacccaggactacctctctggatatcagacctataccctgtgtcaacttaatactatatacattagtaaattatcttcttgattgacatgttgacttgttcatattattttcatttattttgtccatgttaacacagacaaggcctctacagaggacatactctggccactgggcaggaaggctttgtctgtcttctttagcaatacatgggcactcttgtagcatcatcttagagaattttactagttagagaagataaaaagagccttctcaccactagtgccctatatttatgtaacttccttatatgaatcctgaagctgacccccccaatagacagagtatatatgggactaaactgaagtgtactttaatgatctattgccaccacttggaaaaaaagaatacgcaaacatatatgacagtcactgactttcagcttctagtgtagtataccagataaaataatatgtatttgtttatatcaaaattaaaaactttggagaagttcaaattgctgggtttttttttcttttgttttgttttgttttttgctttttgagacagggtcttattctgctcactctgttgcctaggctggagtatagtggcgtggtgatagcttactgcagcctcaaattcctgggctcaagtgatc

SEQ ID NO: 203377 - DNA, 1000 bp, Homo Sapiens
gcagtgagccgagatggcgccactgcactccagcccgggcgacagagcgagactccacctcagaaaaaaaaaaaaaaaaaaagaaagagtgtcttggtcagaatcatgcattgcatttagccgtcatgtctcttcaacctcctccagtgtggcttattggccatttatgtatcttctttggaaaaatgtctgttcaagtcctttgctgatttttaaattggttttttgttgttgagttgtaggagttatttatatattctggatattaatcccatagcagatatataatttgcaagtattttcttccattttgtagggtgccttttcattctgcagtcaacacttgctgttttctatttttgttttcttcatagtgaccatactaaccgagggcatgccaacccttgcatggttgaaaatccatgtataacttctgactcccccaaatttaactacagaagccttgccaataacacaaacagtcagttaacacatattttgtatatgtattatatactgtattcttacaatatagtaaggaggaggaggaagagagggcttggtcttggtgtctcaggggtggcagaggcagaagaaaatctgagtgtaagtgactcatgcagttcagatccatgttgttgaggggccaactgtatatatctcattcatatatatacataatatatattacatttatatatacatatatatatatacacacatcacatttttatatatgcgtatatataactttttttttcttttttgagacagagtctcactccgtcgcccaggctggagtgcagcggtgcaacctcggctcactgcaacctctgcgtcccaggttcaagcaattctcctgattctcctgcctcagcctcccaagtagctgggattacaggcacatgccaccacgcccagctaacttttgtatttttagtagagagggggtttcactatgttggccaggctggtctcaaactcctgacctcaggtgatc

SEQ ID NO: 203378 - DNA, 1000 bp, Homo Sapiens
ctttaaaaaataagtgatttaatcaatttggtgatttttttcccccttattgaaaacgacttttcaactggctgatttttcccttgtttttaaattagagcctagcacagtggctcacacctgaaatcccagcactttaggaggccaagatcagaggatggcttaagcccaggaggttgaggttgcagtgagccaagatcgtgccactgcactccagcctgggcagtagaatgagaccttttctcaacaagcaaacaaataaacaagcaaaacccaaaaaccacgacaccaaaaaagaattaacttacaatccagcaataccacatctgggtatatatccaaagaaattgaaattggaatgttgaagagataatctgcactcccatgttcatttcagcattattcacaatagccaaaataaggaagtaacctaagtgtgtattagtggataaacacatgcacacacacacacaggaatattatacagcctttaaaaagaaagatcttctgtcattcataacaacatggatggagaatattatgctacgtgaaatcagccaggcacaaaaagaaaaacactgtgtgatctcacttataagtggaatttgattttggccagccatagtggctcatacctgtaatgccagcactttgggaggctgaagtcagaggatctcttgagcccaggagtttgagaccaccctgggcaatatgacagaaccctgtctgtacaaaaaatacaagaattatcaggggtagtggaatgcacccgtagtcccagctatgcgggaggctgaggtggtaggattgcttcaacgcaggaggtcaaggctgcagtgagccgtgactgtgccactgcaccccagcctgggcaacagagcaagaccctgtcactgggggaggggggaagtagctttttcactgacttttaattatttatttatttattttgagctggagtctcactgtgttgcccaggctggagtgcagtggtgtgatc

SEQ ID NO: 203379 - DNA, 1000 bp, Homo Sapiens
ttctatatactaggaatgatcagaaaaagaaatttttaaaataccatttaaaatggcataaaaacatgcagtacttacagacatatctaacaaaagatgtaaaagacccatacactgaatactacaaaatactgctgaaagaaattagaggaaatctaaagaaatggaaagacatactttgtttatcatagaacagacaacttaatattgtttggaagtcagttctcctcttaatctaagattcagtgcaaccccattcaaaaatccgtatagactttttctagaaattggcaagccggttttaaaaattatatggaaatataaagaacctagatagtcaaaacaaatttgaaaaaggagagtaaatttggaagactaatactcccagattccgagacttataaaaaagcaccaataatcaaaacagcatgggactggcaaaaaattaataaatacagcatgggactggcaaaaaaaaataataataaatatagcaatggatcaggagagagcagaaattgtcgcacacatatatgaacaactgattttctgacaaagatataaaggcaattcagtggagaaagaatatatatatatatatttttgcagaccgagtctcactctgtcacccaggctggagtgcaggggcacaatctcggctcactgcaagctctgcctcccaggttcacgccattctcctgcctcagcctctcaagtagctgggactacaatgcctgccaccacaaccggctaattttttttttttgtatttttagtagagacggggtttcactgtgttagcaggatggtctcgatctcctgacctcgtgatctgcctgcctcggcctcccagagtgctgggattacaggtgtgcaccaccgtgcccagccaagaatatattttttaaataaatgttgctgaaacaaatatgtccatatgaaaaatatgaactttgatcaacacctggcaccataaacaaaaattacctcacaatggatc

SEQ ID NO: 203380 - DNA, 1000 bp, Homo Sapiens
atcttaaagctacctcatgtaatgcatgtgaaatatcatagactttataattgggaaaggccaacatttggtttttcctgttgtagggttgctggtctatagagcatgtggagcagtaccttggcactgatgaattaccaaagaatgacttgataacctacctgcagaagaatgcagacgctgctttcctgcgccactggaaattaactggcactaataaaagtattaggaaaaacagaaattgttctcagctcatagctgcatataaggtatatattggcatcaaaacactattttgattgcaaatggcttcgtgctttgttttgcagctttggaagcttcttaaggaacagcagttcattgagacataattttaaaaatgaggttgaattaacactgttaatgcacaaattctaaaatttcaaatatggctggtagcattggatctgaatgcagactttgaccatggcttagagtggttatattttatttgggaattttaatggtttagaatgccttgatttatgtcttgtgttatgtttttatttaaaaagaaggcactttaaaaaattccaaccctttcatagtggtattgatacaatgatacactgtttttcttgaaaatgtgattaatggccagtttttctaattgtttctataggatttttgtgagcatggaacaaagtctgggttaaaccagggggccatttctactcttcaaagtagtgatattcttaatttaacaaaagaacaacctcaggccaaagcaggcaatggacagaactcttgtggagtagaagatgtccttcagcttctgcgtattctatatatagttgcaagtgacccttattcaagaatatcccaggaaggtctgtaagaagccttgtttcatttctatagcagttttaaagcaagtcagtttatatttttattaattttattaattaattttatagatggtgatgaacagcctcagtttacttttccaccagatgaattc

SEQ ID NO: 203381 - DNA, 1000 bp, Homo Sapiens
ctgggcacagtggctcacacctgtaatcccagcacgttgggaggccaaggcaggaagatcactaggtcgagatggagaccatcctggccaaaatggtgaaacctcgtctctactaaaaatacaaaaattagttgggtgaggtgttgtgctagctcaccaggtactgtagtcctagctactcaggaggctgagtcaggagaattgcttgaacctgggaggcagaggttgcagtgagccaagattgtgccactgcactccagcctggtgacagagcaagatgccgtctcaaaaaaaaaaaatttaaaatgccgcagtccttcatggactgaacaaaacaagatgaatgtgggaataaagacaaaggcaaaagagtatatttggaagaaaggatcaggaggctccttgcttctagtgaacaagggtgctgagcttctacagcccttcgtatttattgagtaaaggagatagggagaaggtggtggttgtcagtcagctgcttggcttagtgcaggcttgcatgactgcattctttgaacagtagtctccagatgttccagcagataacctcaaggagcacagcaccagggagtgattgccctcagcaaaccttctggcagcaggtgcagaagtgagtttgtacacgttctgcattcatgataaacagtttgctgtttgatcatgcagccttcagtggaatgctgagttggtcacaaccctcaggcctttggctccctacattaaaacacccatttcaccagattgaaaatattcagtaaaatttctgaaaaggacttaacacttgccagcacttagtaaggaagtgctcaataaatactgttaacactgttactattatttctctgcctggcagttgtcctaaccccacaccagacctcccacattgcctaatcctgacttgtgtcagtgatgcatgactcagcagtgaatctgggacagctattgcaaaatgcaagacttaaattccaccccaggtgaattc

SEQ ID NO: 203382 - DNA, 1000 bp, Homo Sapiens
aagtgattctcctgcctcagcctcccgagtagctgggactacaagcatacgccaccacgaccagctaatttttgtatttttagtagagatgggttttcaccatgttggccaggatggtctcgatctcttgacctcatgatccacccatcttggcctcccaaaatgctgggattacaggtttgagcaaccacgcctggccgaataatcttataataattaaagaagttgacttagtagtttaaattttctcacaaagaaaatttcaagtgagttctatcaagcattcaaggaagaaataatttcagctttacataaactaagtcaaaggagataaagagggaaagcttccctaactcattattatggataatgtaactgtggtaccataatccaataaggacaatgcagaaaaatgaacactataggcaaattacattcaaatatggatataaaattttaaacaaatacctaaaacaaaatcaaataatgtattttaaaaagtaacacatcatgaccaagttggctatttctaggaaagctagattggtttaacattgggaaattattgaatgtagttcacaaatcaaaagattaaaaaagaaaaaccataagatcatgtcaataaatacaggaaaattagttgatacactcgaaacaatgttcataataacctgataaacagtacttacagaaaatctacaataagcatcatccttaaatgtaaaacattagtagaattcaaattggaaaaaaagctgaagtacccttaacgctacttctgtttggccccaacactacttctattttgcagtggaggttctagtaagctagataggtcgagaaaaagaaatagaccataaaaactggaagggtatatccaaactgttattcagaagtggtatttttgtttacatttaaaaatccagaataatctacatattagaattaataagagagttcagagttcctagatcacaaaactaatgtacaaagagaattc

SEQ ID NO: 203383 - DNA, 1000 bp, Homo Sapiens
gtgaggttaacacactacttatgaatcaacaaaaagtctctcataaataaaagatgtcatatgtaggttttttttgtttttgttttgttttgtttgttttctaattgcaccaaactctttcagtggacattttaacagaaatgagtgtgccttgcaaattcatatttttggtatgaaaattgatattcaaaatgtatcatcaggttttatattactaaaaatatgaggtttgtataatttttaaaccttcagatatccccaaatatttttgaaaaatgcaaaactgctgacaccttttcaaataatttttttttttttgagagacagggtctcactttgttgccaagggtagagtgcaatggtgagatcatagctctctgcagccttgaactcctgggctcaagcaatcctcctactcagcctcttgagtagctgagaccacaggcgtgcaccaccactcctggctaatttgtttgtttggttttttttttttagagaaataacacagtggaggtctcattatgctgtccctgctggtctcaaactcctgggttcgagcgatcctcctgcctccacctcccaaagcactgggattacaggtgtgagccaccacgcctggccttcaaataatttttacaatatgtttaaacaaaaggtttctaagatgcctgtacttgtaaactcattactttattacattttatatcatatattatagaaaaatagtttttaaatctttctgttctgttggcattaagatatctcaatcctagcaaggcagttgacatgggacagccaggctgagtcccagacgtgccaggcaaaccatcttctgtgtattgtcaccgcccccaccagggccaatgagtttatgctatgaattggaacaaaatgaaatctgaattccagctttagcacttcctaggagaacttggatgaataatcttcctgagccagttttctcatctggaatatggagataataatgctgatttttcag

SEQ ID NO: 203384 - DNA, 1000 bp, Homo Sapiens
caaaaggtttcagcaaaataacctccaactatcaaggatccatactcatcgacatcgtgatggttttgcagtccaggatcacctgaagtagacaatcccccttctgacatatcatcagaagatcaatagtagccttaacactacatcacaatgcctatgtcattcacctcacttcatctcatcatataagcattttatcatctcatatcatcacatgaagaagagtgggtattccaagagaaagagggactacattcacataacttttattacagtattgccataactgttctagtttattattagttgttgttaatctcttactgtgcctaatttatgcattaaactttatcataagtatgtatatattaaaaaaacacagtatgggctgggcgcagtggctcatgcctgtaatcccggcactttgggaggccgaggtgggcagatcaccctaggtcaggagttcgagaccagcctgaccaacatggtgaaatgccatctctactaaaaatacaaaattcgccaggtgtggtggcacatgcctgtaatcccagctacttgggaggctgaggcaggagaatcgcttgaacccaggaggtgaaggttgcagtgagccaagatcacgccattgcactccagcctgggcaacaagaatgaaactccatcttaaaaaaacaaaaacaaaaacaaacaaacaacagtatgtatagaaaaaacacagtatttatagggttcagtgctagctgtagctctaggcatccactggtgttctgggaacacatctcccttggataagggggcttgctgtaattttaaaatcaggtaccaaaagaagactccaaggtttctggcctactgaagccatttattgaaataggagagactgtagaaggagaaggtttggtgctacggggaagggtaagtatgcagttgtgagagttttaaaagttagtcttcaagttctttaaaactcctctcatcaagaagtagagatgaattc

SEQ ID NO: 203385 - DNA, 1000 bp, Homo Sapiens
tgtttctcctctttgatttacctgtcaaaggttgtactctgaaaaaaaaaaaaaaaaaccctgacaaagatatttgagtaaagaagacatatttttcatgaatgaattttaatatgatttttaccataatgtctgcaattaaatgttacatgttttgtattttaaaatctacatatcaaaagagtaattcctagaaactataaagataattattaaggacaaacaatttcaataaaaatagaagtaagaattggcatacaacagaaagacagttacaggtgccaagaattatattataggcaggatttaaactaaattggttcaatgctgggataagaaggctaatatagacataaaaaataatgaagtttggtaaggaaatcagcttctaaaattgccatctcaactttaaacatctagagtgaccttatgccaatgttcaattttatttaaatattgttttgatcagaagcatatgtttaaaatttatttaaagaaaaatatttccaaacattttttgttttcattatcagaaataatttgtcataaagcataaacgtatttttcatttttgctaaaacaaattaaaaacataaagacaaacttgctatttttgtaaaagtctcactccatatatgaattttcaggagatttaattcaatttcaaatagaagaagccaagccaaacagcagagagatgaatatctgccagtcgtaatgacggacttcttatgtgaggctttacctttgagtgcttcaggacactggcataactcggcaccttaactcatgaatggacaaagtttaactatcatgatcagtaaatgctgcacacaacagatatttcagagcttcttaaaactaaataacttaatagctaatagcaactaaaatcaattactaatttaaaaacagtagtatatttcaattttcattggtgctcacttccatatttttaactgtcatcatattgtgagctaactaaatgtgattagtgatc

SEQ ID NO: 203386 - DNA, 1000 bp, Homo Sapiens
ttgtgtcattattgtcgttcagtttggagaatttttaaatttccatcttgattttgtttttgacccaaggatcattcaggagcagattatttaatgtccatgtatttgcatggttttgaaggttctttttggagttggttgccagttttatttcactgtggtctgagaaagtgcttgatataatttcaattttcttaaatttattggggctcattttatggcctatcatatggtctatctaggagaaagttccatgtgctgttgaatagaatgtgtattctgcagttgttggatgaaatgttctgtatatatgtgtaaagttcattcgtttaaatccattgtttctttgttggctttcagacttgacaacccgtctagtggagcacttaggctccaatgttagtattgagatgtgaggtaccgttgcattcatcgtgctatctattgcctgtgtactttggtttttctgtattttgtttttgctttttaacatgtttttgttttataggtcctgtgtaatttatgctttaaagaggttctgtattaatgtgtttccaagatttgtttcaagatttagagctccttaccagttcttatagtggtggctcggtagtggcaaattatctcagcatttgtttgtctgaaaaagactgtatctttccttcacatatgttgcttagttttgctggatacaaaatttttggctaataattgttttgtttgaggaagctgaagatagagccccaatcccttctagcttggagggtttctgctgagaaatctgccgttaatctgataggttttcctttataggttgcctggtgtttatgtctcacagctctgaagattctctccttcatcttaactttagataacctgatgacaatgtgcctaggtgatgatctttttgcaatgaatttcccagttgttgtttgtgctgcttgtatttggatgtctaggtctctagcaaggctggggaagttttatttgattattaccc

SEQ ID NO: 203387 - DNA, 1000 bp, Homo Sapiens
ttcaggagcaaccccagtgaaacgagaatttcaaaaggattcatgagactttggggggtggaaagtcattccagtgccctccaaagagccctctcccatggagatttatcaaagaaaaaggatgcatttgcttgtgacagcaaaccatggtcagtgcttggaggtaaggcagagcttttaccactctggccttgaaggtagttacggctagggtaagagacaggtgtcaaggttgggcatcaggacggagatgaaaattcccattagagcacaaagttctgggatccaggtagagagactcatgctattttcccttgggaaaagccagctgtcacctactagaaagctaaagtccaagcatccagcacaaagtaagaagcaggaacacaggtagatgtggcagaggcaagcacgctctgagtggatgggatgtaggcagggaatgaggaagacagaaggcatgtttcagagagactacctcgaaactggaggtagtgcaagattgagcgcatgcaattaaatggaccacaggtagcacagacatctcccaacacagttgcccagtcttaggctcattctcaaatgagcagctgatggtgactcccacgagtccagggtggggaatatttcaccctagtgaaggagattcatatgcatatctactacataaaccctgcatagctggggggatttctgggatcctcttcacatgaagtctgggtcaatagaaacatttccccaggcatgactgaatgacagacccatctgagaaattctaaaagcctcaggaagtaacccagagggtagggactttcagccagtgcaaagaagagcccagtagcatctcagcattcccaagataccagttgcttcttgggaaagagggtctctcctgcacaggatccaaacacaatttctcaaaataatgttcggaacttgtaatgtgttccaaattcctccagagaaggggctctaagacaatgagtcagacaacggcatt

SEQ ID NO: 203388 - DNA, 1000 bp, Homo Sapiens
cagaccactacccagctaaatgctcaaggggaccttgagtatatttctaaggtctctctggggtctatgctctgtcacagagcagttctcaggatcaagagtttttatatatgtaaaggcctctaacttgttgcccaacatataattggggctcaataaatactttaaaaatcaaatttagatctccagatacaataaactttagtggacttttctcattcttttttgttttttattttttttgagacagtctggctttgtcacccaggctggagtgcagtgccgcaatctcggctcaccgcaagctccgcctcccaggttcacaccattcttctgcctcagcctcccgagtagctgggactacaggtgcccgccaccacacccggctaattttttgtatttttagtagagacggggtttcactgtgttagccaggatggtctcgatctcctgacctcatgatccacccaccgcagcctcccaaagtgctgggattacaggcgtgagccaccgcgcccagccgtctcattcttttgactacccagcatctataatttcttctaatcaggcagagcttgtctgccatcatagaaactgcaaagaagcaagtcagagaagaagcagagaccacactgagtttattctagggacaggaagcagcagggcagtgagagcaggtccatccactctttagaggcagcattctcggtggtcatagtaataatggcccagcagtgcagaagtgcgattttcattaaatctgttctgtggtgagatttggggcacttttctagctgtgttgcctggcaatctggttgttcttccaaagattctgcatgccatccagtatcctttaacattttgcattgttaaagtatagcatatatacagaaaaacacgcacataaatttttttttacaaaatgaatttttacagacagtgcatttttataaccagtgctcagataaagaaacagaatattaccaacatcctaaaagct

SEQ ID NO: 203389 - DNA, 1000 bp, Homo Sapiens
attaagagccttactgagatcatggaattttagagctagaaaggatcacctaagcaaaagccctccttttttaaattaaaaataaacatctttttttcttttcacagaagcaatacttgtttactgtagaaaaatcaggataaactgataggcaaaaagaaaaaatgtgaaaaccttgtgatgtgtcactccgcggtgacacatgtccgcatgctcagccctcccaggcccctgtggccacagacaggttgtgtgcacctgagagctgctctgtaacctctgaacaacacatggtaaactgcaccttgacccagatgatagagcccgctggtgggcttgccaagcagattttaaacatctgagctgatgctgggattgtcagaatggtgtccttggagggtaagaggctgggggccccccatggcctcctagaattcaccctggacaggcagaaccaagcatgtctcccattaggccgtgagaagaatcgagaagccatgctctctgagcactcccaggctgagtctcccctagtatactttgctgagaacatcctttctgtatttaagacaggagactcagatctgtacaggtgaggactaatttctgccaaatctccaagctggtctccatgagatgccacaaagcaccaacacacacctctttctataggggtgtggtagttacaaaaataagatcatgaggcatgtactattcaggaacttggtatcttcatttaatgatatagtgcacacagggtttttccataggcatgattggcagcagagtcttcagccctgaacagattttgcacaggtgttctataatttattaacttcatctcctaccaccagcactgtgataagcaaccttgttttccctatctttatttcttaggatgaattccaaggcttctgataaatagtgattttcagaaaggccatgccagcagtgtgtgagagcctgattcccaaaaccccatggccaggcccggctggga

SEQ ID NO: 203390 - DNA, 1000 bp, Homo Sapiens
ctgcatatccatatgcaaaaaaaatagatttttaaaaacctcttatctcactccctatacactaattaactcaaaatgtatccaaatataagagttaaactttctagaaatcttttgataggacacaaaaagcacaaataataaaagaaaacatgaataagttttgacttcagaatttaaaacacctactctcaaaagactcgggtgagtaaatgaaaaggcaaatgtagacagagaaaatatctacaaaatagctatctgataaaggactgttatccagaatatacaaagaactctcacacctcaagaagaagaaaaacaatccaattaaaagtaggcaaaacaaaggctgggcacggtggctcatacctgtaatcccagcactttgggaggccgaggcgggcggatcacctgtcgggagtttgagaccagcctgaccaacatggagaaacccagtctctactagaaatacaaaattagccggatatggtggcacatgcctgtaatcccagctactctcgaggctgaggcaggagaatcacttgaacccaggaggcggaggttgcagtgagctgagattgtgccactgcgctccagcctgggcaagaggaacgaaaaactccatctcaaaaaaaaaaaaaaaaaaagtgggcaaaacagccaggtgctgcagtcctctttgggaggctgaggcaggaggactgcttgagcccaggagttagagaccagcctgggaaacacagcaagactacctctccaaaaaaaccaaaaccaaacaaacaaaatgtgcaaaagatttaaactgacactttaccaaagacctatgaatctcatgtaagcacatgaacagatggatgctcactatcattagttattagggaaatgcaaataaaaaccacaaagagataccattagagtggctaacattgaagactattaataccaagtgttggcaagatgtagagtaactgaaatgctcatacattgcttctgggaattc

SEQ ID NO: 203391 - DNA, 1000 bp, Homo Sapiens
gtagtaccggaagcaatggagtacctaaggagtgagtgatccctcaccagcatttagaggcatcggtctgaaggacttgccgctgctgacagctacaaccgcagagaacaatgggagctcttctctagctttatgattttgtgctacagaagactctttctgtgaaatgttccttttctcatccaccccccacatcttgtttcagacctaatacaatttttaaaatccatgtcaatacaaatgtctaaaagttttaagagagagaatgtaatttgcattaaaaataaaaacaaaacagaacaaaaaagtcccatgaaaagcaaaaagaacgttttctaagataattcttaaccatcttctttctattcttttctaactttgccttagtgtatgtttttccattctacacattcattctgctacattcattgtgtgtgtacctgtatatatctatgtttgtatgtatatatataacacgtacacatatatgcatttatgtatgtatattttttatacatacacacacagtcttttccctgaatgtatgcttattcacagcaaatgcggtgcatgcttctagaggacaggtatcatgcagagaagctagcataatatattaatcagtcattaataaatattggtatctgccaaggatatcagaagttacaaaaacatgttggatatcatgatcccccctacatttacttttttgtggactcatttcaagcttggaagccaacttttgctttatgaactctaatactacatattttgctatgttccagatttaggactctcaactaaggtaattaattaattattttattttattatggctaaagttgtttaggtataagtggtgtcatcttttgatgtgctaaaactctttgtgaatctgtttaataaagatctttatactaccaattatctattcaaagatctttgctaatgtatttgtagataaaggtgcaacaacagttcattaatttgttaggaattc

SEQ ID NO: 203392 - DNA, 1000 bp, Homo Sapiens
atctgccacccccatgggctcctctgtggttcactaattgtgacctacacacattgctgctctccaggctgtgggtcagcactatgggatgtggtaagaggaagctataaggcaagctttcaccctcattctagtgccaagtgtctcacaccaacagggaacctggggcgtaaagctggccccttgtaggctggttcctgagttgtcataattttcctgggaaagtaaaaaccaacctaggctgaaatagagaaatgaaagaaagaatttgtgcagcattcatcccacttattttatccaatgctgccccacaaaacaacccatgctcatttttgcacagctaatactttgtaacagagatgactgaagagaacaggaatactaaggaggttgcagtggtggcccttcaagaattaactcagtaaacccagccaactgctagcaactctgtggccagtggttccactctgagttactctaaatgggctaggtgctttccacacatgaacgaatgcaattctttctccacagcactatccccatttcacagatgaagaaactgaggcagacagggagaagtgaaaatagtaaatagtaaaatttactattataaaaatagtaaatttataatttagtaaaatagtaaaactacgttataaattataaacccaaataccatgctctttctattattccagtttcccagaagctggacaagccacgacggcgccttccaataaaaggggaactccagagacgctatgagaaaagaggaacagacatctgcaatagatatctgcaacttccttttcaaaaacaccatcggcattgctttctcaggaagccactgccagcctattgtgatagctgacactgagttcctgagaattctctaattaggatcccagattggagggtcagccagtggttaacatataatggacacaaaactgattttactggaagactgagggtgggcactcaccatggttctaagcat

SEQ ID NO: 203393 - DNA, 1000 bp, Homo Sapiens
cggatttctctgatttgtttttttcctttagcagttgccactgtatgagattatcttgtttggtctatttatttgcttgtcatctctctgtttacgtgaatgtgagctccataaaagcagatacttttcctaagacagtgcatggcacatagtatttaaatattaagcatgaaataaagatttctggaataaatgaagaagcaaatgcagaggcctttgggaacacatacaacataaaaagaagaggagagaacaattatgactacctagtagacttccttattaccttagttatcttggcaagggcaagaaattgcccaaatatagatcatttgggggctaacaattctgacaaagtagggctttatagaagttgaaggtaaagctagttaatttgaggactttccctagacagagccctttctctaatatcctagttaataataatcatccatctttacatgctaacagtgcatcagggaggactatgtcatggtggtggtagtaaataataatgataaaaaataacacaatcaaatacttacatggtgcttactgtgctccaggcactatcctaagtgctttatacagatgagctcacttactcctcacagtcaccctatgagtttgtgctattattatcactgtttgctgatgagaaagtggaagcacagagaagttaggcaagttgccaaatgtcacacagtaagtgctgaaactagaattttgagccacagcctggctctgtagtctgtatttttctatgctctgtagcctcagcacactttcgccatcaggtatgcaggcttggggatcaaacttcctcacttcagaaaagttgctgcttgaagagttgctgcttcattgctgctcaaggctggctcttagatccggagcctggaattcatgcagtgtcctacctatgaaatctttctgtggggacaggcctccttttatctgtgcttgtgttgcaggggctatacgtttctcatttagagcc

SEQ ID NO: 203394 - DNA, 1000 bp, Homo Sapiens
tctcactgcacctatgtaaataatcaggccaactttcatgagactaaacctattttacaaacaaatcagtcttcctttgattatctttggtagaaatgggagtgactctagagagaaaaattgttgtggaagagactatactgcactcattattagactctacctcattgtttttgtgggttcatcatctacctaaaatctagactgaatcctaaattttttagtttcctccaatatctgactacaactctccaaacaaatgttccaattttcctcccatcccctggcttggaattactgaaattaagaccactctgtttctggatccctgtgagctgaagttgggccacttgttgtaaacttcagggaaagcgcctcaatagcttatttatggacagcctcacggtgttactgtatgaactactcggaaagttcactaagacacctgatgccaactgcagaccaggaaaatctgtcagattcccactgactggtcttactccagctgaagatgctttgagcctaacatctaaaaatccccttaactggctgccctctggactcaaaaactgagtttatagtttgttctaatcacaaatctttgtttttctttgttttcatagaaatgcctcttcttaaatgcttgattgctgtaaccacatagaggtggaagcccatctgcaaaaccacctcctaaaatgagacacagctgttaagtgtttaactgaactgaactatttgtggaactgagagactggttcagtggcctgtgggacaatccaccaaccccatttctggacttttcccaagaagtttcagacaggggaatactggggctcagaaaatgatgcttctaaatctggtgccttggcatgctgagtaccttgaactaaaggagattgtgaaagcctcagaagcaaagttgctctaagaccttcttccatcttcctgtctcctatccctcattctcccctgaaacaagtcatggaaaccagaattc

SEQ ID NO: 203395 - DNA, 1000 bp, Homo Sapiens
gacagcataacagaatttttggagaaaaatcaaacaataaaaacaaatctacagaagatccagaaattgggcataagatttcagatgctttttaattggcgtgttcaatatgatgaaaagttgtatcagagaaaccctaaaattgaatcaaccataaattctagaactaaaatgacaaaagtaaaagtaatagatgcatgtataaatatctagagaaaatacaaaacaatagtaaataaatgtattaccaagctagtattttttctggtcattttcataagatattgaccaaagccaaaactcttgctcagttgtaatctctgaatttgaaatctggctggtgaatgtccatttctttgctcataagtatctatgctcaggcccatgaactggaggcatttaattgagcccatacaacagggcaatatgaatcaatggcatgaagtaaagaggtatgggtcttcctctgacccccaggctccatgccagcagcatcccaacaatgaaggcaactgattccccatctggtagagatggataacaggaggtgctaaggattggccttgagaaacaggattctctcaggttctaaaatattaggttggtgcaaaagtaattctggttttcaccattactttcaatggctggcttttcttctagcctttttcttctgcctttccttctagcctgtattttctctacatttagcttaggactggggatttgctttttctaaccatgcaaatatcccaactattagaggtctgattcttttccatcacaggctgaaagcagaggcatcactgttgtcagatgggctagtttcaacatcagcttggcacatgtttcttcctgttgactgtaagatcctgacttttttctactatgtttttaatgcttaccctcccaggtgtataccctcctagatgtatatttctgggactcaatattcacaaggttgtgctcaagtgtctactgtacctccaaatcacaagaattc

SEQ ID NO: 203396 - DNA, 1000 bp, Homo Sapiens
gaaaacttagacattatagactgtattgattattttgcatatagaggaatagctaagagtggatgatttataaagaaacatgtttatttggctcacactttggcagactgtacaagaagtgtgtgccagcatctgcttctggtgagggtctcaggaagcttacaatcatggtggaaggcaaagagtaactggacatatcacatggtaagagacagagcaagtgtgaggtgaaggaaacacgttcttttaatgaagcagctttcatttgaattaatagagtgtaaactttctgattaccacgaggatggcgtcatgccattcatgaggaatttgcccccatgacccaaacacctcccaccaggtcccacatccaacattaaggattacattgcaacatgaggtctggagaacacggacacccacaccatagcatagaacaactaggcttaacagactcataaaaaacttctcagtcaaaagcaacagaatatatgatattcttatttgcacctagtgtattctgttaaaacacataatgggtcttattaaatttaacaataacaactgggtgcagtggctcatgcctataattccaacactttgggagaccaaggtgggagtatcatttggcacaagaagtttcaggccagcctaggtaacacagtgaggccctgtccctacaaataatcaaaaaaaatagctagacatgatagtgcatgtctgtagtttcagctacacggggagctgaggtggaaggatcacttgagcccaggaggctgaggctgcagtgagccaaaattatgccactgcactccagcctgagtgacagtaaaatcctgtctcaaaacaacaatgatgaataaatctaagaacaccaaaatcatacactgtgtgttttctgacaaaaacttaataaaactaggaattaaaagcaaacgtaaaattggcaaatccaaaaatatatgaaaatgaaacacacaggctgggtgtagtggctcaa

SEQ ID NO: 203397 - DNA, 1000 bp, Homo Sapiens
aagccaccatgtttgtgtaatttgttacagcagccacaggaaacctatacagttggtctgacataaattaatttatctgtaacatttaaaaattaatagtagtttaataattttattgcattgtttctagattttaattgctatttcagaataaattggtggaatgcagttctttctttatagagggatagtgtgtaatttttaatacattgtgaaaaggcacataatagaataaactttggcctcttttattggaataatagactcaagaaactcatttgatgtttttctggtaggttgaaagttgtgcccattattagttttccttgttgtagtataatgtcgaaagaagttgttgagatacttgttaaaaacataagagtggggaaaaaatgtaatggaaccattatatatgaaaaaatttggacctatagtccacatagattgtttaatcaacatgatcattattataatttataggaaaaacttgatagttatgtttattctgaccacctgtaacccgtcagtggggatactttttaaaagagaaaactgtcttgtccttatgacagttaattgctaaacagagtagatgcacagaaacccagctcttgttttcctaagggggggactatgatatgtaatgggatgggagtagccactgtcacatcagcaggtcatgggatcttaccagtcatagcccctgtggcagttgcttgacttttttggatatacacttctctgcaagcccttgagagcaaagtcaatgtctttatgtattcatggattcattcaatagttattactcccttaccttgtagcaggtgctatgccaggtactgaagatactctaaacagcaaaaactgacatggttcctgttttcatggtgtctagtgggaaacagacaaccaaataatcataaaaataagtatcttatggccgggcgtggtggctcacgcctgtgatcctagcactttgggaggccgaggcgggtggatc

SEQ ID NO: 203398 - DNA, 1000 bp, Homo Sapiens
ggtggattggaacttggggtaggggggcagtatttttaatgtctgttatgttaaagtctgagtttttcacaagagggtcacaagctcttcttttattggattattagaatgtctctgtattatattctttttaaatgttatggacaaacctcatcagaaacttattgtttcagttcgttgagttatagaattagatgtaggtaaaaataagtccaataacgagaactttagtcaattacttccttgaaattacacttgcacagctttctgagtcaactagggcaccattctatgagtacaacgtgttcattttatagtattgtctttcattcacttttcctcccagtactccttaactataccttctaattatattattgatttcttttttcttgacatctttttaaaatataaaccaggcccttgtgaagagattatctatcagaatatttttattttcttcctaatctttatactgagagtttttttaatatctttccattactttctatgattaactcagtttgatttctgttatttgaagtttatttatcttatcagtttctgcaactgaattaaaaactttaactactttcattaaagttaatatatgctcatcttttttcattcatgactgagtttcttgtgtaaactaaagtgtccctagtctcctctggaataaaagattttttctaaaataacagaccaggtgtggcagctcacacctgcagtcccagcactttgggaggctgaggtgggaggatcacttaagcccaggagtgtcttaagagcagcctggacaacatggcgagacctcatctctacaaaacaacttaaaaattagctgagtgtgatggtatgcttctatggtcccagctgcttgggaggctgaggtgggaggatcttttgagcccatgaagtcaaggctgtagtgagccatgatcatgctactgcactccagcctgggcgacagagtgagaccctgtctcaaaaagtgaag

SEQ ID NO: 203399 - DNA, 1000 bp, Homo Sapiens
tatatcaaggtggatcacttgagcccaggagctggagaactgtgagccatgattgcatcactgcattccagcctagatgacaaagcaagatcctatctcaaaaaaaaaaaaaagcagttattcaagactatgactacagaccattcttttgaggaattctgcagtagagggtcagaggaataagactagctagcaggttgtgataaaagtggttttctttaaaatggaggaaaaggtatgtctgcatgcaaatggaaatgatcctatagagagagaaaaattaatgatggaagaaagaaaaaaattatcatgaccagtctcctactcatacactaaaggtatttccaattttctactcttaagagaaaaccaagactggacatgatgcctcatgcctttaatcccagcactttgggaggccaaggaaggaagactgcttaagtccagaagtttgagaccagcctgggcaacacagtgagaccctgtctctacaaaaagtaaaaaactggctgggcatggtggcacgtgcctgtcatcccagctactcaggaggctgaagcaggcagatcacttgagcccaggagctggaaaccagtgagccatgactgctccaccacattccagcctgggcaacaaagcaagatcctatctcaaaaaaaaaaaaagaaaagaaaagaaaacccaagatgacttagatttatgtcaactatttctgcaggttaaattcccagaaatgggtctgctgaactgaagagcctgcacatttaaaaaagtaatacatgttgccaaaatgcacatctacattctcactaacagtgtatgaaaatgactgcttatactcatcagcactgggcattatcattttactaactttttgctgatcaagtattttaaaaatccttactgttatatgtatttgcatttattctcaaataaaactgtttaatttggcagtttcttaaaaagctatgcataaatttactatacatcccaggaattc

SEQ ID NO: 203400 - DNA, 1000 bp, Homo Sapiens
aatatggaaaaagtaaggtgcagaagaatgtgtaaggaatatgctaaaatgtgcaggaaaaggaccaaaaataggcagtgtttgctcagtaatagtagtgcacagagaagactggtaacagtgattgctaggggtggagaaactgggtggcttggggccaagaggagggagaaactagtgaataccacgttgtatcttctgaattttgaatcatgtgatgtacttcctactaaaaaaattatgcaaaccagaaaaagtgcatcagacacatattttcataaactttatttgtcttaccaggctgactgcagtccatgccttggagtttattttactattcccctattgtttacattgccggagagttatttgtttagctgtgtctctcccaagggaaggatttatttatcatgaagttttcagctcaatgtgttttggcaaacactgattgacacccacaagccctgatactgtgctaaatccaggggaaacaaaagtgagagtcctgctgggtgtgtagtccctgcctaggacaaactcgcattagtgggggatacagacatacaaacaaaagatcacagcgcaggattaagtgtgcaacaatagaagtgtgcacaaagagaaaagtggtagaaaggaaagctgaccagctctggtgaggtgacaggggtggaataaccaggaaagacttagctgaaaaactggaatcagggtttagaaggatgaataggcttacccaggagcaggttctttgagggaaagacgcgtgggttccagggaacacatggctccagcccaaagtgaagcagcagaagatgccctggtgcagtgggatgaggggcaaggaggtctggtcgggttagcaagggcattgaatgcccccaaatttggatttttattccgcaggcaatagggaggcagaggcgtttacattcaaaaggaatgaatcccagagcctggcacagggaaggcaagtaagcaaagttggtccaatgaattc

SEQ ID NO: 203401 - DNA, 1000 bp, Homo Sapiens
gagttgctgtcccttccttttaatcctgtagtagctcctatcactttttttttttttttgagacagagtcacccagactggagtgcagtggtgtgatctcagctcactgtaacttctgcctcctgggttcaagcgattctcatgcctcagcctcctgagtagctgggattacaggtgcgtgccaccacacctggctaattttcgtatttttacaggattttaccatgttgcctaggctagtcttgaactcctgacctcaggtgatccacttgcctcagcctcccgaagttctgggattacaggcgtgagccaaggctcctggcctcctgtcactttttataattgtcagtttgtttttcctctcagaaattaagctccttaaagctctctattattgttttgaattcccagggcctagcataatgcccagcacgtaatgttgaatgtttgttacgtaagtgattgaaggaataatccaatacatatctgtcttaagtacaaaagaattccaatatggtggtctcacagagtcaaaaaagcggaatgtttcagaaaagagggattgataaacagtttcaaatggtagtaaaagtattgaaaactgacctttggatttggcttctagaaggtcattggtttccatagtgaaaacttttatagcaaaatggttggagtagaagtggttgaagattaaaggagaaatgagatgtaagaaacaacaaacaagtttgtgggggggcgggggttggttttatttttaaagatttgtagctgagcgtgacagtatgtatctgtagtcccagctatttgggaggctgtggctggatgatagcttgagcccagcagcttgaggctgcagtgagccatgattgcaccattgcactccagcctgggtgacagagagagaccctaactcaaaaaataaaataaaataaagatttgaaactaaagggaagaaaccattggagaagaaagccaaagatctgacggaggagaattc

SEQ ID NO: 203402 - DNA, 1000 bp, Homo Sapiens
taagctaagatactcaaatttaacttttagccaccttatatgggagagcctggaaactaaaggggaccagggaccatttgaccaaaagaggtgtttggtggagtttctgcatttcaaagaagaaaggccagataggtcatcacaattcattgtattattctttttttttccccttaatgtttatgcaaattttattttatatttctgaatttggttagcacatactaagccaaagactattctaaatgcatttatagtgaatactatgtatgcccatggtaatgggtcctccctaaggagtggtgaatgtaattgtgtgaatcctgcttatcacaagtggtgcaatttggtcataaactttatttataccctgtatacatctgaataacagagcagaaagacctaaaaaagggcttctcacaggaacaatattactatgttgttctaagaaaaaataagttgagtgctgtattagtttaagtgtttctaaagttctataggcagcattttagaattaagaattgtgtatatccattaactgatataattcacatgtccttttatttgttatcagaaagatcaatactatcccaatttattcaacttgttacccaagaaatggaaccaaaggaatccaactttcattttgtgtagaatcatacctacttatacttaatgctagcactgtaagaaataagtcttttttgtttaaaaaagggaagataagattaaagattcttagtgagatcatcttgccaatttgttgtacatctctcattcattgttgggggaaaaaaaagcacaactatacctctttaatgttattttcttccattatccctcatttatttggaaagataagggaaaccttgtctgtattatccagaagcacagatatttgcttgacacaatatttaaattcagcccaatctttaacattaaaaaattttctttttaacttgctggaaaagttggatacattggcaaatatagggaattc

SEQ ID NO: 203403 - DNA, 1000 bp, Homo Sapiens
actgcattgctgaagaaactgaggctcagatgtgttgagtcatttgctaatacatgcaggagccaggattcaaaagcaaggctttctgtccaattccactttcttctcattccctcattttctgagcgcagctgaggctctggggtgagtgaagatcaaatccgagtttccgtcctattttcccctcaggatcgctctcacagagtcattctgaagatggaagcagaatcagaacagagcttgtgtgttttgttatgtctcacctctttttcccaagatttcaaaggcatgggcccatttatctagacactcaagttctcaacaggggcgttagcagctggggagtggaatgttgtttggaaaggatgaaacaacactggcagtgtttatattcaattccggagacctggttagaaaaatatttttaaaaaacggaaggaagagtaaccatgcacttacaaaatgtggcctccttatcgtgagggacttttgcccttggattctattcccaggagtagacatgtccagcctcagactgccgttaggagatgaaagggaatctttcaacatttcctcctattgtttgtgctttctctctgctttgtcaccatcatattcattattggaattttgttaatgtgccatttctcccctggaaacaaaagagaagagctgtcaaagcaaagcaggaaagacgtgtggcttactcctaagtgagtaattatcatgtgtcttggaatggttggctgcttccagttgaagatgtttgagctaaaaaggaagacacataagcatccagtgaagtgaaagatgggggaatccacctggctgcgggaggtggcttagagcccacagtaaggcatggggagggctgaatatgacttgggaactagaacacctgagctcaaatcctgattgcactctgtacaagctgtatgaccttgagcaaggtacttaccatctctgaacttcaccaagttcatcacatagacaggaattc

SEQ ID NO: 203404 - DNA, 1000 bp, Homo Sapiens
tgggattgctgggtcaaatggtagtcctacttttagttctttaaagaatctccatactggttgtactagtttacattcccaccagtagtgtaaaagtgttcccttttcaccacatccttgccaacatctattatttttttattatggccattcttgcaggagtaagttggtatctcattgtggttttaatttgcatttctctgataattagtgatgctgagcatattttcatatgttttttggctatttgtatatcttcttttgagaattgtctattcatatcatttgcccactttttgatgggattttttttcttgccaatttatttgagctccctgtagattctggatattagtcctttgtcagatgcatagcttgcgaatattttctcccattgtgtgggttgtctgtttactctgctaattgtttcttttgctgtgcagaagctttttagtttaattaggtcccatcgattcatttttgtttttgttgcatttgcttttgggttctttgtcatgaactctccctaagccaacgtctagaagagttttacctatgttatcttctagattctttagtgtttcagatcttagatttaagtctttgatccatcttgagttgatttttgtataaggtaagagatgaggatccagtttcattcttctaatttttaaaattagttaatttattaatttgttttttcccagacagagtcttgctctgttacccaggctggagtgcagtagcatgatctcagctcactgcaacctctgcctcccgggttcaagcaattcccctgcctcagccttctgagtagctgggattacagccatgtaccaccatgcccagctaatttttgtatttttagtagagacggtgtttcaccatgttggccaggctgatcttgaactcctgaccgtgtgatccacccgccttggcctcccaaagtgctgggattacaggcaaaagatttctttaatgtcacctcccttaacttgag

SEQ ID NO: 203405 - DNA, 1000 bp, Homo Sapiens
gggggacctgatagagaccaaagaaagcagccagagaggtttagggaaagcagaaaaggctagtgggtgggaatgttttcaaaaagaagataatgttcaatttgtgcaaattctatacagatgtcaagtgagatcaagttgaaaggtatctgctggctttggtgataaatgtctctggagatcctggcaagaatagtttaaatgttgtgagggcagaaaggaaactgcagttgttaaaaagggaacgagatgtcatgaagtacagacagcaagtatagaaggcacatttgagaatcctggctgtaaagtaaggaaaaggtggagaggtgatgagaagggaggcaagtgggattttttgtggggagctatgatgggagacaagatttttgggaggaatggtgttgaagaagaattagaagagagacaattgagaagtcaggttcctaagtgtacaggctgtgatgggctacatagctcaggtgcactgactgcctttagaaggaggggcttcatccttcatcatgagaggaaagtaaggatgctgtattggtctattctcatgtttttataaagaaacccctcaaactgggtaatttataaagaaaagagttttaattggctcacagttccacaggctgtacaggaagcatgaatgctggtatcttctcagcttctggggaggcctcaggaaacttacaatcatggtagaaggcaaagggggagcagcacttcacatggacagagaaggagcaaaagagagacagtaaggatgtgccacacatttttaaacaaccagatcttgtgagaattcactcattatcatgagaacagcactgaagggatggtgctaaaccattcatgagaaaaatcccaatgatccaatcacttcccaccaggccccactttccatattggggattaaaattaaacatgagatttgggtggggacacagatcaaaaccatatcattccatcctggcccctcccaaatctcatgatc

SEQ ID NO: 203406 - DNA, 1000 bp, Homo Sapiens
ggtgtgttaattatgtctcaataaaattattatttagaaagataactaggtaaggaaattcctaagttgtaagtcatcctatttatatgcaacatatggaatacatacattatgctcatctcattaatatagcatatttagtgactgctcttttctctttacaatctagaaaagccaatatgaatataatgttcatattaatacattatctttataatcacaaaggagaagcacattcagaaaatctgattcagctaaactttaaattttatagccagataaaatgcaacaaatatctgaaatatgaaaataaataaagcaaataatatatcaaaaatcttaggaatgatgaaatgactaagagtttgtcttaatttaggtaacaaaatctcctgaaacatttatacatttaaatcactaggagttcacaataagccatgtcagggttatctagaaagactgattatgtatcatgaatattaaagtattttgaattaagccttgtagatgttgcttattttgttttcaatttttatgacgtctatatcaaatgcgatacttttatttaaataaaattaataccatgttggacaataaattaatatttgagtcctctcattttgttgggatatataagaatattttgaaccaataggtggacaaacataagtgatgtatttcatacacacacacacacacacatacacacgtgtatttaactcatatgtataagacattgttttgggaaggagcaaagtagcttctgatagccaggatattcaggagctagccatatagtataaagcaggtttagagctaggtgtaagtgttcttctgatgaccatttcaacaatttcatagaacatcagtatcagacatggctaatctatgcaaatgagagatcacaaaaactaggctaacttataatcatatcaaatagagacaaaaccaggaacatcacccaaacaaaagactaacaaaacaatcccctgtcatggct

SEQ ID NO: 203407 - DNA, 1000 bp, Homo Sapiens
acatcacactctggggactgttgtggggtcaggggaggggggacagatagcattaggagatacacctaatgctaaatgacgagttaatgggtgcaggacaccagcatggcacatgtatacatatgtaactaacctgcacattgtgcacatgtaccctaaaacttaaagtataataataataaaattaaaaaaagaaagaaataaagaatgggttctgactttaaaattttaatcaataaatggtgtgtttctaacatgtatacacagtgatttctgccataaactatatctttaaagccttctcccacgatttatgtatcgccagggcccatataacatggtcagtttgttattctgaggctaaagctgtaggaaatactttgcttaccatatggacattaagctgctccttggctgtttccggtaaacctcccagcggtttagatgccaacagatgacgctccgtgtcagtcagccactgctgcaaatcctcaatttcgccatggaaccctttggcctgaagtaataggcagttttaagttggggccataaacactgtcagtttcaagcaggaaataagcttcaaacaatcccagcctgctaagcctctctatgcattcttaagaacagccaggtaccattagatttgcctttcttcatcaggagagctctagtagataagagtattatgctaagaactagaaagctgtgttctcttctgctgttctgttctttatttcacttatttttactcctctccttaaggtataaaaattaaacaggagtctgtgaactaataaaagaattccatgctattttggtcttgaatgctataaaaactttcagaatttattctcttactcacctggcgcaaggcaccatccagctgctgcttcctttgttctgttttttccaaaacattttgccagcgttgatttaaaacctctagcttgttctgaaggttgcttgcttcttctcctgcacttgattcaattagatc

SEQ ID NO: 203408 - DNA, 1000 bp, Homo Sapiens
caggcatttattaattaatagcatgaactttaaataagtgatacacacacttagctgtagcccaaacagtgtggttttttttttttttttaaatcacatggccaacaaacctcgccaatatatttttacaaggctgttaaatactgccaacactctatgatgttgagccaaattattctggaatatcgtggtatatagcacaacaccatgtttttgtgaaagactagagataccaggggagcaatccacaaagctcatgaatgtctcactgtaaatggaatgtctcagtgtgagccagccccttggggctgagggtctcacctccttacctttgatggcttgtggcggtagagttaggctcagtggggcttctcatttggaggcaggggagccaaaacctgggtctgtcttttaaaaccctgagactatatctcataactagagttgggactttcacctcagtaagtgccagtgatcttttccaagagccaatctcagagctggtaggagctcagcttgcaggagcctggagcatatctcctcgacgtcatcaatctcaagcaggcccagcatccagctttcaccaaatgctcactgcatccagggccaggctggtctgccgcctaccttactaggtgccatcctggccagcgctgcttgccaccactcccagtgggacttccttcctgccttactgcggcccctcttaatccagccagattgcataattagcaaaccgtgcttcagtctgtatttcagtgcaaggagatgcagaggactgggagtttggcaaagatttgagtagtagacaaaccagagtacagctgagaggctgtggagtgtgcagacgatccacatctggctttctgcagaggttctcaaagagctggcatgatgcatgatctcccacggtgctaagggagatagcacatgggtgctggctgaagacattgaaatttactggggtacagcaaacacacaagtcatcagcatcagcata

SEQ ID NO: 203409 - DNA, 1000 bp, Homo Sapiens
ggagccgccctctggcttctccctttcacctctttctttaaggcctgtattattgctctcaccacaacttgtcctgagagaggtgtctataattagctcagtttgtgtgcagggtggcttaacgtggaggaagtggcatgaggaactttggttaatcttaagaggaaagtcctgaacacagttgatgtcctgggagggcgggtcacagacacagagttcccacctctttgcctaactacctacagtcacacacagtgccttgtattgcagatattcatgtgtgtatttgagtccccagctggatctgaatccttggagagaaatgtctccgagagggctgggtcttttttgtctctgttttctcagtgctgagctcagtccctggcccagaggacacactcagagggaaggagaaggcaggaatgcagagaatctcttaccagtgggttagaactgctgctcttgtgcccacattgccttcctggtccctcccctgcaggcccttttgggtgtggtcaaccccgcagtgtcaaccctgtttctagttattggcgtttgttatgcttcctcacttcaaaggaaccagaaaaataatttccaaaaacagctgcctttgtactttctaggccttttaaggtttttgcatgccagaatctcacctatttctaatatcataaagatgtggctgctttggaaaatatacctctgaggcttaatgctataataacttccagaataataaaacaacctccgtctctgggacctcagtaccttaaccaagcatcgtgtccactttgggctcatcattggagggaaagtacgtactaacaaagcagcggaccaggcactgtggctcacacctgtaatcccagcactttgggaggctgaagcaggaggaccttttgagggcaggagttcaagaccagccttgccaacatagtgagaccttgtctctataaaaagcaacaaccacaaaaaactagatggccttcaggaattc

SEQ ID NO: 203410 - DNA, 1000 bp, Homo Sapiens
gaggacccttcttcattctgtttctaaacttagaaacattctttcttttacaaggattcttccttgagctccagatctggattagctgctccagctttctgcatctggaaccttgtcactccaagtatgcttttggggccaacaacattaacatcactatgagagcttgttacattggattttttggaatgttagaagacctcagagttcatggaattcagtaaatgcagaatctcagacctaacccagactactgagtcaatttggaatgtaacaagtcctcaggtgattctcaggcacgttaaagtttgagaagcactgctctaaaacgcttgtccattcacatgccaaatgccaccgcaattgctggctgaccagtcttttccgcactagatgctgaaccttgtaaaggcaggatctctgccatcttcactctgtatttttagcccccagcacacggcctgacacatagttagcacattaaatgaatcaatgaatcaatcaatcaatgaagtgagatctcttcaagtcttttaatatttgcaaggacattgcattttttggaatgttagaagacctcagagttcatggaattcaattgtttccatctgtgatctaaagattcttgagggcttggagagacataagggatgcttgggattgggtggggtggaggggcatagaagaggagacccagcaggtgggactccaggccacccactccagtttctaccagaacaaatctttagtcatctggtccacacatttaaatcatctcattactcaattactcaacaactaattatttagcacttacttacaaatgtgaatacgacataagggatcactaactatacatagtttacattgtagtagggaagacagataatatgtaagtaaacatacaagcaatataagattctaaatctagtaagtgcaggaaagatagttaaaccattagggtgtgacagagcaaatgggcggacattttagagaattc

SEQ ID NO: 203411 - DNA, 1000 bp, Homo Sapiens
atgtacctagaattaaagacattgccttgattctagaagctgcaaattaacatttaaaataatgactcacctttgttcaagtttgaatcttatgatgaagctaaatttctcaggttttaaatcctgaggactgcactcagaagaaaatcagatgttttcagccacaaacattgcttaaaagaaatttctgggaagagaatatattgatagaaattatgtagtcaaagatttagataaatttatgggcaaaagactttttagtgtccccagcctacatgattaataattcagagccaaatttaggggcactccacccagaaggaattacattatccaatttctgtcatgtcatcctgaagtgtaagcagcaagctcattaaaaatgaatgaggtaatcagacaaattctatgaccatgcgtgagcttctcattaatgttttactagacagcattaagaaagactaaatagactgcactagatctggaagtaataaatggacttcaaaagcaaagcaacttaacgaccttccagtaaacagaaagacttgaaagggaaaggatgaaggattttagaaacctatcagctacacattttggctgcatctacaatggaaaagcgaaatgcagtatgatcaattacctgcttaatttgatgaatcaacaggccaggtttaaatattactttgaagcccgaaataacggattgggctgttattagcaggttaaagttcctaattctcccttcactgagtactgtttgactagtgcacagtttctcagcagtaacagtaccggtgttttggcctgggtaattctgttcagggggctgtcctatgcattgcaaggtgtttagcagcatccgtggcttctactcactagatgccagtaacatcgcccagctgtgactaccaaaatgtctccatacattgccaaatgtcccctgacatttatacctgagcctggtgaaaggagtcacacctgttacagaggcagagaattc

SEQ ID NO: 203412 - DNA, 1000 bp, Homo Sapiens
aacagatttgtgaactcagccaagcacagtggtggcagggcctagctgctacaaagaagacatgttttagacaaatactcatgtgtatgggcaaaaaactcgaggactgtatttgtgactaattgtataacaggttattttagtttctgttctgtggaaagtgtaaagcattccaacaaagtgttttaatgtagatttttttttttgcacccatgctgttgattgctaaatgtaatagtctgattgtgacgctgaataaatgtctctaaaaaaaaaaaagatctttggtggaatccgtaggctgctttttcatctggtggctgtggctctctggtgttttgtcctcaacagccacatctaatatgagcactgggaagaagactctttctaaggctgctcagctttagagtacatttcttgatggtgtgagcttggtgtcctgtctcagagtcactagtttcccagcccgaaacagttgtgtctcaatgccctccatcctgccttttccacccggccaattacacaccattctaggtctgttttgtagcactccacttccaaataccaaattgtctatcagtttggattcttagtcgtaagcaacagagatggattctggttttcagcataagataaattgtattagaagaatattgtgctgcttgcagaatggccaaaaggactagagaatcagcatcagtctgagccacacggctgggaataaatcctggaaccatactgcataactggtcgggtgaggagattgtagccactgttgccaagcactgacacactgctttgtaacactatctgctgctttgggaatttgatcttgacacatgtgctactgcatctggagaggatacactaaggtccttccttgatttgttgttgctaaccagttaccaattttaaagtatgtgcaagttcagcttaagttgtttggcattttcagcttttatagagggagactggctcagtgggaagactcaaggaattc

SEQ ID NO: 203413 - DNA, 1000 bp, Homo Sapiens
ttaggaggaggcggcgcttgatcaaggtgttgtttaaatgtttttaccagtttaacaacctcgcaggttaacacaggcccacatcgcacagaagtaagctggcgaaaggaaataacacaagcaaaagttgttttcagagagagaggaagggaaaaagtctcaatgtcctttcccctacagtgcttcctggactttaacattcatgcctatcatctgggatcaaggcaaggagatccaggtttgagcctggacattgccagcctttagctgtgcatcttgggcaaatcactcagctctgtgggacatcaatttcctcatacaattggcacctacctcatagggttgtggtagagactgaatgaaacggtgtaagcaaaagagcacaggggctggcacagagtgaacgtcagcagctaattttgttttcatcattagcagctaattttgttttcatcattactattgacaagcattcattgaacaagtactcacctgtgctgtagtagatgatcttggttcccacctccccccccccccccccgccaggtgtgtgagtgccggctgcagacacagctgccgacttcccagagagctgccctctgcaaagggcattgtaccacctggctatgcctggaaggttgtacccaatgactgactcatacaggtgcaaaaacctggcccccaacgcatggcgggacaactctgtggtgcattcaggtaccagaactcttcaggggaatcaggtcaggttagactcatctgaagccacaattttgcttagcttttccctggataacttccctctcctccctgcagattccccctgagtgcccgccctccagccctcactccagtgaggggcctgacctgaaacagctgtctgcccttgccaggctcagaggtgagtggtgaagaagcagttgcccctgcccaaaatgggcttatgctctgctgggggagactgatcagtaaagggacaattttttgtcataaggaattc

SEQ ID NO: 203414 - DNA, 1000 bp, Homo Sapiens
gtcagtgtctacggaaacttgaggactgatgggaaaattattttcagaaatggaggtgaatgaaaacagtcatggtggaatattttccaaccataactcttgccttctgttcatccatccgctcagagagccaagtgtacgtatgtagtcttctagctactaaattccattcctagatagtcataggtcttccaaggcccaaaggcttaccttgatttctgtttttttggataagtcccagtcaaatggctgccacagaagacagaaagtcatatatagattctccctttcctcctcattgcttcttcccttctctcacccccatgccccattccttatctttttactgatttctctctccgccctcctcctagtcatacatctacttttttctagtattcctagtttttttttttttcctcacagttgttcatggctctttgcacaccactgtctaagtctgaagaagtaaaaagagaatgaaataagtgttgccaagcaagacccttctcttctttccatgtttggaaaacaacctcttggaatacagctcttgaaatgtattgaattatctttgtgttttgtacacagcccagtgtacaaaactgggattgagggattgaattatcattgtgttttgtacacagcccggagtgctcaagacattccaaaaaggttaaatgacagcagtagcagtcacccctcttatgcaagacattctgggcttcatccaagataggtggagcattgctgtatcactctcatgcattcatttgctcatttattctctaaataaagagataagcagaggccagattccgttaggccttccagaccataatgaagaatttggttttgattctaagaactgtgggaggccaggggactgacatggtctgatttgtgtttttaaaagctatctctggctgcagtatgagaatggatgatagaggtcaaggtcaggagcaggagatcagttagagaagctattgcagaattc

SEQ ID NO: 203415 - DNA, 1000 bp, Homo Sapiens
actcagcagttccttaaatcacaaacaatggtaggtctattattttctccctggatacactttatcttcatccatttcccaatgttttgtcatggctatttctactcaaacactaatcccccattctctaatcaccattattaatcatatcaagtcaattagtttggtttcacactaataataatgacaaaaagcacatgcagagtaatacacaaacaaaaaaagtgacagttacttttttgtgacaagagcaatattgggtatgaactgattaatattaatctgaggtgttgctactagactgagggtttccaggagtagtactatgacatcatgtaaacacattcagttttcatgttggaatctaagatgtgtcccttctcccaaagggattttaatcattcttggcctctctactcactcttaatcaaagtgtggaggaggtggcccccacagcagggtttggaacctacagaccctggcccctgagacatgcagctgtcagacaagccatcatgtcaaacacaggttagagagactgagcttccagattgcatagccatttccttgactactgagtaaaggccaaggctaagatttagtaagcctagccctgaagcaagcaaagaatatggcagtgtaatgcaggtcatttagaaaaaaacaatgttgggcacaaagaaaatttagatctgacaagtataattttctaaagacattatttcaggattaacatcaatttcttagcagaggaaatgaatactattgtcagaaccatatctatatagtcaatcatttcctcttttaacgtctgtcttgttctctttttacccaccacatatgtataactatgtgaaaaattatatttgtgcataataaaatgtgataactttttacaacagaatgtgattttatttttatgtttttcttcataaggtcccaaagaacttcaagtacttctaatataagctgaactgattagatttcattaatggaattc

SEQ ID NO: 203416 - DNA, 1000 bp, Homo Sapiens
ggcaccttctctggcccctttctcctgtgactgcccaggaggggctcagggcacaggctcagtccaagcaagctgctggacaccacctgctgcccggccatgagtgccaactgcggttggttctgcctcacttggctggaataatcacgctctggttaatctttcagagacctgggttgtcaccacggagtttctcattagcaagcagctcaggttaaatcaaggtcttgttatagcaactggagatctcattcacccactttcctttggctcagggagcggacaggtgctgggccctttggccctgctgccttgtggggaggctgcaatttgactttgttgggtatctgagccacagtggagatgggagaattctctcctccaagaaagaacaatcccttaggagggtcccagggctgcctcagggtttgaggtggaaagaagtgaacagtaggcttcactcccaagcccctaagtagcagactgagttcccccaaataacagctgggcggcagctgcccaaaggtctgggcaaacctggccttcctggtagccatagtaaaggtaacaaccctacccttgagggtaacccttcatttcctcactggtcctgcaactctctgtggagaggggttatttttcctctgtgaagacttgaaaccaagagatcttccatgagccagtggcagagttcgtagctgagctcaagctttccagagatgacctgtccagcgcatttttgtttgaacttgcatacaatttccttctaaaggttggggctgttactgaaacattactggacattgcccagctttcaaagacagagtgcccaaggagtttggtccctccctggggttcctggctcttctgttttcaggcttactcctgctcaacatatttggttttccacaacctgctttttttccttaggggtagagggaatgatggaagagcagtggcttggcctctgaaattgcctgacgtctggcagcaggaattc

SEQ ID NO: 203417 - DNA, 1000 bp, Homo Sapiens
tgtagatagaataatttttcttcttgatatgttagtactaattaaaatgaggaaacaaagaatccacctctaactcaagctctcactatatttgataagatctttctctacatcctagtactaggagtcctttggaagcatttttcaattaaagaaattcttccgctcatttttctaggaaattccaaatgatgtagtcaccaaaaaacaagactcttgagaatctagtgattcccaataatagaactttaggaccatataggacgtttaagataatttaatcaaactttcttattttgccaatggaaaaatgaaggcacagagttgggttttgaaaatacatgctggccgagtgtggtggctcacaactgtaatcccaacactttgggaggccaaggcgggtggatcatgaggtcaggagttcaagaccagcctgaccaagatggtgaaaccccatctctactaaaaatacaaaaaaattagccagacatggtggcgggcacctgtaatcccagctactcagaaggctgatgcagagaattgcttgaacctgagaggcagaggttgcagtgagccgtgattgtgcctctgcactccagcctgggcaacaaaatgagaatccgtcttaaaaaaaaaaaaaagaaagaaaaagaaaatacattctgtaggatttgccctgtcttccttccttccttccttccttcttttcctccttccttccttccttccttccttcctttcctttcctttccttttttaagatagagtcttgcttgggtgcaggggtgcaatcatggctcactgcagcctccaccttctgggctcaagagatcctcccaccccagcctcccgagtagctggtaccacaagcacatgccaccacccctggttaatttttgtattttttgtagagacggagtttcaccatgttgcctaggctggtctcaaactctgggctcaagtgatccatccacctcggtctcccaaagtgctggaattc

SEQ ID NO: 203418 - DNA, 1000 bp, Homo Sapiens
ggtgaactaggagcatcttttattctaatatttggtctttgaccccagctcctgacacagaactcctaattccttggaatttcctaggtaataggggtatctttgtttcaataaggcaactcttattgggctcccggatgggggctggtcaccagaaaggccaagccactgttagaagcttggcgctttcagccccacctccattctctaaagagggagaagggctgaaatgcagttaataatcgatcatgcctacgtgatgaaggctctataaatatccctgaagtatgaggttcagtgagcttctgggttggccaacacatctgagtgccaggaggtggtgcaccccaactctatggggacagaagctcctgcaatcagcacctctccagacgttgtcccatgtgtcttctcatctggctgttcatctgtatccattattttaacttttattaagacactgaaggcttggcatggtggctcacactcgtaatcctagcactttgggaggccgaggtgggcggatcatctgaggtcaggagtttgagaccagcctggccaacatggtgaaaccccgactctactaaaaatacaaaaattagctaggcgtggtggtgcgtgcctgtaatcccagctactaaggaggctgaaacaggaggattgcttgaacccaggaggcggaggttgcagtgagccgaggtggcgccactgccctccagcctaggcaacagagcgagactccatctaaaaaaaaaaaaagagagagagagaagacactggtaaacgtgtttccctgagttctgtgagcctcactagcaaattaattggacccaagtaggtggtagtgggagcctcgatttatagctcattggtcagaagtgtagatgataacctactacttgcaatgtgtatctgaagtgggaaacagtcttgtgggactgagcccttcacctgtggaatccaacacaatctttagatagatagtattagaattgaattc

SEQ ID NO: 203419 - DNA, 1000 bp, Homo Sapiens
accttgctgggtcccggatattaatagtcttggaaagcggtttctacagctgctgctttgcctgaaaatagcaatgtttttcccaaacatgcacataacactgccttctcttaacgagaacctccaaaataaacaaaagtcacccttgacctactaaacagtcatcacatggagatgagtttttatcctcaccttcttgcttgttcagtgaacaagtagtaacaagcagctcctgcgtgtgcctagatctgagctggcataccattgctgccgagactgtataaagtgcaaattgaaaaacataggagactcacatctatatcagtgaacacattttctttcctttcttacagggttttggaaatttgcccatctgcatggcaaagaccgacctttctctgtctcaccaacctgacaaaaaaggtgtgccaagggacttcatcttacctatcagtgatgtccgggtcagcacagacgctgggttcatttaccctttggtcggaacggtgaatgagtcacattttccaaaaaccctccccattctgcattgtcgcagtgcctcaaatcgttatgctccacccgctctttaaaaatcatggattagggagaattgggagtaattaatagtacagtattcgctatttttctaaacactctgtctcacctacctttgccattgtggtttgggtttttctttttttagatcatgtgttcaggatccttagagtcataatactaatttccttcctaaggcaagtaagaacataacttgggagaattcagtctgttatttaaatggtagaatggcttaggacagtggttgtcaacctttatcacacatagcacccaaaatgatgtaatcagtagggttgactgctcacaccagacaggatctgcccagtcaccccaagggctggggaaagcagtcctcaccctctcacttccccagcacatcaggtgggaagttctggcttaggaaattactgaatcatatgaattc

SEQ ID NO: 203420 - DNA, 1000 bp, Homo Sapiens
ggtatgccaaaaaagtaatgtcagggactgatctaagtagtactgctgcaactgtcattttatctcaggttacctaagctttaactagcatgctacacttcatccaactatatattttgttattttccacctgtactgtacaattactgtgtagatattaagatgctaatagagagattaattaatacaacttttaagggttagaattaggaactcagtaatgtttatgggaaaaccatttttctacaaataaggaatccacttagttgaagaaagatactttatccaaaattctgacagtattatagtataaggagtgattaatgaaagggaacaaggacctaaatttaaataacaaattcttcaagcaagtatagtttgtttttaaaatcaagtgtgtgatttctatatgattttaaaagagcttactaatttgttaaatgcagtaaaaaatttaaacaggagctagtttggagcttaaaggaaaaaatgatgctttaaaaatatttaatagagaaataatttttccaaaaaaaatagctgagttttaaaagcgattgcattaacaaaaatcaggaaaccactatattaggtagccttcctcaaaagttttttaaaaagatatatatttttattccaaaatgatttctgaaaatgctcttagcttgattagctaaaattagctccaagcaaaggagggcagtgcgaaaccataacacttagcctcgcaacagttcttgcaacctacagataactagctggagtagaagcaatttctcaagacaatcttgtctcataaatgttcattcttccatgataaaggttaatgacgaattggaaagtttattggatctcaccaagaccattttaggcacaacaaaatagggcattttaacacaatttattctttttttttctttttctacttagaaaaatcccactattcaccacatgtattcatttagtgttccattttattggtcctaaaatcactgaattc

SEQ ID NO: 203421 - DNA, 1000 bp, Homo Sapiens
taataggagacttgaacaccccactgtcaatattagaaagatcaatgcaacagaaaattaacaagaatattcaggacttgaactcagctctggaccaaggagacctaataaacatctacagaactctccaccccatatcaacagaatatacattcttctcagtaccacattgcacttattctaaaattgaccacataattggaagtaaaacactcctcagcaaatgcaaaagaatggaaatcgtaacagtctctcagaccacagtgcaatcaaattggaactcaggattaagaaactcactcagaaccacacaactacatggaaactgaacaacctgctcctgaatgactactgggtaaataatgaaattaaggtagaaataaataagttccttgaaaccaataagagcaaagacacaacgtgctagaatctctgggacacagctaaagcagtgtttagagggaaatttatagcactaaatgcccacaggagaaagtgggaaagatctaaaatcgacaccctaacatcacaattaaaagaactagagaagcaagagcaaacaaattcagaagacaagaaataactaagatcagagcagaactaaaggagatagagacacgaaaaacccttcaaaaaatcaagaatccaggagctggttttttttaaaagattaacaacaggtagaccaccacccagactaataaagaagaaaagagaaaagaataaaatagacacaataaaaaatgataaaggggatataaccactgatcccacagaaatacagactaccatcagagaataccagaaacacctctacgcaaataaactagaaaatctagaagaaattggtaaattcctggacacatacaccctcctaagactaaaccaggaagaagtcgaatccctgaatagaccaataacaagttctgaaattgaggcagtaattaatagcctagcaacctccaaaaacccaggaccagacagattcacagttgaattc

SEQ ID NO: 203422 - DNA, 1000 bp, Homo Sapiens
ccagccggtccttgtcctcagccgccgccaggtatgcgctggacgcccgcttctcctgctgggcggcctccagtgccttgtgcaggatcttcactagctcctgggcagggagagggaagaatcttgtgagctcagggagggcctgctgggcgccacagtggggtatatgttatcagtagttctcctaacaaccgtgagaggtgcccagcagcatccctgcggcatctcatcctgacactcactttctccttctctgttcaagtgactgttagctgggcacatggttccccagcttaaaactgcatctcccagccaagccatggtgaggtgtagccaagtaactattctgcctaaatgggaaatgaaaagtgagatgggcagcttctgggtcctacctttaaaaccactagatacacgctcctctggtccagttctctttgcttctggctgggaagtggcaggaactagagtggccgcctcagacccacagcagaaggtacatgttgagaaagggctgccccccagctcagagttgctcacctacctctgggttctttaatgtgaatgagaaacctctcactcgttttgggccacagtgctttgaaactttttttttttgagatagcgtctccctctgttacccagcctggagtgcagtggcacagacatggctcactgtagcctcaatctcctgggctcagctgatcctcccaccttagcctctcaagtagctgggaccacaggaacatgccaacacaccaggctaatatttgtatttttttgtagagaaggggttttgccatgttgccgggctggtctcaaactcctggactcaaatgatctgcccaccttggccttccaaagtgctgggattacaggtatgagtcaccacacccagtggagatgtttttgtcacagcagctgaacccataccctgacatatacacatccatttcagggatgaacaaactgaggcccagcagagagtagaatggaattc

SEQ ID NO: 203423 - DNA, 1000 bp, Homo Sapiens
aataagagaaagcctggtctctgaggaacagtgtctgcactggcaagacaagtgctggagtcagggagctacagtgggcatgtgtgacagcagctgggggccggcagagggagctcccacacagcccccaccttctccccactccagatggcacgccggccaccacatatgaaaggcagagggagtctgtccatcctgctgcctgatgctggctcatccttcactccttctgggagagacctgggctgagcagtcagagccccaggcccgaggatggcagtgatggtaagaactagacagaggccagcacagtgtaccacccactctgcccagttcctggctcagaagccaagataccagcatgttccagaggggtgaggaacaaggggcgcgggggctgcacgtggcaaagaagtgcagggccttggggctcagggaggagaccttatgggtgagatcaaccagaaaggggtgctcacctagcccaggacgcccacctgcccacgcacctgagagtcgacagctgtgtcatgtccatgccccaaaatccaggccagccagcctcccatcgtgtacaccccaggcgagtggcccagcctccaagcaggtgccatccctctccttccctcccactgcccactacccccacatagctggcgtggcaggacagggcttccatgggtagagggcagacgggccgcagtgtgtcacccccagcagcccgtctcactggccactccaccacagagctcttgcagaagaccttatctttttacattaatcctggctcatggcagaaaacaagatcaagagagaggtgactgaaagcggatggctttgttttcctaaaagagaaaaaggagcatttttcactcatttactatttaatattaaatctaagaattcagtccaagaaaatagggaaaatgtaaaaaaccatgaataaggatgttactgagcaggacagtttctaatttcaagaaatcaaaacaaagagtaa

SEQ ID NO: 203424 - DNA, 1000 bp, Homo Sapiens
agtgtcttggcccaacccggccctaagtgaatcagaggcttcatttttaaccaggtcccagtggatttgtgggcaccttagggtttgggcggagcgtcccacatggggtgcctggtgccaaccccacccagcgcctcgggacagccaggtgggccctggaaagactagccctcctgccactagctgcgtccctgtccccagtgtattgtacaagtaggattctcagagtgggttgtgagaagaatgggggtagccagtctgactctgggggcaggagggaggctgagtggctcctgctcgccagcaggggcaacagtgctagcttatcccagcagatgcttgacttcctgtcatctcttgcaggctcctactgaagtggcgcataactgacgctgtgtgtgtcaggacgcgaggaaaacgctgcacttacagggagaggtggtcactttgtttacggagtttggaagagacccatactgctacttgtgttttggacttaactgaacttggacatggtctgagttagaaccacttgttttggggaagtattcatgggtaacctctttgaggtctctttatctgtgtttcctttttagttgcgcatagcctaattctaaggttttggtattttgcaaaaaggtttctatagtgaaagctgaatccttactttgtgacttttttttttttttttaatgacaagctttgacttttaaaagtggaaccaaatctgttggcagaggtggcagccaagtacatctctgtaacccagctggcccctggtgctgttggcctggcaccccactgccaagggtggggtctcaggagtcaggcagggccagcacagggtggcgtggggggcaggggtgggtgggtggagggcacggaaggggttttcccatggatcatgttgtataagtgaaccagaccaccctgatggcatccacagtgatgtcaaggttggggctggccaggggtgggtggactagaagcatttgggagt

SEQ ID NO: 203425 - DNA, 1000 bp, Homo Sapiens
cctaaagatccttaatttaatcacacatgcaaagtttctttgccatgtgaaataacacattccacttttgggaatgaggatatagacatctttgatgggacattatttaacccaccatcatggaattgttatgaagattaaatatgttgagcacttacaagcattcctggcacctatgtaatcattaattaggcattaataattaatattatgattatcattattgttatgtagtgttcatattgaacccatcagaaaaaatgttgcagccaggtgtggtttgtaactgaaggaaacttagaaaaagtttaagtaacttagaaaaaggctgttgtatgtcctttgtcccccttcaatttcatttcttcctctttcctgctggctgggcagtgggtgtaatggctggagctggggctaacattttgtaccatgaggcggcccagggaatggaggccactcatggcagatgaacaaaaataaataaatgtggcaccatgagggcttggtagagcacaaccccacacccaaccttggattgtctacctcagcctgtcacacaggagacaaaaataaatttatactgtgctcaacctcttgttatcttgggcctgggtcactcacagcagaatgtaatcctatgaatactttaattttaatctgtttctcatcaatcataagagatgtcaaatgcaccaagaggccacagaatgaaatatgaaaacagtctgtgtctgcagagccaaagggctttgctgtttgcttttcaatatatgggactaagaagggaggtaatgtaatcatcccagcttgtctgaactgaggtttcatttatttcttccttttcttatcatatttttaaatgacatggttcttgatgcagcaaaaacaacatgaaaagaagatcaaactcaggctataaagtcatgtgtggaaggaaatgacgagctcaggtggaaaggactctgtgacctctttgagcccacatccctcacctttcctc

SEQ ID NO: 203426 - DNA, 1000 bp, Homo Sapiens
ttgattttagtgtttcttctttttcaggaaagcatttaaaactaaaattttctctaaaactagtttacttacatcacgaatttttatatgttgtgttttaattttccttgacttaaggaaaatgctatcacaggaagttgaatctctggattgccttttattaaatgattatttaaataattaggacttcaataccgttaagaggttttgagagctaagtggattgtgtaataaattatgaagtatgtcttaaatagtttttttttctctcagtttttgttgtagtaaaatatacataacataaaatttacggttttaagcatttttaagggtgcggtgcagtggcattaagtacattcacattgttgtgcaaccagcatcaccatctatctctagaactcttttcatcttgcagaactgaaactctgtactcattaaataataactctccatttccttctctactgagccctgtaagccacttttctactttctatctctatgattttgactaccataggcacctcatataagtggaatcatgcagtatttgtcctttttagtctggcttatttcatgtagcataatatactcaaggttcatctgtgttgtgtagcatatgtcagaatttgtgtgtgtgtgtgtgtgtgtgtgtgtgtgtgtgtgtgtgtgagagagacagagagacagggtctcactctggcgcccaggctggagtccagtggcatgaactttgcttagtataccctcaacctcccaggctcaagtgatcctcctgcctcagccctttaggtggctgggaatgtgggcacgtaccaccatacctggctaactaacttctctattttttgtagagatggggtttcgccatgttgaccagtctggtctcgaactcctgggcccaagcaatccaccttcctcagcctcccaaagtgctggaattaacaggcatgagccactgtgcccggcttccttcctttttttttttttgagacggagt

SEQ ID NO: 203427 - DNA, 1000 bp, Homo Sapiens
gcaggtctgtggtggcaaagaagctggcaagcctaggagagcagcgtgaccgtcctgcacacgtcaaggggcctgccctggtttgcccgcccgctccctggggccaaggggaggaacctcccagcacacgtgtagcccaagtgtggtccactgttcaggaagctccgcagtagccggcaagaaccccttttgtgtgtaggcttttgggattgggtttctgtcacttgcaatgggggaattctgactcctttgtggggcaaagacagtttggggacccaaggccatctggtttcaaaggctgtgcccttccccaccacatgacaggctatctcccgcatgtatgccctcaacatagaactacatttctgagaggtttttttgttttgttttgttttgttttgttttttatctgcgaaactccctttcagggaggtcatcatttgttagtctgtcatggttttcatgaccttttcaactatagccaaggctcctgtgagtaaagaatattggccaggcgtggtggttcacgcctcacccatcgtggctcatgcctgtaggctgagttggaaggaccacttgagtccaggagtttgagaccagcctgggcaacatagtgagaccccatctttacccaccccccaaaaaagaatattgaggttcagctaacagtcgttgatcatttataatgtgccacagattatgctttttcatataatactcaaagggattctgtgatgtcatagtttctgcatttcgccaatgaggaaactggggctccatgaaagtgaggaactggcccaaggccattggtaatttccacctcactgacactccagtgttctctgtgggcactgccctgaatgagctccaagacgtatatgcctgtccctggtgcctttcccttttttttttttttttgagatggagttgcccaggctggagcgcagtggcaccatctcagctcactgcaaactcccctcccgggttcaagtatttctcc

SEQ ID NO: 203428 - DNA, 1000 bp, Homo Sapiens
ccaacacattagtgacatagaagggtccctgctgggcactgctggcctcttccataagctgagtatagatgtacccagccgaagacattataacaatgatgttctttccctcctcattgaaaaggaaggtaacatctcttatctttgagcttggcaggagaaaatagaaggttggactcaaggcatcaacacacaggtcataaatctgcaggatggaagaaaaattaaataagggaaatctatctcagtcccatcccccaaatatcttagtgaatccaaatagccggaactgaccaataacaggcattcattctccattcagtaaaaaaatggagtgttaggcactggtcttataaagatgaacagaacacctttcactctccttcaaggaatgagtaggggacagacatacataaataaattctgaaacaagtatggtaataggtgtgcacttggtacagtgagggtagaaccagaatcaattccctattgcctaaagacagaaagctcctactcagcaacatagcaaaagtgacaaaatatggcttgttatcatttttagagacagggtcttgctctatcacccagattggagtggagtggcgtggcatgatcacagctcactgcacccttgaactaagcctcaagtaattctccacctcagccttccaagtagctggtactacaggtgaaagtcatggcacccagctgatttttttaactcctgggagaagctagcacatagtgattctggatttaaaagtagaaaaattctaggaccatatcatcaaagaactgtaactgtaccttaacaaagtctgcggtgacaattgctaactcggtctgtgaaccaggtaaccacacggctttgatgatgaagttccccgttgccaactgagggtgcaaaaccaagtgatccgaaacagagcctgagctactaaaggtgagcacatgacagtcctggacaatgtttaagaaacaaaatggtgaaaagatgatc

SEQ ID NO: 203429 - DNA, 1000 bp, Homo Sapiens
cccttgtccactgaggtgcatcttgggggctcggatccagcagcacaaacatggctgccacacgaagtactcagggaaggggagtgggagatgaaactcaaaccttgttttctatattttgttctacctcttaccgtaaaccctccttcctatacacccagaaatgcctctgcccaatagaaccagctatcttagttcatcctgtgttgctataacagaactgagactgggtaatttataaagaaaagaggtttctttagtttatagttttggaggctggaagttcaagggcatgaccctggcttctggcaagggcttctgtggtgcatcttaacatggtgaaggtcaaaggggaagcagacaggcatgaaccccaggggtattctggctttataacaacccactgtcaagggaactgatccattcccatggaaactaatccagtctcaccaaagcgagaactcactcaatgccacaagaatgacatcaagccattcatgagggatctgccccctgtgacccaaacacctccctctaggccccaccttccaccaccaccacattggggatcaaatttcagcatgaattttggtggggacatattcaaaccatagccaaacaatagcaccagccatctcattgactgccacaaactgtattccccatccctgatgggagaatattcaaagtcctgttgagctgcagcacgcagaggctcacgctccccagatatgaatgctcaccagctgccatttgtggactaagcaatcagattaaaccatgcacaacacgcccagtatacaatactggaagaaaaacaagacaatggcaatgaaccattcctctttagaaaaagaaatagggtataggaacccccatgtatctctcatccagttattagccattagtaatgagtatataatgaggggcagaggaaggggaaatgggactgtttaaatccagacctgctcaaactaacataagcaaacagggagaattc

SEQ ID NO: 203430 - DNA, 1000 bp, Homo Sapiens
aggtttatttggggtatcttaaaacccatgaataaaaagtggagtcataaggaaaatgcagcttgtatggatgcttaattaggggaatatttttcactttggaagtaaagtatcctaatttcttcagaagaaaactaccctgggaatatgcagttctctatgagaaatcatagtgtcatctttgttttttttttgtagtactattatgagtttatgttgtaagcacatccaagatcccatctgggtttataacccctttgtcttaataactcaaagttttcctaactgtgagtggatatattcaatgaggagaaacattcccagtctctttaatacccaattaaagtgattgttccctgagacagacacagttgtaccatttgcaagcaaaaggaaagacaatgaacaaacttttgagcaaaggctttgtcttatatagggatttttcagaacagcgatttattagggaactacgttaaaaactttaaagtgctacaaaactattttactgacttgttcaaaaatattaagaactgcagagtgctttggaaatggaaatgcaaagatataaacgctaaacttcaaaataattacagctaaaaagtaagcttttaaaaagtacttggatgccaaggaaaccaaagtaattgtgtggtgacttttgaagcggctttttaaagttataataattgaaagcttatgtgtttacacagatcttcagattgatatgagaccaagctctcatggcttgacaactgaaggagacccaggtttcttttttttaacttgaattggctacaatacatattttatttccaataacctattttggttatgacaaaagatttacacatgtatatagagataaaatatctttaattgcggtatctttaaaaatgagctttatgggctggaaattactttcattttgatgtaaagagcccaggaaaataagcataattactaatgccttcctaacttacccttgattcttgaattc

SEQ ID NO: 203431 - DNA, 1000 bp, Homo Sapiens
aggcctggccaccttctcctcaggacacgtggtgccacagcagaccccgcgtgaagccagcccagtgtctaatccttcctccccagctgccccatcctgaccaagtctgcccaggagaacactcacctcccgctgcccttgcaactcggcctggccatgcctcccaattccagccaaggaaccgagagagaaaatgtgtaggtgaggctgcttttcttaaaacgatgtttatttcagggtttgtttgtttgtttgtttgtttgagactgagtatcactcggtcatccaggctggagtgcagtggtgtgatctcggctcactgcagcctcctcctcccagattcaagtcattctcccaactcagcctcctgagtagctgggactacaggcatttgtcactacaaccggctaattttttttttttcatatttttagtacagatggggtttcaccatgttggccaggctggtctcaaactcctggccttaagtaatccgccccaattcccaaagtgctgggattacaggtgtgagccactgcaccctgccttttatttcagtttttgaacaggaaagcacacatttcaaagtcccaagtacgaaaggaggtacgtgcacagttggctcgtttcccacccccgatcccttctacctgtctccctcctcttccagcttcacttaaaggcaaatatttgcttttttgtctgcttgtttcccttgcaaatacaaccgaatgtgtgtgtgtctatttccttccttcttttcttacctatgaggctgcctatcagtacagctatatactctagatctctacatgttgttcttgttctttattacttaatattcttgactcttggagatcactccatacctgtatgcacagtgctcctcatttcttttttactgcacggtatttggggttttttagtttttagagacagggtctcactcttcgcccgttcatagtcccaccgtgttcctctggctggtctcgaagaattc

SEQ ID NO: 203432 - DNA, 1000 bp, Homo Sapiens
aaatacaaggatgaacaaaatatagcccaaggatcttatagctgagtattttgctccaacaatgtgaacctgatttgtgtagcccaaagaaacataatcaataagggctttttaaatcgacatttaaactccattcttgcctgcctaaaactaattcagatcatctgactctcttagtacttcaaagcactggaggagggaaagtaaaataaaatatttacctttcaacaattgtgaaggtaggttttatattcaaaaactaaaccacccaaaggcaaattaaaatcttagcttttaagtctctcactcttttctacaactcaataaggatttcaaaaatcttataatctagtctcagtggaaatccactacactacactttgagaagcttgaagccagtcatttctttctaagcttctcattcatgtactctcgggaggcaaatttagatccttctctttccgcaaaggcagagctgagaccaatttgtgcatgactgcatcaccaagccaaaatccggcacagggctggcacatcataggacccagtgaatatatgttaaccatcacaacttgccaagtactttttctgccaaatggcttttctcactgctaacctcctgccaaacctctgccctagaaaactctcatctaattgcacacaaagttagagctctacaacctcagggccttcacagaattatctctgcccctcctcaccacagctgacacatgacctaaggacactgctccctggtggctccttcaagtagaggggctgctctttttttcacatcaccatgtgctgagaggcctggtggagtagatcagcattctcttctcctgatactaccaatgatccttctcttctcagaaacttacacaaactggttgcactcttattttattgctatcgtgcactgaccttcagataatttcctggtacccggttcatgattctttattcccctccaactcttgccatcattctgagtgaattc

SEQ ID NO: 203433 - DNA, 1000 bp, Homo Sapiens
tacttactcacaaaaggtgatacattagtaattttcagaaccagtaccaaataaagataccttccctgcactatattctacattctaagggctagggacttttgtgttcacatgcactttgttgtcatatagctgtctggcctcgcaaaaaagtgaggtaaaagcaaacactgttattagatgatgctactggacctgttacattaagaaagttatcttatttgattaaagaggaaattgtaaccccagagatatttgactgtcctgtttgaaatttggaattaattcgggaggggtagatggaaaattttttttttttttgagacagagtctcgctcttgtccaggctggaatatagtggcatgattatagctcactgcaaacttggactcctgggctcaaaggatcctcccaccttgtcttcctaactagctgggatgacaggcatgctctagcataactggctttttttttttttttttttttttttaagacggagtcttgctctgtcgcccaggctggagtgcagtggcatgatcttggctcactgcaagccctgtctcctgggttcaagcgattctcctgcctcagcctcccgagtagctgggactacagacatctgccaccatgcctggctaatttttgtatttttagtagagatggggtttcactgttttggccaagctggtctcaaactcctgacctcgtgatccgcccacctcggcctcccaaagtgctgggattacaggcgtgggccactgggtccggccgcatgtctggctaattttgtagagacagggcctccctatactgcccaggctggtttcaagctcctggcttcaaggggtcctcctgccttggcctcccgaagtgctgggattacacagatgtgagccaccacgctcagtgggagatggatttttgaatcaaagtcatgagttagtttgaccacagtttttatatcttgcaagttctcagaatattctattttctggaattc

SEQ ID NO: 203434 - DNA, 1000 bp, Homo Sapiens
tcagcctccccatacacaatttgtatgggcttatgtccctattcaaaaatctttagagtcttctcattttctagagaagaaaaattttcagcattatgttccttcactctggcaaaataaagtcttcataccagtcagatatttcttctttcatttcactcaaaaccttcgtcacatcaattgtgataatcatcaacagttactttataccttcattactaaaggctttttctaccttgagtctttgcttttttttttcttgggtctcatctcaaatttctaccctttctaaaatagtcccaggtaaactctcatcttcatttctcttaaattcccagcctccttctccctctagtgatctgacctaagaacccctggttttcacatgcactctatatgttagtatgtttccttctggtcctgttttctgcatatgtatacttacatagtatctctaacaaattggaatcataccaattaaatgattcttcatttttttcatttaccatatcatgaacattttcatgtcatatttttatatttatattaaaatatgattttaatggtttcaaaaatagtccacaccaaattccacatcttattaagcatttacatgtagttggacatttatgttgtttccatccttttgctataataaataatgctgtcctgcaccttcttacttatctttaattatggacttgagataaattctaagagtggccttcttgggaatgatttttattaggttcttgatatgtatttccagagatgttatgcctgtttttttctatcagcggtatatgaatatatccactttatcactgctcatcaactctgggcgttataatttgcttatacagtttgttgattagctagttaaaacccatttcattgtagttttacatattctggagacaaggccttagtcagacatgtgtttcgcaaatattttctcccactctgtggtttgtcccttatcacgatcttaactgaattc

SEQ ID NO: 203435 - DNA, 1000 bp, Homo Sapiens
tgttcattactttgtatcctaagcttccagaatagtcctgacacatgatcaatgctcaaaacataaatgtttcacacttgaatggtatcaaatctgttgatcttttactttttgactcctaattcggtgtggtccttagaaacagtgtttcctatcgttacattataaatatattgacttacattctcttctagtactctcataatattctttcttaaatttaaattttaatccatctgtaatttattttggtgaaaggaataaagttaggaggccagctttataattttttaaatggctagccatttatccaagctccatttattagacaatctgacatcttcttattgaaaatctggtgagatttagttcttattctgatataaatatgagctagtaataaaaaccatttttatgcctactttgccatgatacttatgccccaaagcaaaggcatatatgtaccatataaagtggttaactatagatcattaactaaattacccactaacacagtgaataacagtcgcgaataacagttagtgtccttttacttttctgtaaccaacaattatttccttctgattagaaaattgggagaaagaaaagggataggcaggaaaagaaggagtcacaaaatttcctacggtctacagagggacaagcttaggtgattaatatcacttctgtttatgttgaacgagatttttttaaaaagcaagtaagacgctaggaacaaaaaaaaaagatacttctttacctccatcttccatctctgtaggatattttcattttaattgaaaatgacagatggaaacaatggtgtaaataatccatcagaaaagaaatcatggagtagtcaaagaaattttgctagaaaatcaataaccaatatttacagaattcagagggttataataatcctgggagagattcaggatccaaactttgggttgacttatgaaaccagatgctccattagagactgaatttattttgc

SEQ ID NO: 203436 - DNA, 1000 bp, Homo Sapiens
tactcttccaaggacactaagtattttagaatgtatgctgaaacgactcaggtctcagaaacatgggtcatatccactcatgaactgctttcaaacagtaggctggaaaaactgccataatgtcatgaaagtggctttgagtccttctctttcctacccttaaatttaagtctcaaaggtgcagagtaagaatgtcttctgtggccttcccaccatcaaattttaagacagatttatttctgtgaaaccatttgacactgacagaatgtaacatgctgaaactctaagaaaacatttgtggttgttccctccagacctatcccattttctaacccccacctcctgccttttacaaaggtaaaaggttttagtttcttttctaagaagtgggagcctcttagttggtagctggaggtggatcacctatcagaccaggtaagctgataacttaaatccaagggcattaggttagggttaattgagattaatgactgacagtgattagactgctgatcaggacagctacctctttttcccggtgtcggtaaacatggcggccttgcttcatttttgatggagcatgggagaccaatttcaaccggaccttctctgaagatctgttcagtatctcttaagcagcgagcctggatgacaaacagagagtcagaccacccacccacccaccattgatggaacagctcagcctgctaacgatggggacaaaggccatttaaaatgtttaaatgcatagggtcaacaaagatctccttatcctcaacgttcttttggaaccccatattctgggagagtctatctactgtattttatgcattagccgaacacgtttgcctccttcacacttttctggggctgacaggattctctcatgctgtctacatcattccatcacaaataaggacaggtagttaatggatgggaaaacagctgatacaggcaatgccaagtcttaaagagggtttatccttggatctaggaattc

SEQ ID NO: 203437 - DNA, 1000 bp, Homo Sapiens
cagaatcaattcatttagagcatggcattgcaatagagaaagagtttaattgatgtaaggtcagccatgtggaagaactggagttatcactcaaatcagtctccacgaaggctcaggagttagggttttacacctgagaagaaccttctcatgacttttggtgcttcatgaagaagacaggagaccccaaaatgtggtcagaggcacctttttggtcttccttaaggagtgtcatagttgctaagagtcccctctagatctcttcgtgtggtatcaaaggtggcaaaaaaggaaggaagaataaaagtaaatgggataacaagtctccgggaagccaacgttttggacaatttggtggacagggggatagggaatgggtgctgcagattgggtggggatgaaatcataggggtatggaaaatggtccacatgtgccaactccaccttggataggggccacaggaccagttgagttatgagtcatgggtccagatggggtcagttagttgcaagacagtctgaaaaaaatctcaaaacaccaatgtcaggttctacaatagtgatgtgatctataggagcaattggagaggtcacaaatcttgtgacctctggccacttgactcctgagaagtaagggattatagaaactatatctacatcttatcagcattcagaccccactcataatcctaaccttatggcctttcattagttctgcaaaggtgggttagcttggggaaggggttattatcatctttgctttaagattaaactataaactaagttcttcccaaagttagcttggcctacatctaggaatataagactagactacaagttgaaatgtctcctttttaaatcctgtggggaatccaaagcaggcagttttagtgtacaaaggattttaactttgttttaaatctgatttctgcttttttttttaaggagaatttctaaggctagtcatgacactaatatgtgtctttctttcaatttgatc

SEQ ID NO: 203438 - DNA, 1000 bp, Homo Sapiens
catggtgaaaccccatctctactaaaaatacaaaaattagccaggtgcagtggtgcgtgcctgtagtcccagctacttgggaggctgaggcaggagaattgcttgaacctgggacgtggagattgcagtgagccgagactgtgccactgcactccagcctggacaacagaatcagactccatctcaaaaaaataaaataaaataaagagagagagaatgagaaaatgaactagaggtacctgatactttttattttactaaagaaatccttgagggatcttcaatatcatctgtaagctcacgggccttaaaagagaaattgttctgcacaaacacgtccataaagcagaagtgggaatacttctctctcattttattttattttatttatcttttatttttgagacagagtcttgctatgtcacccaggctggagtgcagtggcacaatcccgactcactgcaacctccacctcctgggttccaacaattctcatgcttcagcctcccaagtagctgggactataggtgtgcaccaccatacctggctaatttttgtatttttagtagagacggggtttcatcacattaaccaggatggtctcgaactcctgacctcaagtgatccaccctccttgggctcccaaagtgttgggattacaggattgagccaccgcatctggcccctattattttatagaccagcactacccttctaacaaaaccagacaccttttagcaaaacaaaactacagaccaatacccctcatgaacatgaaactaaaaattcctaacaatggcctggccgttgttagaaatttcttttgagatggagtcttgctcttgtcacccaggctggagtgcagtggcatgatctcagctcactgcaacctctgcctcccaggtgcaagcgattctcctgcctcagcctcctgagtggctgggattacaggcacccaccaccatacccagctaatttttttgtgtttttagtagagaca

SEQ ID NO: 203439 - DNA, 1000 bp, Homo Sapiens
aacagcttgctgctgatctttttgttaagggatgctgtcaacacagatatgtctaaaattagagatcagaacagaaggagggcaggcggggacagacaatgcaactttcactcacaatcacagaactcaactcccgtgtagttgcttggccaggctcccagttgagaagggagattttgtaatgtttccagccttcattttatggcctgttggactttttatgatctgggctctcttttaccttttttaatggtttaggttttttttattattgtttcatattctttagcctggttgactttttaatctcagcctatagaaagcatcacaatttaaatctcttagaaattttcaaatcgataagaagtagcaggaattaaataaggaagggcagttgagttgtctatgaatgtagctgtttatgctcaatcttgctcactctccctcagaacatttctaaaaggaattattagcctctaggtgcttaataagacatgaaagggcccttaagttactggccattttttcttttttctcttttttttttgagacgggatctcgatctgtcacccaggctggagtgcagtggtgcgatctcggctcactgcaacctccatctcccgagttcaagcgatccttctgcctcagcctcccgaatagctgggactacaggtgcgagccaccacgcctggctaatttttgtatttttagtagagatggggtttcaccgtattggccaggctggtctcgaactcctgacctcatgatccactggccttggcctcccaaagtgctcggattacaggcatgagccaccacgcccagcctggccattttttttgaatgtccacatttcctccaattccacagttacagaccacagcagatatgttgatgcttatttaaaaaccagtgaagcttgctgggcatagtgacacacaccaataatcccagcattttgggaggccgagttgggtagattgcttgagcccaggaattc

SEQ ID NO: 203440 - DNA, 1000 bp, Homo Sapiens
aggaaagcagaggaattgagaaatagaaattagttcaaagtaaaggggaaaaaaatcactatccaagttggagttcagcaaaagaatcacaaagcagaggaagaaaaatactaatttgctatgaaaagtaattccattgggtaagtgaaaagatgcttgtgtacgtatgaatgatgaatgagaaacaagaagaaattgacatagaaagttacttatgacaattaactaaaaatccatattttgccaataaccaacaggcaaagaaatgagcctctctaagcctcagcttctttctcctaaataccataccctgactcttctatggaattcaggatgccacacaagtatctagcaaacataaatttgaagttcagaagaagcaaggaaaaccaacattcaatgttcaattcaaaatagccagtgagggagaggcaccaattagaagcagctgcagtccatggcactcatggagaggagtgaaaggggtgagtgaatacagcacccttagctgaaatacctaggttatcgcattggaacggactaggaaaacaactcaacccatggagaatgaagaaaagcagggtggggcaatggcccacctaggggcatcatggaggcaagggaacccccacccccagccaagggaagtgatgagtgattgtgtgacactgggaaagcatgcttctcccacagatctttgcaacccacggatcaggagatcccctcgtgagcccatgctaccagggccttgagtctgacacacagagctgtgtggagtcttggcagaacagctgctcaggcacagacacagacccagaagctttacatactccagccccaggatatccagcaaatatgtctacagctcaggcaaggcaagaggtctgcacataccctaggaaaggggctgaatccagggaaccaggcagcatcattctgcgggccccacttccactgcacttcacaagataagacctactgtcttggaattccgcggatc

SEQ ID NO: 203441 - DNA, 1000 bp, Homo Sapiens
cccgccctccctgtccagggcaggagcacagtggaccacctgctgcccctgtgtcttggggcctctctccctggaatgtcactgatggaaatttaccagtccctcagggctccctttccatgtcaccctcatgaagctttctctgatagccccatgctcagtagatcttaccacatatgacttgtgttaccatgactatatctatgcctttctcctcctcaccaacttatgactctcttaaggatcaggactatgtcgctcatttttacatttcctatagtattgaaaaggggcatgagagatattggatagattttgagaattgagtgagtggagtttttgcgttgacacctgcaactgcagcaattacagaagcagtgggtcatgctggctgccaggcagtacttcttcagagctggaaataacccacaatgagacatcaggcttgggtgcattgatacacaaaagtcgctcaaccctgaccgtgccagtatgtcttcatttgggaaactttttcatcccaaagttccccagcttgaaaatgccttttaagcagagcttattttatttcctttctggaatccttgacatagagtgaaggaactggaagggagtttcaagatccctgggtgacctcctcattttacagagagaaatctgtcaaaaactcacgccctccccgtgtcctctcctcagtgctttggcccactttctgcttcctgcaaggtttattttcctgctaattctattccctgtgacctcaagcaacatgcctcatttcctgagggaattctctctttttctgtaaagtttctgctcatccttgggcaagaagaggagcagggaagggtgggaacagctgccacgttgagggactgcctgccttgatgatatccatagctcgcagaagaatgactccaacaaaaaagtcacaaagaggactgggtgcggtggctcatgcctgtaatcccagtgctttgggaggccaaggtgggcagat

SEQ ID NO: 203442 - DNA, 1000 bp, Homo Sapiens
acagaagaaggctcaggtctccctgacctcccccttcttccaccatttctcccaaagaagctgaagtttctttatctacctaaaatccagacccaccaaggagaacaactgttctttcttcctctccctattatctcattatctattgcagaaaagaagaccaagatgtgactacacctgaacagactcttttacaagcatagtgactgtccaaggatcatctgcattccaaagaaaactatttactatttacaaggtaagctctgttccccatccaatcactcttcatagcactcacttattgcccttcaatagaattcctcatctcccccttccaataacctgttttaccagaatccaagcccccattttttctgtaatttcaaaatgatatataagttcctgtagctcgttgggaagttggatcttcattctgaataaaaattaaatataattttatgccttttccccagttaatccatcagtctcattccagtgatttttcagtgaacctttaggaggccaatggccatggtcctgagagatgttttctacacaaacccccagctgaccccttctcctggaaacccaagaacaactgctcatgccttttgcttaatctcctccccaaagcctctctggaatcatttgtcctcagaatgcattgactctacattcctttatgttgttgcatgtcctgactcctgccatcttacctgccatgctatggggcactgtgtgtccaccttgcccctttgagccttcactccttgaaggcagtatcactgtctcatttttcatcgtaccccacggtctactccagggtgaccaccacctagaagggacttcttaagtgtttgttgggtgaatgagttgtctacagagcttcaaagaagaaaacaaatgttttgtggtcagttgagttctgggtaaatagacagtggattggccagctttgatgagggtgtgcagctccttactggaggatggtggagaattc

SEQ ID NO: 203443 - DNA, 1000 bp, Homo Sapiens
caggagaaaccaggcacaagcttccagttgtcttcttgcagtggagttgtatggacagtgcttatttttcccagcattgatatgtgacaatgtgatggagtattgtcaaccaggaaagttcaccttagcctaggtttacagagttttgattgtaggtctgttacgtaggtgtggggcacccatgtggccaaccttggttatttagtcttcaggtcattcagaggaaagtctgatacagcatggcccagacccccactgtaaatcacattgctagcataaactccatggcatggcccatggcccaaggccccagacataccaagacaatctgatcaagtgggacattccaatggcttagagcttttctccaaggaactagccaagggtcagccttttctttgtaatgtgtagggtttgaataacccaggcctgttgagttaacccattactgcacatgcattgtatttaacatgctaaaatcctgccaatctttggcatctggattatcttgtatctagttacgatctcccttcacctactggcaataacttctaactctgtgtttcaaacgcactttatattgaacgtgtcttattatcatatatgcaataaggtgaggagttataaattaagatgatatacagtgctttccctcagcacctgggacaacagcttgtgtatataacaaaggtgatacatatttattgaaatgaatgattgttgtctctgctcatgttttggcattcctattaactggtgaagtcttcataattagagaccatgttgtgttcatttgtcttccacagagtttaaggcctttcatggatcgagggaatatatgtatatgtattgaatgatatattcatgaagcattgcttgtatgtaaaatctcatttaatcctcacaaaaccctatgtagtaattactgttattattttaattttatagataaggaatatacctatagccacttagccagcaagcaacagaactggaattc

SEQ ID NO: 203444 - DNA, 1000 bp, Homo Sapiens
tgagtgaaactggtgagtttggtggtgactccggggtgcctggaactgactccagctgaaatgtgggcgtggttggagagtagctgggacagacaggagagtccctgagggctggtgaagacacgagagagactggggagtaattcagtgaaatttgtgagtttggtggtgattcctgggtgcctggaactgacgcccgctgaagtgtgggcgtggttggagagtagctgggacacacaggagagtccctgagggttggagataaagacgtgctagagactgaggagtaactgagtgaaattggtgagtttggtggtgattccggggtgcctggaactgactcccgctgaagtgtgggcgtggttggagagtagctgggacagacgggagagtccctgagggatggtgaagacatgagagagactggggagtaacgcagtgaaattggtgagtttggtggtgacttctgggtgcctgcaatggactcccgctgaagtgtgggcgtgtttggagagtagctgggacagacaggcgagtccctgagggttggagataaagacgtgctagagactggggagtaactcagtgaaagcggtgggcttggtggtgatccctgggttcctggaactgacccgcgctgaaatgtgggcgtggttggagagtagctgggacagactggagggtccgtaagggctgggggtgaagacgtgagagagactggcgaggatctcactgaggtctgtgagtttgtaggtgtttctggggtgtggggtacagactcccgctgaaatctgggcgtagttggagagtagctgggacagacaggagagtcatgggtggctgggggtgagctgctggatgatggcagtaagaacatatggtatattattgatgaatgaggtgactgtgaagaatctccagaggaggtcacgggagaacacaatgacatgagtgactgtcctgcttggttaggaaagggaaacgtaaagttgtggaattc

SEQ ID NO: 203445 - DNA, 1000 bp, Homo Sapiens
ttgtttacatttttcagaggttcaaaattatacagagctggccacgtgcagtggctcacacctgtcaatcccagtacttcgaaaggccaaggcgggcagatcacttgaggtcaggaattcgaggccagcctggccaacatggtgaaactctgtctctactaaaaatacaaaaattagctggacatggtggggtgcatctgtaatcccagctactcgggggctgagacacgagagtcacttgaactcgattcaagcgattacagaggtggaggttgcagtgagcccaagatcatgccactgcactccagcctgggcaggagagtgagaatccaccttaaaaaaaaaaaaaaaaaaaaaaaaaacgaattatacagaactttttaagttgacttccactaacccctcacatctttaaaagcactgatttaaaaaaaaacgttaaggccttcagtttggcttaccagagagtttaaagtggaatttggctctttgccctttggtaatgccacgaactaagaggcaaagaaatggcccaagtagcttgcttgtggcttttctcccagaaaaatgagtgctaagaagttcttaaaacacttccatagtacaaatcacaaatcagagtgatgccctttacccaggaaagaaaacattaatgtggttggtcttgtttttgttttttgtgattgagtctcactctgttgcccaggctggtgtgcagtggcacaatcttggctcactgcaacctctccctcctgggttcaagcaattctcctgcctcagtctcctgagtaggtgggactacaggtgtgtaccaccgcacccagctaattttttgtatttttagtaaagatggggtttcaccatgttggtcaggctggtctcaaactcctgacctcaaatgatctcccctcctcagcctcccaaagtgctgggcttacaggcatgaaccaccgtgcctggccgaattaatgtgtttttaaaccaaaatcctgacatttat

SEQ ID NO: 203446 - DNA, 1000 bp, Homo Sapiens
tccttccacgtccttcatggtgactttttgttttctttccaaatggaaccctctattttattttctaatttttattttgttacttgacaaatacaagttgtatgtttatggtgtacaagttatagtgacttggcagtttttctcctcggccatccctgaccacaaggtggcatttagtggatggttaatcatttttatccactgaagcttgtctttaagaatcttctgtgacccccaagacctggggtttcatggccccttgctttggaaaaaacatacatggttcattgtttcctaaatactatcctctccctctccgctgccactcccccagcttccatgcccatataccctaaacttccccacctcctccacccccaatactgtgaacatgaagcccaaagagaccggtatgagattacaagttgggaatcctaggttctcttcccaactcttccaagcgtctgggaacccaaagtattttctaaaccgctgtcttggcatttctgtctgtaaatttaaaaaataataataatgacttggaatattggtaagatgtcaccagtgaagaaatgctgctagttcttggagaatgaaaaaggctgtctgcatgctataagccactgtagctcttctacataagccacagttgttcttatgtgagataatgaaaatcctctggtaaggtaccttcaaactggaatacatgtttccttagacatgctgccttgctttagcgccatcattctaataccttgcttcaccactggaggggtgtagcttctcccaaactttcttcccacatcttggtcagcctcttgagctgcgacacacacctcgagagtttagcaaagcattttgaagctttggttccatccttcccaaaagttctcttggttcactgtttttcaggaaccttagcttatatggatagctcgctttatgcaacagatgtgttattgggagtggacaatacattttgtgtgtgtgtatggaattc

SEQ ID NO: 203447 - DNA, 1000 bp, Homo Sapiens
cagtacaataacttcttactcaccagattgttcggaccacagttctggaacccagaaatctctgaaaacaatgttatttcttgagtctggcataaattaatttggcagcaaaacctgaccggatctcacatagctgcctccagccttggttgatctgttggctgtgaccgcatccatgttgcagggatgttaccgcacttcaccggggagcgcctggcccctccgtggttgttttgtaaacctctggcatacccattagcttaggttttcaaaaatccagaaaaagtttgaattccaaaacgtggccacaagttgtagataatacttcatataacgtactgtgaccaagattttaactgccctaaggattatttgcattttaaacagaatctgttaaacctaaaggacttttttaaaatgctgtagggaatgaaaggacatgattttgaggcaagggtgggaagagaagcacttccagcttcctaagccttctccagcagctgccccaccccccggccccatccccagaaggtccgggagagcaccatggcgccatccttcctaggaactgccaaccctccctccctccagggcaccgagttgatagtcttctcctcttggtaaaattaactttctacattaaaaatgctttggtgcctttgttcaagtgaaaaacttctcagcccatgaaaaatgggaggtcaaagccactaagccaacattatggccttcataaaatctcctaagccttgccttctttccatttctttccaacatctcaggcgtgtttcttgttagtcacggtgtttccctctgccttctaccttaaagtgctacaccgctcctgcccgtgtgggaatgggcaggtgagtgagctggcatctgtggccaggtggctagcgtctgctgaaaggcaaaggctgccttgtgcatttagggcaggcggctcggtgcagacaacacctcgatgacaaacatgacccctttctgcaggaagctt

SEQ ID NO: 203448 - DNA, 1000 bp, Homo Sapiens
tttaatctcacagattacatattatcattttaaaccagaaatgtttgttaagatttacccatgtgtttactacattttttgcttataattccttcccccaacccacccccttcatcacttctcttaggtttcatttagtgaggataaatcgatggaaaactctttaagctattgttcactggaaaaatgtccatttcccccttgttcttaaaatggaatcttgctaggtatacaatatatttttgccaggtataaagttatggttattttctctcagcatattaaagatgctcaattgttttctgacttccactgctgataaatcaatgctaagtctcattgccatttgtgttgaaggtattctttctccaagagtactttacgactgttttttaagatattttctttgtttttggtgtttggcaattttatcataaagtgttcagatgtcaacttatttgtatgtgtttattttgtttgggggtttggggctttataattttgtggattggctttctcatcagaactggaagattctcaggctgctattcctgctctgtactctttctctctaattccaggtttgagattaagcatatgttatacctttgttctgtcttttccatgttttagcttctctgtcatcttttctatttctatatttctatgtgctgcagtctagataatttactcagttttttccctctggtttcctgtgtctaatctatctgatctagctcgattcttatatactcgttcccttttatttatttaaacaatattttatgttttgtgtctaattttaaagtttgaagtctttgttggccgggttctcctctctattgttttcactggttgttgttcatggtgctttgtttctctctctctctctctctgtgtgtgtgcgcgcgtgtgtgtgcgcgcacgtgtgtgtgtgtgtgtgtgtgtgtgtgtgtgttttgttttgctttgtttttggaaactctattagtgggaattc

SEQ ID NO: 203449 - DNA, 1000 bp, Homo Sapiens
tggcccataaagtgctttgttaaaaaaagattttttttttttttttttgagatggagttttgctcttgttgcccaggctggagtgcaatggcacaatctccactcaccacaacctctgcctcccgggttcaagcaattcttctgcctcagcctcctgagtagctgggattacaggcatgtgccaccatgcctggctaaatttgtatttttagtagagacggggtttcttcatgttggccaggctggtctcgaactccctacctcaggtgatacaattgcattgtattacattgtatggatgaattagaattcatttaacttgtcctcttttgctatttgcccttttccctaatatttgtaattataagcaatgctttggtttgtaacactgggcacaggttgttttgcatgtgtgcggttccaacagtagggtaactcccagctgctcagttgttgctttgccactctagatgcttggccagtttctactcccatcagcctcacatgaaaagttctgttaccccattcttgttctgtccaccaaagatgaaaatgatatctcatacttttgattttatatttatctgataagtggttaatatgtctaaatataatttgtgtcttttctgttaactatgttctcttcccttcttttgtaggagctctttccttatagaaattggctctttgcctaataggtgacttgatatgtgtgtgtgtgtcagtttgtgttttgttttctatgaaaaacttaaaaactttttatctagttgagtttattttttcttttatgatttctgggttttgtattacaaaaatttttctcattcctagagtacaaaaattatcctagtttctttaggttattttgtggattcacatgctttaaaatcatccatctatctggaataatttaagtgtgaggcatgagcaacgggtctattttaactgttgagaagtcttaggatttgtcttgatagacaaccacccaggtgaattc

SEQ ID NO: 203450 - DNA, 1000 bp, Homo Sapiens
tgtggcaggaccatggggctcgagtgcagccccggcgggaacacagaccattttagttttgattgctgttactactactgataactgagccaaagtagtgatgctacttgaaggaaatttctgcaacccgcagtcaactatcatacgattgtgagccatgcctttagtgaagaggaacaccaagccccagcacttgtgccagggagctctgcctgaggggattaccagtgaacttgaatgtgtaaccaatagtactcttgccactatcatacaccagctgagcagtctgagatctactcatttctccttgggcagtcagaaggtggaggagaggatgccctggctatgaactatgcaaggcttacaagggctaaaaggctgcaccatttacatcaatgacccccttaagaaccatttgctgcaaaaacttcatcagcacggccaagtacagcatgtggtcatttctccctgagtttttgtatctgcaatttaccaaacctgccaatgctttcttgttcattaatgtattgcagcaaattccagatgtgtctccaacaggaaaatatacaactctcttgcctctgatttcagggaccaaagaggttatagaagattgtaaatgacatatggcagacaaaatagttaatacaaagaactgagagttccttcctacagacatagtcctgatgtcttccagtgaacctcagttgattgttatatagcaacgcctaatctggatggagagacagatctaaagctacagcaggctttgccagaaacaggttgaatgcaatcagaaaaccgtttgttcagcctatctggaaaaatagacctaatcgtcatttcttagcttagatggaaccttgagcctaagtggtaaaagctctgttccaattgggcctgaccaggtcttgttaagaggtatacagctgagaaatactcagcggattattggcatagttgtttgcactggatttgaaacaaaattcatgcagaattc

SEQ ID NO: 203451 - DNA, 1000 bp, Homo Sapiens
acggcagagggaatcccgcaccttgggaatttaaatcaggtcagtcgggtggggatgcggcacctgcattttcacaccctcctggtgtgttcccacttggagtgattgcgtatggaaagaagcaccctctcatcaatcccttggaaaaggtaacttctgactaattcactgagtcctggctcatcagctgaaagaactcactgatggggcaggtggaatgtcatgtttccatggggcatttcaggggtggggtgcgtcatcgcttccctgtgtggatctgagaaggagagggggcaggccaggtgcagagactggaaacccaggcttggactagaagagtgttccaagagtaagcagggagcagtgatcagtagccgaggtaaggaaggaccagcggaagcactggaagccctgatcagcaaagacaaggtcttgctgcccaaagctgagggcagaggtcactagcctgcccacagctgcattccacactcccaacggtgactgacttcttaactgaaaggactaaatgcaggagcgtgagccatacccacctgaggcagagaacacgaaaaattgagacaaaaagatttcaggataacacagtgttaatcagaaccctttaatcccctcaatctctcaatctgttgctgaagattttaacctactgcagggttcagctcctgtgatgtgcgtgctagtgttactttgtgtttcctaaggaacaggacattcacaaataccttgcagcttcttttctctcaaatcccactgcatcactcagagagctatttactggaaaacaaaaccatttaaaacattaatatgctatttcaggaattgccttttatttaatgcttcatggtcctttgtcacttcatctagttttaaaaacaaacattttaagaaatgcatttcaaccacagcaaatgagcaggaggcccacagaaagctattactgactgcacttagcatctctggacttagttcttcaccacgtttc

SEQ ID NO: 203452 - DNA, 1000 bp, Homo Sapiens
ggctacagattgagaccctgtctctaaataaataaataatttgggcaaggaagatagtcaaagtatttaacaaatactataacatagcataggtactgactactcaaaaaggccaccggcccttcgccttcctcaggtgtacagattgtcagcctcagtggggaccctgtgaggtaaatttggaataatgaaaaaaagtgtcttcccacaccatttatgttacccagtcatagggacataagctcaaatataaacaacttctaaaaaatatttagatatttaactgatgggtggttgagagaaaacaaattctgtgtgatgaacccttttccttttgaagttgatgttagagaaaatgatcatgcatctgttcctgccttaagttagccccccatcctgcattggaagctctctggactcttcttgtaggtcttctggcaatcacaggggaatgaaattgctatttcagttgttttacatccagctaatatttattgtacattgactgtgtgccaggccttatgatacgtgctaggaaaagaagagagtgcaaaacagaccctgtccttgtcatcatggagctacggtttagtgggggagtcagataatatcacacaagtagatttgtaattccaaactgtgcttggttccatattggaaaaatacctgagatatttctctcctttcctctagattgttcatacagccactcactctaagaaacctgcttgcttttctcttcaggagcctgcagacagggggatttgcctgggaaggagaagtagaaaacaacgtgtacagccaggctacaggggtggtcccccagcacaagtatcaccccacagcaggcagctatcagcttcaatttgccctgcagcaacttgaacaacaaaaacttcagtcccggcagctcctggaccagagtcgagcccggcaccaggtaattcaagataagtcttttccatgtgttatatcttcctgctgttggtcaaaaaaaaaa

SEQ ID NO: 203453 - DNA, 1000 bp, Homo Sapiens
gctaaagattacaatttttcatttagggaactgtgaatattttctgtgaggtttacagaaactagtgtatccttttcactatgttgaaaagacaatctgaactttagctatttatatttcagtattaacacaccttcactgattgagagtcttgagcccttctctacttttataaagtgaatcctatttccaagtcatccatgtcttttgaagtctgtttcttatataagtatttattactttactgtttagcataaataggagacagaaaaggataataaactactaggtcctttattcctattaaaataaatttataaatcccttgaatcaactgaattctaagctttttgaagaggttgctgatgtagtgtgatcaaaagaatctaaggagaacctcatctccaaaatctgattggagctgttcaccctctcaaggacaagataaagattgacttcagagatatatcacatcaagctagaggaaaaaaaaaaaacctcaaataaaatttttcctcattcgaagggatccagggtatccttgggttatgtaggagggaatcatatttgttctaatttacctgaatgtacttgtgtgtgaatccaatcttgattctaaacaccaaatcttgtcaacagtagagaagtatagtaaggagttcctgttgtcaatcaaatgagggtgtgaaacatttagaatgctctgtgttacacttgaaccatgtataaatgtaacctgtgtatcttttttttaattagcttttctgaatttaaattatattgtttttctttgtattgttagcaaaatgcatcagaactggattttttttctcatctgaacataatataaaatttgaaagagtattgtgatattaagcactttaacatacatatcagacaaactgacgtgggtttttcaggtttgggagtacatttaaatatgacttttcatgctttgttctttacaaataaaactgtgggattgataaaaaaaaaaaaa

SEQ ID NO: 203454 - DNA, 1000 bp, Homo Sapiens
catgagggggctcgggggacggtcgatgtggggggctggctgaaccaggctgacccttggggcctggctggggggtttgtatactgagccgcaatccctgggggccctgtccacgggcctggagggcccgaaccccctgccacttccgaccgggaagcgtgtcccttggctgttgtgtttgtggtcacctgccaccggggccccgtggatgggcggccacatgctgtccccctgaagtccagtcggccgggctggtcaccgtgtatctgagtgtccccttgcatggtcaagtgtgacatggggaagggcctgccagtttagtggctgcagacttgggactctccatcccattaggacacacttgagcccactcatgtctctggggcttttctagccagatgatgcctgtggccccagagaggtcccctgaggttgggactgctggttggagcctctcctgtgacttttcagcccaaccagcagggcccgtttctaacgagagaggcctcctccccctcccacccaccccacggccttcagcttccctgggaaggtccatgcgcgttcctggggaaatcgatacacattcggctttgttagaataacgcgaaacattaaaacccagaaaggattcttaaggctggagtagcaatcacatgaccccatttcaaatgacttcatttaagactttaaaaatactcagctgggcgcgatggctcacgcctgtaatcccggcactttgggaggctgaggtgggtggatcacgaggtcaggagttcaagaccagcctggccaacatggtgaaaccccatctctactaaaaatacaaaaattagctgggcgtggtggcgggcgcctgtaatcctagctactcaggaggctgaggcaggagaatcgtttgaacctgggaggcggaggttgcagtgagccgagatcacaccattgcactccagcctggacaacagggtgagactccgcctcaaaaaaaaaaaaaaaaaaa

SEQ ID NO: 203455 - DNA, 1000 bp, Homo Sapiens
ccctgtctctactaaaaatacaaaaattagccaggtgttgtggtgggcacctgtaatcccagctacttaggaggctgaggcctgagaattgcttgaacccaggaggtggaggttgcagtgaactgagatcgcgccactgcactccagcctgggggacggagtgagactgtctccaaaaaataaaatacaataaaagagactccaaagaactttctagccctcttgccaccacctaaggatgcaaagagttgacagcaacctggaagagccctcaccagaactcgaccattctggcactctgacttccagcctccactgtgagaaataaatttctattgtttatgagccactcagcatatggtactttgtagccctagacaggctaagacaggtaattagcaattttaggtgattttcatcatcaaaattttcatgatggcattttggagaattcacataaaccactctgttaccctcctaaaagtattgctcaaatactgaattatatttatgcttgccaaagttaatttttttccaacaagtaacactagccacttcattttgtgcttttgatacaaaagcatttcccaatccagcggctttcatcttctggcctggttggcaaaagtgtaactcacttcggcaccctctctgaaccctagtctcctcctcaaatgtaaaacagtaataaacctttcttacccaggaagccattataaggattataatcaacataagatataattctttaattatcaaagcagttgctggcatgtggcaggcattcaacagaaaccgtgttgctatgttatttttattgttaccattaatattcctattgggattgaaacccttatgtcatatcaaaacttttccatctttgacaaatgagacatattaggatagtatcttaataatatgtaagagtttagtgcttgagctattcaattattaaactttgcttccaagaaaaaaaaaaaaaaaaaaaaaaaaaaaaaag

SEQ ID NO: 203456 - DNA, 1000 bp, Homo Sapiens
gatgttttgttcatgatactatccttcagggttatgtgcttatcaatgaaataaccccagaggagtgagggaaaataacgtgtagccagttatattcaggaataactactgtaaatgatgaacgtgttaggagacctccaatatttgctacttgccaatcctaatttagttacaagaattggtaggcaatcctacttaattttggcaaaagccccgtcatctaaatggcagaataactcagagcatgtctttgaagatgctgggcgtctaccaccaccttatgtccccaccctacccaacaaaaataagtaaaaagaatatggtgtattctacaaatttgtggcatgctcaaagtttatgatcacataaaggcaagaggatacttcatgaataatacatttcaatgcaaataaacagatggttcacttctactagctatgagcctgtttttgtatacactgagttaatctactcaggctgtaggtcccagcaatgttctagagtctggtctttccctttcctgcagcttcgggtccttggacctttcctgtttcctattacttggagtgtctgtcagttgagcaccagttgttctggtgtttcatttgattctacttgtagcataatcatttatacgagctattgggaggttccaaaccctacctagatttgtgtaggtgatgtatcaaatgagcaatataccgttcatctgaaaatagtagcacacagccatatataggatatcattttctaaggactgtttcttcacattgagcagagcaggcataaatggtggttatttagtctaagtcttttatttttttatacctgattttcaacataacacgcaatgtggatgtcgagtagtgttaagaatggtgctgctcctgacaagtgtatgttaactgtttacattttctatctgtagaattatttctctattactgaacttttcctaagtaaaatgtctttgaagtctcgttatttctgaaaaaaaaaa

SEQ ID NO: 203457 - DNA, 1000 bp, Homo Sapiens
ggcccacactccttatcccttgggcagtcgatgggaccaggcgggcaccccggagcaggaggtggcaccgttgaggtggctcgggccgctggggagcccacaggggtgaggggtggggcttgggcatggccggctgcaggtcctgagccctgccccgtggggaggcggctgaggcccggtgtgaattggagcacagcatgggcaggctggcagtgctgggggacctggtgcaccctccgcagctgctggcccaggtgctaagcccctcactgcccaggcaggtggtgtgggctggccactcccagtgcggggcctgctgagccccgcccacctggaactcgtgctggcccgcgagctcggcgcgcagccctggttcccgcctgtgcctctccctccacacctcctggcaagcagagggagccggctccggcctcggccagcccagagaggggcccccacagtgcagtggcgggctgaagagctcctggagcatggccagagtggatgccgaggcccaggaggcacctagagcaagcgacggctgctagcacgttgtcacctctcaacaccagcggccctgtggctagtggtctcattccagggtcccactagaggatctgcctcctactcctggctgtaagaattgaagaagaaagaaacatgaaaagtggctgagtagtcaaagacaggtttatttcagagagtaaacctgagagggccttctggccgagttaggttgggagcagtctctcttacagactaagagtatttaagggttcagggtgggagagcttatcacaggcttgaaatgtcctgtgtctctttgtcttgcttatctgggagggagagttttgtgtctgttcccatacatcttcctgcacctgcaggcatacccccgagtttacttttagcttccctatcttagtgcacctgaaaagaaaggaatgtgcttatttggacccactgttttgctgggtcccattgtatgggtgtgaagctt

SEQ ID NO: 203458 - DNA, 1000 bp, Homo Sapiens
ttgcagtgagctgagatcgtgccgttgcactccagtctgggtggcagagtgagactccatctcaaaaaaaaaaaagaaaagaaaagaaacacatgaaaagattttcaatatatttagttacttgggaaatgcaaactaaaaccaaaaagagataataaaactttaaaaactgaaaaaattcaagtgttggaaagacgtagagtaactaggactctcatacattcctggttggaatacaaaatagtacaaacactttggtaaacaattttgcagtttcttataaagctagatatatacttatcatatgacccaccaattatgctcgtaggtatacacccaaaagaaataaaacataggtctacaaaaagacttgtataccaatgttcacagtagcttattcataatggtcaaaaaacccaaatgttccctctggtgaatggataagcaaactgtagtatagccatacaatggaatatggctcagcaataaaaagaaacaatctactgacatatgcagcaagaatgaatctcaagagcattatgctaaagaagccagccacatattatatacagtgtataattttttgtgtccactgtataattccaaattctagagaagacaaaacaatagtgacagaaagcaggtcagttgtcaagggagggtgataggaactacaaagggaaatgagaaaatttctttggagtaacatatattttatactattgttgtagtattaaatacattacttaacatttgtcagaattcatgaagttttacacttgaaattgctgtttcattatatataaattatacctcaacaaaggggacaataacaacaacaaaaataagcatatgcaaaatgtgagtgtcatgtatttagtagccaaacaagaaaaggttctagaatgcaaatgccatttgacttaggatctagtgtcttatattgtaccatgctgcctcctttctcagaatacttccctaaagatccaggtgagaattc

SEQ ID NO: 203459 - DNA, 1000 bp, Homo Sapiens
gtagatctgctgcagtgaaaagaaaatagaaatttaaattggattaagtgtaggcttttaatctagaacttgtttcatatttatgctgggtgatatttctctgaacataatgtacgttgtcaagcttggcatacttacctggaaaagcattattgctcaacatgctgtcattgaaaaataactgcctataacatgaatgctttcttttttgtaaggactgggttaaagagaaatgtgcagtatcttttgaagtctgagactgttaatttctggcttgctctttgtttggcgtttaacacctgtcagtttgtctgtttatttttaagacgctttgtatgtggtagtcgtttcttctatgtgctttcgtcttgcatggatttatgtctgtatggtttcatgaaacttgaaaatttggtcatgtgttttggcagaagcaatttatgacaaatttttttgtaagaatatatagaaataatcttgtatgtgattaagctgttgaatctgttgccagtattaataggaaatgaacactgatttcacatgaagttgtaataaaagacaattaagtcacccacatttcacttatgggtttggccaaaagattctgtagaattataaaggcttatgacagcaaaaaagaaagggaaaaaaagccaatttcggttatttctagggatttccctccacccccaggagacatttggcaatgtctggaggcattttttattgtctcattgggtgggtgggggtgtgtgtgctactggcaactagtgccttcatagccagagatactgctaaatgtcctacagtacacaggagtgccctacaacaaatagttttctggccccaaaatgtcagcagtggtgctactgaggaaccctcattgagactataaatctataaatgaaaaatctacatcacattgcctttttattatagtgtatggtaattccaaagcctcttgcccaagttttagcattgattgctcttcagagaattc

SEQ ID NO: 203460 - DNA, 1000 bp, Homo Sapiens
cccccactccccaccgccaattcagtctacctaaccgtccctgcggtggccaaaaatattaagagcaaagtactttagctagacgtctcatttaaacgtctcgacaaccctttaaggtagttactattgtttttccgtttgaaggatgacggaagtgaggttcagagagctccagtagcttctccagggtcacacagcatcagaatccggatttgaacctttcttctcagttgctttttgaccgattacccaggaaatgacattgaactgttctattccttgcgtcccagatcttctaccgagcattgcgagacgtccagccaggggaggagctgacagtgtggtattctaactccttggctcagtggttcgacatccccaccacagcgactccgactcacgacgagaaaggtacccattccaaaagcgtggatgggcaaaagtccagccctcctcctcctgtcttgaagcgagtccctagacatagctcgatctatgtaaaatggaattcacattccctgtatttcaaggcaaagaggagagaggtcgccactacctccttaaaatcaaccataaacgataacagtgatagtagcaatctggctcacaatggcaggggaaaaagtaggctctatgaacttaatggggccatcctttttctgttgcatattcaaacagaccattatttactcaattaaaataaaaaaaattaggcgcggtagctcacacctgtaatcccagcactttgggaggccgaggtaggaggatcacttgaggctaggagttcgagaccagcctgggcaacatagtgagacctctgtctctacaacaaaaaaataattagccaggtgcggcggtacatgcctgtagtcttagctactcaggatgctgaggcaagaggatcacttgagcccaggaggtcaaggttccagtgagccgtaatgttaccactgcatgccagcctgggtgacaagtgagaccctgtctcaaaataaataaa

SEQ ID NO: 203461 - DNA, 1000 bp, Homo Sapiens
ccacctccctactttcctggagtatattttcttgttgggaagaagactaaaaacaataaaataagaaaacaaaattctaaaaattataatatataaaatggtagttaaatagggatgttatggagaaaataaaacagagttatatgataaattagtacagtggaaggagccgggatgacgaatcagtgtctgaaatgatgaggtgtcctaaatttccaaaccatccgcttaaataaaatatcccaaaattcagaaagaattcagaaactcagataaaagtacatatttgacatactaagacattactgatttaccctattctgtctattaaagcaaggcatgatttttttaaaccttttttttcttattggaaaatgtttactttaatttgcattgtgttaaaataacttacagaaatcaatttggatattttatggtgagtattatggtgaagaacattcaatacctgaggaaactcaagtatccaacaaactcaacccttacagagacacatagagctgaaaataaatatataaataaacttaggaaaaacacaagtaaaattcaagcatgagaagttaatcattgtttgatgtactaagtcttttatgtacacataattccgataaacttgggtatctcttcctaaattcatatcaaattagaagcatcaagtgcttttagggaaggaactgttctaaacagaagaaaagaaggaagaaatgatggctaataatctggaagaaagaaaaaaagcctctttggcaccatttaatctgtgtaaaaagagccttaccaatgtagtctgatgacaccactggaaatttggtattggtcctgatgataacagtcttgaatcaccaagaaacatttacattgctaaagatgatagttcatgactattaaagttcatagatttccttggaacttatggtctctgatggccaaaattttgtctgtcttgaacctcattgtcaacccaggaatcttactatgcctg

SEQ ID NO: 203462 - DNA, 1000 bp, Homo Sapiens
agcagtattcttaactattataaaaagccagccataggcggatcacttgaggtcaggagttcaagacctccctggccaacatggatggtgaaactccgtctctactaaaaataaaaaaattagccagtcgtggtggcgggcacctgtaatcccagctactcaggaggctgaggcacgagaattgcttgaacccggggggcagaggttgcagtgagctgagattgcaccactgcactccagcctgggtgacagcgagactccatctcaaaaaaaaaaaaaaaaaaaaaaacccagccattatcctcatttcagaaattattgaaattgtgtattaaagaatattcattttgaaaaagtaaccaaatctttaaaggcttcagagaagcagatttctcttgtagcttgtggcagcattttctcagaactggacggggccaccagtagcgtccttcattcctatatccgggtgcttgttccatgcagtcatggtattaggttctggggatgctgcacacagtgacacacactcagtcactgccctgatggggtttttacaacctggtgaggcagagagatactggtcaaatagtcacaccaacatataatccacaactacaataaatgctatgaaggaaaagactagaatgctctaagagtgcattatgggtagcaagaactgccctagactggggtgtggggtgggggagggatgtgtcaggaaaaactttgcctgtaggtttttatataaaagaatgtctttgggctgggtgcagtggctcacgcctataatcccagcactttgggaggctgaggagggagaattgcttgagcccaggagattaagaccagcctgggcaacatagtgagaccttgtctctacgaaaacaaaaaattaattagccagatatggtggcacatgcctatagtcccagctacttgggaggctgaggtgggaggatcacttgagcccaggaggttgaggctgcagtgagctatgatc

SEQ ID NO: 203463 - DNA, 1000 bp, Homo Sapiens
cgagatggtgccactgcactccagcctgggcgacagagcaagactgtctcaaaaataataataataataataataataatacattaaaaaagaaaaaaattctgtaaagtaaatagatctctattaaaaccttgaaggatacatgtttatattgtatgctggtaatattgttaataataggctcctttaataatctggttttgtttaatatttgagggcaaggaagacttgtgtttcccaatttcttctatcagtaattcagaaagagataatcattagcttaaatttgactttaagtaatgtatgagacttactggagagagattttggttggggtaatgtgaatgatagagatggcatattctcagaatttaccagagaaattataagagaggtttgtaaaacttttaaaagtgactgtattttgaaaagatgttttcttgtgttttatcatgtggctttttttggtaatgtgttaaattaagtaggagaaaacacttgatttctttctttcgaaatcaagattttgatacattgtgtcatcttagtgctgcctgttttcagattagctaattcgttttatttcagatgcaaatagggcttcagaaaaattcattataataatattaccttgtctctattatttactataataagctgtatactaagaataagtatttcacgctgtatagtattgtctcatgtaatcctcagaacagccctaagaggtaagctagctttatccctttttataggggagaagcagagttaaatcatgtgcccaaagttcatacaattagtaaaagcctgggattataattgaacccaggattgtttcattctagaagtgctcataactttaggtctatatcaaaaagatggtctcagagttgagtttgaaattaaaaagcttcctcctcttgaagaaaggagaaaagactagaagaaatctaagaaggctatatgatgagtaatcttttaaagtaaagaaatactgatc

SEQ ID NO: 203464 - DNA, 1000 bp, Homo Sapiens
cagaaacagggggaaaaaggagagggccttagggctcttagctcctgggtgggggtggggcctgtgtggacctgggcatttcaggcccctaagttaatacagagcacgcctgtgggcaggtggcaggggctgggcatggctgggatcaggagttgtgtgttaccacaagtgcacagtgagtgtgataggtatggtgaggtgagggcatccccatgaacctgcaaagccctgttgagagtgtctgtgttgcagggcgaaccccaaaatttgggttcagcctgggaggccatgtgggttcttgctttcctacaggaagaaattcaagggccagccaatagaataaagtgaaagcaagtttctcaagaaagtaaaggaataaaagggtggcaaagcagccccaagggctgcagggtgaccattttgatggttatttcttgatcgtaggctaaataaggggtggattattcatgagttttctgggacaggggtggagaattctcagaactgagggcttctcccctctttagaccatgtagggtagcctccccacattgccatgacatctgtaaactgccttggctgtggtaggtgtgtcttttagcatgctaatgtattatattcagcatataataagcagcgaggataaccagaggttgcttttgcagccatcttggttttggatggttttggcagtttctggctggcttctttactgcatcgggttttatcagcagggtctttgtgaccttgcaaaccaggcctgtggatttctatctcacctgttctagagggagtcattctggtgcaaagccttctgacatccatgtgtgcgtgggcgtgggtaattgtacaaccacttgcagagtgcgggtgtgcaggcccttgtggccccagaggtcagatcatgtggcaagcagcctgcaggtgggctggggtgagggcaaggagggggctctttgtgagcctctagctcactcagacatggctttggggcctcagc

SEQ ID NO: 203465 - DNA, 1000 bp, Homo Sapiens
taataaacactgcagtgtggcctcgggctggctgttgactcagtttgggccgggcataaatcagttaatctctctgtgcatcagttcactgccagtaaagtaagtctgagaattcttaactaactcaaagatatagtccttgagaaaggaagaagccacacttccctcaatagcctggcagtgtacactccttgctctaagaaatacatggtaaacagggactgtgccaagactacacaccaataaaacattttggacctttagccctgctctcatggagaaatatgagtggtctcaggaagtttgcagccttggttttcatggtaagtccggcgcacgtgaaactattggcatgccacacaacaccatggatgtgtccaaatatgtgggatacctcaaaggccacatgtttggagtttccttctatctcctccttcctaacctctaaatgcctgtgggctccggggttctggcctcttctcaatttacattctcatccctaagcttaagtgaattcccaggttgtatctctagcctgatggctccttgagcttcaaactcttacatatcccactgtctactcaacagctacacttggatgtctcaaaggttctcaaacttcacatgtccaaaaagaaattcttgtttccagattcaataaccccatacaaatctgcattcacttccttccccaagctttccctatgaggacgtggtaacatcatctatccaggcacttagacttaacattaagaagttgctctttgttttgtttttgagacagtgtctcactctgttgcccaggctggagtgtagtggcacaatctcggctcactgcaacctctgcctcctgggttcaagcaattctcctgcctcagcctcccaagtagctggattactgtcatgtgccactttgcccggctaatttttgtatttttagtagagatggggttttgccatgatggccaggctggtctcaaattcctggcctcaagtgatc

SEQ ID NO: 203466 - DNA, 1000 bp, Homo Sapiens
ttcctactgcaaatggcccttactgagctgagagatgtcattgccacagggaggacctataggcacatgtaggttgaatgaaactctagttccacttggaagcccaggcaagggatgggtcagtgagcagggctctcttcctagtctcaggccatgcctgtggcaccctaatcctactctcaagatgttggatctgggcagatgtgacaaattcacacaactctgattttgtctcaattttgtagatcttgtagatttcatccttcactctaatttcagcgtctaaaatcctcgctaccatgaagaatctgagtatttgatgagacagggctgaatattgcagtttttctcccagcaaccatttgggggcatttgctttaaatcgattggaaaaatatggcataaccatttgcacaaacttgggacaaatgatcttgggataacgatctaccagaatagggaattttacccacagtttctgggacaaaaacccaggaatctctatcatgatcagccttcaggcctcctgaagaagatctctcacagtgtcctattctcatgctgaggagcctgaagtccctgtgtgaggattagacagtggattgttatgtgtgtaggagaaccagcttaatatgtctgtccatgtctgaacttattgcagaaattgaaaagtaccaagaagtggaagaagaccaagacccatcatgccccaggtaactttgagcaattatggatgcttaattctgtgttgacacctggagatgccaggtccagggaaaacaagagtatgttcaatttcatgttttcaacgaaggttgaattactcctactgacattgctgttggttttccttgcagtagatgtttaggtttccatttcttcctccccttatcatttactaacttactgtaggttgaccatacctcaaaggctgtatggcaactgcatggaatcttaagcaagtttatggaaaattattgagcccactcttttcatgatc

SEQ ID NO: 203467 - DNA, 1000 bp, Homo Sapiens
cctcatcttcatggatttatccagctttggtctttgatgctggtgactttggatggggtttttgtgtggatgacctttttgttgatgtttatgctattcctttctgtttgttagttttccttctaacaggcctctgtgctgcccctccttccaccaagctcgagcgtcccaggtcgactccagactgctgtgctggcagcaagaattttatgccagtggatcttagctttctgggcttcatgggggtgggatccactgagctagaccatttgcctccctggcttcagccccctttccaggggagtgaaccgttctgtctcactggtgttccaggcgccactggggtatgaaaaaaacttctgcagctagcttggtgtctgctcaaatggctgcccagttttgtgcttgaaacccagggccctggtggtgtagggacccgagggaatctcctggtctgtgggttccgaagaccatgggaaaagcgtagtgtctgggccagagtgcactgtccctcatggcacagtccctcacagcttcccttggctaggggaaggagttccctgatcacttgtgcttcctggttgagaggacgcccccaccctgcttcggctcaccctccatgggctgcacccactgtctaaccagtcccagtgagatgagctaggtatctcagttggaaatgcagaaaatcacccgccttctgcgttgatcttgctggaagctacagaccagagctgtttttatttggccatcttctatttacatttatttttatatgtagttatatatttaaaactttatcttgaccacttgatttagagtaatggaaattggagaaatgtatacagtacagaacattctacattggctttttttttcctatttaaaatgcttaaacgttctttaactcaagaactttaattttgctaataacaaagattcttaagcttagtgtgaaacatggaaaggaaacgccagcagcctggttatgaataggatc

SEQ ID NO: 203468 - DNA, 1000 bp, Homo Sapiens
gtttaaagggcaatgttgtaattttacatgatgcatttatttccagaggatgtctacagttgctttcgcttcctacgtgatgtttttgcagatgagttcatcttccttccaggaaacacactaaaggtaaagtgcttacaacaaagagcaagtatgtttgcagtgtgagttctagaaatgttaggggtgaattcacagatgtgtctcaggcagtgtgccatccctttcttcaaggcaaagtggggcagacttcaagagaaactggggcgctcacagttcagcagactctagtttgattcttgatcaagtttaattaataacttagggattatatggtgagaggagagtcattctttgaactatcagtgtggccattacaactaaactaactttattttagtaaacgtttaaaaatcagcacacagccgggcgcagtggctcatgcctgtaatcccagcactttgggaggccgaggcaggcggatcacgaggtcaagagatcgagaccatcctggccaacatggtgaaaccccgtctgtactaaaaatacaaaaattagctgggcgtggtggcgcatgcctgtagtcccagctactcaggaggctgaggctgaggcaggagaatcacttgaacccgggaggtggaggttgctgtgagccaagattgtgccactgcactccagcctggtgacaagaggaagactccatctcaaaaaaaaagaaaccaaacacaacaaaatcagcacacattttcctgttagcaagttgttagaatgagtcacccaggcaagtgccttttactttgagagtagtgagtgctggtcctgcctggtctagacagctgaggggtcatcaggctcgcagagctggactgctgctgggttgaagtgggaagtgacagtagatgagaggcatgttaggtgtttgtgtgctttaaggataagaggtttgattctgtagggagtggaacaggagtgttggaaacttttttttttttttttt

SEQ ID NO: 203469 - DNA, 1000 bp, Homo Sapiens
gaatcgctcgaacccggaaagcagaggttgcagtgagccaagactgtgccactgcactccagcctgtccgatagagtaagactcgtcttaaaaacaccaccaccagcaacaaaaaagcaaaaacaaacaaacaaacaaacaaacaaacaaacaaaaacacatctgactcttgaaacaaaagtaatagagatggattgtaaggtttataacaggtgtaaagtaaaatgcatgacaatagcataaaggcagggggaggagtcatgtgaagaggtatgatgccacttgaaggcagactgtgatgggttaatttttgtggaaagcaaggcagaatttttgaagtttgtttcttcaaatactttctgtttcccgtacatacaagctagtttgttctgcagagatctcattttctaggaggctcggagggggaccttctgctgtctgtcctcatgggatgcacaagacacaagggaacagtctttcacttttaaatacattgatgggtctgaggagatagatacaactgcattttttttttaaatgaggtgggattctcattggtcttgaacttctgagctcagtggaggcttcccctacttcagcctttcaaagcgttgggattaataggcatgaggcactgcgcctggtcacaaccaacgtttaaaatcacgtccctgggtggtctgtaaccaccaaccttatggttaacagccgaacgcgctaaccgattgcaccacagagacaacctcaatcgcttgctttcatctctatatagattaagcaatcactaaaccctaggagttgccatttgctttctgcgggacaactgtgcagactacaaagcttcagaaaaccggagaggctgagtcgactaatcgtgttgttgcacgttagaaacgcgtgcattgcgtgactctgaagccagaagggcggccgaatggccttcaccctgcgttcaccctcgcctgcttcagaagccagtgcctctggaaatgcctggatc

SEQ ID NO: 203470 - DNA, 1000 bp, Homo Sapiens
cttagaaggtgcttgtactttctaaaacatctttgatattaaaaaataccgaggagctaatgggaatttgaaacacacatacatttttttacagataaggatttttcaaccaatttaaaagcaacctaataataatatagtaacaaatgtgttaagaatgtatgagagacagtaaaacataaccaaacgcctagggttgaatcttggcttcaccattcactagctatgaggccttggacacctttgtttccctgagcctcagtttcttcatctaaaaaaacagagataacagtagtgcctacttcatagagttgctgtgaggatttaatgtgatactatgcatcgaggacaatgcctggcacccagaaagttctcattaaatgttttctagtctcatttttgagactcataatatgcacctaacagaaattagttttctttctaatggaaaatttttattatgaaatcaagataattttgttatactatactatttcgaattgaatgttgcttgaaacaggtgaatagttgactagatactagaattttaatcaaaatatctacttcttcatttatttatttttgtggtggttttacaaccacaactggttaagagcatttaccaaggagctgggaaacctgagttttatttccttcttatctgaagattttgattatgatattaagggatattacacagcagagcaaattgctaaggcaagttataacatcttccctggccattttgaaaaatagagaagatgaacgtatctcttggactgttaaaatgcagtcattcttggagacagaagctatgttagataacctcttgagttcacttcagttcaatctcgtaattccatgccttagtggtaaaattggagtaatagtcactcttacagattatatgttcttagatgaaatgttgagtataaataaaaatgtcactgctattttgctttttgtctctagaaaggaatttatttaaaactggatgatc

SEQ ID NO: 203471 - DNA, 1000 bp, Homo Sapiens
ttatttgcttagaggtgtttaagtattctctgatgatagtttgtacttctgtgggattggtggtgataccccctttgtcattttttattgtgtctatttgattcttctcttttcttctttattagtcttgctagcagtctatgaattttgttgatcttttcaaaaaaccagctcctggattcattgatttatttgaagggttttttgtgtctcttatctctttcagttctgctctgatcttagttatttcttgccttctgctagcttttgaatttgtttgctcttgcttctctagttcttttaatcgtgatgttagggtgtcgattttagatctttcctgctttctcttgtgggcatttagtgctataaatttccctgtaggtgtatatatttaatggggtacataagatgttttgatacagacatgcagtgtgtaataaatcacatcatggaaaatggggtattcattctttttgttacattctagttgtactcttttatttatttatcttttttcatgtaatcttgctccttctaacacttacagtcttctggttagatttgtctatcatttttgtgtaaatattacactttaatatagctttataatatattttaatatctgataggccaagtcttcttcctcactgcacccacacacattattcctcttttctttgatagtctcacctacttattcttccagatacatttaaaattatgctgttgtttttcagaaaaaaaaatcccattggtatttgattggatattcaataaaactctcatgtagaaaaagcaaagcaccatcataatcatcattcttcccattagtaattatagtatgttttcatttattctgagacccagacatttcttgtttgtatatttctaggtgttttattgttttattgatattctgaataggatttttcccccattacgttttctaggtttttctctttttaatatttactttgtttacaaacactgaagtgaattc

SEQ ID NO: 203472 - DNA, 1000 bp, Homo Sapiens
tcgtggccaggctgtccggcccagggcggagccgcccccgagggggacgccctgcgcgccagctggaggtctgctggcaagtggcggtccctctccgggtcccagtttccctggagccccagctctggtggtctgggtgggatcaggagaggagacctctgctccagaccctggagtctgctccagcccagccccaggtctagcctctgccagggctctgggctgcctgcctgccatccttttcccatgctgcacttagaagggtcttgataaaatgcgaatttcatcatgttactgcctgcttaagggaaagttcaaggtaccaggccccggcattcaaggctttgcacagctcagctcctgtcccctcgccagcctactccccaccccgtccccacccctgcagccacacagaactttcaggattccccagaactttgtgcaagctgttccttgagtctggaaagctattagtgctgcttgtttttttttcacccagaatgctcctattcatactgctaggcccagctcagagcccccaccccccggaagccttcccggatagccaagtggtgctggtttctcccctctgacccaaccctgatcacactgaactgatggggttcctctcccaacctggaactggccagccaaaggcctctgcagccccctacatccctctctcactgcttgccatcagctggggtcctggaatctcctcctgttcctcctctggcacccccaacctcaccaggttcctggcctgctgggctcagggctcacccacccacatcagccagacccatgttcctgtgcccaaggataaggcactgtgccagacacaatgatacagatggagactgtgagctgcttcattcattcacttcattctttcacttacgcatatgcacattaacttaataatggtgattatgattaaaacaattccgacacacacttcccaggggtcagccaagcactgggacactttggggaattc

SEQ ID NO: 203473 - DNA, 1000 bp, Homo Sapiens
acctccttctgggtgccaatcacataaaatgtcttcccttcaaacttcaatttgcagacatctggcctaagaaaagaaaatctctgggtaagaagaaaaaaagtggcagctaaccaaggtacctgggtttcccataggaatctgactcaaaaatgccaggcagattgcagtgaaacaaggtattatcattggtgaaggtctaatgggcagtgaaaagcctcgagtgaattatacagcaattctcttcccaagagaggatccgcacagagctcagaattatttattctattatttacagtcaggctgcatcgttcttccaagaagctctagtgttcgtgaacattaatgatcagaacaatattaattgcccagcccacttagcaaggtgggaagaacgtggtgatttcagattcagttaatgaaatgatgcggattcacagtatctgactttctcctccttctgcatccatttccaagaagcaaatccactgcactgcaaaatgttcactcctgttttccctgtttacaaaagaattgtgttcttatatattggagttcccattcttttcagcaaggaccggtttaaatagaaacatgtgacccaattctgtccaattaggtatacaggaagtctcctacagggcttctaaaaaattatccttgtttgaaaaggagacacatggaaggggctgctctcctccaggctccgggcattgccatggggagatgtgcaggccagtcccgcacatgcccatctcaggagcaggagcctcaggaccaatgcgcctgactgagaatggcagagaaaaaaaaaaaaaaaaacagagacctaaatccttcccggcatttaagttaataggcagttaagttaacagaccagggaactgctccacgtttgctctgtgagctgattagtcctcttatttgtaagccatcatgagtagacattcctactaccttttgccaaaagcatcttcacggatacactggataacaaagg

SEQ ID NO: 203474 - DNA, 1000 bp, Homo Sapiens
cttccccctctctggagctataatctgaaaggtcatgagtgaggagccaccccaagagagatgacgggagagcagtgggccacctgcttccacacagaagcagggtgccctcacagcactcctggcagccagcctgaccatccacagcatcaggactcccagccagggggagcccagcacccgaggggccagtactgcagtagctcttagaactcagcccacccagggagtgcagccgggggtatctgagccggaggacagaagcactgccggcatggggccgaggctcctcgggtgctcggactgtggagaaaggtgggctaagaaaggcaggcagacagcccgttcaccctggcttcctgtcaacactctgggaatctagaagcatttgtgagtgagggaggagaagagtactctggaaggcagttccaggggtgtgtgaaagcacgttcacaatcaggagtgcatgttttataacatctcattttgataacccaactaaaagtgtgactgacttatagttcatatacagcctgttagtacagttgttctaaattgctgacaccctttggtcttcagcagttagaaactgaattttctaatgtctttcccatttggcagtctgcatcaaaatttgtgtttattaatgtttttctgtgtgtcctgaaatccatctggaaattgagtatttccataactaatcctcagatttggcaattctcattattattgttcttttctcaataccagaagtgttttgttcctgtgaagttttttgggagctacaggaaataattgaattgttttattcctttaaaggctttgtttaataaataacataataaataaaaacataatatgtttcaaagcaaggaaacagacagtgttgagcactgtacctcaagagctatgctagactattaggaagataaaaagaaaaggtaggcagtccttgtctcaaaaaagtacacagtacaatcaaaggcattagctagaattc

SEQ ID NO: 203475 - DNA, 1000 bp, Homo Sapiens
tatagacttcatcttatctcctagtatttcccatttgaaaatctccaaatgtaccaatcttctcactgctctccaaaatatcccacagtctcacattcacatctatgcacttagaaatgatttcttttcccatccttttcaaatcgtgttcaccatcatctgagatcatagcaacctccatctcttccatcaacctcccctgtgcaactctttcccacattctctcttcttagaagttatttaattgaatattaccttacattgttacatagtttggaagattaccttacctcttaagatatggaagctttcacaaaaaaaacatacagatttttttacttttccaccatccctaagtgcccaacacagtgctgtgcacataggaggcacccaataaaatacctggggagactgttttaaagatatgaagttttaaacacagccctctagctgttacgaaattcttgttccaggcaatctgcattccattattattataaatcatctgtgtgcctaagtcatttctaatctaaaaatgatctgtttttaacatcgttccttcttaggaaatatatactgaggtatttaggggaaaggacataatgtctatagcttaatctcaaatggtacaggaagaaattgagagcaagcaaaagatggaatgatgaatcaaatatggaaaatgttaattggtggatctgaataaaagttatatgtggaactctttatgcaacttttgctgctttcctttaaatgtgaaattaaattatttcaaaacacaaagttaaaatctagctcagtactaaaaaattaatagtcacgctaacttagtacttcagtttctttgcacgaccttcaaaacaaaacaaaacaaaacaaaacacatgatctttagaggtggaattcccaagttaagggaaatgtttacttcaatgaccaaagaaaagtatatcaatgcactttttttcttttttttttatattgttctgccctctgtgaa

SEQ ID NO: 203476 - DNA, 1000 bp, Homo Sapiens
tcttctttttttttttttttttagacagagtctcgctccgtcgcctaggctggggtgtagtggcacaatctcagctcactgcaacctgtgcctcccaggttcaagcaattctcctgcctcagcctcctgaatagctgggactacagatgcatgccaccacgtcctgctaattttttgtgttttagtagagatggggtttcactgtgtttccctggtcacaaactcctgagctcaggcaatctgcctgccttggcctcacaaaatgctgggattacaggtgtgagccactgtgcccagccacttgttgctatattctaaccaggcatattagtccattcttgcattgctataaagaactacctgagactgggtaaagaaaagcagtttcattggctcctggttctgcaggttatacaggaagcacggatggggagacctcaggaaacttacaatcatggcggaaggcgaagaggaaggaggcacatcttacatggccggagcaagaaagagagcgaacagggaggtgctacgcacttttaaacaaccaggtcccatgagaattcactatcacaagaaacagcaagggggaaatcaacccccatgatccaatcatctcccaccaggaccctcctccaacactggggattacaatttgccgtgagatttgagcagggacacaaatccaaaccctatcaccaggcctggcagatatttgttcaatgaataaactcgtgtctcctccatcaggctgtaagctccccgaggttaaaaacaggtctgtcttgacaatccctggttccccagaacactggccaagtaacaacactgagcagggactcagtacatgttaaacaagtgactctcttaccttcatttaccccacacctccctgagaatcatgaattcagggggacttggaaggtacatctgagttcatctttccaggagtcacacacttaaatgcctcggggtcagctaggagcataggtacaaactaggt

SEQ ID NO: 203477 - DNA, 1000 bp, Homo Sapiens
tcaggcaccagcctccacacagcctttcctgccaccacaggccgtaaagtacccatcctagctcttcctttgcccccataagagtaaaaatacaatatttaactctttttcctattttttgtgtttaacagacatttatggaggagatgactcgcaaacagcctgacgtggaccgggtcaccaagacatacaaaaggaaaaacatagagcctactcacgcgcctttcatagagaaatcccgcagcggaggcagtatgtttccagccccctgtgttaggatgcttcattcctgctaattgaggatgagcactttccaaatgcctatcaaaaaaaattatattccattttcaaaaaccgtgttggttttgaaccaaaatctctcatttttgaaactcacttttcttacattgacagacagtagctgtactccatattctttggtatgattggtatgaaattacgaggtggttaagcttattttttaacagtggcctttccattgttttggttatcagccctagctgtttacatttggcttgtactaatttaatcaacacaacagcttctacagaatatgttgcttttttagttgagttaacgtgtcatcagctcactaaggtaggacagaattgcttggagatatgtaggcagcaggtaagtatgtgctgggaggatcagtacttttggaattagtacacctccgtatctaaatattgccaagtcccgtatttcttttctcagttattgactggatattattataaagatcttctaggtttatacatacagctatttctctttgtatactaaccagctgttctaatcttgtgattatttttccttttagggaaatccctaagtcagccaacccctcctcccatgccaatcctttcacagtctgaagcaaaaaacccacggatcaaccagctttctgcccgctggcagcaggtgtggctgttagcactggagcggcaaaggaaactgaatgatgccttggatc

SEQ ID NO: 203478 - DNA, 1000 bp, Homo Sapiens
tatttacccagtgatgggattgctggatctaatggtaattctgttttaaattctttgaggaattgccacattgcttttcacaatgggtgaactaatttatactcccatcagcagtataagtgttcccttttcttcacaaccttgccagcatctgttattttttgacttcttaataatattcattctgactggtgtgagatggtatctcattttagttttgatttgcatttctctaatgattagtgatgttgagcaatttttcatatgcttgttgactgcaagtgtgtcaaaaatagctttttaatttattgagttgctattcacattgaattgaaaatatctgtaatttgcctcacagattctgatatatagtaagttttccacagatgttaattctgtttttgttgttgttgttgtttgaaagctctccacctaggaagagaattgcctccccacttgcaaaggcaagtttaatagaacataatatctttatcctgtgtctagaaattgctgttttagctgagtttcagagtagaatataaataagagtctgttggtttttctaggccattgtgattctgtattttcttctcaccttgtgttaattgaggtcagaatgagtctcagccacactgtaagaaccccggtggtctgatactgactttttgtacatcacacccttgctgtggggaagaccagtgaaagaattctgagttgtcctttccccttgggtgaactaaatttgtctttatggataagaactataatcatttaatattaaaacattctgaaaaatatcctagaacttgtacttttttcagtgcccagtgtgaagatctgaaatcataagtaatcttttattatgttttttgggtaaaaagttggcaataatgttactctgccaaatgcaaaattttatagagtatctagttacgaatcctttttttttttgagatggagtctcactctgtcgcccaggctggaatgcaatggcatgatc

SEQ ID NO: 203479 - DNA, 1000 bp, Homo Sapiens
gaaaaacaaaagcaagttaaaacccactatcatctccttgcgttagtgacacatatctgtcttaggaaataaagcataaaggcaaagtgtattttcagaggcactaaaacttctccccttccctgctgggcgggtgctttgatttggagtattcttgccctaacccctccctcccacggtacccaaacacaggccccagttgctcaagcaggaaagacagggagctgtgaaaggctcagaaacttcatctgagaccctaaggagtgggggtcagaaccttatctggcttctgagcttgggcaagacccttcccctcggtgggcctgagcttccccctctgtataatggtttagacttccagctctggtattcgaagttaaggatcctgatggtggccaggcggggtggctcatgcctgtaatcccagcactttgggaggccgaggcgggtggatcacttgaggtcagttgtttgagaccagcctggctaacatggcgaaaccctgtctctattaaaaacacaaaagcaggccaggcgcagtggctcacacctgtaatcccagcactttgggaggccgaggcgggcggatcacctgaggtcaggagttcaagaccagcctggccaacatggtgaaaccccgtctctactaaaatatacaaaaattagccgggcgtggtggcaggcgacttaatcccagctacttgggaggcagaggcaggagaatcgttagaacccaggaggcggaggttgcagttagctgagatagagccattgcactcaaacctgcgggataacagcgagacttctctcaaaaaaaaaaaaaaaaaatacaaaagcagccgggcgaggtggtgcacacctgttatcccagctactccagaggctgagtcaggagaatctcttagaacctgggaggcggaggttgccgtgagccgagatcgcgccactgaactccagcctgggcaacaaagggagactgtctcaaaaaaaaaaaaggatc

SEQ ID NO: 203480 - DNA, 1000 bp, Homo Sapiens
attggtataatcacagaaccagcattttgcgtttttattctttagttcaaatgatagcaacatttattttttaagcagtgctttcaaaatgttttaatgaaaacatgaaatttccataccaagtatgttaaattaaaattataataaatggttaaacagctcatacaaaatttatacatacactcaaattctactaaagtatttgagaagagattttcagtaagacaacccaactcccttctgacttagtatcagatacttaaagctgttgagggactgaatagcacatgtcataaaaaaagccatccacttgaatagaaaatagttcttttttttaattagctgtttggagagcctggagataaaggccttcatatttgatattactgtcaccatggctctggcatattttaatccaatttaaataacccaggaatgtttgctttttgctcaccatgacacactgtcattttttaacttgctatgacctatgaaaaacaagtaaaattcctagacaacaaatttaatggagagttgaaacacattctactatccaggaggatcatgaagttttaaatgaatccaagagagacagtaaggagctggggttgctttaataaaaattggatttgcccagaagaggaccagtgaaaggagaatattggaaatcatcactttcaagcccaaacataagtctggttccatctttcaaagaaatgaagaaactgcttgtattgttcatttccatgaaagtcttcattcactcaaaactaattactagtcccattttgaaaggcaaaatggatgatgatttcagtttcagaaaaaaactaaaggaaatttactacagtcaaagaaaatcaattataaggcaagcaactggattattaatgaaacacagaattctaggaggcaaactaatggaaaattgtaaaaccaaataaacatgattctagtctaggaaaaaatcctgactgatgagcacaaaagtgttcaattg

SEQ ID NO: 203481 - DNA, 1000 bp, Homo Sapiens
tggccagtgaaaaatggactgttggaaatttacaagaatcagaaactagctcactcacagcattattgtaagaattgaattagttaagatagttaggagtctgagaacagtgagaacagcaattctccataagcgttggttattattatgtcttttaaaatatcaccggatccaccagttcaatttttagcctctcaatgtttaccttaaatccaagatctgtttctctagccccaacatctgcgtatctggcttctacagctcctcacatattttctgtatgaattcccataagcattacacaagataggttagaaaggcaaggtacttggttgataagactgctgtggctttgcctgatttcttttaaacctatgctggggagggggccaagatggctgattagaagcagctgcggtctgcagcactctcagagaggaatgaaaggggtgagtgaatttggcaccttcaactgaaatatccagattcttgcattgggacagactaggcaaatagcccaacacacagagaacaaagaaaagcagggtggggctatggcccacccaggagcagcacagagccaaaggaactcctacccccagccaagggaagcaggtagtgattatgtgatcccacctgggaaaccatgcttctcccatgggtctttgcaatcagcatatccagagatcccctcataagctgtgtggagtcccagcagagcagccagtcggccacacacagagacccaggagttttgcatactccagccgcaggtttccttgcaaggtgggagatccatccctaggtacacctaaagggggctgaatccagggagccaagcagtcttgttctgtgggccccacttccacagcacctcacaagttaagacctgctggcttggaattccagccagccagtggtgacaggttgaagtctgcctaagatggattgagttcccagatggagtggtggccactatctttgcagtttgatcaactca

SEQ ID NO: 203482 - DNA, 1000 bp, Homo Sapiens
actggggtggagggtttggcctgagcctgaaatcaggcactcagtcttctccagggccctgcaccaccacggcttcaccccattcaccgcttcaccccattcaccgcttcaccccatcctggtccttgacagcacagggcttgtgccaccgtcccacctctctccccaccctggactggcctttgctctgtgtggtctccacttgtgcagagccctgtaccgctcccacttgcttccatctcagttttcccagcgttcaccctcatcctagaggaagagcaggggatgtgtgaacagacaaaagagacacaaattccaaaaatgaaattttaggggaaattctaccagtgagtgtatacttctaccctagcgatacaaagagtgcagtggcatttccaggatgagggaaggggtggctgttctaggatcacactgcctggttgcctctttccatccatgaacaaaagaggccatgccgtgcaggaaataaattcccagcttccagaagtccccacattttccagagaccagagcagatccttgcctattcttgtttctgctgttgcatgcaccttgtctaagaggttttccaaatcccagtgtgtgtttcagcatcacttgtgcacactgtcatgctggagcgccctgcacaaggctgggagcctgacttcccatgtggattcctctgtcccatttgtctgaagctcttcgcacacaacagatcgtatttaaaaaaaaaaaaacaaacctctgcagtacctcttacagttttgtgttaagacccatatatttgttaagcgaatgaatgcccaagtgactcagcagtccgcacacctgacactctgctgttttcaggtgctacatactatctcatctatttctcaaagcaaccctgtgaagaaggcccgccattacccctgccttcaggatgagaaaaatgtcttgaagaggacttgcccgaagtaacacacaggtcgctgactgccaggacctggaattc

SEQ ID NO: 203483 - DNA, 1000 bp, Homo Sapiens
tctactctccttgttcccaccagtaagtaagctccacaaggacaagaaacatctctttggttctttgctgtatctgtagcctgagacagtgcctgatacttcattgtgctcaactatttaaatgagtgaatggataaaattcatttttggaggttgaagattatctaaagtggtgcttccttaccttttcacttcactgcacatatagtatttctaaggcatatagaaatcaactgaagtgacttcttatggccagtgaggactggtgtggggattcaagctacctttttctacctttgctgctttcagcaaatccttgggaaattgatctgaaggccagatactacatcatcagcctctttcctttgtcctttcccattgcctaaaggtgctcatgttgctgccacctgtaacgaacaaattctgccttccaagttacagtgtcttcttgctactctttctctcttcagagctaagttcctcagaataattgtgtaattctattattttttcaacctttctgtatgtttgaattaaaaaaaataaatttcaaaggactctggggacacagtccagtctcctgtcagtttgtatcccttccctcaacatctcaaccttacagtcattcatcttttgcctctgaagtagcaggaagttcataacattgccttttctaacttgacagctgtaactgttaatggttcttctatgacattattaaaagttgtgtccctgatacttgcatcaatctgtcctttctcactacagaatcacataggaaaatcttatcacactctcagtgattgttcagatatgcaaagataattctgtgctctacgttcattccccttacagttaaatattcgcagctccttagttgcactgagtgattaaaggccaaactagcctccttgcctcaatccccgactgtccaccttctcccagtatattacaaacctatctccaggagaggaagggagcatcagaagagaaggaattc

SEQ ID NO: 203484 - DNA, 1000 bp, Homo Sapiens
agctttcatgcctttttttcatatttacgcttaaaccaaaccacacattttcttgtgtaaaatgtttcctcccttttaattatagcctgatttgctgcctcagcaggtagagcttttattaacttgaaagtgtatttggtgcaagtgggagatgtggaagcaaacccttaaaggaaaatcacattttccctgaaatgcagtgtggcatctaaatataacctttactatgtccctagaatattgagggatgggaaaattttcaggaatccctatcggggatagatctgctttcgattttacaaaagagtgactgtatggagtcactgaaaccaaacaggaaaaaaaaaaaaaaaaaaaaaagaggaaaaaaaggcttcacattgaaagtaaaggccaagaaagaaataagccacacaaaagtgtgagcaaaggaaaaaagtgtccatcttttttgtttgtctttgactggaaaggcctttgaccctaggcaatactgtgcagtgaatacttttgtcctttgtcatattttacttcctcctttcatgacaaccccgacaagtagcctgtgtaccattcctggagggtctggcccggagctgacaactaatccctggtaaggtctatataaaaggctcttttcagaaaagggtgacttgcatccctccactgactgcaaggacacaggctgaaaagacagcttaaagatcgaggggtttaggttcatttacagtcaagactgttgaatatcagttccatgtgaattctggaagtctttaaaaatgagagaacttctcacatgtctgagacagcttaaatcttgactttaatctggggcagcaaggaagactaaagtggtagctaaagtgcaaattctgggtaaccttatcatgcttaaaggcagaattccaatgtcaggctttttttatatacaaaaagttgtttgaggtcttatcattcctgttttgtaaaattctaaagagctgcgaagcccagtttggga

SEQ ID NO: 203485 - DNA, 1000 bp, Homo Sapiens
atagtttaaatccagcttgggtgtactccagtgggcatggatgtattactgttttgcagtgcattcttctatgatcaatacacagaagcaaacaggccacgtgggtaaacagtaattttcatttaccagggtgaatatggaagtcctcttgtttccatgtcatgatgaaggaaagcaaggaccatcttttgccaaggaacagtggctgtgggggaactgaggagatggaaggacaaggcagtcaaaagctttggaacaactctttttttgagatggagttttgctcttgttgtccaggctggagtgcaatggcacgacctcggctcaccacaaccgctgcctcccaggttcaagtgattctcctgcctcagcctcccgagtagctgggattgcaggtatgctccaccatgcctggctaattttgtatttttaatagagacgggatttctccacgttggtcagctggtcttgaactcccgacctcaggtgatccacctgcctcggcctcccaaagtgctgggattacaggcatgagccaccatacccggcccttttttggaataattttataggttttcaaactattacacttacctttttatataagagacaggacatagtcactgaacaatcactccagattttaagtaagtccaggatgggatgacaatggaacaaccatgaaatgaaaggaagaatgtgtcactggtatgtccacacgtctccaaatctctcacctctgtcagctgcaaacagagcctgaaataaatgtttcctctgtgcacagcctccacaacttcctccctccacgtttctcactcactcctctccagcacttctctccgggttctgcttacaaacttgaaaccggctatgcaaaaattataactgtggaaattatgacagtgaaagagatcagacctaaccgactccatcttgcttctaacctttaagctgtccttgttcatttttgggctgaactaactttgggaaggaattc

SEQ ID NO: 203486 - DNA, 1000 bp, Homo Sapiens
atcattcatcctttgtgtcacatcaaggaaaagactaagaacttttttttacaaaattcattaatcttccctctatcttttcatatacagtatttcaaaattaattgaaatgttcttgatttttatcaaccctgctactaggtcatgcaggttaaagtattacattattaatataaaaatatattttaaataaaatagagttatttaaaaatatattttaaataaaatagggttattttacatttagagtttttttaatgcctacatatcgttaccttgttttattgtggactaaattaagatttacctcctcaattgtgtgttcctaccaaaaaaaggtaaagacacccatcataaaatttaacctccacctgatgttaattgttgtggagcataactactgtaaagaaaaagagagtctcatttcaccctcacaggttcaaaaaagaaagttcatttaaatctgtcaacagctattaagaggtttctgaaatcagtaacagtaaatgtaaagagaagtagacagcctttcactgttaagtgtgagaggtattaacaccttacagttagcatgaaagtagcctttattacttttaaacttttcctcttcagactcacaattgtttcagtaatctacctgctgtgtttgtttataatgattacagagaacaagcaaaacaactattttatgttgagcctttcctgtttcatctaagcattgcaattcccactgattaaattatacagaggacatctagaatcattagattcagtcttaatgtatatttctctgtaaattatgcatcttaatagctctcctttttacaaaaaatcactgtgatctgtagtaggtatttctaattattggttcaattgagttctggaatgtaaaatctaataattatgtaagttgattcttttttttctgaaaacattggtactcacagtttatatttaggcaatatgaagatgcagattcttgccccaccttctagaattc

SEQ ID NO: 203487 - DNA, 1000 bp, Homo Sapiens
aattactttgggcagtatggtcattttaatgatattgatttttcctatctatgagtgtggaatgtttttctatttgtttgtgtcatctcttgatttctttgagcagtggtttgtagttgtcactgtagagatctttcacctccctagttagctgtattcccaggtaatttattctttttgtggcaattgtgagtgggagtttgtttgtggtttggctctcagtgggactgctgttggtgtataggaacgctagcaatttttgtacatttattttgtatcctaagatttccctgtagttgtttatcagcataagaagcttttgggctaagatgatggggttttctagatacaggatcatgtcattggcaaacagggttagtttgactcctctcttcctatctgaatgccctttatttatctctcttgcctgattccctgctgaataggaggggtgaaagagggcatccttgtcttgtgccagttttcaaggggaatacttccagcttttgcccattcagtatgatgttggctgtgggtttgtcatagatggctcttattattttgagatatatttcttcaatacctaggttattgagaatttttaacctgaagggatgttgaattttattgaaagcgttttctgcatctattgagacaatcatgtggtttttgtctttagttctgtttatatgatgagtcacatttattgatttttttatgttgagccaaccttgtatcctggggatgaagcctacttgattgtggtgaataagtttgttgatgtgctgctggattcagtttggcagtattttgttgaggatttttgcatcgatattcatcaaggatatcagcttcaatttttcttttctttttttttttttgtatcaggatgatgctggcctcatagaatgacttagggaggagtccctccttttcaaattttttggaatagtttcaataggaatggtactagctcttctttgcacgtctggtagaattc

SEQ ID NO: 203488 - DNA, 1000 bp, Homo Sapiens
gatctatgttaaaggatgttaagaattttttttattttttattttttattattttatttaccctaaaagtaaaaaaaaaatcaaataggctttacagtaatcacttaatttttttgcttaagattttctgtggaaaattcatgaacttgtttcactcggagcctgcttctgtgctgaacaaagacttggacaattatagaaaatactgtgactgtgtatgtgcatgcatgtatataccgtaggaagataggagaaagatctagattcagaatacctactacaaaatagtgtcatgggtaagttagtttcttgtttgtttgtttgtttgtttcacagtgggcaaaataaatcaccaaagcctaaccttgtttttcaacttgggagctggaacagtgtgaatgatgtcaccctccacttctcacatctttttcctctttcccctataacttcccttccaaagcaatttagggttctgaggtttcacttctagcatttaaaggctcagtggtaagaaatgtaaacattgtccccagtacactattatttggcctatctgctaaattattctgggaaactacattgttttttgttgtagttttagtttttaatttatttttgtagagacaagtttttgccatgttgcccagacgggtctcaaactcctggattcaggtgatctgcccacctcagcctcccagagtgctgggattacaggcatgagctactgcgctgggccacactgttaaaagttagactttagtttatatttctcttgcattaaaagtattttaaaattatttaactgtatgttgacataggaatattggaagagattcttctaaaatgcatacttcttattttctttaaacaatattagattttcaggtataaaaaattatattcttatagtgatcttgaagttaacatttatgtattattgagatcaaaagttcgttgaaatcgaactagaaaactaaggcataatgtttttagagctgtg

SEQ ID NO: 203489 - DNA, 1000 bp, Homo Sapiens
agaattctacagtcattaataaataatgcatataaattatccatggtaaacactaatagctgaagctatgtagagactgaaaagtcaggtatattaatagatattacgtatttcttctatctaaactcccaagtatgtcaacacattcatctatttctttaaatctgttcatcaaagccaggtttaagtacaacagcaaagttcactacaatagcttccagtacttaatggtaatagattcaatttaataatttgatttatattaatagttttagaattattttattcctcatcgttgaatgcacttgctaatgctttttttttttttttgaaacagagtcttgctctgtagctcaggctggagtgcagtggcatgatctcagcttactgcaacctctacctccgggttcaagtgatcctcccaactcagcctcgcaagtagctgggactagaggcatgtaccaccataaccagctaatttttgtatttttaagagacagggattttccaggttggctaagctggtctggaactcctggcctcaagtgatctgcccacctcaacctcccaaagtgccaggattacagacataagccaccacgcccagctgctaatgttttaagctcatcagtgaaagacacagtcataaatttttgaattggttttaaacttgggtctttctgcactgaaaaacaagtgatgttgctatttctggatttcaaggaggtactaacaataagaagcctacaagggctttactggtattctttacaagaacattgaagtttgagatataagaatcaagaaagttgagatattaaggtttttaaaaatgtgcataatctgatggaatttcattaccagaagtctacactctaatccaatggttctcaattgagtgaattcacccctcagggcattttgtatcattacaactgagtggtggtggtggtggtggtggtggggggggtaaggggtggtgatcctgccaaataggcta

SEQ ID NO: 203490 - DNA, 1000 bp, Homo Sapiens
aaactactcagttaacaagctactgctcataggcagccatagttggacttttcccctcatcatggctggtgatgggagtgggcactggattccaggctggccagatcatggactggccacaactgccaatcaaggacaggaccagtcaattagcagacaacacatagaggccactgggaggcagcagggtccctgaggatttccgaggaaatcagtcaggtataggtggaagccttgagagatgaaagagaaaagcagagtgggaggcagggtggctgataggctgtgtcaggagctgtggatgggagacaggaaatccaagttacagaggagaggtggatggactgcctgcaccagaggggcaaagaggtaaccttattcctagatcaactctaggaccttccagttgtcttttgctaggttgggctgtgcaccttcctgattgccccaagacattcctgtttttatttccagtgacttccacttctaaacttactcattacccaatgcattcttgtaatacattctatcataatttgaagtagcttgaggactttgtaccttgtagctaaaaaagtctaatgaatgcttctggtttattcttaaggatttttttataataactttttttctctgcaaaaatagtacatgacaaattgaaaacccaatgaagtacaaagcagacaataaaaatacctatagttaccctcactcagtcactgttaaattttggtatatatctgtgaagggctctttctctgttttcgaattgcaagaatgggtgcacaccacatacactgttttctatttttttaacctaattattgtaaatatctttttctttttatcacaacatatttaattattatgtcatattttgttgtatgtccaaagttcaatgaattctcaatggttgaacattttggctgtttatttattttttgctactgtaatcagttctgtggtaaatcaccttgaaggtaaatatttgcacacattt

SEQ ID NO: 203491 - DNA, 1000 bp, Homo Sapiens
tgcaatataagaaaaaaggagctgatattagtctacacagtgtattacagatgaggtacatttcttcttactgcactcctgctgaaccaaagcaataattcacagattccttaaaaggttcgtgcaccatcacatgcaaaaaaaggctaatccttattttaacatctgcttgaagatgtaatcacttaaagaagtatgcaagttttttaaatgcctttttcatttatcgcttaccaagatatataaataacgaagttagtatatccaggtctgaaaaagtacaaacattcatagattgccttgctgacactgttccagtaatagtatgaagaaaattgccctcaatatttcactaccagcctacctaacttgcttcgcaagtggaagagcactttagaactttccacattttgagtgtgtgaaatataatcaattctcaattatctgcaatggtttattcttttttggattattccatatttcctttttaaaaccaaagtcactgtgatcagctacccctaaagctgccaagagctgtaaactactatacaagaaatattagttgccatgtgtacaaatcatacaaaagtaatatagagtaattctcatgccatagtcaaagtataaatgaccaaatgttttattgtttcaaaatattttaattggttcaggccacagatgcaaagagaaaccaaaataacatactaaatcagaagcagcttaattctgacttaatgtgactcatgattatcttttttaatgtactctatacatcatccactggagtattacttttattttcctccattttctctttttttcatatcctgtttcagcaaaataaatatgtatttcctcaagcaaagttccagactgttctattagtgctttaaaatggaggaattcacagctggctcacctggttagtgcttcctctctgatcgtgcccatttcccttctggcatcgcccatggctctggatatagatactcccaattaa

SEQ ID NO: 203492 - DNA, 1000 bp, Homo Sapiens
aacatctttacaaagtgattttttttggccaggacttcatcacacagcagcgaatgcaaaaagggagtagttttgttacaatccttgaacatagaaaaccatacatagttcttctgttttccttttatttttttcctaatttcctttccttccaacaccacagattagagagaactcccctgcagtctctcctaccacaaacagcacagctccatttggcctgaagcctcgatcaggtaaatgaaaacctcagcccattcttacactaaataactcattgctttctcttgagccttttaagtgtatgcattatcaatgtgcacatccttgtcagttctgctgagccgaaatcctggcatctacagctaggggaggccagagtttgtagctttgttttcagtgaatcagctaagtccgtgttatcagtagtggatattctatcttcgtttgaatccgagcaaagaaaaaacaggtggtgggagcatgtaagcggggaagaaatattctattgatttttttttacctaaggaagataaaatagctttggccccagtggttcctgctgctcggctgagttaaggggcagcctgcctctggaaaagtgactcctttctgagacatcctcatttgatttctgagtctggtaggttctgtgtgtttactcacataacagagtggtcatttcaaggcttgcatgagtggtcaggagttacttttttaaaaagtcttttgagaaagcattctgcttatattaccaattttaatttgttattagtttattcacaaaagtaaattatagcaatgtacaaaataatggttgcttttgaaaagaaagtactctgtatagaaaaatttgattcttctgatttctccatttatttgaagttctgttgctaatcttccttcttttaggtctttctttgttttaatatttttgactctttggtatttagtctacacttactactgatgcttttaagcaagtgctaataaagaattc

SEQ ID NO: 203493 - DNA, 1000 bp, Homo Sapiens
gttcgagatcagcctgggcaacacagtgaaatcctgtctctaccaaaaataaaaaaaaattagctgggcatggtggcatgcacctatagtcccagctactcaggaggccgaggtgggaggatcacttgagcctaggaggcagagattgcagtgagctgagattgtgccaatgcactgcaacctgagttgcaacctgactctgcctcaaaaaaaaaaaaaaaaaatccagtaaggcttcccagccaacagtaggtattagtagttaagtattagaggagtcagaagttatacatgggtttttgactgcacaagggccactgcccctaacctctgtgttgttcaaggtcaactatatagtgtaaatgtaacctttttatagactaggaaaccaaaaagttcatgtgacttgctttattgcagtatttgctttacggcagtgctctggaatcaaacccacagtaactccgaggtatgactataatttgtagagcacggaatggtcaggttgtaagagtggctactcattaattcaagaaactatctgagcacctatgatgtgttaggcacctttccaggaactggggataaggtagtgagcaaaacaaaaccctctgctctcacaaaacctatagggtcataaagggttatggcatttttcagtaactgtgaagtaacagtcctatcctatactcaactcaactacattacaagaataaaaatgactctgctaatattgtgtgaactctatatacccaattccaaacatacaggctctttactattatcacataacatattttactgaatcctattattttgcttaacctctgaaatatcttgataactaaggctattttttttaaaaaagtgaatcaattaataatattgctaaataagaatttgttagaattaaccagttgctttctcatgtccattaactagatctggctggtttcttcctcattgtgtcacttaagagtttattttattcactgaattc

SEQ ID NO: 203494 - DNA, 1000 bp, Homo Sapiens
ttggctacatccagccattggagtcacctgttcccataagcctttctggacttttccatgcctgggaatcggccttgcctctgtgtccccagagcacctggtgtctgccttcatcaaggcctgtggtgccctgtgcttacctactggttcctcccctcaactgagaatttcttgaggacttatgtccccatgattacctaaatgaccagatgctttaaaggcactcgacaaatccttggcggcacatgaatgaagaatctgcattataaaaggatgaattccaacactggtagctaaaataataaatttagcataggatttttaaaaaaatccctaaaataaagctaagctatccattagaagtacagacccttttgctgtcaaagcttaacttttaaaaatatatgttgtttttaccccaatattattcttcccatatgatatggtttggctgtgtccccacccaaatgtcatcttgaattgtagctcccataattcccatgtgttgtggaagggaccaggtgtgagataattgaatcatgggggcggtttcccccctgctgctcttgtggtagtgaataagtctcacgagatctgatggttttataagaggtttccccctttagcttggctctcattctctcttgcctgccaccatgtaagatgtgcctttcaccttccaccatgactgtgaggcctctccagccacgtggaactgtgagtccattaaacctctttttctttataaattacccagtttcatcgagtatgtctttatcatcagtgtaagaatggactaatacaccatataataggccttactatttcaacttagggtaaaaatatatacattatttgtctggtcattgtatttttttatgtttctaagtccacatagagttaaatttcaaggtccttctggttaagagctgtacctcttacatgacttttgtttatggatccattgatttctaacttcctttttagcttaagtgaattc

SEQ ID NO: 203495 - DNA, 1000 bp, Homo Sapiens
ctccaagtgctcagtagagttgaactgtaccatttaacagtgctgattaaactgttacaaagttattgaatgttcagaacaaaacaggaatttttcagtcttttgtattctaaatcagacatactacgactatgggttgagacagtaacttgtttccaaccaaatataaaggacagtgcaaacctttgtatttaattagtccaaatcccatttgctcatctggaaaatacaagagctatgatgcagaatagcctctagaatccctgacagccctgacgttctatgagaatctactcagggatatctcccatggcacagcttctctggggcttggctaacttgccagaggcccctgtgatctgacaacacatatgtgtcatggaattggacatgtctatttctttctggagaacttttggcaatttctgcagcctgccccgggcagtgagaagtttccagaaagttggcttactgcccatgtttcctcagaaattgggggagtgtggagccaggcaattgtttttatactttgagctacttacttccttcctgtacccattgagggacatagggagtgccatttgtgtaccttggaggtttttaagatttgcagagaccatcatatttaaggctaaaaattcttaaatgctatcaaaaaatagcacattaactattgttaataaagctctgtttcagattgctacagagcctcattccccaaaaagtctaaattacctaagttgtaaaaaaattaaccttttggttaaaacaaaaacaaaaccaaaaacgatgtcatcatattatatgcattataattggtttccttgattggtattgaactgctatgtaccagaccctgtgctaggtactgaagggaatgaaaaaatgagcatacaagattcccaattcataatccagtctgggagggagacaaacacaaataactctaaaagagaatacagggaaataactccttacgagatccgatgaggtagaattc

SEQ ID NO: 203496 - DNA, 1000 bp, Homo Sapiens
aaagttctaggtggtatcattttttaataaaaatatatacatgtccacatatatctgtctctgtatatgtgcatttacatttatacatagatgcataaataaggtctagtaccaagttcttctctgagcatattctaatatgcccgggtatcagatggacactgcattctgaaacttacaaatatgcaaggcctctgcaaattctgactgcctgaacaataacaactgactgaatagtaataatatggctgagctccccagtatcttttctggaataaggtatggaatgaataaataatgctaaaaaagtctgtggtggcttactcttgctattaaggatgattgcattctcaacgttcttcataattataaatatagaacacaatactgaaaaatagttataaaccattcagtggcttatttagacttgtaaatggacaaaactgtaatcctctgtttatatcagatcacacaaaattatatagttaaaactagtgtaaattatgattgaaaggaggtttaagtatgaaggacttatcatggtgactattaaagtaatcacaattggccaagacaggcaagaaatgtgcttgttaatagttgcattagttgcaaggtggataatgagataataaaacacataattggaggttatactatcttgattactgtagattataccaatgggcacaataatgccactaagcagtgcatcaccagtgagcactcatttgttagatgataaatgggtaatgatctactataaccataacttccagaacgtgacagaaaatacttcctatgacatatcatgataccaacacattttggacagcaggcaagatctttcactctttgataaacttaataaataatagagaactacaaaaacagaaaagatactatatggctctgaaaagacactgaaacaaaaactggaaaatgccagattttactatgaagctattctccataaccaaacacacactttattgaattc

SEQ ID NO: 203497 - DNA, 1000 bp, Homo Sapiens
ctttcctgtcatattagctgtatatgatttttttctcaatttccagttcccaaaacacacacacattatatacatgcaacccactcatgatgtatgtgtaaaataacttttatgaaatgatgattatagaggaagacaaagtctaaagaccacatactttcaataatttcaaattgaatgttgatttctatttttgcaagtctttttcagccctccaacatcaatccatgaagccgccattctcagctcattctctctggcccagagatctcccattcttgtgtgatactctcctctcctccccagatagtgagataatgtatcttccagtctcttacatttattatataagcagagaaatattaaatacccaccgcagggctctgaggatgaatgtaaactgaatgctttttgatcagcctgttgtctgttagatattttgggagtaacaatttttccaaaccaaacatacaaagtatggtgatcctgtataaggtatagacaaagtgtataatctttttttttagtattagttaaattgagttcattttatatttccaaatgttaacttttttttttctttttgcaaaatgttaacttttgcaatccatggaaagaaataaacaattattagcttcttttaaaagagaaccaatttatcttaggaatgtttgcttttaaaagcaataataatctgcaaagttaataatttttttaagatccaaaatatattgtatttaaatgattttttatttcttatactaaatattttaggaaaaagtaaaatcagcttaattaaaatagcatttttctaattaatgtgtgaaaatatatatcaagggaaaattgtaatgtaagcattgtgtggtatgacactcattttgtaattcaatatttatgaattctttaaaaaaatttttaccccgtggaacaaacttaaaaattatattgataatgatatataaaacttgcatgctgtaaaaagtaaaattcacgtggg

SEQ ID NO: 203498 - DNA, 1000 bp, Homo Sapiens
ccaaagtgttgggattacaggtgtgagccactgtactggtctgcagccttgttcttgagtgtagtaggtgtgtctataccgatacatgttacactttgtcatctttagtatttgtttagcatatggtaacaaaaaattttttaaaaattagggatacaaattaaaattggggagtattttctgccctctaggtcatactggacatgggggaagggtagaagagggatgaagaggaattaaagagaccagaaaacaactagtcgcagtgttgggaggtataaaccaatggtaatttttaaaaatgtgaatttattaactccttgttttttcatggtggcaccaaaaattaatcttagtctcccacttaaactcatcagcctccccaaagcctttccagataagcatatgctccatgtaaaagcagactgcctgcgatccaactcagcttagagacaaggcacacttccaactcccaaggcctccttcttgtatagagatgctggtgctgccactgtgaaatacatcatacactcagacagtataaaccttagagtgcaatgtaaagaataacaatagatcacacccaagtacgagtcacccggctgaagaactagaacatcgccaggcccctggagcccctgagtacccctctccattgccttccactcacttctcgcctcccacccaaggaaccactattctggatgttgtgttaactttttcccttgcttatatgaaaaaccctgaggaaaggaagtttcccaacaagcatttccacaataacctggagcattctttatttttctttttttctcaaggagcattgttattgaacttaaaagcaggctattgagggtaagatacaaaccacaaaaaagccgaaagtctcaaagtcgggggatcttttagtctctgtcttcttccaagtttctcctgtctccctggcacggatcccgaaggtgtgttctgtctgtgtaggggagacccagtctcttccaac

SEQ ID NO: 203499 - DNA, 1000 bp, Homo Sapiens
ttctctggttttcctctaagtcctggattctagatctttctgtactccttaaaaggagttttgggcttaggaagagcaatatagaaagacctagaatttctccctggaaattgtcttcctagacattgtattcatgtccaggaagaatgggacaaaatctgaccagacaggcctgctccagtctaagggaaacttccttttgcggccaggtaaactgaccatctggaaaatctttgaatcaaacagaagcataagaaaaaacatctctaaaacaccaatgtactagacagccccagaagcaaagcttcctctctaagtgtcacagtgcctagttgtgtgcaaaggcaagtggctggagggtgctatccgcagtgggaaaccctagcaagtcactgaggtcttctaaaactccaagtcttcatctatgtaactgagataataactgctgatctcataggtcactgtcaggagtaaatgagtgacgatgtctaacttctagtgtagtgcctgacatgtaccattacagattgaattctgtgcccctatattagcccattctcatgttgctacaaagaactacctgagactgggtaatttaccaagaaaagaggtcaagggtatagtgaaccacgattgcatcactgcactctagcctgggtgacagattaagaccctgtctcaaaaaaaaaaaaaaaaatttataaattaaccaagcatgatggtacatatgtatagtcctagctacttcagaggctgaggtggaaggacagcttgaagccaggggttcaagaccagcctgggcaacattagcaagcctccatctctaataaataaataaataaataaataaataaataaataaataaatagaatcatcatatgatccagcaattgaagcaggatcttgaagacatatttgcacacgcatgttcacaacagcactattcacaatagccaagaggtggaagtagcccaaatgtccatccgtggatgaacagat

SEQ ID NO: 203500 - DNA, 1000 bp, Homo Sapiens
gtctacagactttctagtgtgatcccacaagccccaccggcaggcatggcccagcacttgcaaatgaatctccacgaggcgtggcaatcttttctttgaaacctgctccttcacactcccatttctgcctccccatcctggtttctgaactcattttggcatgcagggctgcagtgccagtctggaatcttgcaatgccttgtcaggaaatacagcaaaatcctttgttatcagagcaggagacagaatgactggatgattaacttcctatagtagtggtctttccctgtgagtacggctgtgtccatctgatagaggggccactattttacttctaatttttaaacttttgtatatgaaaataataatgtgttaacatcatcttaaatgcaagctgtgcaaacatgttcctgaatacatttcctcttgtcacattctgtcctaaacgaaaccctaagttattacagctcaacagaaaaagattacaagtacacactaaactactttctgttgaacttggaatcatgataatggttatcctgattataaaaaacaacagctataacagttaatttttattcactgcatactaagtgctaggcatttttctaagcacattatggtcattttatccctaacaaatcggtgaagtaggtactattattattattatttttttgagatggagtttcactcttgttgcccaggctggagtacagtggcgcgatctcggctcaccgcaacctctgtctcccgggttcaagagattcttctgcctcagcctcccgagtagctgggattacaggcgcctgccaccatgcctggctaattttttgcatttttagtacagaagggtttcatcatattatccaggctggtctcaaattcctgacctcaggtgatccacccacctcagcctcccaaagtgctaggattacaggcgtgagccaccgtgcctggcttgcttttatttttagttgacacacaattgtgcatattt

SEQ ID NO: 203501 - DNA, 1000 bp, Homo Sapiens
cacatcgtatttcagtgttcatcttactgatgtcttactgatggtttactggttttcttacttgcaatatctgtttaggaaacttttgacactttcattttgacatttctcttgaggtctaaaatttagaagcatgtctggcttcaaggtgttttttctctgccttgatagaacaatagcattttgtggttttctatctagagaattctaaatttgtggttccttggttaactaatccaacctttcactgaatctttctatggtaactctgctcatcattttctttctctggtccctcctttctcactatatgctattgccttagtcttcttgatagtccaagaagcccagggttttttgtagctgagagttggaattggttttataaccccttaggattgaagatcatcgtctcaaagtattgcacagaatgtaacactttccaaatgtggtgtctagcatgatactgatatgagacatccttaccccctgtaatcaagatattgtatatttcctggcaagtaaatttcaagccttttggctctacagattctctgtttcttggtttagaggaaatttagcaggtgatgtgttatagtatggagtcacttatatgttaaaagctacattgtgacatgggagatttcagtgatgaaaaaccggaagtgggaaatctgcagttggcaacttgattaaggagaactttctagaaatgtaggggcaagacactgatgtgttagaagagggaagatggtagcccttaaaaagaaacagtgtgacatacatgctgaaggaaccatagtaactaagaagcaactcaacgatgattaatgactaatattgaaaaaacattccggaagcagtgatccaaaaaaggctgggagaactatagaactgtgcccaaacctcctttttggaattcttttcaatgcttgtggagattttggagaacggagattgtataagacttttttgctgtgatacataatctgaagaattc

SEQ ID NO: 203502 - DNA, 1000 bp, Homo Sapiens
tggactcggtcacttcacaggcctatttctccttcagacatcgtcacagccacatgggcaatgggcaggaaagaatttcaggactgtgatagtattttaacctcctgtaggcctttaaaattttctgtgttaaccacttaaagcattcagcagctttggagtcatccagaaggtgtgagctcacgcagagccaaaaaggagagaaagaagagtgtttccttctagacaattcatagtcttttgttcatctgtagacgtttattgcatggcttaagtgaagatttgggttcattttcctagtgtttgaattttaccaccattgttttttaaaaaataatttgcgttttcctctctgacttaaaataccaacttttagtaaaaggaatctctgtatatttatgtctatttctgggcttaatatttagttttagtttaatatctattactagacctattttacaacatattcagtggtctaaattttaatatttgtaaatatcaggcaggtcaaaaaaaacatcattttcacttttgaaaatattattttctagtatcagctgtttattcttccaggaaagtttataatcagtggaccttatttaaaaagacctgtagcagtgtttttagagttgcactgaattgcaataaatccaatggggagaaattggtagttataacagtactcaatgtcaatattcaatatcaatagtactcaataatactgatataagaacatgataagacttccattgctgaacttggcttcaggttttcctcagtcaagtattagtttgcttcctgcatttcctatgcatttcttacaaaacttaaggttgttatcttatattttctgaatctgatttttattcattgtattttcaggaatattggaaagatatcatttgaatatatttaattttttaactgaaaaaactattgctaagctatcttgttggtttcgttttgaataatagattcttgtgttttcgggtagatgatc

SEQ ID NO: 203503 - DNA, 1000 bp, Homo Sapiens
gaatggtattggtcagcataattggcaattatttacaatctgtcataacatcacctatctttaagctgagcttgggtggtcaatacatttaaggttcttcttcacctttggatagctatcaaactgttatttaaaaattctgttatcttcccaactggccaacaatgatggtttccatttttgagactagattccaatataagatcttagaaaatattgctaaatgtagaacatggcatattgataacatgggtgtaaagcacaaatgtgataggaatttggggcatacaaaatttactaattataaaccagttactaacactagcattgacagtggtaccattactactactactaccaattcacaactaaagatagggaggtttaagaggttaaatgacttacataatctaaaacaactagtaaatgaacagtggggctttgaatagatcttctgaccccatacactgggtcccttcaccataccattgcgcaagacatattctctgtgctttaacaattttcaaacaactattaatggcaataataaaacgggtagacagtttaagagaaactaagttactctgggagtttcgagaggagaagatcacaggagagggttattggaggtgatattccagatgaaccttgaacaagagttgaaatttcaattgacagaaaaacgggagggcatttcaggtgtctgtgatagctggagaaaagaccagagagtcagaaaagatagagcatatttagggaacatgaagtagctgattttgcagaactgtaggaaaaatgtaggatagtggtgggagacaagacgaagcaggtagcaatgtgaactaaatttggaaggtggaggtataccattcaagtttagtgaacgatggaacgtaattagatcataattagatctatgcttgatctaccctcaattcaggtggagaaggaagagagagaaagtagggagaccatggagtcagtcatcactcggcaaagg

SEQ ID NO: 203504 - DNA, 1000 bp, Homo Sapiens
agaaggaaacagtggattcgtgcagctttttttttcatattaacaaccagaccccattttgctttacatcagggctttcatgtcttgaacgtgggatttggggctaaaataggaagctttcctctgcactgaaggatgtttagtagcatccctggcctccacccactacatgccagtaggattctccttcctctccatctcccaggacacaacaactgaaatgtctccagacattgccaagtgcctcttggggcttggggggtggggtgggtgtggggcaaaatcactcccagttgagaaccactgctttgtgtttagataaacatctgaaaagttgtctggaggttggggcaaaaaacatattgatagcaagaccctggctctccaaaaaataaaacaattagctgagtgtggtggtgcacagctgtagtcccagctactagggagactgaggtaggaggattgctttagctcaggaggtcaaggctacagtgagctgagattctgtcactgcactccactgcactccagcctgggtgaccgagtgagaccttgtcttgaaaaacaaaaacaaaaacatattgagcatagttttgaaaatgtaactcacatactgtttacatccaaatgtatcctatttctcctgacttctgggacactgtgtatttgaaaatctccagtgtcactatcatgcctctttcctatgaagctgcctaaatgcaaacactccgtgctctggataccccctaacacccccttcctcctcccaaccctggctttcctagtctcatttgtgtccatctccccaccaacccttcctcacgtgttcaacccaccaggaggcacttgctctccatatgagtcagactgttccccgctccgacgagcattgtaggggtgaggaccagaaaccaccaagcttggagcccccagcagcctccaatgcagcaatggccacacccaagaaaatggactcgttttcatcaccagagagttgatc

SEQ ID NO: 203505 - DNA, 1000 bp, Homo Sapiens
ctcctcaagatctgtctggtcaccattcattgtccccctgctagtagcttgggtcaggtctcaaaacacctgagctgggaaatatagttctttctccaggaagaaatggtttataggaattgcaggtcctagattatatgtactaaaagaaaccagggaaatacatgtaggggtgaattttgagagtgttgactggtgggggaaataaaataaggctgaacagggaagattttattgacatgagagcactcactcctgaattggggctcaatttcctagtaaggacatctggagctggtcttaatattcttctgggaagtttccttgaagtctgcatgtgatgatggcaaataggaaaatgagacagaaatgctgaaattgctttggctggtattaaggaagatttgagaaggctcatgaagataggaatgttagtgtggattctttatatgatctctagcatctgtcacctgactttgttccctgagaggatccagaggatatacccttcaataagacagaaaacaattggctggtgaggggaacatcagaatctgaaaaacctggtgatgtctatcctccccatgtcagggttagtaacaggagatgctgcttgaaactagtctccctagtatcagtgaaggtatgggatttctcagtgaaaagtatatgtggtgatactaaactgtcagaggcaagatggttgcaattactgaaattgacagaagtctatagtagcagtctggctgtcttgacctgcaggaatctgtggcaatggctaataaattgcagtttgagggatgaggtacatggatagctgactgggcaatttgtgtgtgtgtgtgtgtgtgtgtgtgtgtatgcaacaacaacaaccaaaatatcttcatgtgatgtgctccatcagaatataagaagaatatgagcatcagctatcacaatggaaaatctaggtccttcatccagcttctagatttatgtaattttgtagacctagatc

SEQ ID NO: 203506 - DNA, 1000 bp, Homo Sapiens
ccatctccaaggtttacaatcactataaaacaactgggaaattagaaacatcgctaaatcatggatctttgggattaaaaaaataataattaatatacccatcaccttacctatttattattttttggtggtgagaatatttaaaatgtttttagcaatttcaaaatctacaatacattaactatggtcaccatgctgtgcaatagatcaccagaacttacccccctcatctaactaaaactttgtacactttcaccacatcctctcctaagactctgaaaaccaccattctactctgcttctaggagttcaacttttttagatttcacatgagatcccatgcatcttttttttttgtttgtttttgagacagggtcttggtctgttgctcaggctggagtgcagtgggatgattatagccttctgcagtttcgacctcccaggatcaagtgatcctcccacctcagcctctggagtagctgggactacaggcacatcaccacacccagctaattttgtttatttttatagatacaaagtttcactatgttgcccaggctggtctccaatgcctgggcccaagtgatcctcccatctcagcctcccaaagtgctgagatcacagacatgagctaccacacccagctgcatcttttttttaaaaaaaaaaaaacattaccagctgggtgtggtggctcacgcctgtaatcccagcactttgggaggcttaagtgggttgatcacgatgtcaaaagatcgagtccatcctggccaacatggtgaaactccgtctctactaaaaatacaaaaattagctgggcgtggtggtgtgcacttgtagtatcagctactcgggaggctgaggcagaagaatcacttgaacccaggaggtggaggctgcagtgagtcaagatcacgccactgcactccagcctgggtgacagagcgagactttgtttcaaaaaaaaaaaaaaaagaaaattaccagttttcttgaattc

SEQ ID NO: 203507 - DNA, 1000 bp, Homo Sapiens
ggtgggtttatcagagtattaaatgcattttcaacttaaggtatttttcaacttactatgggtttatcaggatgtagtcccatctgtaagttaaggagcatctgtattaagcactgttatatgcattcattagtttatccatcttcaaaacaacccaacaatttatagagattattattatctgttcttacatatagggaaactgagtcagaatggtttaccaacttgcccaggttcaattaatgactaagccaaggagtctggctccagagcctaatctcttaaccatgattatactgcctatcatagaagctcttactgagtatgttaggagttgacacaaaaatgctacagtgatgaagaactaaatactactagagtgttctctgttgagcatttgtaaggttttgtttccaaagacccatttttctatagaattatagtgtgatgattaatttttttctgtataagtaccgtgtgctaaccaattgcaccactggagctccaattttttttcttttcacatttcaggtcatcaggaaaataacaacttctgttcagttaacataaatattggcccaggtgactgtgaatggtttgttgttcctgaaggttactggggtgttctgaatgacttctgtgaaaagtaggtttccaaagtaaattttcttaaaacatatattagaaagcagtaattgtaaacgacaacttaccaagctggatctcctaatggatacattgccagtattcacttaccattcagcgaagaattcattttaaattatttgattccaaacctcatattttgtgttattggaaatactttaagaaagatgccatgaaacaacttcatgcagtagtagtacccatgaattaagaagatagaaaagttgagttattagtttaatttttaaaatgatgcatacttattcatttgaaatgtgtgtattccaagaaaaattgttttgttataaatggttttaggaagtagaaggaattc

SEQ ID NO: 203508 - DNA, 1000 bp, Homo Sapiens
gtgcaaactgttctttgtttatcatctaattgtactattttatggagtggagaaaatgggcactcgatgctactgtgaggttgctatggaaaagagtatctgaccacatgaatctaaatcaaatgggttgccttatctcttggttgagtccttggatgagtgggaactggcactgagcttgggactaggggtttacataactttgtttagacagtccctgcccttggcactattaatttgtattgaacactttaagtaggctttttttctggcttgagtttttttttttttccctttggtcgtgaattttagaagtcttaaaggctgtgcctgaaaggccaggtaaaccccagctgcaagtatccaagagagaaaataacttaatgtctatttcttattgtgcttagaaaggagaaggcaaaaacaacacttaaaaaagcaaaactagaacaaaagcaattccataacaactgacactgctgctgaaataagagatggaaatgtcctgtatttgatgtggagaagtatttgattcaaagctgaaaagttaaactgagctgtgccttttctcttataagcacctaattttcggcattagttttgttgtggccgcttctacattagccatgtgttgctatgtccagagttctagttactggctcatagggggaaaataggtaagtgaccacttgaataaaatcctttgttatttctacccatttagtagtatttgcactgaaaccatattttatcttgatccttgggcttcatacataaacctttatggtacacggtgtgttgcaggaaggagatcttgggtttgttaggcaggcctgattttaatgtaaatatgcattttcccattgtctggatattggtgttaaatgctttgtaaataattttttctcacagaagtaatacatcttcattatatacaatttactaattcagaaaagcttaaagtatcaaattaagattattttcctgcaatctagagatc

SEQ ID NO: 203509 - DNA, 1000 bp, Homo Sapiens
tcaacaaactcttagtacaattattaagaaaaagcatatgaagaaaaaacctcaaaacaacgattcaaacgactattgatttcttaccagaaaaccataaaaggtaagaagacagtgaagcaacgtaattaaaggacacagagaaacgaacggccaagcccgaattctacatccagcaaaggaaaagattttttataaatgcaggcaacatagttgcattctcaggtgaaggaaaagtaacagtttgtcaccatcagacctactctaaatttagagtctaaaaaacatgctgtagttctaagttcttcaaacagcagggaaatgacacctgagagcctgggaatttcaagaagaacaacaaaatagactacttttttcttaagttctttaaaatacatgtgataggctgggcgtggtggctcacgcctgtaatcccaacactttgggaggccgaggtgggtggatcacgaggtcaggagatggagaccatcctggctaacacggtgaaaccccatctctactaaaaatacaaaaattagctgggcatggtggctggcgcctgtagtcccagctactcgccaggctgagggaggagaatggcgtgaaactcaggaggcggagcttgcagtgagccaagatggcgccactgcactccagcctgggcgacagagccagactctgtctcaaaataaataaataaataaataatataaaatacatgtgatagttgaaagcaaaaattataacattgcttggtggggtattcgatgcagtataaacaactataacataggggaggaaaaaggggccattgtggttgaaaggcctttatattttatttgaggtggcaaaataccagctctaagtagactgtgaaaggtatgtatattgtaacccccacagcagctacgtaaaaaataacaccaagagatacagcctcttagtaatcagtagaacaagtaggcagaaaattggcaaggatagagaagacttggaattc

SEQ ID NO: 203510 - DNA, 1000 bp, Homo Sapiens
gtagagatgtgagccacctcacacctgtatatgtatatatgtgtgtatgtatatgtgtgtgtgtatatatacacacatacatacacacgcatacacacatatgcacacatatatacacatacacatgtatgtatacacatatgtatatatgtgtatatatatatgtgtgtgtgtgtatatatatatatatatctttttgagatgagagtcttgctctgtcacccaggctggagcgcagtggcatgatctcattgcaatctcatgactcattgcaacctctgccacccaggttcaagcgattctcatgcctcagcctcccgagtagctgggtctacgggcacgcaccaccacaccacgctaattttttcattttaagtagagatcaggtttcaccaagttggccaggctggtctcaaactcctgacccaagtgatccacccatctcaggctcccaaagtgctgggattacaggagtgagccaccgcacccagccatttttttttttttaaacaaaagatatctagacccccattatgacagttcttttagatgaatgaacagacttttataccatcagagtcatctgcattttcctgcatataggcattcagaaaataacaaatgaaaacattaagataaactaatctttaactgacaacttcattgtattagggtgagaaaaccaacacccatttgttaaataaatgctagttaatagccatgtgatctcttcctcctttaaacttcatagcattttgtatttttacctgtgttgaccattcattagttaataaacattccaccaagctcctactgtatgccggggcctgttggggaatgactgggaggcaatggatctagagatttctctggaggtagtctggctaaggaggggaaaagagatctaggataggagatcctaggagctacagacttccactgttgttttcaaaaattggaaagtctgtgctggtatcttctctcctatcaaactgaattc

SEQ ID NO: 203511 - DNA, 1000 bp, Homo Sapiens
aatgatttcttggtggagtcttcaggtttttccatatgtaagattatatcatttgcaaataagaataatttgactttttttcttcccaatttggatgccctttatttctttttcttgtctgattgctctatctaggacttccagtactatgctgataaacagtgatgaagtgggcatcctccttatttccagaccttagaggaaagcctttcagttttccctctttcagtatgataccagctgtaggtctgtttatatggcttttattgtgcagtggtagattctttctatacccagttttttgagtttttatcataaagagatgccaaattttatcaaatgcttttccagtatcaactgaaattatcatatggtttattccttcattctattgatatgatgtatcacattggtggatttgcatatgttgaacagtccttgcatccctgggataaattccacttggtcatgatgaatgattatcttaatgtgttgttgaattaggttcactattattttgttttggatttttgcatcaatgtttatcagtgatattggcctatactttctctttttttgatacgtctttgcttgattttgatatcagggtaatactggcctaatagactgagtttagaagtattctctcctctgttttttggaatagtttgggtaggattgttcttctttaaatgtttggtaaaattcagcaatgaagctatgaggtcctgggctttttttttttttttaataattttgcatgcttcattcttttttattcttttattttgtctccctcactgtatattttcaattagcatgtcttcaagctcactaattctttcttctccttgatcagttctgttgagagactcgaatgcattcttcagtatgtcaattcaattgtttagctccagaatttcagcttgatttttaaaaattatttcaatctaatttacatttcattttacattttcattatggataggattctgaattc

SEQ ID NO: 203512 - DNA, 1000 bp, Homo Sapiens
gactcttgggatcacacacttttgtgagaagaggtggtcgacaaggcacgactgactcctcctgcactcacaaattcacttgatgtgaagtgactcctggatgccagaaatgaggctagatgcctggtgtgaagataagtcaatggccttgactttgaggacattgcagtctgctagggattctctctaaatggtttatttttccatttgcatttgaagcagtaaactctaaaccagtattaattccagggagcacatggactatggctgaatggaaactatttattcctggcaatttagaggatgctggagggggtagtagtagttgacaatacatttttcctatagttgtttatacttgattctcacagcaattctatgagatgggcattatttcattcttttagaattgacaaaatgttggcttagcagtattgagtaatttgcaaaagatccagcaacaaatgtttcccattgggatctgaacgctagcctagtgcctcaaattaaatgtcttatgacatgataactacaacagtcaaaaggtccccactagaaatgacaaaggaatattgcaaaactggggacttggaaggaacatgttacaaagcagctaccaaggtggtgagagaggccctcgggatggcacagacacgcccaaattctcatcctcacctgcagttcttccctcgccatcctcagattatgatccataaagcctctctgaagaggcagccgacagccctgtgcttgctaacaacctgcgtatcctctgaatagtatctccatactctcctgacaatggggagttcctgttactgtctgctgttagaggcaggaagccacagaagagaatggcttcttcctagcttgaatgcttcagttccataatggagctgacttccaggcactgatggggcctgggctaagaagcagtgtggagtggggactctttccaggaggcaaaggatgctgggatttcatatttgaaagtgaattc

SEQ ID NO: 203513 - DNA, 1000 bp, Homo Sapiens
atccacccacctcggcctcccaaagtcctgggattacaagtgtgagctaccacacctggcatacacttcattcttagggtacctgttttaatgacccattaagaatcatttatttagatgagatacacacatcaaaaagaaaggaaagagagaaagagagagagagaaaaagaaagaaagaaagagaaagaaagaaagagaaagagaaggaaggaaggaaggaagaaagagaaagaaaaagaaagaaagaaaggaaggaaggaaggaagaaagaaaagaaagaaagaaagaaagaagaaagaaagaaagaaagaaagaaagaaagaaagaaagaaagaaagaaagaaaataatttagcataagtataaccgcaaagacagtagctggcatgcagtagaatttggctcaatacatgtttgttccccacaccagcaaaaaaacgtaagatgggttccaggctaccaaggcttctcagactatctgcagatgagaaggtggtttccaaagaaatacaggcaggggtgcttattattcagccgtgattagcctattctgcaggactttgcgggacaactctctgaccacacgggtccactgttccacagcctgaggctcagttaagaatcacctggagacggagtgactaactcatgctagttttaatacaaaaagtcctgtgtcccaggaaacccctcagttctgtgcaaaccaagacagctggtcatgcttcctggcaatcctgttaaaacacagtgtccccaaagattctgattcagtaggggagaggcagggcctgagaatctgcatttctaaactgctcccaggtggaccacacagagaggaacactgccagactagctcaacctcaacctcagggactggagtcagaatcctggggaaagaaaaggcaatactgaaagaagtctttcaccaagtctcgattgccacatagcacagctgtgggacaaatgtaatagaataacccaagggagaggaattc

SEQ ID NO: 203514 - DNA, 1000 bp, Homo Sapiens
gcccagggcacctggaaagccagcctcctctcctggaggaaaggaggagattgagagggtgacccggggtggtggacaactgcatccctcatgttctctgccacttccacctacactgttgcagtgtctgagaaacttatcagaacaagttctcctgtccattaaatagcatttaatcctccgaggagccttaagaattgggaatatgctacattttactctggaaaatatgtttagttttttggtactcactgaaaacctggtgcatgggagactgaaaaaaataaaatgatgttttatgcacatgaaagcagcaagttatgtcagttacttcatctgttaccaaggatttgggaattttagaggctcactgggtaaaagcagactttattttcatttcctagactgaaacaatatagggttgtgagaagtttaactgtaatttttttgtcattgtttaaagctgcaactttgaacattgtgctgaaacttagatctgagagatcagcagatctatatagtagcatctgatttgtcagggatcatcaggggatgaggcatttcagagaaataaaatattccagtatttaaatcatatctcttgagggtcttaatgtttgtgttaatcattttttgatgtaagagtttcccaaatctccagctaacccactgccttgtgaaacaagaatgcagtatcagatcccatttgccctgctgatttaagagcatttgtatgaaagccagttatcagatcattctgatgcactgccctctgaggctaccaaaacttgttgggtgtttacccctgtcttcagcggacccatttgtcatcatcctataattctgttagccataagtacccccagtatattttcctgggcaagaatgtggtatttctgtctggtgttggcattagaggatctccatccgagtgacagttgggtttgtttaggcttgctttgattagccttgcttgcttgtaatgtgaagtccaaagatc

SEQ ID NO: 203515 - DNA, 1000 bp, Homo Sapiens
ggatgaaagtctgggtttgattttcagcaatcttagccttgtagctacaggagataaggatttctttctcttttttttttgagatggagtctcacttctgttgcccaggctggagggcagtggtgcgatcacaacccgctgcagcctcaacctcctgggctcaagtgatcctctcacctgagcctcctgagtagctggtactgtagcacactccaccacaactggctaatatatatatatatatattttgtagagatggggttttgccttgttgcttaggctagtctcaaactcctgggctcaagcgatacaccctacttggccttccaaattgctggaattacagccatgagctactgcaccctgccttaagcatttctttcaaggcagacatagacactttcgggtcatttatgtggagcttatgtggaaattgaagccctgagttgagaatttgaagccctgagatcatccttttctatccccactttctccagagcagttaggagcagccagccagtcattatattcattatttttactaacatgtcctaaggtatcaaatatgtggcactcagaccttgccctttataaatatttaattatgagattccaatggcagtatcttgcatatttctattgccacattatgccatgaccaatgatttcattatcactggaaataaagtcattagtgcctttaaatctaatcagataagagaaccaatttcagacagaccagaactaatttagaaaactcatccttaagattctgttcctttagaaccactctacatactaaaatctgtgttattgaggtttcttcagagaaacagaaccaatacgaaacacacacacacacacacacacacacacacacacacacacacggattggcttactgtttgtatgggctgacaagtccaaaatctatagggcaaccatggaggctggaaactcttcggcaaaaacacgatgctgtagttcctaggtggaattc

SEQ ID NO: 203516 - DNA, 1000 bp, Homo Sapiens
ttgggaggctgaagcgggcagattacttaaggtcaggtgtttgagaccagcctggcaaacatggtgaaacccgatctctactaaaaatacaataattggctgggtatgatggtgagcacctgtaatcccagccactcgggaggctgaagcaggagaatcacttgaacccaggaggcggaggttgcagtgagatgagatctcaccactgcattccagcataggcaacagagtgagactcaatctcaaaaaaaaaaaaaaaaaaaaacaaaaaaaaaactccattttaatacacagtataatttctcacccatcaggttagcaagaattcaaagcctgatagataaatccaatacagacaaggagaaggatcccccctcacatagtgctgctgagaatataaattagtaaagccccttgtagggacaacttagcaatatctattaaattaaaggcacatgacctttgtcaagcaattctaggtatttattccagagaactagtcacacacaggtgcaagaatgtttagtgcagcacatttttaatagtttaatgtaactactaagtatattctgtatactgatataaaagccatgttaagtgaaaaaattcatggtatgaacacacttatgctgaaaaaagtatctatcctgcacacagaatgatctggcaggatacaaactaagcctgcaaatcaggatggggaagagaaagcacagggaaaaataagggggaatgttcacattgtactccacatactcaggacctgctgctttaaggagaatatattcactatattacctatacaactatcacatctaataaatatattaaaaagcaaaacgataaccaaaaatcagtcttgctttttgtttaactgtgaataagatttctttgagcactgtaacttttctgttaaatgacaagttcccccagtgggccccactcatcccttattaagtaaaataagcccagcaataaagcaccgggatacaaagaattc

SEQ ID NO: 203517 - DNA, 1000 bp, Homo Sapiens
ttgctcccccgtctaaaaaataccaccaagaagaaaccttttataccctcaagactgaaacaggaatgagaggcaagggtagaaaactgagatgacttgtttgtcggcactttaaacagatttcaatactgtgaaattatcttgggggttgtttcctcaaacttcaaggtatttaaagatgattaaaagacatgttctcttgcttaaggatttgctgacatgtaatgctttttttttcctccaaataaatgcaggagtgacatttaataaagagtctgagaagaacatggccctgagcagtacttttattcccattaccttttaagaatctaactcctatgccactatccctccccctccacccacttgccctaccttctccctcaccattattaatctaacctgaatcactctattcttctccaagggaacacacccagtaacagcagtgaatcatagacactattgcctctctagtctctaatggatttgacaaaatgccagatctgggagaataaaaggacaggaaattcaggtgaagggagctttttaggttcttgtttagtacattgtcctgaatattagttattagatacattttctagctgcctggtgatggaaaggtttcattgtgctaataatactgatcctctccgtatctccgtgttctaagtaaccatcctactcagtgaggcaatcgctccggcatgcctaacagctatgtcaagggcccttttctcttgaagttgataataaaaccctctcttgcatatcttggctaaagaatatgaaatagttaaatcataaaggtcaatgtttggtaacaaagtctctacaagtgcagccattacacattatggaattccatgtgagatcgttaaggtaatagagaaaaaaatagaaatatttgtcaattattctcaaagagaaatttatgaaattacacagcactaaaacatcactttaccatggatgggtctataagatgcgacttgaattc

SEQ ID NO: 203518 - DNA, 1000 bp, Homo Sapiens
ttcataatacatactattttgattctctaatacagtaatttatagagccatagggaggttatatgatgtaccaaaagagagctttatgaaactaaggcttttaacaaataaatcatctcttaatttctcctataccccccaataaagtgtgtatcattatccaagttgttggtttgaaaatttttgtggtaacattagtatagtttaatttatattttaaacattaataatttagataaatattaaatattttactaacatgcaatttgtatgtgttttaattggctatttagacagacacatgttggattcaccacaaaaatcaaacatcaaatatggaggaagtagattgtctatcactgggacagagcagtttgaaaggaaactatcctcaccaaaagaatctaaacccaaaagggtgccaccagaaaagagccctattatagaagctttcatgaaaggtgttaaagagcaccatgaagatcatggtatacatgagtcacgtcggccttgtctgtcactagcctccaaatatttagccaaaggaacaaatatctatgttccttcttcatatcacttgccaaaggagatgaagtcactaaagaaaaaacatcgatccccagagagaaggaagtcactattcattcatgaaaataatgagaagaatgatagagatcgaggcaaaaccaatgcagactccaaaaagcagaccacagtggcagaagctgacatcttcaataacagctccagaagccttagcagcaggagcagcctgtccaggcaccacccggaagaaagcccactgggagctaaattccagttgtcactagcttcttactgcagagaacgagaactaaagaggttgagaaaggagcaaatggagcagagaatcaactccgagaattctttctcagaagcaagcagtctttccttaaaatctagtatagaaagaaaatataaaccaaggcaggaacaaaggaaacagaatgacatcatacct

SEQ ID NO: 203519 - DNA, 1000 bp, Homo Sapiens
tatcaaggagcacaatcgctgcatcatataataacatatttagtttcataagaaactgccaaactgacttttaaagtggctgtgccagttttcagtcctaccagtaataaatgagagttccttcctgtttctctacatccttgccagcagttggtattatcagtgtttttgggttttttttgagacagggtctcgctttgtcacccaggctggagtgaggtggtgcgatcacagcttactgcagcctcgacctcctgggctcaagggatcctcccaacctcagcttcccaagtagctgggactaaggcgcaagccaccatgcccagctaattttttgtatttttttggtagagatggggtttcaccatgttgcccaggctattctcagtgttttggattttagccattctaacaggtatgtggtggcatctcaatcactgctttaatctacagttccctattgacgtaccacactgaaggtttccttttatgcttatttgccatctgcgttatcttctttcatggtgtctgtcaaggtctttgggccatgtttaaattgagttgttttttattattgagttttaagagtcctttgtatattttggatacctgaccttgaacaggtatgtgtttggcaaaatttttctcccagtctgtggcttgtcttttcatttccttaacagtgtttttcaccgagcagaagttttttatattaataaagccaaacttagcaattttttaatagatagtgcttttggtgttataaagtcatcaccaaacccaaagccacctcaattttctctgatgttaccttcttccagttttatattgttgtgttttatttaggtctacgaatcatcaatatggtctggctctgtgtccccacctaaatctcatctcgaattgtaatccccacatgtcaagagagggacctggtgggaggtgactgaatcatgagggcggtttccctcgtgctgttctcgtcagggtgaatgaattc

SEQ ID NO: 203520 - DNA, 1000 bp, Homo Sapiens
cagttccagccctcactgagcggacagcctagcaaagaagacagacacagctgaggagtgctaggtcaatggcacccaacatgctggtggtcggggggtgccaaagcaggtgaatggaacctactggaggtttggagaaggtcttctagggaagtgctacctaagctgctacagggaagtgagagaagttagccaggtaaacagcaaccaaggcaggaaggaaggactatctttccatgagtctaagtggcaagagacaggtgaaaaaagctcatacctcctgcagatcaaagcatagaaaagacaagagggagtgtggagagagatgagggcttgttcacaggttaagcagtttggattttatctagaaggcaactgggaacctcccctgacagtacttagcttacctgttcctcatgctatccctatgaggaataatcataacaagctccattggcttacgccaaaccaatttaaaatcactcatttcctgctcctccgtaagccaccacatgtgttttgagaagggggtaaagtattcagatttgcaattgagaagaatgaggctaaccagtcaagaatgagtccttatcacaggataggttatagagaagggacccagaagagttacagcagaaggtaaacgcgtatgttgatgggatgctgaaaccagcaggctagaatcagcccacgttggtttcctgaggtttgactgtcaacttacttgtcatcatatcttcttcttccagctggttgattccaaagaggtgcagtccgcttgcagggatattgttcttcagggattcggttagcagtttatcaagggtctctgtgttgtagggcacaattttaaaggcctgaaaacaaaagtgaagatggtcagatctgaaatccagctctcttccatcccgcagattcaagactgataagccatgagcagaaattacatgcccagaaatctcaggtttccttgtaatatccttacctgacacatgaattc

SEQ ID NO: 203521 - DNA, 1000 bp, Homo Sapiens
aagaacaccccaaggatggaagagagaacaaaacaaatagtaaacacaacttgaaagaaccagagactgtataaaaagatgctactaaaaatccatcactggtatcctgagagaggtcagatggtggtacattcaggttgcagaggaatatgagaagggaggaaagcaagaaagaaagaaacgtggtgagagagaatttttttaaaaaaagtattttggaattaaaatatgaaaaacaggccaggcacagtggttcattcctgtaatcccagcactttggaggccaaggcaggtgaactgcttgaggccaggagtttaaggccagcctgggcaacacagcaagatcccatctgtacaaaaaaaaaaaccataaaaataagtcaggtgtggtggcatgcacccacagtcccagctactcaggaggctgaggcagaaagactgcttgagcccaggagttcaaggctatggtgagttacgactgggccactgcactctagcctgtgtgacagacactctgtccaaaaaaaactaaacaaaatactaagagctcaataggaaaattaagagaagttgaaaatatctcccctaggaagttggaaaaaaaaaaaagacaaagaagataaaaaaggctaataataaaattagaccagtcaagtaagtcaagcaacttgaataacaggagttctagaaaaagagaattgggaaaacagagaaataaccaaaaacaatttcaacttaattccccaaaatgacatatgtttccacattaaaaagttccatagagaccccaacacaatgtataaaagcagacatacaccaaggcacatcagaacacagaagaaaaacagaagattggtggggggaagggaaggagaacatccagaaaataaagcacaggccacagtgagggaaaaggagtcacagcaatactggaatctagacaatcatctaccagtgacttcaaaactcctacaagaaatagtcccccatcctagaattc

SEQ ID NO: 203522 - DNA, 1000 bp, Homo Sapiens
agagcttctgttccattctttgtaggatcttttgaaaatcttagtagtttttttgttgtgcgtgagacagggtttcgctctgtcacccaagctagagtgcagtggcatggtcacagctcactgcagccttgacttcccaggctcaagcaattctcctgcctcagcttctcaagtagctgggactacaggaggcaccaccacatcgttagtagatctttattataccttctcactccgaacttcatgtttcacaacatctcagatgtcatattttccatctgtctctttgtgtttcattctgcattcaatctttagctctctatctttgaacttactttcttttctgccatatcaaataacttatttaactcttcctttgaatttctcactttaatattatactcttcctttctacttaactgttttgcatatctgctggttcatagttttggtacttgcttattctgccattatattcttttactaactgctgtagactgagtgtctgtccccccaaattcatgtgttgaaaccctaatcaagaatgtgatggtatttgaaggtggggcctgtgggaggtgattaggattagatgaggtcatgagggtagagctctcacagggctcttaggaaaagaggaggagacagaagatctctctgcatgcatacaccaaggaaggccatgagattttgtaaccaggaagacagctttcaccaaaaccttgaccatgttggtaccctattcttgaactctagaactgtgaaaaatatttgtttaagcctctaagtctatggtaatttattatagtagcctgaaataagatatgatatctgttcttttttaacattaattattcatattttacattgataatttaaacacctgcagtttttgtggaactgatttgtttaagtctcagtcacacaggcttgtttccagttgtgatttgtgtttcaattgtgagcttatgcttgttgagacttttatctgtgggaattc

SEQ ID NO: 203523 - DNA, 1000 bp, Homo Sapiens
ataaatgtttttatgtattaatattctgtatctgagagaaagcttagagctgaaatttggatttggtgcctcactatattcattgctgctttaaggcatttgtaatcaaatatttatttttttttaagtcaggtaggctacccagtgcaattataggagctatttggagccaccagtagatgattagcctctgagaactgtctctgcagctacatgcttctggctaatgtatgtttataaactgaccataagccagtagaggtttatttgtattcaaactgtgccttcagggactagaaagtttactaaatttaggaaggtcaaaataggaaagacattagtctttttaaaaagctttatttgaacatttgcacaacttagaaatatctggactggttccccacaattatatagtaaaccaaggaggcccctaagccagagaattcagaattccaaatattaatgattgtatttcaattttagaaaaactatgggctgggcaccatggctcatgcctgtaatcccagcactttgggaggccaagacaggcagatcacttgagtccagtagtttaagaccagcctgggcaacatggcaaaaccccatctctacaaaaattagtcaggtatagtggtgtacacctgtgtagtccagctactcagggggctgaaacaggaggattgcttgagccaggagaccaaggctgcagtgagccatgattgcaccactgcactacagcctgggtgacagagtgagaccctgtctcaaaaaaaaaaaaaaaaaaggaaaagaaaaatgatttattttatctttatgagtaatattaaacttttaatacactgttttgtaagatagtcacaattagaggtcagagatacctttcaggggctcttctttttctgttattgtcattacctattttagaaatcctacatctgggccgggcgcggtggctcacgcctgtaatcccagcactttgggaggctgaggtgggcggatc

SEQ ID NO: 203524 - DNA, 1000 bp, Homo Sapiens
ctattcagagaactaaatatgaaaaggaaaactaacatttattgaaaaatgtagaatatctttatggtcttaaaggtaaggaagaatttcttcagcacaatacaaaaactataaaccatgaaaactataagaaaaaagacaccataaataaagaaataaagctaaagattgatagaggatatacacaatatgtttaacaaatgcttagtatctagaatatgtatagagttcctacaaatcaaaataaaacaataaaaagtggcaaaggacatgagcaaacgtttcatagaagacaaagagaaatatatactaaaacaatatcaacctatcattttataccaatcaagattagaaaaaactttaagggtaacaagctgaaaataagccaatggaagaatgaaagctctcagactgtaggaatataaactgataaagtcacttaggaaaggaagtggaatatataataaattggaagctgtatataattttcaacccagcacttctgttatagtggaatatatactctagagaaattccctgtctccaaaaggagacatgaataagaatgctcatatccttattgtagcattatttgtaagagtaaaaagaatggaaacaacctaaatatgtgtcaacatatttggatattttgtattataaactggattgataaattgtactatactcatataattaaaattaatgagcagccactagaattcagataaataaaacagaaaggaggggagtttaggggaaaatgtatctagataactataactagggaaaagaaatttaccaaaatagactaatgttcaaaatatcagtgggatagtatttcaattcataaacatagtatatctctgaatgtattaaggtcatttaaattccactaaggttttataatatactctaaaactcatatatcttttattagatttatttataattgacaaacaaatttctgtttcttactttgggaggccaaggcgggtggatc

SEQ ID NO: 203525 - DNA, 1000 bp, Homo Sapiens
ctttatagtatgtgaattacttctcaacaaagcagttattttaaaaataaaattttctgcaatatctccaaaatttatataacaaaagaagcaaggtgaagatagtatgtatagtaccatgtgtgtaaaactagatagacagatatagatagatcgtctatagataaatatagataggttatatatatagagagagagagggcaaccagcttttcattctgtacccttttatgtttttcattgtttgtactatgtgcaggtattgtatctattatatatatatttttttctaggatcatatagctaatggtttatcattataacttttcacattcatcctttctttccttttaggaaacaacaattagtgacatccttgaatccgaagtagtgaatgaaatattgcctttatcaaactccaggttagtaaagtcaagacaaataaagtcaagtctatctgagatggactgtcagccatgcctgagagtcatggctgcctaactagtcctggattgctggcttgagaaggcatagctttctggggtcattttctctacatgaattatttgaatcttcttccaattcctccccttgccactccttcaactctaaaccccacagaatcctgacttaaggtaggaaataaaatatgaacataggtttaaggtaaattttatttggctttgtgtaacagttgcaaaaaattgaaattctatcaatgcctgtatccctgtaaccccgaactgctaccaacaaactctatgtacatgatgtcctcacatatggcatttcttagtttttcaggaaaaggtttggtagagtcatttgcaagtcttcaagagactgaagagatcaagtcaaaagaagcaatggcaagttcaaagtcccctgaaaagtctcctgagaatcttgtgtgttcacagaattctgaggctggatacataaatgtggcttctctgaaggagacacatggtatacaagaacaagaccaaaagtcaga

SEQ ID NO: 203526 - DNA, 1000 bp, Homo Sapiens
tatgtatctacttatttgagacagggtctccctctgtcatccaggctggagtgcagttgcgtgatcccagctcactgcaacctctgcctcctgggttcaagcgattctcctgcctcagtttcccaagtagttgggactacaagagtgtgccaccacacctggtaaatttttctattttcagaagagacggggattgagtcaccatgttggccaggctggtcttgaactcctgacctcaagtcatcctccagcctcagcctcccaaaatgctgaaattataggggtgagccactgtgcccgacctctagtttttgtatatttcttaaatttaggtcttagatccattttgaattaatttttgtatacggtatgaggtagggggtccaatttaactcttatgtttgtggatatctgcttttcccagcatcatttgttaaacagactgtcctttccacattgaatagccttggcacctttgtcaaaaatcagctgaccatggccaggtgcaggggctcatgcctgtaatcccagcattttgggaggctgaggtgggcagatcacgaggtcaagagtttgagaccagcctggccaatatggtgaaacccctaataaaaatacaaaaaaattagctgggcatggtggcatgcgcctgtagtcccagttactcgggaggctgaggcaggagaattggttgaacccaggaggtggaggttgcagtgagccaagattgagccactgcactccagcctgggcaacagagggagattccgtctaaaaaaaaaaaaaatgtcgagcacggtggcttatgcctgtaatcccagcactttgggaggccgaggcaggcagatcgcctgaggtccagagttcgagacgagcctgactaacatggagataccccgtctctactaaaaatacaaaatgaggccgggtgcagtggctcacgcctgtaatcccagcgctttgggaggccgaggcgggcagatcacgaggtcaggagatc

SEQ ID NO: 203527 - DNA, 1000 bp, Homo Sapiens
gggataactcacaggtgtcttgtaaaggggtttcaaagacctgttaaggaaaccggaactaactccatctgtcatgctagggccaggcttggctccaggtaggctggatttcactggaatcggaagcctgctccctcgggggctctggatgggcttataatcaagacctttaatcatgctaagagctaattccagcttgtgattacacccatgctgcggagcctgatcatctgaacaacagtcacactttccaagttcctttgcacttctctcagtctcctcatctttctgttgtggagggctagcctggacgcttgcatccaaagattccacagaggaaccaggcgtctcttcctccatgctttctccatctgggggtacctttgtgcttgctaagtcgggtggcccaacctcagacaacgctggttcttcagtgcaaatgctggtcgaccacctgctagaagggccgcaggagatacttctggccacctttcgaggtaccttacaaatggcttcatagtcagaatcagcaacccgcaaagcggcacaaccacggcatctcctgggtcggtttccagggccttctgaaccatggcagctgtgtggctcctggatctgatcctcattctccacccagcactcaaaccctgaataggcgaagtcctcctggagcagtgcagagtatctcgcatcgggtaagacggacatgtcaaccgtcccattccccgccttgatctccgcgccagagtcatcgttattcttccgatacatactggcaatgcagaacttgaggcgatccttctccagtagcagcttttgcaagcgctcaatagaaagcgcttcaatccgggcaataactgtgtcgaatcgatagattcgatcaagcatgaaagcacacttgctgcaagcgaactcggctttgccatcgcgggggacatccttgcccaagacgtgcgaaagcagaacctggagattgagcttggacgccgtgtggaagatc

SEQ ID NO: 203528 - DNA, 1000 bp, Homo Sapiens
aatatgtttgttctagcaaacaccttatgtaggcccccaaatttcctttcttagagcaggtactaaaaagagcttacaaatgtgaatatccatctcttactacttagaagtgtctttctctaaaacccaagagccattccattgaaatgtaatcaacgggaaggatgggcctttgtctgtcttccagcctctgtgggaggaaagaattctaatttccacactgtcagctgtcagacacagctagactaatcacatttacactgatcaactctttgtactttttcacttctctgactctactaagtccccctcactcctctccctttaaaatgcccagtcatccccacacaaatcagaatggagctcagctcttttcccacagtagttattaaataaaacctgttttcactgctctgagtaacgtcgagttgtatttacctttcacacacgagtgaagaagccagacataaaagaatctggccgggcgcggtggctcacgcctgtaatcccaacacttggggaggccgaggtgggtggatcacgaggtcaggggctcgagaccagcctggccagtatgatgaaaccccatctttactaataatacaaaaaaaaaaatgagctgggcgtggtggcacccgcctgtagtcccagctactccggaagctgaggcaggagaactgcttgaaccctggaggcggaggttgcagtgagccaagattgcaccaccgcactccagtgtgggtgacagagcaagactgcctcaaaaaaaaaaaaagaatctaaactgtgtggttccatctatatgaaaactaaaatgggcaaaattaagctatggtggtagaaaacacaagtgtttttctcaagacaaggaagtggaggattgactggaaaagagcaaaagggaactttctctggtgatgaacacgttctatagattggatggagtgttggttacagagatgtatgcatctgtttataaaaactcactggactttacacc

SEQ ID NO: 203529 - DNA, 1000 bp, Homo Sapiens
tgagactagcaattcattccttcaatatttaaggatacttttttcttttttttttgagactaagtctggctctgtcgccaaggctagagtgtagtgtctcgatcttgtcttatgcaacctccgcctcccaggctcaagccattctctcacctcagtcttccgagtaggtgggactacaggcatgcaccaccatacctggctgatttttgtattttttgtacagatggggtttcaccatgttggccaggctggttttaaattcatgagctcaaacagtccatctgccttggcttcccaaagtgctgggattatagctatgagccaatgcacctagccatagttaaggatagtctataattacctctgttttacttaagtgaagtgatgggcaactctatactcttaatgataatggttggccaagttatcagtcacatgatgactacttagtctgtgcttgccctacagtagcaattgcagaatactttagctagaacttttttttttaagtttttagcactatagaagtagtgaaaaagcagatgttacattaacaaaacaagagaaattcatgtaaaaaggaaagcttatctgagtttttgcaagaatagacttaattttgccagtgacaattatgtgtttaaatattacattctgatttcatcacatgtatttcctgagaggacagtggaagtaaaagaagttctaatgctacagatttgagaatgttctgaaagcgtcgtacctttaagagttatctccagaacattcttgctgtcctagtgccacaaaccatgcttgtgttttttgatttgcctatctcagatactttgggattctgcagaaatgaaatacagtgattttgtattaattgggaaattcttaatatataattcaatttttaatcttttctatgcttctgattctgaaatatatcatttgccatctccttgtataaatattatgattgtccctgcttcaaggaaacatttatatgatc

SEQ ID NO: 203530 - DNA, 1000 bp, Homo Sapiens
gtcaggtcaaaggctactacccagttaaacagatgggaagaggcagatactcctcttctcctgaccatgcagtcttcacccctgtacaatgcattaggtgaaataactgttgtcatgggacaatcattccagacatcatttccaaccctcctactactttttgaacgctttctttaatcaggggtcttcaaccgtaagcaacagaaacatactctggcaaacgtaagcaaaatgggaatttaatggcaagaatgaaggcacttaagatttgaaaggaagtttgaagtacgtagcttggaatagacaggtcccagacagctgcagaacttctgattgcaggcactccccaactgtctctccagctggacaaaatagttaagaagcaacttttttttttttttttttagacagagtctgactctgttgcccaggctggagtgcagtgacacgatcttggctcactgcaacctctgcctcccggattcaagcgattctcttgccttagcctcccaagtagctgggactataggcacgcaccaccacgcctggctaatttttgtattttttagtagatatggggtttcaccatattggccaggctgtctctaactcctaaccttgtgatccacctgccttagcctcccaaagtgatgggattacaggcatgagccactgtgcctggccaagaagcaacttctttaaagagagaatccaggccaggcacggtggttcacgcctgtaatcctagcactttgggcagatcacttgagcccgggagttcaagacaagtctgaacaacatagcaaaaccctgtttctacctaaaataaaatacaaaaaattagctggacatggtggtgcccatctatattcctagctactcaggaggctgaggtaggaggatcacctaagcttggaaagctgaggctgcagcgaaccaagatcatgtcactgcactccagcctgggtgatgggagtgagaccctggcttaaaaaaaaaa

SEQ ID NO: 203531 - DNA, 1000 bp, Homo Sapiens
gacctgggcctgcacagcttccttggtaaactgaggaggtgtgtaccagaggactgtcagctcattcctctccacacccaatactgtgggattctaggatacagtttgtcactgttgatggctcaatcttatgcactggacaaagataatatgaaggaaaaaataaaaaacattcaaatgagtgtaaaggtcttcaatctcagcctctctagttcaaagagatgaacaatgagagattctggtttatcaatgatctggttcatagagctgttagattcatctgtcacaggtgacccagcagagtataacaacaaaccagagtacaacatcaaaactgtaatcaacataatcaatggattaggaaccattcaaaatagctccagttttccaactgtacatattggtactgtgtgtaattaacacataatttattatggaaatgtgggcatgccaataagccggaggatttaagttgacagttttcataatacttgaaacttcaaatgccttttctgtggactggatgacctcttccaggtgctttggtttggtttatctcctgatagattctgatggaagcaggaaggaccagcctctcctgaagctcatcatggctgtaagacacacagtgcctgctcacccgcccatggagaaacattgctgtcacaagacacagaagacacactcccaatcaggagtacttacctgtcctctcatatctggagcaatgggaatggtgggccagatggtcgagtagatgccaaaaaacaccagccaggtcagcatgcttccccagacagccagatgactgaactgcagagggaaatagacactcagacaggcttctcgaccagcctggcagattcaccccaactccacttgctgcagaatccttgcatccaagctacctttccttatggaaagactttgatgactcaccagttaatgggaagttcaatctttctaattcccatgtctcagaatttttaacaatgaattc

SEQ ID NO: 203532 - DNA, 1000 bp, Homo Sapiens
tgcttaagatggtgaaaggccaaactgttgtgattccttccactatgtatcatcctggagcaaaactcataggggaaaattagatattcgtgaagcaagatagcgagggtttttgttgttgttgaggttcccatcaggaacaagcttatattattggatttacttgagagtgtacaactgcccttgaaatgaaacatcacctacttccaacaagtgtgctctctccctagttcaccctaattaaggaggcttccctatattaattttgtctcttatacaagcatccttgagactctttgtgcttaattatttatgtctatgtctcaagtattaagagcacacttgaaatttaagatttttctaagtttctaacacttactagctttgttttttgcttagacctgttaatctaattttgtcttctcaacacttttgggaataatgcattgcttatccttaaattttgctttgcagtttctgtatgaaagattccaaattcaggtttcaatgtatttgaaacgaagttgctgattcctctcactggaattaagacctacacttacttttctcactcttctttattctatttcaaagtttgatgaatattttctcaaactgtatttgaaaaatttagaatccaataccatgaccaatcttcctcctgctaagccattggtggtctaactattactttttaagaaaaattaatatggaccctgatgtaaaaagaaaagaaaaacaaatatagagtgatttcagcaggtctattactagacatgttttctcatgtttctcggtagcttgaccctcttgtctggtattcctgagagaatgggcctacccacagagaaagggagaaggaggtaaagaagttgcaggtttgctggtgatttgagatgaatcctcatgcaacaacttgaaggcagacagattggaagagcagtgagttgattttctaaagtaaaatccaccagaaagagtttacacggtgttggaattc

SEQ ID NO: 203533 - DNA, 1000 bp, Homo Sapiens
agcaagcttagatagtggaagacagctgtacttttatatgttttattttgcaatttatattacagtatgtggcaaaatcataacttcaatttatctaaatggatagccaagtttctccacagcatcaactagtacagcctttgtgcactaatttgcaatgctgtctttatcacacactacatttcctaaaatgcatatacttgtttcctctactgttatcactagactgttttaattattataactttataccatggactgatattagtaggacaaagctgcctgtgtgcctgcccttcttcccaaaatttcttgtgtggtttcctttccatgtgaattttagaataagtttagcttgtcaagctctacaaaaattcccctaagaactaaaattatgggaggaggaagggaataccttcacccagcaacaagtatgccttttgtgttcttttagttatttggcatgttacaagttctgctgcttttataaaatacaagttagaaatgttaggaaaaacaaatgagacatgctgatttgaagaaaaacttttgatttttatatggtgattctgaatccagccaccttattgaagatttttttctaaactattccaataatctctcagttccaataccgcacactatccagggctggtcacagtacactatgggcattagtatgacttacagaaaatggaacatgttggcttactttcaacctggctaatggaagaatggttaagagtgtctaccatagcctggtgttttcatcatcaaatctgattagaccctatcatgtttttgttgctttccaaataatatgtaattttagttttgattttgtctttatatttctaagtaaatatataacagacaaaaaactgctcatagctatttgttgaattccatactttttaaaggttaattttgagtgtttccaatttattattcaaaagtattcatggatattcaacttttgcattttttgcacatctaaaaa

SEQ ID NO: 203534 - DNA, 1000 bp, Homo Sapiens
tctctactaaaaatatttttaaaaattcgccggtgtgatgacgtgcccctgtagtcccagctactcaggaggctgaggcaggagaatcacttgagcctgggaggcagaggttgtggtgagccaagatcgtgccattgcactccagcctggtcgacagagtaagactctgtctcaaaaaaaaaaaaaaaaaaaaaaaaaaaaacctactctctatcccccatgattgtttctagagtcaccactgaggacaaggaaaatatcttatttagctttgtattcccaatataaacagaacatagcctccaatggaggaccagtcagtgaccagggaatgaacaaaacaaactttgcttttagattataaaaccaaaataattacctgcaattgttctacttattaactttaaacgcaggtaagttaatttatttagaagttctatataagttaataaagagccttacattcaggattatgttagggtgaaatgtatgttattttaactatttgaaaattggtgccagtttgatacataataaaatcagccggaatacttaaataattgacacttaatgtgcttagagcctgtatctgaatatactaacatataaagtaatactccctaggagtaacacatccaaattttgaaatacatttaacatcattgcctggtgcacagtaaacagtatataagttttggctaaaaacatgattctaatatccctttaataaccactccctcctaggcctggtgttaggtttaaatgtgcactaaaaaaaaaacaactggctaaaaaaatgaaaagcagccagtcttctttattaagaagatacagtagggcacagcacagtttgaagataaacaaaacaaaaaagctcaatcaatcttaacaagcttcgacacatgcaagaattcagtttatagcccacttcccaagataagcatataaaattaccgaaatctgagataactggcttcttcatcatttgccacatacaaaa

SEQ ID NO: 203535 - DNA, 1000 bp, Homo Sapiens
gtgggatattaaattgtaaaatgttaatgttaaagcgtaaatttatataaatgaaatatatatggcctatatttattgtcagtataaactatccaagagggccgttaggtttcttaacaagaaacctttttcttgagctttagaagaaagtcgttgatgataaagctaatttagctgttttagcacaggcccattgtatgtaatacattatgccattgactcaatgtttcaagttttccagattgacctggtcagactttagttgtgatttgtgacatttgcattgagagatgagttgagactggtaaagatccattgtatgcctagcccctgtataagaaaatgctataattaaggttaacctgattgtaccgagctggtagcatttttagcaggaacctactcattatttcttgagataatactcattaatttacaatggaaactagtcactcatgggaatgacccttctacagtgatactggtcatcatgatgtatttctaattcccagaagctctaggagctagattttctgttgatagaagttgattcctctatgggtagactcttaacaatttttaatgaaactcctaagatttttgtaaattgttagcattagaaaagataaggttcaaaaaactgattttcctttgggaggggttgatgaaatgtaagtaattttgaatatcacgcagtcagaaaataggtgtgtgcctactatgtgtgtgcactgtgtgaggcactggagataaaactgagcaaagcaaaaatcttaactttcaagttctaagagtctataatagatagtgtaaatcagctttagacaacttttatatgctttttgtttgtttttgagacagagttttgctctttttgcacaggctggagtgcaatggtgtgatctcagctcaccacaacctccgcctcctgggttcaagcagttctcctgcctcagcctcccgagtagctgggattacaggcatgtgccaccacgcccgg

SEQ ID NO: 203536 - DNA, 1000 bp, Homo Sapiens
ttgtatttttagtagggacatgttggccaagctggtctcgaactcctgatctcaagtgatttgcctgccttggcctcccaaagtgctgagattacaggcgtgagccaccatgcccggcaatttgaggaatctttatgaagtagacagagttagtattaggccttccaccctttgtaatcacatggctgggcacagctccctgctacagtatcctgcaaagatgtgcccacactgacagcaagtgaccatttcttaagctgcaattctcaaccttattgtgtacaaaactcatttggattgtttctttaaaaaatgcaactctggtcaccacttccaaaggttctgatttaccaggtgtatgacagtctgcacttcataattagcccatgtgactccaatgcacgtgacttccactgagaaatagtactctacgacttgcttctgtaagtgtaaacctcttgtaatctcattacctttgagggttggttattcaagctgtggtcaaatccactaaaataaaatggaacacttggtttaatgttacccattctctttataaaatttctgaaaatgtttataaaggtaggaatttcaggtagagtggccgctagaagacaagcagccctctgtggccagtctctggtattcatgagcaggctttccgcatcaggcggaaagaaaagaggtgtgagtatcctctcctatgatttaaaagtggcaggatgatttttttcaaattaaatgcaacttttgaaaaagtattattattattattttttgagacagagtctctctctgttgcccaggctggagtgcagtgacacaatcttggctcactgcaacctccacctcccaggttcaagcgattctcctgtctcagcctcccgagtagctgagactacagacacccgtcaccacccaggctaatttttgtatttttagtagagacggggtttcaccatattggccaggctggtctcaaactcctgaccttgtgatc

SEQ ID NO: 203537 - DNA, 1000 bp, Homo Sapiens
gttgaatttagtcacacagttcctctgtaggttataatgataacaaagtgaatttttttttaacatgaccatataagaagattgataagcagatgctttctccctgtgaagtcacacaggacactggtggatcttcttatttggaatggcccttgatgctcatggcccattcctatatgtcttctcaatggtaaaaatccttctctgtgagtggatctgaattttcaggccagccaaaaaagttttggagctaagtttggcaaactcagtaatttaatgaagatagttgttattattttggttcaaaaaaataagactcagagcagtatatctagtcataagtttttgtataaaaaagagggaagctaagaatacacatttacatttgcttgtatgtagaaagaaactctaaaagaatgcagaagagcatagttacctgtgatgaggagaggggaaaagaacggggtcgatgggatgaagatggatggaggtggggcattttcactgaatatacccatgtatgtattttctgtttttaaaccatgtgagtctattatctattgaaaaaaattgaaatatgtttttaaaagttaggtgtttctataaagtattgagattgttatattttggaggttttatagcctgggtaacaccttgacctctctacctgtgaacttggaaccagctgagaaatagagataagaaattagctgtgtgattgatgaagttgattgggtaatgttattttagttgattactcccttttattttaaatatctatatctctgagtaccttttttttttttgcctgaaatccaacattgaaatgaaaattgccacttcctttttccttttgagttagagtgccttgtcttttgcatgtccttctattgtaagattaacaacacgtacttttatctcattttaaaattccatctaatttctttttttgagacaagttctcactccattgtccaggctggagtgcagtggcatgatc

SEQ ID NO: 203538 - DNA, 1000 bp, Homo Sapiens
ctgattaatagataaatagaatgtggcatatgcatcaatggaatatcactcagcaatgaaaaagaaatggtagtactgacacatgttacagcacaagccttaaaaacactatgaaaactaagtttaaaaaaaaaaaacaaaaaggactacatattgcatgattccatttataggaaataatcagaataagcaaatctgtagagacagaaagtaggacagtggttgcctacggatggaggagttgaggaaaagaggcacttactattaacaaatatgagatttctttttgggatgatgaaagaactctaaaatttattgcaataatagttgcacaaatctaagaatatactgaaatccactgaattgtatgcttggtgaactgggtgaattcactggtgaactgtacactgaatatacactgagtgaaccacataatacgtgaattatacctcaataaagctatttttctttttaaagtagaaacaacccaaatgctcactgactgataaatggattaacaaaaagtggtgtatccacacagtggaatattgttcagtcatacaaaaaaatgaactactcggccaggcgtggtggctcacacctgtaatcccagcactttgggaggctgaggcaggcagaacacgaggtcaggagatcgagaccatcctggccaacgtggtgaaacctcatctctactaaaaatacaaaaaattagccaggcgtggtgacatgcacctgtaatcccagctactcagggggctgaggcaggagaatcgcttgaacccgggaggcggaggttgcagtaagccgagatcgcaccactgcactccagcctgggcaacatgggcaacagagtgagactccgtctcaaaaaaaaaaaacaaaaaaaaaacccactcatatatgctataacacagatgaacgttgaaaacattatgctgtatgaagaaaccagacacaaatggccacatataattccacttacatgaaataatcagaa

SEQ ID NO: 203539 - DNA, 1000 bp, Homo Sapiens
aagaacctttgtctttgtgtgttatatctattgatacatgcatcgttaagattattaaaactgagaaatttttcaaatacaagaatacactggccagacgcagtggctcacgcctgtaatctcagcactttagtaggccgaggcaggcagatcacccaaggccaggagttagggaccagcctggccaacatggtaaaacactgtctctactaaaaatacaaaaattagctgggcatggtggtgtacacctgtaatctcaactactagggtgactgaggcacaagaattgcctgaacccaggaggaggcagaggttgcagtgagccaagatcacgcgactgcactccagcctgggccacagagcgagactctgtcttaaaaaaaaaaaaaaaaaaagaagaagtaaaacttctacatcaggctgggcacgggggctcacgcctgtaatcctagcactttgggagtccaaggcagtggattacctgaagtcaggagttcgagactagcctggccaatgtggtgaaaccccatctctactaaaaatacaaaaattagctgaacatggtggcaggcgccagtaatcccagctacttgggaggctgaggcaggagaatcgcttgaacccaggaggcagaggttgcagtgagccaagatcgcgccattgcgctccagcctgggtgacagagcgagactccgtctcaaaaaaaaaaaagaaagaaactcctacatcatatcacattaaaaaaaaaaactcaaaatggatcaaagacctaaatgtagaagctaaaagtgtaaaactgttagaagaaaacataggagtaaatcttcataatcttggatcaacaatgattttttaggtatgacacttaaagcaaagaaaactaaagaaaagagataaatgggacttcatcaaatttaaaacttttgtatttcaatgagcacactcaagaaaatgaaaaaacagtatgacaactcctcaaaaaattaaacatagaatgatc

SEQ ID NO: 203540 - DNA, 1000 bp, Homo Sapiens
caaaaaaaggagagaatttaagtccaattttgaaagcatatatccaaattagtcgaataagacagtttaacaaattgtgtttaaggtgttttataactgtctttcagttcttcccttttgaaatgaaaacttctggtgtatcaatagacattgtgcttctgggtttattctgtgtggcatgaatgcaatgatataagcatacgtggatttaataatgaaaactggtatgtatcagtcaatttctactcataaaagtatataaaattgagcagctggctgtaagactccatggagcactgatagatccacgtttgcccctgaggccatctgagtatcaggtggaaaagtccacatgctaacccaatattctttgggttcggagttggacttgaccaacaggagaagctgtcagtattgaggaatataagaagccagcttccaagagaggttgcttttttctttagtaattatatatcacatatgtttttccatttaaataatgtaagaaggcctttattcattgccaaaggctgttatagtttcatttccctatgtaatactgacatctagaggaactttgaaccgaagagtttccaacaaacagaagttgtattctcctgtcctttccaggacagacgctgtatttctccttttcttttcaggactgcaaccaaaaatatgaaacatttttactttgtatttctaagttatgcctagaagttgctaaaatagaaagctcaagtttgtagatacaccttgtttattgtccaaaaatgaaacatgtcttctaccgattaaagagcacaggaccagtgctcttaagcattaagtttctgacccaatcctgaccatccccagttaatgggatgaaaaccatgtcagtgactatattcctctgctgaattcacatcgatggctgggatgaacctaaggacctctttcatgcaaattcacttaaaaatatttctatatttgcatatggatttctttggaactattt

SEQ ID NO: 203541 - DNA, 1000 bp, Homo Sapiens
aacaactgtactaccaaccagatttcatcaatcatattttaaccatagtattagttgataatagacaaattttttcggtactttttataattttatacttgtaaattagtgtgtatgctccaaaaatgatgcagtacactttagcatttgcttgttgggaagagatgagaaaataagatgcgtttatcagatcttccaattgcgcaccagaaatactttcaaagtacctatgttgtaatttcatttttaaaaaattcttttcaattgggggggagggtgaataagtaattacaaagaatggctgcctttagatagaggtttatcatgtaattataataatgatcatttaaaaggatccaaaatgtctccactagtttaaagggctaggcagagttatttttaaaatcaaacgtatgtgctttttctgtttatgtctttggaaagaacattctgtataatgaaaaacatgaccaaatttttcacagtacatcactataaaaccctgtaattgacttttggggttggtttactctatatctatttttgacctcgtagaaaacagcaatgatgtggtgaaaggcccaaaatttaagtctcattgcaggataagactccatcctgattagtatagaagtatcatatttgtgctgggaaatgtgcccattctagtagagaaaactttagtgcataggaaccacctcttttctaatcaagccatgtaaaaactagtaactctggtgtctagtctgggccttggatggaatgtggatgttgtttacaccgatcccctccattaaaggcagcataatgttggtcttcaaaactgatgttggaaatgacaggttcattgcagttaatctgatggaaagtaacaatgtatgtcacaggtaaattataaattaacctttaaacatataaattatcattagatagttctttttctcttgtgttaacacagattaaataaagaacttaatctccttctaaaagctttgaattc

SEQ ID NO: 203542 - DNA, 1000 bp, Homo Sapiens
ctccacacctccccgcaagttgagggagccggctccggccttggctagcccagtaaggggctcccacggtgcagtggtgggctgaagtgcttctcaagcgctgccagagtgggcgcccaggcccaggaggcgctcagagcgagccagggctgagggctgtcagcacgctgtcacctctcactggtacagcccccttatctccaggctttttcccttctcacccgtttcgcgtgccttttaagatgcgggatttttcttctacctgacttcagacttggtgacctctttgttaatccaagtccttgatctcaggaaacccccaagatctccattcactctactcatcccaggcttaggtacctgacccctcagtgccagctgtgtgactgtttcctgaatcctacttccagtctgtggtctcatgttgcttctaccgtgctttaaaggactgccaatgtgtgaagctttttgtatttgatgtgttaatgaggttgtgagttttattctttgctcagccaaatgaatttgtaaagagaattatgtattagagaatttgtaaagaggattatacacatatatatatgaaatacacatatatataatccatgtatatatacatatgatccataaataatctgtatatatatgtttaatgagtaacaactatctattgatgaaaatggtggaagttatgtaagatgacttgtaaggagcatcccttccctgggagaaatcagcactgaatgtctcctgggaggtagcacattttgatgctgctgctgatgatgatgatgatggagaagaggaagataagcatctccattgctttttatgtgctaggtacatagtctcatttgctctcacgttaatccaggaaactaggcactgttttggtccctgtattagctagcttgggctgccataacaaaataccacagactgcatggcttaaacaacagaaatttattttctcatagtctggagctggaagtccaagatc

SEQ ID NO: 203543 - DNA, 1000 bp, Homo Sapiens
tgaacctgagtgttaagcgtctccttcaattttgtgccctggttgccttactcgcctctccctgcctagtcccagccctctggtcacggatgtgatttcagacaaaatccctcacagggcagcttcagcctgatcctgggggaaccctggagtgtaagttatgccttagacttttcctggttaggggctagaggcctggggctttctgactcctgtactccctgggcactggttaaggacaccttgagaatcaggataacgtaaattcccaagaacagacctcctaaaaagagccacaggtgctggctgttggaagggaaagtgcacctaaggagggggacttggggcacatgatcagtaggaagggatctgggtgagcatcgataatacgtctcaccagtgtttgttgaaagaatgactgaatgaaggaagaagtatataggtgaatgaacaattgaattaattgaacaaatgaaggaatgaactaaaagttgagagcattaaagtcttgtctttgaccaactttgagctcccaccccacccagcttgcatgcggatgctggatgacgagcatggtggtggatgtcctcatagcaaagttcatctctccttcaccaggaagtttcccatcagtagtggatacatagaacgtccaccgacatgatccaaatgctggtagacctaatacccaaaaagagagcagagcagaatgtccttcttttccctggaaacatcccctaagagacagcagggaaatgaagaagaaagtcattggtttactagtgacctggctgacaggctcttgctctcccaatccctccatcctacccattaaccagagctccccaaagcagcccagtatacggtgtcactgcttaaatcccatcacatctccctactgactcttattacattccaaaatatttacgcatttgatgactcagaataatcatctctgtcccaagcctctgagactggcagtaagagcagcagagaattc

SEQ ID NO: 203544 - DNA, 1000 bp, Homo Sapiens
taaacaatttaactttaagtggaactggtaggaattccatcaggaaattttataatttaaaaaaacaggccgggcatggtggctcacgcctgtaatcccagcactttgggaggccaaggcgggcaatcacctgaggtgaggagttcgagaccagcctggccaacatggtgaaaccctgtctctactaaaaatacaaaaattagccagatgcggtggcatgccctattgtcccagctactcgggaggttgaggctggagaatcgcttgaaccaggagacagaggttgcagtgagccgagatcacgccactgcactccagcctgggcgacagagcaagactgtgtctcaaaaaataaataagtaagagcttaggaacaaactctacttgcatggttaaaagtctagaaaatagatttttagtttttgtaaacatcgatattaattaaccctgacctgagaaattctaacacaaagcctatgatgtctctctcttgctcatctataacaactccttcctattaaagcaaaagaagaaaaaagaagtccactcagacaggacaaaagccaagatctagctgaaaccaatgtctttgtaagaacagccacgtgggcagatggcttgagctcaggagttcgagactagcctacacaatatggcgagactctgtctctacaaaagacatacaaattagccaggtatggtggtgcatgcctatagtcccagctacttgggaggctgatgtgggaggatcacttgagcccaggagggtgaggctgtagtgagtgagttgcgattgtgccactgcacttcagcctggacgacagagcaagaccttgtctcaaaaaataaaaataaaaataaaaaaaacagaacagccatactatggtataaagcaggtttttccccctcaaatatctacttttctattttgctaaaatatcaaagacttttctattttgctaaaaatcgggcctttgccaaaaactataatccagaattc

SEQ ID NO: 203545 - DNA, 1000 bp, Homo Sapiens
tgggcagctggcatagtcagcaggctgattatgctgggcgagtcccccctctcccactttttctgatggggagtgggagaagggtggggttttgatgtctggctttcttgctttgaccctctaaatctgttacttccttggggtggggaacaagcccaaacctctgggggctgtagctggccatcaggaagaaaccaactagcagctaagctcaaaagcttccagcagccatgaatcgagctttgcgtggcacctcgtgtttccagacactgccatcaattcccacaatgactctacgaaacagcggacagagcctccattttacatgcaaataaaatcaggctccgtgatgttaaaatcacgtttgcaaggtcacctggctggcaggtagtagagcaggggttcagacacccccacataagcacagcttaagagggtgcatgggaatctgcagagccggccaaagggcctcccagctgggcaaagacccgcagcagaagtcaatcttcaagtaacgttttcagattccccagcccctgagatgatcctgttcacattatcttccttgcactcaagctggcccttgcttttcagttctgctgtatgtgcggagggagactgaggaggtgtttgacgcgctcatgttgaagaccccagacctgaaggggctgaggaatgcggtaagctgcctgtggaccccgccccccatggcagaccccctctaggctcctgtccccactcctcaccacgcagttctgatttcccacaggagggaaccttggcatgccggtggcctacccgtcccaccctgtccagggggcctgaggggccctgccggtgggggtgtgcctctgcgatgttatctcccagccagaaccctgactccaccctgggagtcgcacacaccataaatcctccttgatctgatggctgctgtctgacaggccagggttttttgttggctttgcaaacctgtttctgttttaatgggaatggaacc

SEQ ID NO: 203546 - DNA, 1000 bp, Homo Sapiens
cagactcttgaggtctgagatactatggtctttgccttcccttccctcaatgtctaaaatagaaaaatgcattatctagccatatttataactgaagtgttacttaataactgctgtgatatcattctataaaagacaaaaactgaatatgcttttaaaagtggacagtttaatagatattaaagaaatattaatattctgtcatattaattacaaaaattataaagttttgctctctaaaagttttgtttccctttcctccttccttcatttcctccctccctccctccctctcttccttccttccttttgctttctcagtggcaatttctctctagtttaggaaccaaataaaaaatgttgctgcctctagggggtggcattttaataactttttaagtggggtctaaatcaaagagcgcttaagggcttcaaagattctgtctttgttagtttgccttcagaacagagtgtgtgttcccagacaacagtggcagaaggaaaactatgcaaccaccttcaattataatttgttcatttgcaccttaatgaatgaattagtatgccacatcagttctactccactgtcatgataaaacttgcatttatataacctgtaatcatttttactatgggcacaagggagaaattgatttctaaagttgatgacaacaaataggttatgctattgcaaagccatgagaatttgcaaatgacttgtggcaacatgcaagagacaagttgcaattaaatatatgccaatagaaataattgctttgatgatggctgctatggcactaacaaagagaaaataaatgtaggcacttgtatgcttttacaagtaaataaattgcaatggaaataaaatgaatcagagtcaaaggaagtgtgcatagagttgctagtcatttctgactcaatagcaaattagagcctaaactttgtttgaattgcagcacaatttccactaaaccacaacgctcagatccccaaagaattc

SEQ ID NO: 203547 - DNA, 1000 bp, Homo Sapiens
aaagtagcttgaaaggaaagaatggaaaaagattccatgccaaaaaaataaccaaaataaagtaaccaaaaacttaggaaatgcagtaaaactagttgtaagggaaaaatgtatagctattaattctaccctttaaaaaaataagaaaaaaacctaactttacaacttgaggaactgaaaaataagaacaagctaaacctaaagctagcagaaggaactacataataaagatgaagacagagatgaatgaaatagaaaacagaaaaataatagaggaaaattagtgaaacaaaaaattggttctttgaaaagatcaataaaattgataacattttagctacatagactaagaaaaaaagagacgtttcaaattactaaaatagaaagtgaaagtgggttttcctaagaaaaagaaagaaataaaagtgggaacagtactaccaactctacagaaataaaaatggattaacagagattactaagaataattatatgctaatacataggataatctagttaaaatggacaaattcctagaaaaataaaacctaccaagactaactaatgaaaaactctaagtaaatttataacttttataacatgattgagccagtgaccaaaaatctctggacagagaaaacctgtggacctcacggcttcactggtgaattctaccaaactttaagaaatgaatgctaatccttcttgaatgatttaagaagagggaacactttctaattctttgtatgaggccagtattattctgattccaatgccagacaaagacactctaagaaaaggcaactagaggccaatatcccttatgaacatcgatgccaaaatcttcaacaaaatgtagcaaactgaattcagcagcatattaaaaggaatatacaccatgatcatgtgggatttattcctggaatgcaaggatgaatcaatatgtaaaatcaatcaatgtaatacatcatagtaacagaatgaatagggtaaaaagcgt

SEQ ID NO: 203548 - DNA, 1000 bp, Homo Sapiens
ttcttttggtctggcttctttcactcagaatagttattctgagatttaacaatcttattgttgcatgtatcaataggccattcctttttattggtgggtagcgttccattgtgtgcacatagcagcttctttacccattcacccttttaatttagccattttagtaggtgagtaatggtatcccactgtagttttaatttgtgtttccctaataaccaatgatagtaagcatcttttcatgcggctatttgccatcagcttatcttctttggtgaaatgtctgttgaaattttatgagtttttttcatcgagatattttatttttgaagtttgacaggtctttatgtattttaggtacaagtcctttatcagatatgatttgcaagtctgtagcctttttatactcttttttcttatttcatgtcacatgttaacacccatctttatgctctcaatagtatattttgaagagcagaagtttcaaattttgatgaagcccaatttatcaatttatactaatatggattgtgctttttggtatcttattgaagaaatctttgtctaacctaaggccacatacattttctcctatgctttcttctaaaggttttataattttaattatgtttccatctttttccctgggtgttggattcaaagtgtggtaagaagaattctaagatggccccaatgatttctgctccctggcattatgtctgtgattatatcatggaatattgcagaagggattttgcaaatgtaattaaggctactaatcagttgattgtgagttaataaaaaatgagattatctgggtgggccaaacccgattacctgaagtctttaaaagcagagcattttctccagctagttgcagactaggaagtcagggatgtaaagcataagatggacttgatgtgcggttgctggcttgaagttggagcggaccacacatcaaggaaatgaggacttaaatcctaaactgcaaagaactgaattc

SEQ ID NO: 203549 - DNA, 1000 bp, Homo Sapiens
aggttgcggtgagccgagatcgcaccattgcactccagcttgggcaacaagagtgaaacttgtctcaaaaaaaacaaaccaaaaacaaaaaccaaacataatacatgtaaagcactaagaacagtgcctgatatatcattaagtaatcaggaaatgttatttttattaatataataataaattactaaggttttgtgaagattaatagatcactgtaggcacaccataaatgttaactattatgtttactaagaatatgctggcaagaagcagtctttattacatcaaaacagaagtaaaaacggttacccagtttttttgaatatgcatccaacttgtaagctgcctgctcaagagctgctacctgctcttcaatgacattgatctgatccagataaggctgcagtccagcatctttaaaaacaaagaaaaacttcatgtttatatggctttattaacaaagaatataggaaaagagtggaaaagtaataatgctagtgtctctccagctatgctaagacagattaggtggcgtgacatgattctgagcactagcagggcagatgctttagaagacagtagctagttgatcaggcacgactgtggcccagacttagtgtctctcatctactaattttccattctttttaatttcttgctccttgagcaatctttccattactgattctgtttcttgggtactcccataccaagaaagagcaccctagagaaaagaaacacaaaaataataagtcaatggaaaaaatatattcgactactctaaattagtgttttccattatagagtttttggttttctgcttatagagtaatcctttatggatttgtaaatcaattcattagaatctggccacccttcctttgccccctcccattccaggaataaactgataaaatcaagatttagaagcaaaaatacccatacaaacaaaacatgctaatcctcagaatggaagaaattcatcttaaatttggaattc

SEQ ID NO: 203550 - DNA, 1000 bp, Homo Sapiens
aatttttctcttcatatatttgatgaattgccatatagaaaaggaattcaatttgcctataaagtatctcaggtttaaaccaagattaggatttggggaaaatattttgattcaatataatgaagatctttctaatggtaaaagatgttcaaatgtgggatgaattgccttggcaggcaatgagctcctatagttataagtgcttgggcatggtctagaccagtgctgctgacttttattatgcatatgaattacttggggatcttgttaaagggttgattctatttcggaagatctggagcagggcctgattctgcatttctaataaagtcccaggtgatgctgatgctgcttgttcacaaactatatttcagtaaaaaggagctaggcaacactttggaagtaatgttgtagcagataattcaagcagtaattgggtggttcagatagatggctttcaagatcccatacaattcttaaatacattttgaagaaattttgagtttaagaaagaatttcttgcagtgatgagataaagaggctatcaaaacagtttattaagagacctttggccgggcgtggtggctcacgcctgtaatcccagcactttgggaggctgaggtgggtggatcacgaggtcaggagatcgagaccatcctggccaacatagtgaaaccccatctctactaaaaatacaaaaattagccaggaatgatggtgcatgcccgtaatcccagctactcaggaggcggaggcaggagaatcccttgaaccagggagctggaggttgcagtgagctgagatggcgccacagcactctagcctggcgacagagtgagactccgcatcaccaaaaaaaaaaaaaaaagaagagagacctttatcaacagatgcaacctctgctggtcttcctgtttgggagaactttagcataacctgacctagaggcagaaggaggcaaataacttacatttttaacattaattcagaagttttagaa

SEQ ID NO: 203551 - DNA, 1000 bp, Homo Sapiens
attttaccttttaaaaaaggaccatgaggccggcatggtggttcacacctgaatcccagcactttgggaggctgaggcaggcagatcgctttgagctcaggagttcaagaccagcctgggcaacatggcaaaaccccatctctattaaaaatacaaaaaaattagccaggcatggtggtgcatgcctgtaatcccagctattcgggaggctgaggtgagaggatggcctgagttcgggagttcaaggctgcagttgcagtgagccgagatcacaccactgcactccagcctgggtggtggagttagaccctgtctccaaaaaaaaaaaaaaaaagaaagaaaaaaaggaccacgaaaaatgaaaaatgacagtctcatgtggggaggagcaggtggaggcagatgtagtggggtagagatagataaagaacggcagaaattggtgagtattgaagttgggcaatgagatggggctcattgcactgttttgtttttttaatatatatttgaaataatgtatttcaaatttgccataataggttttataaatttaccacatcaaaaagtaaaagtggaagaaaagacttagggatgtctgttttctcttagaaatctcttgatcaacaatctcaaagaaactcatactctttaacctagtaattccacttctgggaatttatctaaaggaaataattagagatacaaagaaagtgtcattgcaatattatttaaaataaggaaaaatggaacacaactccaggtccaacaataggggaatggtgaaagaaactgtgatgcggccattaaggacatgggaaagtgcttttgacctaaaattaaatggaaaaaagtcagaaaacaaaactatataccatatgatcttcatttgcatgtgtacatgcatgtatagaatcagaatctggaaagaaatacagcaaaatgttaaaagtagttatctctgtttggtggacttgtggcaggtgttttgttttgttttgtt

SEQ ID NO: 203552 - DNA, 1000 bp, Homo Sapiens
catgcctgtagtcccagctacttaagaggctgagacaggggcattgcttgagcccagaggtttgagtctagcctgggcaacatagggagaccctgagaaagaagaaagcaaagcaaagctaaaaaaaaaaagaaagaaaaggaaggaaagaaaggaaggaaagagagaaaaatagagagaaagagaaaaagagaaaagagagaaaggaaggaaggaagaaagggaaggaaggaaggaagggagggagggaagggaagggaagggaagaaatgagcatatcctgtgatcactttgaatctaagcctataattttatgatagatgttcaacaattcttagttctgttgagtctgtgtccgctcagcagctcagctgggcatctcaaaggtcaaatcatttaaatattttctctgagtcaaattcacaaacacaagagttgattctacatctgcagacaaacaggtaccagaaagccctacctcactgttacacactaagagtgtggaatgaacagcaggtgaaatagccaaacctacacaaatcaaccaacaaaatcaaatgggagttgaggagaggcgtaggtgttactcaggtatagtgccaagtggatctgaggacaagaatgttctcctatgcatctctgtatccttaatactaagcacagtgcctggcacaaaatagatgctcaaaaaccatttgctgaattcaactgaactgaaatttatgtctgacaattattaactatttgccttttcatttcgtatgaggttcacgattcattgttatatatttattcatacattgacttggatttaattgcttatatctcccccactacattacaaacaccataagggaccatgtctcctattgatcattgtataccatgtagccctggtacattgtgtggcacataggaggtgtgcacttaatatttgttgaatgaagtgaataaatactggaagtggatctctaaaataactgtgtacttgaaagaattc

SEQ ID NO: 203553 - DNA, 1000 bp, Homo Sapiens
tttgctttttgtttttttttttttttttgagatggagtctcgctctgtcacccagactggagtgcagtggcacaatctcggctcactgccacctttgcctcctgggttcaagtgattctcctgcctcagccttccagatagctgggattatagctttgcaccacaacacctggctaatttttgtatttttagtagaaacggggtttcaccacattggccaggctggcctcatactcctgacctcaagtgatccaccggcctcaacctcccaaagtgctgggattacaggcatgagccaccatgcccggcctcaatttttataccgaggattttcctcgtatgtattttacttgctgtgctatcaggtatacctctgtaaaccacatacaattctgtttgaaacaaggcaggacacaaaaaagaaatacctagagtgagaactcatggaatttcaaatcttttttttttttttttgagatggagtctcactctgtcgcccaggctggagtgcagtggcacaatcttggctcactgcaacctccgcctcccggcttcgagcaattctagtacctcagcctcccgagtagccaggattacaggcacatgccagcacgcctgggtaatttttgtgtttttagtagagatggggtttcaccatgttggccaggttggtctcgaactcctggcctcaggtgatccaccctcctcagcctcccaaagtgctgggattacaggcgtgagcctctgcacctggtccaaatcttttttaaaatgcactcttaaaacttgggaatgtataaaataccattcctgcctttgatgaacttaaaaatctattgtcatacgtgtaaatggttaccagaaacaacagaatatgatagatcacaaaggtagtacaagcaaagtccataggaagggttgcaccttctccccagaggcaaagttaaaatgaatggagctaccaggatttagcgtttcttttgtagaactctaggaattc

SEQ ID NO: 203554 - DNA, 1000 bp, Homo Sapiens
catgaccctcttttatccacaaccattcagcccccagagtaatctttctaaagtgcaattctgatcacgctgcttcctgtgactctcattgcttagaggataaagtccaagcccctcacatggtgtatgtggctgcatgaccagcatgaccttcatcacccgtccctgcttcaacatgggtctgctcctctgtgccttccagttctgtgctcctcttgtcttctttctgctgccctttgccccctcttcctctgactccctcctcatgggcatactgaaattctcaaatgcagaagtccccctaccccaggagaattccttggccacaccacttccttactgggctgcaagtcccccataatagcatgtgcccatggcagtattcacacttgcttatacttgtgggaggcagcggggtgcagtgattggagccaaaatgtctgggcttgaatcacagctctgctgcccactcactccttatgtgacctcgggcaagttactttaccctcctatgcctgcagttctcatttatggagtcaggataatagtaagagacccaaactcaccaagtgctgagtgtgaagtgagcccaaatgtgtacagtttagaacagtaactggcacatgataagcacgcaataaatgctagccattatctgaactgtgttcctagctcctcacttgatggtgagctctttgaagtgaggggcagtatttataaatattaccatgtgccaggcgctgtgtgaggtgtttctatttcagccagtcctcacaaatgaggtaagtgccaattcttcctccctgtggccctcctcacctcctagctccttccctcttcccatcttctctctgtccttccttcctttcatacatactttggtgtcaagtctgtgccgtcatccctatttgacagatgaggaagcagccgcctgcggagaagctaaggaatttgtccatatgcacatagccagctgagcggcagtcctggggtggaattc

SEQ ID NO: 203555 - DNA, 1000 bp, Homo Sapiens
tgtaagaaagttgcctttggtatatttttgcccactctctgtagtgattctagcctagtaatattacaaaaaaagataggtcatcaatttcataacttgccttaaatctctttttattatgctttccctttaacatacaaaaagcttccaatatgtcctattcttaaaagaccagtaaaataacaaaattttaaaatgtcccttactcaaaatcttcgactattagtgctgggaagccacttagatgcagagtagcacgatggaaaccatatgggtttggacttaagccaaccaccctagaccaagttatataacattttcctgagcctcagcctcttctgtaaattggggataataatggtacctcattcataagactcttctgagggaggattaaatgaaatcatgcctataaaattcctgatttatggcaagtgtgtataaaatgatggctattaatcaccaagttcaacctcttcatttcacagatgagaaaaaggaagctagaaccagaacaatctttctccagattctcctattcagtaactttctttacaactaaggacaaattccttgagaagtggtctacagccacttcattcactaagtcactatctgacctccaagttaatctccattcccatcaatcctacaaatattcctgttgctaatgccgtctatgaaatagacaaaccccataattatgcttaaataattatgggactatttcactctgaaactgagtgaatagtccccactgggactattggactgattaaacctttggatatttattcaaagcatccctcttcaaaccaaaattctgtaataaaactgtctgcttcacttggaccctacatggcacctgatacaagccaaattactgttattcaaataaaacatttttaacaatatgtttgaatgaataattattacttttagaaatagatataaaagattattaaatatttttaatttttcttttcaagttggtaagatc

SEQ ID NO: 203556 - DNA, 1000 bp, Homo Sapiens
atcccagcactttgggaggccgagacgggcggatcacgaggtcaggagatcgagaccatcctggctaacacggtgaaaccccgtctctactaaaaatacaaaaattagccgggcatggtggcgcgcgcctgtagtctcagctacacgggaggctgaggcaggagaatggcgtgaacccgggaggcggagcttgcagtgagtcgagatcgcgccactgcactccagcctgggcgacagagcgaaactccgtctcaaaaaaaaaaaaaaaaaaaaaaaaaaagaaagctgatatagtttggatatttgtcccacccaaatacgtttaaatgtatctccagtgttggaggtggggcctggtgggaggtgactggatcatggaggtggatttcccatgaaatagtttagcatcatcctcttggtgctgttctcatgatagtgcatgagttctcacaagatctggatgtttaaaagtgtgcggcacctcccacccactctcctgctcccgctcctgcctggtgaaacacctgatcccgctttgccttccgcttttgcttcctgaggcctcaccagaagatgctggcactatgtttcctatacagcctgcagaactaggagacaaatcagcctcttttcttacaaattacccagcctcgggtatttctttatagcaatgtaagaaacggctgaatgcatgcacactgtaataaattacttttacaagaatccccattgcaggtgccgcttataggaacttgacctaggatagctggaaccagagccatcccatgaaggagaccgcaaggatggaattccttaagggtgactcactggctgaatggtagtgaggacccagcaggtggaatattgacagtccctgaagtgtccgagccctgcagtggctaaaactttcacctgtgctgccccgggggcacagcagcatccgtttatggtcttcccaacagcgatgtgaattgtgcagctctctgtcacaatagaattc

SEQ ID NO: 203557 - DNA, 1000 bp, Homo Sapiens
ctggttggaagctcaccctgcaaagaacaccccggaggtgtttccagggctcagctgtttttcactcatgtctaggcagggccttgaggcccctgaggaactttcaactttgccctcaagacttcctcttaatattattattattattattattattattattattattattattatttgaggcagagtctcgccctgtcacccagggtggagtgcagtggcgtgatgatctctgctcactgcaacctccatctcccgggttcaagcaattcttctgcctcagcctcctgagtagctgggattacaggtgtgcgccctgacgcccagataatttttgtatttttagtagagacaggatttcacgatgttggccaggctggtcttgaactcctgacctcaagtgatccacccaccttgacctcccaaagtgctgggactacacacatgagccaccgtgcctagcctctcaatattgtttttcactgtccttcttgacacatgaaaataggctgtgcttctcttgaggcaataattggatcagaattttaggatttttgcatgaccagccattttattttgtaggcgaggaagcagaagacctgagaatgacttcccctaagattctgaggcaatggagtggcaggaccaagtcagccaccccatcttccccttcccactatgtggttctcctcttactgccctctgtcttagccggggaatcttacagatgttgcatctggtgcttcctggtgttcatttcttccaaccaccatttgcccttgcaaataccattcggtatgaaagtattttagagcaactgagtcttcagtgtgtcactttattgccaaaagaagacacaaacgatggagtacaatggtaggagtctccggctgggttctcagggattttctcaggaattatgttttgctccaagtcgtttcagttgacgtattcattcctcagaaccggtagatgactatgacatataatacccaagctt

SEQ ID NO: 203558 - DNA, 1000 bp, Homo Sapiens
aattttaccttgtatctttcccccttcctcctacaagaattctgtaaacaaaaacaattttattactatcatgtgtgagccaaaagtttctctcttgctgcccaaggtcttcccccatgagagtcatcatgtgatgcttctgggttgtccttagtgattgtcctgagtgtctccacatgcccatatttggaaactgaatgtagcggttctgcctgggctctaatctccatttacttctgttctgtttttgtttatacaagagacggtctggcctggtcatttctcgtcttggtatgttactgctgagtcacagttcagttaaccaagaaccatgagaatgaaagttctcaactaatcacagacggtagattccccaatgcaatgaaaaactcttctttatatcaggaatattaaaatggaagattacatttaaaataataattaaatctacccagtgcttcatggttcttcttgttgatttctcagggtgtggttagcaatgaactgaggtttataactagcaagtattagtgaaaaccccctgataattcagtttaatggctactttgacacattcatcctgatttaaacacagaccctacaggttatataaacggataagatacaagttgttttggtaaattaaaatctgtaaatatgtatgataaaccagccagctatttcttaagtatttacatgtagttttcactcagcttaccagggcccagggatttaattaagctgtactgcaagttctgtttatggttgtgccatatacacaggtggtgctcaataaatctttgttgacttgatgttgattgagtgtatctggggtttaccttcactgtagaaattaccttacatggatggcaacgctaggtgtattcacctggtagacagtgggtctgtatgaagcttaggttttgctggcagtcagcagtttaagtgattaacgaagagttcttacaatacagggagcaacgatttaaagacagaattc

SEQ ID NO: 203559 - DNA, 1000 bp, Homo Sapiens
tgcatttgaatgtctcctgttgaaaaacaaatggtggtatattatctacctgaagaacagagattttttcctaagtctttagagagatgaaatctaaatccttaaagaaaggtagtaggtaggcaatcttttcttttcttttcttttcttttctttttttttttttttttccgagatggagtctcactctcactcaggcaggagtgcaatggcatggtcttcactcactgcaacctccacctcccaggttcaagtgattctcctacctcagcctcttgagtagctgggactatagcacatgccaccacacccggctaatttttgtatttttagtagagacgggtgtcactatgttggccaggctggtcgcaaactcctgacctcgtgatccgcacaccccagccttccaaagtgctgggattacagacatgagccaccatgcccattcaatcttttcttttatcagaagggtctatgggtgacagttcaagtcctggaaataattctgctatctcttgttggagaaagtgctggttttttcagatcaggcaacaggcttataaacgtttattgcagttacaagctacaaagaaagatttctttccagcactactgctccaggtagagcagttgcaccagtcattatttataactggattaaagagtagcagcacatacttctaccgtggttatagagtgccttctgttgtacagagtggactgcttattcaccagggagttctcaaacacctttctctatgggcgctgtcccaaataatgtcaagagagaaaaaattaaaaatgagctcctgccctctaagaacagatgggagcagccccaaatcttgcaaatgaagcaagagggggtattcagtctttaatccaagcagctagaagcttgcctttcccaagttcaccgagtgaggattttaacactcctttgacaaagaaatggggccgagcagcagaggaaggcaggtgacactgagtcatggaattc

SEQ ID NO: 203560 - DNA, 1000 bp, Homo Sapiens
tatttctgtccctttgaagcttataaacattcaaaggaataaagaatgctatatgtcatcttctgtcaataaaatgagtactacactggtgaaagtttgatgtcgccataaattataagtaactaaagaaaaataaaaatactagacaaaattttgaactcttatcccaatgctctgctacagcaaagaacatagggtagctgaataattaagatatatttaaggatataatatctatatataaaaactatggtcatgttagatattgagattctgtcagtcattttattttctgatagtttttaaaaggcttttgctcttaataaatgtttgcaatcacatgtgcatcattttaacatgattcttagtataatatataatatctgagtagatatagatagataatgatagagatattgaaatatgcctatttccagtgactacaaattgttatgaaggcaaacacccttttatgacatgtttcatatattaaaaaacaaaactacaagtcacaaaattttacttggtaggaatgaattatccacccctcagtgtggagggttttaccatcactaaaactttagtcattatgctaagtgtgcatcgtctatttttacaaagtttctttctaatccatgctgaaacaatggcacattctttttggatcattttcttagtaagttattttacattaaattcatgaaattaacttatttgacatagtatttcagtaatttttaactgtattattttgtatattttaattaatatataaatataaattacattttttttacatacagcatgttgttttgttatatatatatattgtggaatggctaaattgagctaaatttttattgcaacaaagttctaaatattatcctatattttggaccacagatacaaaaatacataaagttcttacatactgacaaaatttgagatttaaaaagtaatgcacttgagttgaagtatttttattgccaactttgaattc

SEQ ID NO: 203561 - DNA, 1000 bp, Homo Sapiens
tcaccatctttattccatttcagtgcacttgacgttagttaccaaaaaaataatgcccacttcaaaaaagcttacatttaagttaagaacgttttctaatggatccttatttgtctgtcctgagcaaagttaatggtgtggaaacggatctagtagttcaaggcaaatggaaatcaacttgagaacatatttttcttctaatcaaatgtcacttgttttaggcttgtacaaaggatctgaaagctcactttctacttgtttaaaaatgtgtatatatgttcatacatgcacatataagtgcattacatatattttttacatacagttttttttttgaaggcagttggaagaaatttcccttgctttgagagttacttatcattaatggaatagaaaatcaccgggcttggctcacagttgcccctcagtaaacatctgttaagtgattcaagaaatatcgatcagttcataagcttttaattgtttaactttaatttctccagatgtttctagtgttacattcaaaagataaattatcatgatagcttaaaatattagaaataactggaagctacatgataaagtacataagcttattgttcatggcctttatcctagatgttttccagttgagctctgctatttgccagaacaatttatagcttctctggtgtttctgctttctcatctgtaaaatggggacaataattttccctgcctcataggactgttgcaaagattaaataagatcatatttataaagtacttagaacagggcctggcacatataaccatcaatcactgggagctttttaaactgaatctattgtaaacagctatactaaccacctttgatccttctagaatcaaataaatgatttgatcctcccagaatcaaatgaattcctagaatgagttaattttgatatttatgggccacttttgctgaatttccatacatctctcactctcagcagggtctggagaatagggaacaatg

SEQ ID NO: 203562 - DNA, 1000 bp, Homo Sapiens
cttcctccaaagaccaagcatggagctgatcagccacagtcactgaggatcagtcaggaatttcttttccacttgggttaggtagcttgatacaaaaggaaaaatacactctatgggcatactctgcataatgcaaatatgtatggttgaatacaagaaccaaatgatctcataaaacccttctgtgttatattttaaaaagcttcacagtacatatcctctggacagttcaggctccttggtctaaaaagcacacgctcccaaatctctgctaagaagttctgcggagttcaccaggcaggcacatgtatgagtttacttatcagatgctgatgaccccattggctcaaaagtcttgctatgggaagctaccactgtggctgaaatgcccccattttcaaagaacttaaacatcttgtactgggtttaaaagccattcaacccatctaccgagtcaattcgtggaattcctattcaatgctccaatatctccacatgaaaatttattgaacacttaaaaacacctcctgtgccatgggcatcttgtctccagcctcaacatccacatccctttggtcactcttcagctgacacgctccagaaattccatccagcatatcagtgtccctgcaggtgacacgcttaggattgaaaatgcagcacaattatcatttccctactcctagaggtagtttttctttcaggcagagagaaaagcctgtgggaaggcccagtgggagcgaggaaggaaaatcgttcaggtgggaagagcagcgtggagaaggaagcaaaggggacagccccctcctggagataaggccagtgccaccgagagcagggcagcactgccctggtggcacctctggggccgccggcctgggctccctggctcctcctgttcctgctactcatgctcccgtctgctcctgactaccttctcccgggcatgggtgggcgctgctggtgtttataagatcgccattggctttacttggaattc

SEQ ID NO: 203563 - DNA, 1000 bp, Homo Sapiens
attagccaggcgtggtggcacgcacctgtggtcccagctacttgggaggctgaggcaggagaatcacttgaacccaggaggcagaggttgcagtgagctgagatcacgccactgcactccagcctgggcaacagagtgatactccatctcaaaaaaaaaaaaaaaaattatggaggaccccaaggaacttcagtttgttagaaactaacactaaacttttaaaaaatacttattttatgtaaaaataactatgataaacttattatatattaacagaaataacatatttggaaagaagaataacagtgttttacatgtttgcaaatctctttaaaatgcaacatgtagtctttcaaaagctcttctgtacactcatgaaagagagtgaaaaacatattaatatttttattaaaatagtttccatttcatggatcccttgaaagggtcttggggtatccttagggatcccagaaccatacattgagaaccactggcttaggtaatttgctgtggatgcacagctggtatgaatgaagggtggagccagcattccactcccagtttctctgaaacacacctccacactcaggcctcccccacttacccctgggcaccagaggcctgtgtaaagtgagagtgaagttccgggtgggccaaggagcttctggctctggcactccatgagtctgtctggatgatggcagctctgggcagtgctgattctatggctgctgcccctgcccacttagggaatccacagtttttgagcttcagtgggctggaacagttagagagcatctctcaatcgcttgagaagacagctctgtgactcccaaacttttctaggtttctcaccccacccccaatttgtggcatcacctgtttcagctactgacccagccagctgatgctccaagttaggaagatgggagtcagcaaaggtccttattggtatcgcctgctttttgacaaagttctgaagatggacccctttgaattc

SEQ ID NO: 203564 - DNA, 1000 bp, Homo Sapiens
ttaagttataaatggcatacatagccatggggtggagagaaatcaatgtggaagcaaagagaagcagtttaaagactgagacctctaatcctgaggcattccaactaataaaggtcagagaggaggaacatacagcaaaatttatttaaaaagagtagccaggaaataggaagaataaaactcaaaagtgaggggtcttataaaacaaaccaaaaaaaaaaagcttcaagaaggggctataatctccatcattcctgtcataaaacaggttaagataactggaaattgaccatcggacttggaaaatggaggattagaccatggcaagtcatcttagtggaagctatagggatagaggcctccctttctatgatctgctttttgtacccactgttttgtggacaccatggttattaccaccaaatcaatagctattaccactgaattctccctttcttatttgggctttcctattgaatttgaggttgtgatgattattatcccttgtgtatccatcttgtgacagatactcaatcccactggtttccgtaacactatattccacggttttgtttttatctctctaatcatttatttaattagcttctcttccccttcattctacatgttctttcagtgattgtatccattctcacatttaaactactgtccagggccgggcgcagtgggtcacgtctgtaattccagcactttggaaggccaaggtgggcagattgtttgagctcaggaccagcctgggcaacatggcgaaacctcatctctacaaaaaatacaaaaattagcagggagtggtggtgtgcaccagctactcaggaggctgaggtaggaagatctcttgagcctgggaggcagaggttgcagtgaactgaggtcacaccactgcactccagcctggatgacagagtgagaccctgtctccaaaaaaaagaaaaactaccatccacgtaatgatgacttccaagtcttttatttttatttt

SEQ ID NO: 203565 - DNA, 1000 bp, Homo Sapiens
tgtcatatcaatgtggaagctttaagagactatgtattactctctgtgtgtcttcctcagtaccatattgattgtaaaagtgcttttcaaggcagagcctccatcagccaggtgtcctgagtgagtgtgagttagaacactgggcatgtagtgattttgagaaataaatctgattttaacttaggtgcttgctgtgtttcttttgctgggcagaagccatttagtttaattaagtcccatctattgatctttgtttgtggtgcatttgcttttgggttcttggtcatgaaatcttgtaaattttgacaaatgtttaactttttataatagatttgtgtatattttatggtagtatttgataaaataggctagtatctacatatattttatttgcttgttacatgcttaactttttcttaatttaaaaaatatttcttggctacatagttcatctgtaagtttttccaaactggagaaatctcccccaaaatttccaatatatttattgaaaaaagtctgtgtataagtggacccacatggatcaaacccatatttttcaagggtcaagtgaacttagtattattatatgtgaaacacagtatttaatctgttttatcttactttttcactcacaaattcttatattgtaagccactcaatagatgttttattattaagtaatgggtctttatctacagtttgcaaaacactgactaagggtatgagctttgggtttggaatgcctaagttcagtctggttctgccacttactactgccatggcacattcagcaagatgtataaccactgagcctcagttacttcttttataacatgggatactaatttctgcctaatgatctattttgtgattaaattaaatgagacaataacataaacggctaggcatgtttcttgcaacgttttaagtggtcataaatcaaaaggattcaaactttctttttggttgggaagataagtcctgacatgaccgaaagatc

SEQ ID NO: 203566 - DNA, 1000 bp, Homo Sapiens
cccaaggtcacctgtatcagttagctatagccacataataaaccagccccaaaagttagtgccttaaaataaccatgtattggttctcacaagttgttggctgggtatcagctctgatccaggctgggctcagttaggcggttctcctgttctcatccatgtgcctgtggcccgtaggggcttgactctgctccacatgcctctcctcctcttctgaaaacatcaggccagtccaggcatgtcctttttatagggatggcagaagtacaagagagtgagcagtagattcagagctggtatcctgtcatttcccccctaattccactggttaaagcaaagcaagtggccaaacacaggggcaggcagcaagccctgcccacaggggagggtactgcaaactggcatgttaagggtaagcagagatgagtgaggaaccagggtaatgatgcagccctgcacatcacctgcccggtaggtggtggggccaggtgtgcactggcagtcttgatccagtgtcctgctcttatgcattaagcttaactgcctcttgtgtgtgtacaaatgagataaatgctgggaaagacaagcatggggtaacatgagtgtaaatcacaggggagtgctggagtctgggtagtctggaaaaggtctttctgaggaagtcatgtttgagaggaaaaggatgcatccaggttaatgcagcagagatcacactttgtgccaaggttgcaaggtggtttcacttcctagcaggggagggagggcctttgcaatgccccctgaccaccctttgcagccccccagcctccaaatatgtcctctcatccaacgagcctgtgctctgcctagccacgcaggactgctgaccttccagagacaaccctgggcctgctgtcttccattggtcaatgctccctcctggactccccttcttcttccgaggccaggctcaaaggccctctttgtggagcagcctgccctgatcctccaggtagaattc

SEQ ID NO: 203567 - DNA, 1000 bp, Homo Sapiens
ctgcagcttagagctactaatttttacccctagataaagaggatgcctgtcagaggtgcagtgattacattgtgtccatgtggacagatgttttagattcttctatggttgtatttattgataagggtccagggatttctttttaagttcctgttaaagctattttcaggggctcatttataattaagcgcataaaataggaaagagaagaaagaaaatcacacaatttgtgatgtgtgattacgaagagatttatgactactgtaaatttcaaatttggttatgttatatgagagatgatagtgcttatggtggagcgtatgtttcttgaatagcaaatggaagataacaatacctactcacacttctgagaattaaatgatgttactatatataaaagctcttcgaaaattgcagtgcattatgcagattttcattttatgcaaaaagtggttatatggaagagtttgctgccaaattaagttcttatcctgtctaaatccattatatgtatataaagtagtttgattcataagtagctctgaattctctaatgaaaatagacagaaatgacttgaatatttgaaatctgtatatatgatccaaatctttttaaaggttttttttgcaacgtcttttcttttgtaataggtacctcatcacctatttattggtagaagtgcgaataaataaaaagcaataaaaagcaactagaaagcaagcatattattaaaattttataaacacttgaataatttgacttctcagatttttttaagtaactaaaaaataatattatgacttcatatcttaaattatttagtaccaactaaagcaaaatcaggatgttaagcaagttgaacacaaaccatcacaaagttacctacgtgttagaaataaatctgatattgcaccttcacagcaacaaggtaagacttgtttttatgtaataatacaatagtttgatacttgtctgaatattgaacaaatatgagaattc

SEQ ID NO: 203568 - DNA, 1000 bp, Homo Sapiens
gcggagcttgcagtgagccgagatcatgccactgcactccaacctgggcgacagagcaagactccatctcaaaaacaaaaacaacaacaaaaaagaatccaacctaatctctttaatattctctactgcaaactcctccctcatggtctcataatagctcatgtttattactggtttcataaaaatctttttaaactttaaaaaaatgaaatagtacatagtaaagtacatgaaacataaatgtagcgaacaagaaatgattataaagtgtacatctgtagaaccaccacccaaatcaagaaataaaacactgcttgcacccgggaagactttttctcatgtgacccttcttgatcacaccctaatcccttaggagtaaccactatctcgacttaacagtaattgtatacgttccttacagttttaccacccaggtacatccttgaataatatattttggtttgcctctttttgaattatactttatgtgttctttcatcaacactatttgtaagacttttcaggctgctgtgtaattctagtttggtttcacggctataattcagggtttctctacctccacactattgacattgggagtgatactttgttgtggtggctgtcccatgtattgctggatgtttagcggcatcccttgcatcacccattagcagtcagtagtacttccccttttgacacccaaaaaatgtctctggatattgccaaatgtctcctaagagccaaaaatcactcctggtagagaactactgctctaattcattcacttccattcctcattcattaatggtgttccattctaatgaatgtatcagttacttttccaatctactacaaaaataatgctgttatgaacacttatttataaaagtcttcagaagcatatacacatgcatttttctagaatgggaatcactgggtcatgtctgtattttataaggctcacccgctttttcaaagtagttgtactacaggagaattc

SEQ ID NO: 203569 - DNA, 1000 bp, Homo Sapiens
gttttaacagaaagtaaaatcaaaagcatgcagaataaattaaccttgcattttctcggcaggtcagttagtgggtgttatatccttagttgttggtgctacaaagtaaataatttttggcagctggtttagttttcaccacttctaagcctatgacaaatggtcttggaagatctttggtcttaaaaaggaaaattttctgtgtgcgagttttaagttcagttttgttgggttttgaagtcttttttatgtaagccacttatgtggcattttgttttatttgaatttgaaattttttttaagttttaaagctagagtctgccacattgaactgtttttcacacttggcatttaaaagttaatttgctttttctgtttttaaaagagactaaaaaactaaggtttcccctactaagcatttattagtcaaccacttttgaaaattgaaaaattagtttgtatggttttagattgtttttctcccaggagaaataatgttgctacataatctcagacctgcattcacgtatttagcctgccataagtcactgtcaaaatgaagaaaatgctgaaagttagatatacctgcacatgtgaatttcatgtattttctggtaatcaactctgttttaaaggcttttgggagttgttttctttcagaagcagcccactggtgctgtatttggcatgttgtgtgttattaaaacttcatataaatgcagaggtactaaaacgtgaagtttacaaaacccatcggaacatttttacttgtgtagttagcacgatcacttctccaagtacaataatctttgtgttgtgagcctgtagacaaaactcgtgtctggcatatctgattggaatgtgaaatttaatattttccactagttatttcccaacatgcaaagtgaactgatacccattaaatatatatatttaagtaaaaatagagaggatcagtggcctaatcagctttacagctgtgaatttaggaagtgaattc

SEQ ID NO: 203570 - DNA, 1000 bp, Homo Sapiens
gaatatgccttgccccacctttaactgatgacattccaccacaaaagaagtgtaaatggccagtccttgccttaactgatgacattccaccacaaaagtgtaaatggccggtccttgccttgagtgatgacattaccttgtgaaagtccttttcctggctcgtcctggctcaaaaagctcccccactgagcaccttgcgacccccactcctgcccgccagagaacaaaccccctttgactgtaattttcctttacctacccaaatcttataaaacggccccaccccatctccctttgctgactctcttttcagactcagcccgcctgcacccaggtgaaataaacagccatgttgctcacacaaagcctgtttggtggtctcttcacacggacgtgcatgaaaacggggtttcaccatgttgtccaggctggtctcgaactcctgacctcaggtgatctgcctgccttggcctcccaaagtgctggaattacaggcgtgagccaccacgccctgccacattttcaaatgattgaaaaaatatcaaaagaaacaacttcgtgacatgaagagttgtaggaaattcagatttcaggatccataaagaaggttttattaggacacagccatgcattgttatggctattttcgcacctcaacagcagggttgagttgttgcaacagagacctagtgaatggcccacagctttaaatacctactacacagccctgtgcagaagaaacactgatgcctgaagtagaatcacatggcaaacatatttgcctcacgttatctgaggaaacagtttggtcgtaatcgtgagtttcctagataattgaagccttcccttttgtgcacagaatagttaattaaaaaaacaaaaatctattcaaggaggctggaattcaggatccagaggaagaagcatttgagagtggaatggaaagacttagggggaggtaggaggaatgggttggggagttccaggatgaaagagggct

SEQ ID NO: 203571 - DNA, 1000 bp, Homo Sapiens
aaaaaataaaaaaattagctaggcatggtagtgtgcacctgtggtcccagctacttttgaggctgaggtgggaggatgcttgagcctgggagatcaaaggtacagtgagccctgattgtaccactgcactccagcctgggcaacagagtgagaccttgtctcaaaaaaatggtagtcacttatttccttctggaatttatatgttatgaggtattttttttttcaaataaatagctaattttcccaatatcacttactgactagtttattccttctctactgttttgagatgttattgttatcatatatcaaattctcatatatatacacatttctctttgttttctactttattgatccatttatttcatctatggtatataaactatttcctaaagattgacatttgaattacttagaggacaattccctttgttgtttctaacttttaagattcttttggttgttcttacatattaaattttagtgtgctaaattacattttaaaatctcattgaggacaagggtatcaagacaaatgtgggaaagaatagtcttttcaacaaagggtgctgggaccaactgtatctccacatgcaaaagaatgaaattgatccctacttcacaccatatacaaaataattaactcaaaatggatcacagacctaaaagttaaaagccaaaactataaaaactctaagaaaaaatataggagtaaatctttgtgacctggtgttatagcaaaaggaaaaactaacaaaagaaaaaaataaactggactacatcaaaattaaaacctttgtgcttcgaagaacatcatggagaagtgagaagacaacccacagaatagaaaaaaacatttgcaaatcatataagggcccaaaatccagaatatataaagaattcttaccatacaataaaaaattaactaatttaaaataaacaaagaatctaaatagacatttctcaaaatatatacatgaataataagcacataaaa

SEQ ID NO: 203572 - DNA, 1000 bp, Homo Sapiens
taaaactctcaaaggtgggcagacagatgctgtcctctgggagagtcctagcctggttgggagagggggcagtgtggggaaggagacggcgagttcctgagatgttcaggaatcaggctggtggaccgggagagagggggtgggagcaaaggacagggttcatcaggggacaggcttcaggtccaagtaaccctggaccagtattaggaagatcaagctaccctggacatctggctgaagttcccctgggcactggtgccccacctgcctttcctgggctgctccatatgtggatgaggggctcagcctcctctctggccagagatgctgcttgctccactcgggcccaggttgcccactggtctggttcagcctctctcggactcatcccccaggacccccttacccatcttctggtccctccagacctgttggtgtagtacttactccatttccacatgtccatggagaacatgttccaggacggccccttctccctcaccgctcatttcacagaggtaagatggggcaggtggactgaacccattctcctggccctcacccgccagccattgtccattcagtgccctctacgcccacttcaacgctcagcacagcaggagccgctcagcagatgtgttagcggcaagagaacaaggggtggctgggcacggtggctcacacctgtaatcctaacattttgagaggcagaggcagaggcaggaggaatgcttgagctcagaaggctgaggctgtggtaagccataattgatcatgccactgcgctccagctgggcgacacagagagaccctgtctccaaaaaaaaaaaaaaaaaaaaaaaaagcctcccgtgatggggaggctgcagcctgtgtggggctacctacctgcccagctgccttcgggtggctgagctcctctcccatctccactgtgtggatggacgtgggcctccccacacccagagagggaagagccccacagaaataacaggaattc

SEQ ID NO: 203573 - DNA, 1000 bp, Homo Sapiens
caggtcaaatacatatcttcaggcttcttagcaggaaaagagaaacaaacattccacctacccaatttatagttttctatcaatacaaacagattggctgctgctcagaagaaactcagctactccagatgtagaaatctcaaaaaggaaactttgtaggtatagtgggaagggtgttagccaaccttcatgagcacaattttgatctttttgtgtgtctcttttgtagagccctgaaatgctagctgatgaatatctccaaaggataattgagatggtacagttccatgaagggccaagtatgcagggctaaacccggggtaatatttagaacagctagaggagtggatagattccatgatccaaggcaatactccaaaaatactctttctcacaactggatttttttttcaagatgtttgggtaagaaagagcacaggattataatctaggtaaggaattagaaggcaaagtgtctgtatagcagattacgtgccgattcagaggacaagaaaacatttcatttattttaaaaatcgcatcaccatcccaatgctcatgtctgcatggatggccacctgactatggcccaggaaggccccgggaattctttcaccttgcataccagctagtgttagtaatatctgtagtagcaacatgtatgaatgcctgcctcttagcacccttaccagcactgaatattttaatttttaagtgtttgccaacccagtgggtgaaaaagggaaacatattttttaagtgtgcatttctttagctaataatgaggttggttattttccatgtgctttgaccatttttctatttggagtcttactgtctttttcttatcaatttgcatgggctctctatatattcaacatgttcatccctattaacctggatcttgagccactccttagtggaaatataaagtggccagcagaatccaggaccagttttggaaagcatggtgggtctagttggtttaaagtactgtaat

SEQ ID NO: 203574 - DNA, 1000 bp, Homo Sapiens
gaaaaatgaagagcctatttttaaaacaataattttaaaaaatgtacagttttaaaaacagtgttttttttttgttttttttttgagacagagtctcgccctgtcgcccaggctggagtgcagtggcgcgatctcggctcactgcaagctccgcctcccgggttcacgccattctcctgcctcagcctcccgagtagctgggactataggcgcctgccaccacgcctggctaatttttttgtatttttagtagagttggggtttcactgtgttagccaggatggtctcgatctcctgatctcgtgatccgcccgcctcggcctcccaacgtgctgggattataagtgtgagccaccgcatctggccttaaaaacactgtttatgtccccatagaaagttgaaacaattcacttcctttccacccgtgttcatctccactgtccaagtgtaatataaaagctgaacccaggcagctcctctaccaggactttgcctctctctgtctctagggggctattgtttttggagggcggaggagggaaaggttggttttccattttaaaagaaaattatcagaacactttttcaagaagaaagccacaaaacagacttttaaaagccaggccttctactaaagatatcagcaaatcaagacttttgccaagtaatgttaatttttaaaaataactcagaaatcctttaaaaattatattgatatgaatagatactgagtaaggtaaagcaaatatagattcacggttttgtctatataatagatttccttcactgaaacatgtatttcatgtttgaaggtacagaaaaacagagcacatttattaccttctagggactgaattttacaaaactataaagcaattaaatagtgattactttgttaaacaggtaactgaatcatcataaagtgaatactgcctaagatgaaagatgggtgtttaaggtgtttacataactctcaagatctgaagaggagtgagaattc

SEQ ID NO: 203575 - DNA, 1000 bp, Homo Sapiens
ccgaggagctctgtggggctctgttctctcaattcctgccactaatcctgcctggcgatccccaaggtctggtttcctcaaaggctgccccatgggccttaataaaaattttaaatatactctcacacacacactatattctagagaagaactattgtatcaaaatcctagatttgaataacttattattttaaataatcagtaactaaaaccaagcaatccatcacacaaagaggggaaagggtaatattctgagttataaattttttaccctgtctgataaaaatagaagcctgaaagtttaaatttttcctggatttaaatttaaagataaatttgtttttcagtgaaatatcctcaatagcaattttaccaaagaggccttcttctgaaggccacctctgaaataattagaggataaatgtcaatggcatgatattaagatattacttggccaggcgtggtggctcacgcctgtaatcccaacactttgggaggccaaggcgggtggatcacgaggtcaagagttcgagacaagcctggccaacatggtgaaaccgcatctctactaaagacacaaaaaattagccaggcgtggtagcgcacgcctgtaatcctagctattcaggaggctgaggcaggagaatcacttgaacccgggaggtagaagttgcagtgagccgagatcacgccattgcactccagcctgggcaacagggtgagactccacctcaaaaaataaaaaaaaagaaagatattattcaagaaaagaacttaggagccaggtgcagtggctcatgtctattatgccagtactttgggaggccaaggcagtaggatcacttgaggccgggagttcagagaccagtctgggaaacgtagcaagacctcgtctctacaaaaaaagtgtttaacaaattagctcagtatggtggcacatgcctgtagtcccacctactcaggaggcagaggcagaaggatggctcgagccctggaattc

SEQ ID NO: 203576 - DNA, 1000 bp, Homo Sapiens
gagagtgttctttctttagggaacaaaatgaaactagatctctcatttgtctgtatgggcaagatatggtaaacctcatgatcaaaacacatgccagttagaaacttgatcacagaaatgatgctcagtgttgaaacccaacaataaacaaacaaacaaaaacccccactctaaccagaggcatttaagcctctccactgaagttcctgtttcccaccagtttacgacccttaatgttactgcatgtatggttgcatatttgagatgattaaaaataaaagactggcttaaaagcacctcctcctctagtgtgtaattacatacaaactaaagattccttctgacgtcctaggaaccccatttgttaccgtttcatgtgtaagcaccattgaaccaatttttaaagcacatttgcagttatcaaatgtttagtgtgtcctcaagtttcattgatttgtttgcctttaagcaagaaaagagtaaagtgtattattttcccctgcttcttttcatatctgaattgtcaaaaaatgttaattttggaagtgcttttaatcactattttccccaacagactagaatggctccatgaaatttgacaattaagtaaggaaatctttatccccaaaagaagcacgtatcttaccctctaaactgcatgcaaagtaagggtctgtgtgagagtattttccccaaactcctaatggacatggcagacaatgtgtagaaaaatctgagttttgaactgaccaacttcaagtcttttaaaatctttgggcaaaaaaaaatatcatgtagcagttaaaaaaattattgacttacaaattatagaaaagatatgttatctacaatatatgccaggtgacccattaaatttaaaaaatgtgtgcgaatgagtaactacattaaaactaccatcttggatcttggtgctttccaaaattctgaaatcactattaaggagggaccataccagatttttttgttgttcttttccttg

SEQ ID NO: 203577 - DNA, 1000 bp, Homo Sapiens
tttattagaattaggtggtaggaagcctggcatcatcagagtttcttgattgtattgtaaaatataactgtacttatgagagatgggggaatccatttttcatatctatgatattccattttatggatataatcaacatttaccttttctaatctgggggcattgaggtgttttccacttttcttgtgtacataatatgtgtaattcttgtatggatgttgtggtgattgaatacttaaaatgtggtcacgctattgggctgggagggaacaagccacatcttggatatgtagggaagaagctctttccccaagtgagaaattactcatcctatcagttgtcttagcattgccaataatgctgtgttccgatctctagtgcccaccccatggccctgcactggcattttccatagcaccttgtatcatattatacaattttcttattttaatttagtgtttatttactgtctccccttgctgcaatgcaaaactccctgagggcacgggttcttgtctgttctattcacggatgcacctcaaatacctacaacaagtttatggcacgtactaggccctcatgaacgtctgtcaaatgagtgaatgaactctctgggtaagaggcttgtcctcaatgagattagggagagctctaactggtagcacactgcagactcttgtcctcagctggaaaagatgggagttcctgggcgacagaaagtaagaaggcccacccaggtggtggcaggtgtggaacagaaagccagaacttggcaagccatcatagaactgtgagttgtgaccacccataggagcaagagcaggaatggcaacagcacagcccatttggcagcccctctcctgcccccttcagccagccagcccctgctgactgagtttggaattctttcttactgagcctgcatgtggtctccagctgtttctcagcccactgtgctgggcagctactgccagtggcttgtcgctgaatcctatttgcc

SEQ ID NO: 203578 - DNA, 1000 bp, Homo Sapiens
atactcacatgattcagctaaagagaaaatcatctctggtgtttaggcactcatttgcatttaaaaacccaaaaggaatcattgtgacgaattgttgatattaatatttgtattaactgtctagggctgccatacataacaaagtactttaggctgggcagcttaaacaacagaaaggtatttattgtctcatttctgagggctgaaagtctaagatcaaggtgtcagtaaggtgggttccttcttgggactcagagggagaatatgttccaggcctccctccttaacttgcagatggccctcctctctctatagctctttagtgttttccctctgtatgtgtccgtgtccaaattaacccttttataaggacgccagtcatattgggtgacctaatgacctcattttgccttaattacccctgtaaaaaccctgtctccaaatacagtcacattccaagatactggaggttaggaatttaacatatgaattgaggggagtgaagaacaacccaatccagcccatgacagtgtcctagtgtttcaagacagtttctgcacagatagacatggagacatcgttctatccttaccttgctgattttaagactccctaccccacacacaagttgctgctgttgtttatttaataaaactgtgtagatcactttcctttgaaacactgatgcacagctgtggaaggtggggtatctgggattacatgccgacatccaacctcgctggacctatccggccccaggcattgcaccaaggactgagatacactcgtggatttaatcatccaaacacatctcctaggaggaaggccatacatgatccccccaggctgaggcttcttaaggctccccaaggggaggtggacttgacacactgaatacaggatcactcccagttgcccaaagagtttacagggcagaattaccttttcatctttatatccccagggcctgggccaaagtcaacattcctacatgtttgtt

SEQ ID NO: 203579 - DNA, 1000 bp, Homo Sapiens
catttcatttgagcataatgttggtgctcaaaaagtttcggattttggagtatttcagatttttgatttttagatttgggatgctaaccagtaattgcatttgcttgacacttctgagggacccagattgcatagtgtagtttattcattttgacagcttcctgagaccttttccttcctacttaacagatgaagaatcaaaaatacagcacaacagccaatggtaaagccaggggttttttttttttccttttttttttttttttcttctcctgagtcaacttgatatccaagctttttacttcaattatctggcaagattacatagactgtcaaagtttgtgaaagtttagcaagaaaactgtcagttttttggtcattaattcttttcccttgtttctcaggggcctttctctttttttcttttctttctttttcttttttcttttctttctttctttttttttcttttttgagacaggatcccactctgtcacgcaggctggaacatagtggcgcactcttggttcactgcaacctctgcccctcagggtcaagtgatcctcccagctcagtctccgagtagctaggactacaggcacacgccaccacacctagctaatttttatattttttgtagagacagggtttcatcatgttgcccaggctagtcttgaaatcttggcctcaggtgacccacctgcctcagcctcccaaagtgctgggattacaggtgtgagccacgacgcccggcctcagaggcctttctgaatatagaattttttagaattctggtaaaagacataatataaaatttaatgctttaaccatttgaatgtatggttcagtggcattaagtacattcacattgtggtacaaactatcaccactgtctatctccacacctgttacatcatcccaaactgatattctgtacccattaagtaacaacttcccatcccctggcaatcaccattctactttctgtctttgtgaattc

SEQ ID NO: 203580 - DNA, 1000 bp, Homo Sapiens
gaccacacaataaataagtgaacagatagaattatctctgttttaagctctccttctaattgtttttaaatcattggcatctactattgcaagcaaactcaagcacccagcaaatcactgaccaaagtgcaggtgaatgttaatgggagactctgagactgtccatctggctctaagttgagagatggtttttctgtggacccaggtactcatagttgtaatgctgctgaagaatcacaagcacttgctatataaaacataatcttttttttttgttgataaaatttttcctaagtttttatgatggaataaatacatttcatatttgccagacccctattgacttctatagggatggtaccatgtttgggaagccaaagaggagacccagagccagggaacaagacatagggtttattgaggggacttacacattactttttttttttcccccaagatggagtctcgctctgtcaccaggctggagtgctgtggagtgatctcggctcactgcaacctctgcctcttgggttcaagcaattctcctgcctcagcctcctgagtagctgggattgcaggtgcataccaccacacccagctaatttttgtatttttagcagagacggggtttcaccatgttggccaggctggtctcaaactcctgaccttgtgttccatccacctcggcctcccaaagtgctgggattacaggtatgagccaccatgcccggcccacattactttttacaaacagtagtggttctcctatccagtggcagcaggctggacaggagaactgctactgtttgtaaaaagcatgcagtttatatagcattttcactttgcaccctcccctgagcagcctccactggcaatcttcatttaatccaaaacaaagggccttgatcccctgtatggcctgtgttccacgggatgggctggggttcagatgttcctcatagataaggaatgaaattcagggttggccactcctgaattc

SEQ ID NO: 203581 - DNA, 1000 bp, Homo Sapiens
agacaaccgagaagagcagaagtgaagaccatgtaattacagaaacaaatgcttggtactgaacaacctggtctcgggggctatttttggctgcctggtcctggttaactcaagaccgagccctcagttcccttcctccttacccttcctgtgtttctatgtgtccacctctgctcatttactgaaataccaatgacttctgtgcttttatctcccgctttattttcttgcctcaggttcagctcataccagacaagcccatgccgtattttcacttggatgttttcccatcaggacaaactccacctggcaaggctgagctcactctgctccgtcctagcttagcttcttctcctagaaacatttccctgtttctgtttgcagtgataacatgctccccactacacagactcaaagtcatctcggactcatcttgctcattctcatttccaatcaacttccaagttctgtcaaacatttccttaaaaggttttccccctccttttctttctattcctactgttaatcctccgtacctaatcgctctttaacctcttaactggttcctctacaacctcaaccaccgcattttgcctgacatactaatgctagcatattatttttaaatatattaaaaaatcacattgaaaaagttttagagacttcgttttgccaatgaaataaagattacacaagaccacacggttagagagacttaaggttagaacccgggattttttgtgcttcaattctaacactttttctactaaagcatactgtgtcttataaattccagcgcagggatacattatttgtcctattttatctctaaatgctttagttctttatactttgttttaatctataagttgcttcagtttcttttggaggtagggaagagatcataaaacttggaaatcaaaacaaatgttggttaaaataaaaatgctggctttacattttgggtgtttggatggtttctgattcagaattctctcag

SEQ ID NO: 203582 - DNA, 1000 bp, Homo Sapiens
ttcattaaactgtactgttaacataaatgtttttcagttttctatatgcatgttatatttctttttttcttttttttttttctgagatggagtcttgctctgtcatccaggttggagtgcggtggtgcaacctctgcttactgcaacctctgcctcccgggttcaagaaattcttccacctcagactcccgggtagctgggattacaggtgcccatcaccatgcctagttaatttttgtatttttagtagagacaggggtttcaccatgttggccaggttggttttgaactcttggcctcaagtgatccacttacctcggcctcccaaagtgctgggattataggcatgagccaccgagcctggcctgtatgcatatttcctgataaaaagtgaaaaaaaaatgcgtatgctgaagaaggagacagaagcaccatcctcatagatgtgggacaagtaaaaaatacaggtgttttataaaatatttctttgtttcattttgggtaagttgaaagatgcaaggttaataaacattttttacatatgagagaataaagtagcactaggtaggatactattaaagacttctagacagaattttccaagccatctaacattctcatcttctgagtatttcttgaatgcagaaattaagcaacacgacatataaattttgacctggtctcattccaatattaatgtacaacaattgtgaaaaagtggagagggactaactgaaaacagatatagacaaactagtttttatgcttttgtgaaaggaatgcaattctcattgttcacttggggatcaattagtttgacaagaataatttttttataatatcaagtttataagagggaaatgggtcaagatggctgcctcttttggactgggcctcatggaattcttctgccagtagttttcttcagatctgattatttagcaggtaaagaaacctgattttgctactttacccagagttttcagatctgggggactgc

SEQ ID NO: 203583 - DNA, 1000 bp, Homo Sapiens
cacttctgcttggtttttatgaaaacaatggctctgatggattttgcacctgtgctagcgcttgggaaaggtccatgcaggaatgggcacagtcacatgatgaatgagatggcatcatcccaaaaaataaactgaaacaaacaaaaacttaaaaaaaaaaaaagaacaggactagaaaacttaattttttttgacatatctaaaaaaggggacaagaacagtagcatttgttctccccatggggacaggaatgaagagggaggagggaagagggacttgatttcttctgttcacaagagaatggttggaggggattcttcagagtttttcaggggatgggacccaaatgtagtgcccagactggtcctcaatgatttgtttgattttgttataaatctcttccagtgagtcaccctgtacaatggctaaagtgaagaggaaaacaaaattattactgtggtccatagcacatcccccaaacccagcaatcctgcctctcccaacaatcctacaagtcccccctccaccccctcacccctcacatgaaggacatgttcccaggagtatgggtttgggcttgggttcactggctggctgcctgtgtgttcagggcagtaagggcaaccaacaaggtaccccaagtccagggcttgaagtcaactcactgagacagtgagactaagtagtaatgaccagaaaaatgtgtttattcaaaagatgtttattgagcacccactatgtgccagaccttgcagttcatgttgttcttgggtgccataaggccagcagcttgttattctaaagcagccttactaaaagatttggaaaatcgcagttctccacagaaagaactgaaagccacaatttctggcaagaggcagcgctcctgggcccatcacatctgctgtatgtcagaggtcagcccagcaaacaaggacatggatgctgatggtaaagggagctctgaagacccaaggtgtgtgaggacatttatgaattc

SEQ ID NO: 203584 - DNA, 1000 bp, Homo Sapiens
ctgccacgattgccgcctcttcctttccggttgttgtttccacgtccacgactcgattctttctcgcttttcttctctctattctctttgttttctgaattttcttttgcaaaattctttttcttacaccctacagtctcccatgaagtctatcagagagaacggctgttaatcatttatcattcaaagtgtgtacaattatcaaaggcacatgcatgtatctttctttttttttttttttttgagacggagtctcgctctgtcgcccaggctggagtgcatggcgccctctcagctcactgcaagctccgcctcccaggttcacaacattctcctgcctcagtctcctgagtagctgggactacaggcgcctgccaccacgcccaactaattttttgtatttttagtggagatggggtttcatcgtgttagccatgatggtctcgatctcctgacctcgtgatctgcccgccttggcctcccaaagtgctgggattacaggcgtgagccaccgcgcccggcacatgcacgtatctttcaaacctaactacccacagcttgcagctcacctgcttatcatttaaattctttccctatagttctactttattgatgatgaaggtaacaatcctcttgctaagctcctgttgctaaataattacagctattagctgacctgacaaaatactgtacattttcccaacataaagccctttcctatgcaaatttaggaatacagtaaaagtcatttccccaagctcctattctacaccacctcacttacctctctattaggccttaaatctacttattaattcaaagaccacaaaattacttagaatgatgccccaaaagctccaggaatacaaccttgcctgttccattattcaaactaattatctaaaacaatttaatggcagataagtaaaattttagcttggttttggtgggtttttaaaaaatttataaagcacctaaatttttaacctccaaagaattc

SEQ ID NO: 203585 - DNA, 1000 bp, Homo Sapiens
ccaaaatcctgtccaggcaggccacacggtgacctggtcacttaggggccaccctcttgtgtccattgggccctgccagctgcacttttatctgacatgtaattaggtgcctgtgtaagtagtattttctgtgctctggtatgtccccagatgcaaatccaggaaggccattcacgacgttgtcacagaagaagtggaggtcagtaccactgccatcatgactgcaagcagagcaaatggacagagctcgcagagtggccccagagcctgcctgggcccccttctcactgctcctccactccctggtctgctgagagctggtgaatgatgactcccgcaggcctgccggcgaggggcagtgctgggagccggctgagacacaccctgcaagtgtaccctgctgctcctgccaggtctagctcccaccattggcaccactctgcccagccctggccagtggtactgtttgcagttagcttctcactgccctctcactgctactggggtgggccatggacctgcagctgccccgtcctgccaagaggctttacccccatggctgggcttctgcttgggcttacactcccatatctggagggattagtaccttgtgccagattcaacacccccagaggggccttgcccctggaactctgcccagttggtgccagctgccttctccagggtctggacctgtccactgtccatggcctccagccactgcatggagtcctccatgctggttggacccagcagttagaactttctgagagtgagtgcatttgtttcctctatagctgctgcaatgaattaccacaaatttaatagcttaagtaacacacatttatcaccccatgttctgtaaatcagaattccagtatggcaaggctagactctcttcccagggcctcactgggctgaaatcaaggtactggctggggctggagttcacctggggctcaaggtcctctttccagcttgcccattattggcagaattc

SEQ ID NO: 203586 - DNA, 1000 bp, Homo Sapiens
agcgagactctgtctcaagagaaaaaaaaggccctgatcagcaacgtctccaccacacatcccagcacttagccagccctctgcatcaggaaagagggagcagcaggggaaaccccaagggaaataaagactaactttatctatttgcacatttgtgttgggctctggttgctgctgagagacagagataccaaaacctgtacgaaaatattaacaacaggttggaaagttgaaatgcttagtcaggcccacttcagttccattttcccctgctcctaaggaggagaaagagcagagtgagagaaaaagagcaagaaggaggatgtgtaagagttcctgacatccgccttcataagtggccactatgtgccaagaaaaaagatgaataagacacagcctatttagagtaatatcacgtctggggagctggattctctcacaatatgtcgaccgtatccctgagaacaagggacgcagaagtgtcttgcgtagtgctcaggacacagtgtgcactccggaagggtttgttcaatctccacccacatctgaacgtctaggacctgctttgttgagggaatgtgactttcatgggagaggcgtgatggttaatttcatgtgtcaacttgcctgggctgtggggtgcccaggttaagcactgtttctgggtgtgtctgtaagaatatttccagatgagattagcctttgaatgggggaactgagtaaagcagatggccctccccagtgttgtgggccccattcaatctgtggagggcctgaatagaacaaaaaggcagaggaaggaggaatttacctccttttttctgcctcattgcttgagctgggatacctcatcttctcttctgcttattttagactggaatttacaccactggctcccctgcttctcaggccttcagacttggaatgaattacaccatgggctttcttgagtctccaagatgcagatggcagattacaagccttctcagcctccatgatc

SEQ ID NO: 203587 - DNA, 1000 bp, Homo Sapiens
gcttcgtaaatggggaagagaggagcttgggggagtgccttctagcccaaggtctcggggaagttgaggactagaaccaggagtgtgtatgtgcaaactgggcttcagaaattagattatgcacattatatattaaaaggtgataaccgctatggacgacaaatgaaatgtaaaacagcataaggggatggggtggggcctcattgagaagtcggcattggagcaaagacttagaggagataagagagttattcgcgaggaaatcaggaaaaagttccacacacaaagaacatccagtctcttctcactgtttccttccatcttggctgcctctaccccattttgttcttcagtcatcattgttagcagctgttttctaacctgttcacgaactaaaggggcttccagcaaccgtcttatcctttgcaggacaatctgcaggggcaggtctcccaaactctggcaaacatgcctgttggggatgactctgccctagactcatctggtctcccataaagacacgttttactttagaaaagcagcgtagggtggcagaaacaacataggcatcggagtcaggaagatctcattttgaatgaagcccagctctgctacttatgagcgatgtgatcctgggtatggctcctggactctctggctctccatttcctcattgtaaaacaagtatcatgcctacctcatcaggctgctggggaaatgtacagttcctggtgggtgctctgcacacagcactgtgtgagatagagcagagaatgggccccaaaccatagagaagttagaatttgcttaagaaattcaacagggatatgtaaagcactgcatttagagacaaaatataaattttctagttacaagatttgttcatttgacaagtgtttgctggatgactctatggaccaggcactaagggacataaggggaaggagacatctgccctaattaaagatcacaaattattgctcagaaaatatagatagaa

SEQ ID NO: 203588 - DNA, 1000 bp, Homo Sapiens
ttcaaatatatatatactcaaattatgtattttttcaaatatatatttctttttctttttttcttttttttgagacagagtctcactctgttgcccaggctggagtgcagtgtcatgacctcagctcactgcaacctccgcctcctgggttcaagtgattctcctgcctcagcctcccaagtacctgggattacaggcatgcgccatcacgcctggctaatttttttctttgtatttttagtagagatggggtttcaccatgttagccaggctggtcaggaactcctaacctcaagtgatctgcctgcctcagtctcccaaattgctgggattacaggtgtgaactaccacgcccggccagtcttcaaatatttttaagccacaagactatggactcaactacagaagatacgtaaagaagagataccctgatcaaagtaggcaagcaaggacttggcctcttgtagaaatttacaaaatatcaccttaatcttgtaaaaaacataacttgaaaaccactgatttagatttttttggtaagagtattcaaatatctcataattttaattatgacgtgcagttgagtgtctaggccattaaagaaagagccacaatttaccggtggccaggagcagtggctcacacctgcaatcccagcactttgggaggctgaggtgggcaggtcacttgaggtcaagagttgagaccagcttggccatcatggtgaaacctcctctctactaaaaatacaaaaattagccaggcttggtggtgcgtgcctgcagtcccagctacttgggaggctgaggtgggaggattgcttgaacctgggaggtggaggttgcagtgagctgagatcacgccactgcattctagagtgggtgacagagcaagactccatctaaaaaaaagaaaagagccacactggatttcacagaattgcttacaaaatagttgttaatttgctaagcaataagaaatgtaaagtaagagggaattc

SEQ ID NO: 203589 - DNA, 1000 bp, Homo Sapiens
tggttagtagataatcagcctacagaagagagctgccttctattgctcacaagtttgtttccgctcaagagtatcccacaatttgatttatgctaaatggggagtgagtggacaaagaagaatatctaaggaaacctaaagaaaaatagcatctagagagaacaggaacacagaagaaatggatggtgaaaaagaattgctggtggagatgaatgacaactttaattttgaaaaagcacctgagaaaattcagtcagtataaaataaactttctagcaattaaactacattaaaatgtggtagaaaaagagaggcatggccactattggggactaaatagtggccttggatatcatgtagaagtagttatctttggaaaagtaaaaatccaaagacacggagatttcaaaaatcaaaacacctagaagacgagtctaagatatttaatgtgagtaagtgaagaaccacaaggagaaaaagggaaacgatacaggagggcacaattactaaatactataggaaactttagttcgaaagggctctcactctaataggttccaagcaacatgggtggggttggagtgtggggacacacctaggcagataaatttcattcaaatatttattgttacttcctgcagtgacaagtactgttttagttgctgggaatacagggtgaacaaagcaatgttagttcctttattgggtggaaggaagtaaatgaataaatatgtctcaggtggtaataagtaatacaaaaaaaaaataaagcatagtagagtgactaggctatgttgggataaggtagtggcaggatttactattttatatggatggtcagagacatctcagataagatatttgatcagcaatttgaagtgaggtatctagtgtggtaaatatgtggtggtggggggagagcaagggcagggggagcagcattccagatagggaacaggaggtttaaggcaggcaggaacatacctgccatttaaaggac

SEQ ID NO: 203590 - DNA, 1000 bp, Homo Sapiens
caaatctacttcataggatttgtataataataatgtgccttgatgtgcaccctcaatttttctgcatcacatactacaaatccagtaataaatatacaaagatttttatagacataattatccttattctctattttcatattggaaagaataaatcaaaggaaaaggcaattgttcagagaagttagcaattttaataagtttggatacgagatatagacttctcacgatctttcttatgccttgtctatccacttataccaaaacttaataaatcagaactctgtaactactttcaaaagtattcattcaaaactacctatttgaagtactcttcagaatgacataaaaagaacaaaaacaatgtatttcttgatcatttaaacaacgaaatgtatcagagaatactgtagataataccattcccctttgtaaaagaggctcatatggttgttttagaattaccttgtgcaaggactgcaaaataaacaatttacctcttggacttttaaacaatgaagtataccatagaaaattgtggctcatattgatattctgtttatacaaagttcttataggtataaaaatttttagactagcttttaaaaattctttgcactttcttacattgatcaagtaaggataacttgaactgtaaaagttacttaaataacctatggcactgaattagaaatgaacagaaaaaagtactacaattacagatttatttctggtttaattaatgctataaacttatttcttcctcaaataaggaacacaaatggagcctcccctatttcctcttctcagaaagccaaaattatataaattttctcatagctattttcttttatgtattccagtattactgatggtttcaggaaaaaaaaagatacacactatggagataataataatttatcagtaagagttactaaaagttactaaataaaggaaaagtattcaaaatttggacaactaatataattaatgtgaattc

SEQ ID NO: 203591 - DNA, 1000 bp, Homo Sapiens
tggtacaaaagaatgcctgaaataatttccataggttatttttaaaaatagtatttttcttacaaaatgtttcataggagcatttatgtcattaagtacatgaaataaaatactgaattacttttggagccaattttaagttagtagctgcatgtgaaacactagatgtattattcatttaaataaaatctaaaacagaaaacaaccattttagagaaaataaaaagaaatattgtatacctgatacagcagagtgtccaacatactgatgctaaacaccctcccagcagcaaaaggcagtcgaaacataaaggccaagttagagcctctctcccgttctttctgttcagaaatttgagatagaaaaatttgtgagcattccacattttatgcatttctgcctcagtaaattgtgttgacatacgtaaaaagttctcatcatatggttcttagctataaatgtgtcattacttcactgataatcatattttttaaactgccctttcgttttgctaaccacattttctcagttaaaacacccaatagtgaagaaagatcaacattttttgtacattaagcatgtatttactcttcatacaagaagagacatcataatggaaacaaataaaaatcattgaaaaaaatgtgaaaaaaaaactaacgtcacacgatgtaccataacactgaacactgtaaagaagacctgcttttaaatattctcatgggtgagaacaaaaaaatagggaggtaggcacctgttatggtctgaatgtttgtgtcccctcaaaattcatacattgaaatcctaatccccaaggtaatagtattaggaagtgaagcctttgggaggtgattagttcatggaggtggaaccctcatgaatgcaattgcctttttaaaaaagagaaactctttgccccttctaccatgtaccatctatgaactaggaaatgggccctcaccagacaccaaatctcccagcaccttgaatgtggaattc

SEQ ID NO: 203592 - DNA, 1000 bp, Homo Sapiens
aaaaattaatagctcaccaaccaaaaaaagtccaggaccagacattcacagccgaattccaccagaggtacaaggaggagctggtaccattccttctgaaactattccaattaatagaaaagagggaatcctccctaactcattttatgaggccagcatcatcctgataccaaagcctggcagagacacaacaaaaaaagagaattttagaccaatatccctgatgaacatcgatgcaaaaatcctcaataaaatactgaaaaaccgaatccagcagcacatcaaaaagcttatccactgtgatcaagtgggcttcatccctgggatgcaaggctggttcaacatacaaaaatcaataaacgtaatccagcatataaacagaaccaatgacaaaaaccacatgattatctcaatagatgcagaaaaggcctttgacaaaattcaacaacgcttcatgctaaaaactctcaataaattaggtattgatgggatgtatctcaaaataataagagctatctatgacaaacccacagccaatatcatactgaatgggcaaaaactggaagcattccctttgaaaatgggcacaagacagggatgccctctctcaccactcctattcaacatagtgttggaagttctggccagggcaatcaggcaggaaaaggaaataaagggtattcaattaggaaaagaggaaatcaaattgtccctgtttgcagatgacatgattgtatatctagaaaaccccatcgtctcagcccaaaatctccttaagctgataagcaacttcagcaaagtctcagggtacaaaatcaatgtgcaaaaatcacaagcattcttatacaccaataacagacaaacagccaaatcatgagtgaactcccattcacaagtgcttcgaagagaataaaatacctaggaatacaacttacaagggatgtgaaggacctcttcaaggagaactacaaaccactgctcaatcaaataaaagaggatc

SEQ ID NO: 203593 - DNA, 1000 bp, Homo Sapiens
gaaaaactaaaagcctttcctttaagatctggaataagacaagaatgcccactttcaccactgttattcaatatagtgttggaagtcttacctagagcaatcagagaagaaaataaagggcatccaaattggaaaggaggaagtaaaattatccttgattccggctgatataattttatatttggaaaagtgtaaagactccaccaaacaattattagaactgataaacaaattcagtaaaattacaggatacaaaatcaacatgcaaaaatcagtagtatttctacaggccaacagtgaacaatctgaaaaaaaaatcaagaaagtaactccatttacaatacatacaaagaaaataaaatactttgggataaacttaacccaaaaagtgaaaaatctctataatgaaaactataaaagactgatgcaagaaactgaagaggacataaaaaatggaaagacattccatgttcatagattggaagaatcaatattgttaaaatgctcatactacccaaagcaatgtacagattcaatgcattggtatcaaaataccaacgacatgcttcacagaaatagaaaaaacaatactaaaatttttatggaaccacaaaagccccagaatagccaaagacatcctgagcaaaacaaaaacataaaaactgaaggaatcacattacttgacttcaaattatactacagagctatagtaaccaaaacagcatgggactggcctaaaaatagacacatagaccaatggaacagaatggagaacccagaaataaatctataaatctcacttttgacgaaggtgccaagaacatacattggggaaaggacagtctcttcaataaatggtgctgggaaaactggatatccataagcagaagaatgaaactcgaccccatctctcaccatatacaaaaattaaatcaaactgaattaaagacttaaatataagacctcaaactatgaaactactgtaagaaaacatttggga

SEQ ID NO: 203594 - DNA, 1000 bp, Homo Sapiens
agctttgctcattctttgaaagaatttatcaaatcactgtatttgaatgtagatttatctatcctcctcaccaaacaccaagtttcaatcacatagtggcaatgaccctgatagagtggcaacagtccagccctcttaccactgtggcctcaacagttagagaagccattcttctccagaagctggtagttgctcaataaacatttgaattaatgagtgatgaaataaactgaacaacaccattacaaaataatggcctgtgtttattgtgcctttacggtttataaatgtgcataaaccttacttttctgagacccaaccatggataattcaacatgtatttagtgaaaggccaatatcatccaggctgggttttaggtactgtcaaggtctcattacagaagctaatgccattgttccttccttttaaaatttagagctccgtgggcagagaagacttagccatgcacactccaacttcagactcacccagtggcactgtaattgcccacttggtactataattgcctactaagaaggcaaaataataacgtcctcagagtctaagctttgaactcatacataccccagtgccaatcttaaactttatgcataccagctgtgcaggactgaacaagttgtataaagtctttgagccttggttccatcaaactgtaaaatgaagacaacattcacttcatacatttacataggcaatatatgtaaaacacttagtaagtgtgcaacaaataatgttaatggaggtcattaagattagtgaatgttgataatgctgatgatcggaatgctgctgctgatggtaactcattgaggacaacgaccatgtgtttttgaatccccagcacctaccataatacctgatacatagtagatattagatattagataactgtttgttaaattaattgtcaattgccaagtccaagatattgaaagccaagaggagataaaaaagagactagcatgaactagagtgatc

SEQ ID NO: 203595 - DNA, 1000 bp, Homo Sapiens
actatagactgcatggatctaatacatatttacaggacacttcatccaatggctacagaatacacattcttttcctcagcacatggatcattctcaaggacagaccatatattaagtcacaagacaagtcttaaaacattaacaaaattgaaataatatcaagtatcttttctaaccacaacagaataaaactacaaataacaaaaggaattttggaaactatacaaatgtatggaaattaaataaaatgctcctgaatgaccagtgggtcaagaaagaaattaagaaagaaatttaaaaatttcttgaaacaaatgataatggaaacacaacctaccaaaatctaagagatacagcaaaagcagtactaaaagagaattttatagctttaactgcctacttcaaaaaaaaaggaaaaacttcaaataaacaatctaatgatacatcttatagaactagaaaagcaagagcaaacgaaacccaaaattagtagaaacataaataaagatcagagcagaaataaatgaaactgaaataaagaaaataatacaaaagatcaatgaaaaagttggtttttcaaaaagctaaaaaaaattgacaaaactttagccagagagaagatccaataaataaaatcagaaatgaaaaaggagacattacaactgatactacagaaattcacatcattattggatactatgagcaactatataccaataaattggaaaatatagaagaaatggacacacacaacctaccaagattgaaccaggatgaaatccaaaacctgaatagaccaataacaagtaatgagatcgaagctgtaacaggaagtctcccagcatagaaaagcccaggacctgatggtttctgtattagtcaggttctctagagggacagaactaatggaatgtatatgtgtataaatatatatatacacacacacacatatacatatatacatatataatacatatattaagtattaactcacatgatc

SEQ ID NO: 203596 - DNA, 1000 bp, Homo Sapiens
ttggttttgtcagtaggcatgaagcgagaaatggtttgatttttgtggttttgggaagcgggtaatggggggagatggaggaggaggagcaaacctcatttcaaagatgcctgtagggtcttttgcagtgacatctgctcctaggccataaaggtgctctaaagtggggatagggtcagtggaggtggggataggaatagagagaagtactgggttacactggtggttttggcaatttgagggggtggttcctttggtgaagtggaggtagggttttagggcggtgcgaccctctgaggaggtccagccctgatatttcgtggtccagataatatctccccaactataacataacccctggaaggcttgtggtcgttgattgcaagggtcgggggtggtgctggtttttctggggatggggggcagaggtacttttctgaagaagctagctgtctttgactatggaggtttccacagggtatgacaagacaggcatcgaatgtaattgtggggagggtgatcgggttacattgataataaggtgtccttgggtagctaaaggaagaataaaaagacagattaaacctttttgaatgttagtttggagggtattgatcctggaatgatggtccatgactttgcaatggttgcggccccttttagcccagtgtggtgggtccatgcttttttggccgttcagattgctgtctcagtggttaggagtattagataaggagtattagataaggtccttcccaggttggttcaagctttccttctttccaacatatgataaggacgtgatctctgggctggtgtcggtgaattgggaattcgaggggtggagtttgcgctaggaggccttgagtcctgagggaggaaagggtggaagacagaccaaatatatatatttttagaaactgatcttttgtttcaaatgtgggaaggtcagtagtggaatttagataaggcagcccatagagcatttcaggccaagatc

SEQ ID NO: 203597 - DNA, 1000 bp, Homo Sapiens
ccttccctcccactcccaaagtttgctgcctgtttgataccacttggaggtgtgattcccaagagggcagtggctttatgtatctgtgtgacttatggtgtcaaaggtcccaagggaccagcttagctgaaaagttaagggtttggatgatgaaaatgtccttgctaaaaagggtcgtataaatgaggcttcatggggcaaatttacactaagccagtctggttaagagcttaaagctctgcaaagcgaggagttggatggactgatgtcacaggacccttccatctctgacctcctctgagctagaatgttagccctgggggccttgccctgccaagcctggactggaggagaaggaggaggcggggtgagtgggaggggcagagggagcagaggcgcctgcagcaaccgacacctgctccagccctgcctgtccactaccagtcaatccagagcctcagcaagcagcagctggaaacggggaagagggagcagacaggaagcgggaggtcagctgtacacccaggtaagtgggtgctcacacctggctgcccacccgggccagggtagggccaggatggagacactagcctgctgtccagcttttctacgcaggaaggggcaggcagtgggcaggatgtctgcctggggaacattccctggctggcggatcacacgctggggtgcacctgtatcccctctaggttactccaggatatctggaggagagaatttcagtgtgtcctgtctgggcatttctgtcctggctctaattttctggacacggcttgactttgggtgtgatacgatgaccagattaaaaatatcactagcagtccagaataaggacctcgggctgggacttgttatattttggttagtatcatggtcaaagcagttgagagaactccatttggctcttcctgcctcaatttctaccagttgagaggtagcagggaccaactggaggtagcagggacctggatctgcaggatggatc

SEQ ID NO: 203598 - DNA, 1000 bp, Homo Sapiens
ctgtacaaaaatttaaaaattagccaggcatggtagtgtgcctgtagtcccaggtactcaggaggctgaggtgggaggctcacttgagcccaggaggttgaggctgcagtgagccgagactgcaccactgcactccagcttgggcgacagagtgagggctcgtctcaaaacaaacaacaaccaaaaaactatacatatcactgtgtatccatgttaaatttctcaattttgataactgtactgtggccttgtaaaagaatgtccttgttcttaggaaaaacaaatgaagtgtttaaagaacgatctatcatgatatatacaacttattctcaaatggtcagtatacatatatatatatatatatatggagagacagagagacagagagagaatggtaaagtaaatgtggcaaaatgttaacaattggtgaagctagataaatagtatgtgaacgttttttgggctttgttcagttttcacgtaagtttgatattatttaaaaccaggcaccaaatggagaataaatgtagtttttaatagtacatacagatgtggccgggcgcagttgctcacacctgtaatcccagcacttagggaggctgagccaggcagatcacttgaggtcaggagttccagatcaccctggcctacataatgaaagcccatctctactaaaaatacaaaaattagccaggtgtggtggcatgtgcctgtaggcccagctacttgggaagctgaggcaggagggttgctcaagcccaggaggcggaggttgtagtgagctgagatcgcaccactgcactccagcctgggcaacaggagtgaaaccctgtctcaaaaaaaaaaaaaagtacaaatagatgtataataaaattagtttatcatgaaattatatgttgggatatttcatatacatgtaaatagatagatgctggagaaaaagctgaaaagaaatacacttaaatgtcataataattatgtccaggttttacaactctaa

SEQ ID NO: 203599 - DNA, 1000 bp, Homo Sapiens
tgaatgtatttaatgccactaaacagtaaacttaaaaatgattaagatggtaaattcttaaataaataaaaatgcagaaaattttaagaagtcactggatacacggccatgagcttttccctccttcatccaacaggtttttaacactttccccatgcaggaaaatgggctttaatagtggaaagcaaaatagtctcatttatatgatgggggaaatttttttttaatgtaagagtatgtggttttctttgtgtctattaagattttccagcaattcactctctctttctgtcctatcacagatgattctgaagcacgtggcctctaactagaaaaaataattcttttgagttctcgttccctaattgggaattcttgctagaatattcaaattgtcatggatggggaccaaaagaaattgaattttattttgtagcttcctccctaaaagtatatgacaattttgaatgtttacgataacaatggatacaaacaatatgaatatatttaatacaacattaagtactaacttctcttctactaaaacttttcatcagatctattatcaagtaacaaaatatcagatttgaagttcactttattttcttcccaacctctctctctaagcagtgcttatgtccaataaaatggataaagacaagagaagggacagtaagcaaagcaaaactcatgaaaatccatatgcctacaaaccaggacctggaaaactgggaggcagttataatttgcaaagcccacaaagcccctaccactgcaatgaggtaggggataagtgaggggagaggaatagaaatgtatttccacaaactgtgaaaaacaggtaactttaagcaaattaataataaaatatgcaccaagtaagtgcacccagacacacaacacacttagcaggaaattgctggagagcttctcctggcctacacacagtctgtgccaggctggatggtatctttaattaccgaggtccaggcaaaagcct

SEQ ID NO: 203600 - DNA, 1000 bp, Homo Sapiens
gattgtgagattaaaacagttgttgttttatgccactaaaattcaaggtagaggtgcagcaattgctactgcaatgtggtctcactttgtcatgggctccttgagggcagaagttgtattttatttatctgtacctctagtgtatatactgtgtctgtcccccatgtgctgataatacccccatgtacacgttatgatagaggaaccccagaaggctattacaggtaaatctgcaagtaagaggcagatagagatcatttaaaggtgttcatatatacactccttggaactgggctctattcttccaggaaaacctgcttagtcaagaaatttgattacagtaaattgccacacgtcaggtgaggtaggcagaataatgccccccaagatatccatgtcttaatttcagaatctgtaaacatgttatgttaaatggcaaagaggaattaaggaagcagatggaattaaggttgccaatcagcagacagataatcccgaattatccaggtgggcctcacatattctaaagagtctgtaaaagtggaagaagaagaaaagaaagtcagaagatgttatttggaggaatggtcagatagatgcaacgttgctgactttaagcatggaagaaggggccatgactcaaggaatgtgagtgacctctagaagccggaaaaggcaaggaaattactttcccctggagcctccagaaagaaatgcagcctggtcaacaacgttattttggcccagtgagctctgcaccagacttctaacctacagatctgtaagataagtgtgtgctgtttaagaccactgagtttgtggtaacttgttacagcaacagtgtgttaaaaaactaacaaaccacctctataccaatgttttgattcacctttctccattcaactccataagggtctccattctttaaaaacaggcctgggtaggcgcagtggctcatgcctgtaatcctagcactttgagagactgaggcgggaggatc

SEQ ID NO: 203601 - DNA, 1000 bp, Homo Sapiens
tgagggaacagccagtgcaaaggcaggaacgtccctggttttcagcaggccagtgtgtctgggaggaagtgagagaaaggagagtattaggaggcaagattagggggatgtcacaagacaaaaagtgttgtaggccacggtgaagatttagtcttttgctctagtaaaatggggagccactgcagagttttgagcagatcaagattgggatttcactcattttggtagtatcaactgactgttgtgtgacagctaactaggtgcagggtggggtgggtgaggccagaggctggaggaccagttaggaggacattgcagtaggagacgtaaaagtggctgtgaccaaggtgatgtgatggtggccagggtggtaagaggtggtaaggtctggatatactttaatagttatttcataattcagacttggcttggtatttctggttaagtacatctgattggacaacacttaagccagagacatttctagtatctgcatggtttcctcctcacttaagagtgcatgtgcccagcatttgtgtgtgtaaatgtttgcactgtaacgctcctgttcatcagttttagtttgttctgttttaaggtgggaaggaatgtagctatcctttagccttaactagtaataaaagagaaaaggtaaatctgttcatcttaaaagtaatatatcctttaaaaaacaaattgatattttgctttgtttcctcccatcccaaggcaaccatcactaaaattcggtacccattcttaataagagtccattaaaaatcctcctcaattcagagggtttcagaaattcgatacaaaggtggcagtcatgtatagaataagtatctctgaacttgaaagctaagcaaaaatattactgaggccaactgaaatcctatggaattcagccaagatttaaccagtccagagcactgccaacactggctgagggcggaatgctgacggggcaaggatgaggcgcagccaggacttcgaaaag

SEQ ID NO: 203602 - DNA, 1000 bp, Homo Sapiens
acacacacacttttttgttgttgttaaacaatcaggaatcagacaaccaagccaaaaaacctgggaatctctgaagtagaatttatgattttttttaaatgctgccaccaatgaatgctttttaaaacaatctttagaggaagtagtagaaatggattcatgaaggtaagttttaattcagacactgaaggagggcctgattatatttggttaagtgaagagcttggagagcaatttagataaacaggagctacccaagcaaagggcagaattaggatcttccatcccctttaaatgccaatgctcccaaaagttgtaccttcaaccttctgcttttctcattctcattctacacacattttcagggcaatcgcatttattctcacagctttaattatcacttaagatgacagctcccaccatcaacatcttcatttcagaattgtatcccaatcttcaaactcaaatttgaacgcccactggccatctctacttggatatttatttctttttttgtttgtttgttttctttttttgtttgtttttgagacggagtcttgctctttcgcccaggccggagtgcaatggcgctatcttggctcactgcaagctccgcctcccaggttcacgccattctcctgcctcagcctcccgagtagctgggactacaggcgcccatcaccgcgcccggctaattttttgtatttttagtagagacggggtttcaccgtgttagccaggatggtctcgatctcctgacctcgtgatccgcccgcctcggcctcccaaagtgctgggattacaggtgtgagccaccgcgcccagccttggatatttatttcaaactcaacatgccttaagcttagtgtttcctctgtaaacctgtttctcctatattccctattactgtgaaacagaaccacttcccacctggaaaatcagattatcttcatccctttctctacatctacatctataaattaacaagacttaggaattc

SEQ ID NO: 203603 - DNA, 1000 bp, Homo Sapiens
ttgaggtctgctataaaaaattaaagctactaaaggtggggagatatcggcaactctgttgaacactgctattcagtattagccaagtggagtgtttccaggcaacatcttagtatgtagaatctaccctgaacatgataaaataaaactcatagacaaagttaatgatttttcttgttaattttcaaagagaagatgaagagataaagtagtttatgatgatttccccccggccccggtctttttgcccatctcctggataaaaacagaatgatattaaaagcgatgtgacccaaggaagaaatgatatttaacaattcataacatacttgccttattattctacctctttgttttttattagactctcctgcaatgcagtgaatcaccagatagtggcgttttttacgttttgcagagttgtgcgatatatttgtgcctttttttttttcctggttatgtctaaaagatataatttggcctacatttatctttaatggaatattttttgagaatttcatgaaatactttaggaaatgtgagacaccctggggtattacaaaatctgggctggaaatcactggcccagagaatggttactaaagtctgacagctgttgggtcaacgggctaagccatttaacctccataaacctcattttcctcatctgtaaaacaaaactcttagtgctgacctacttcatagttcaggttggcagcagctaggaaaatactgagagtcatcatccccttgcaaagtatcaactcccatatcttctaaagactgtacataccatagtacagatacttgattgcatagcatgaaagggggcaaggaaaggtaaattattatttgtagttggacaggagccaggaagcatatctcatatttttagagatattaattgggagtatctatatccagagccatggccgatgccagaagggaaatgggcacgatcagagaggaagcactaaccaggtgagccagctgtgaattc

SEQ ID NO: 203604 - DNA, 1000 bp, Homo Sapiens
tgtgggggcagaaactgtgatatacagtcaattttcattgtttgtggtagttcctttctgtaaagttgttgcaaacactgaattagtgaatactgaaccattgctcctagcagaaatacaggattaggttcctgtgagcctcaggtcacaatatttttgtcaacccaccactacataaccttgttttattgtgtttctgtttaagacaccttatttaatatatagttcttataagttagttatctgcagtatttctttataataaaaccctagcagagaaggatttaacatttccctgatgctgggtaacataactgtaaatttcttgggctttcagcctctcaacagtactctttttactacactttaaaaatcagttgtcattttatgagtccacaaatttagctgtttttctgtcttttccatagtttcttcatgcactataaatatcacttcagcactttccagaacagcctcatgtacatattggtgaacttccttttctggatgtactatattgttgattgattaacaatgaactcacaccaatagccctataactcaagcatgaacgaagctcatctaacatacatattttctccatgaggcatacccccagccttcttgtacttaggaacattagacagcactttagtgcaacatctgggggtcatttggaaagtgaaattaccacccaaaagcacaaaaatttgaaaaaaatggcaattaatagactgtaaaaagggcacatttatagtatgtgagccgaaacaagaaggaagcgagcacactgacctcagctgggaatgtgcattcacatcagtgactcccatttgttgacactctgaaaatgcccaaaaatgaccataaaatcactgcatgtattgatctgagggttacaaataagtgttagtgagtagatgaattcacaaatgtagaatccacaaataatgagaagggtctatacatacaacacccagtgacagattactgtgaattc

SEQ ID NO: 203605 - DNA, 1000 bp, Homo Sapiens
gctcatcagcttacattcatgttagtgtattttacgtgtggcccaagacaattcttcttccaatgtggcccagggaagccaaaagactggacgcccctgactaaacaataagatcaccactcccttcaccccacctcacctttgccagttagctcctactttccaattcatcttcaggtttctgctcagtcacttcctcaggaaaaccccccatgaccaccaattgtaggttaatttcattttaaaatggactctcagaaatgggtacctttcctcctcaatgctataactatcttaggctatagttatacatccaagagtataacgatctgatttctctctgacagcaaaagcctgtctggctgctcaccattttatccccagcacccaaagaatgcctggctcagagtggaagctgataaacactggtagaacaagtgaatgccgtaacacatcatctgaaaccaacagcggagggcagtatccctcagaccacatggtgtgttcctgcagtgtgttcattcacgatactcccatccagagcatgagcaagagctgctctgaaaatactgccgtctgataaggtcttatatcagcaattcccagggcatgaatctcccgttatgtcaagaggtaccaggagatgctacaaaaattaactctgacttttagacacgaaattatataaccatctttctaaaagaaaagctgcaggtgaaaagctaaggtaagaaaagaaaatagtattatcttcccctttcctaaaggcatagcccactggtaatttacttgttttttcttctcctgctggactagaaattccacagggaccatttgctgtctcgaccctagttcctgacacgtaaatatttgacagatgaataaatatgtgaatggataaacaaacaagcacggaatctattcctccactcctgctcccattaaaactgaaaaccactacccaagacaaatgctaaccagttcatctgtcaaggaattc

SEQ ID NO: 203606 - DNA, 1000 bp, Homo Sapiens
ttaatgctgaggtgaccccaaaatctcagtgacttaaatattttatagttatgtaagtaacacccatgggggaagtactgaagaaggctatatgggatttttctctattatttttgcaacttcctgtaaatctatacttactgcacattaaaaatataaatagatggcagacagctagacataggtggagggcagggcaccaaacaacatttcatttcctgctcatgctccctgtccaggcaggttggcttggggactctgctctccacagtcctcacacagggagcaggcagagggaggccccactcctgtgcttccacaaagcaagaggaaggaaatgtggtgaagcacatactcactcttaaaacttttaccctgaagaggcacacaacatttccactcctgtttcattagccaaaccaaatcatatggccatacctaacttccaggggacaggaatgtacccagagagaaaccaaaaatatttctcaaatagcattcatgaatattgtacccaaggacacaaactgtatgctgagtcattggggtttgagagttttttattttaaaaaaatagcatgtatttttgggtttagtcttgtgtgactttcttgtaacgacaaggtatactctgaaatgcatttaatctagaacacagtcacccaaactggttagttgtggaataactacgtggccttctccccattgtttagccctctgcccaccagcagcaccctgctgttacaattccttcctggaggcattacacagaatatgaatcattgtggataatgctggttggaaagcaatcctaactacatcggatatgaatctgaattttaaagtggccaaagatcttcagtgccaacattaaagatgttttgtgctgactcttcaagtgctttctgtaagattatcgaacagcaagccacagttaaaccagtgctctcactcacaaagtctgcaacactagcatcctttcataacgtcaaggaagctt

SEQ ID NO: 203607 - DNA, 1000 bp, Homo Sapiens
tgggtagtttgcaaatattttctcccattctgtaggttgtctctttgttgattgtttcctttgctgtgcaaaagcttgttaacttaatatgatcctatttgtctatttttgctttggttgcctgtgcttgtggggtattattcaggaagtctttgccctcagtccagtgtcctgcagaatttccccaatattttattgtagtagtttcatagtttgaggtcttagatgtaagtctttaatctattttggtttttgtgtgtgacaagatataggggtctagttccattcttctgcatatggatatccagtttcccagcaccatttattgaagagactatcttttcccagtgtacattcttggcatctttgtcaaaaatgagttcactgtaggtatgtgacttgtttctgggtcctgtgttctgttctgtatgtcttatttttatgccagtacatgctgttttagttactgtagctctgtagtataatttgaagttaggtaatgtgattcctccagttttgttctttctgcttaggatagctttggctattctgagtcttttgtggttccatataaattttaggaactttttttctatttctgtgaagaatgtcattggtaatttgataaggatttcattgaatctgtagattgcttttggtagcatggacattttaacaacactgattctttgaatccatgaatgtggaatatcattccatttttttttttttggtgtcctctttaatttcttttgtcaatattttatagttgtcattatggagatctttcacttcttcggttaatttctaggtatttgattttatttgtggctatcttaaatgggattagtcttttgatttccttttcagaatgttgacttggtggcatatagaaatgctactgatttttgtatgttgattttgtatcctgcaactttactgaatttgtcagttctaatagttttttgtggcgtctttaggtttttccaaatacaagatc

SEQ ID NO: 203608 - DNA, 1000 bp, Homo Sapiens
ttattttattttattttattttattttatttattttattttattttattttatattttattttattttattttttgagacggaattttgctcttgttgcccaggctggagtgcaatggcgcgatctcgacacactggaacctccaccacccggattcaagcgattctcctgcctcagcctcctgagtagctgggattacaggcacgcgccaccacgcctggctaattttttatttttagtagagacggggtttcaccatgttggccaggctggtctcaaactcctgacctcaagtgatctgcccgcctcagcctcccaaagtgctggcgttgcaggcgtgaaccactgcgcccagcctcatctcctttagatttctaactggtgtctctgcacccctctggccctttataatccataaggagccaaatggtttattttaaaaacatatatcagatcacatcaaattcctgtttaaaagcatcagtggcttcccgccacacttagaataaaatccaaattcctttctatggtcttcaaggccctatccctctgtcctcgtgtcactgtccatgtggtatcaccgtggtcaccttgccttcaatttccttctagcaccgttgggctcttttttgccttagagcccttcaatcttcctatggctggctcctttcaggcatttcattttcagctcacatttctgttttggttttccatagcactcaccaccacctaaaattataatagttaacaactttattactcatttcttgtcttcccgtataagatggaaattgacagcaaggactttgttctgtcctgtttactattttacccctagttcagagatcagtgcccaacacacacggggcactcagtaaacactgcggaataaacaggttgtgccatgaagctcccagtcttcagttcgtacagacaagggacagaggtgcacagactgtagcagaaaagctccagcccttccaaagcttatggcaagatc

SEQ ID NO: 203609 - DNA, 1000 bp, Homo Sapiens
taagatgtcttaaggccaggcgtggtggctcatgcatgtaatcccagcactttgggaggccaaggcaggtggatcacgaggtcagaagatcgagaccatcctagctaacatggtgaaaccccatctctactgaaaaaaaaaaaatacaaaacatacaaaaaattagctgggcgtggtggcgtgcacctgtagtcccagctacttgggaggctgaggcaggagaatcgcttgaacctgggaggcagaggttgcagtgagccaagattgcgccactgcactccagcctgggcaacagggcaagactctgtctcaaaaaaaaaaaaacacaaagatgtcttgacaaaaaagttaggtaattattcatttaattcagcctacacccccaaatgggtactacttactaatgttcctgacagacaaatgaatggcaagaaatctgaaaatgccattgtttttacatgaggaaattgaagtacaaaataagtggataaagaaagtaacattggtcaggggtaggggctcacgcctgtattcccagcacgttgggaggccgagatgggtagctggcttgagctcaggagttacagaccagcctgggcaacgtggcgaaaccctgtctctactaaaaaatacacaaattagctgggcgtggtggcgtgtgcctgcagtcccagctacttgagagactgaggtgggaggatggcttgagtccaggaggcggaggttgcagtgagccgagatcatgccaccgcactccagactgggtgacagagccagatcatctcaaaagagaaaaaaaaaaaaggaacattgcagagaatgaatggaatacaggactgattgctaatcaaatatacaatgcttggcacagagacagtgattaataagtgcctggtcaatgaattcatttagagctctcttgaacgtcaaataacagatcagttagtttcagaagttaaacatttctacagaggaagtgattattttttcccactatagg

SEQ ID NO: 203610 - DNA, 1000 bp, Homo Sapiens
cttattccttttgcaggaaaaatgtttgactggataggatccatgtcttacttgtctttgtagtcctagagcctagttctgcatatgatacataacaagcactcattaaatatttgttacaccagacatgcctaattgacctcaagatattcatcaaaacattttattgcacaatttagataagtggagtgttcacatagattaaggtcttagttacaaaacctttgggttacgaatggcaaaaaacaaaacaaaacaaaaacaaaaacaaaaaacctttgtggccaggcacggtggcatatgcctgtaatcctaggactttggcatgccaaggcaggcatcttgagtccaggagttcgagaacagcgtgggcaacatagcaaaaccccatctctacagaaagtacaaaattagctgggcatggtggtgcgtgccagtactcctagctactcaagaggctgaggtaggaggatctgcctgagcccaggaggctgaggctgcagtgagccataactgcaccactgcattccagcctgggcgacagtcagaccctgtctcaaaaaacaaacgacaaaccaaaaatcccacctttgcctcatctaaatataaacttatgaatttattagaaggatacatgggattcaagatcaaaaacataaaacagagcaccagtaacaaactcgagtggccccagtgattcccctcctcactcgttctttcaacatttattctctctcagaatctcttcattctttccttacttcctcacctagatttttctgctatgtcatacacatgacagaaaacagtcactccagcccagttcctacatgagctcacagcaatagcgccgccaactaactgactcagtctctccatgttctaagttcttggaagcaagaattcaatcggtctagtttgagtcagggacctatctctgggctgcctggctcactgtccactcaaaagaggccatggaaacacattctatgaaaggtga

SEQ ID NO: 203611 - DNA, 1000 bp, Homo Sapiens
gaacaagagtctctatctggtaatccagagaagtctcctggatctggtcaaagatcatcaaggtgctcactctatgagtctataagaaccacagagttactgggtttggggtgccccctaaagcagatatagtttatatcacaacacccaactcatttcaaatatctggaaagccttcccgaggatggctacaaataagccagatgatgaagaatacaataaatacctgactcttcaatgtccaaacaccaaagaacatctactagcattaacaccatccaagaaaacattatgtcaccagatgaactaaataaggaaccagggaccaatcctgaaaaaacagagatatttgacctttcagacagaaaattcaaaatagctgtgttgaagaaactcaaataaattcaaaataatacaaagaaagaattcagaattatattagatcaatttagcaaagagattaaaatattaagagaaatcaagcagaaattatgaagctgaaaaatgcaattggcatactgaagattacatcagagtcctttaatggtagaatggatcaagcaaaagaaagaatttgtgagcctgaatacaggttatttgaaaatacacattcaggggagacaaaaaaaaaaaaaagtaaaaaacaatgaagcaaatatacagggtctagaaaatagtcctgatagggccagtctgagttattggccttaaagaagaggtagagaaggagatcgaggtagaaagtttattgaaagggatcataacacagaacttcccaaaactagagaaagatatcaatatgcaagtacaaaaaggttatagaacaccaagcagatttaacccagagaagactacaagatgtttaacaatcagactcccaaaggtcattgataaaggaaggatcataaaagcagcaagagaaaataaacaaattacatacagtggagatataacacatctggcagcagacttttcagttgaaaccttataggtcaggaaa

SEQ ID NO: 203612 - DNA, 1000 bp, Homo Sapiens
gcacagtattactcaaagtgtggtccatggaccagcatcatcagcatcacctagaagcttgttagaaacacaaagtttcaggccttactgcaaacatagtgaactaatctctggcagtggggcccagaaatctgttttcccaagttttccagctgattcttatgcaagctagtttgagaagcactagccctatcttgcactgacagacccaacacagcaggtcaacagttaccctcagacacaaggtaaccatcaccagcttactatatatgcatgggaaaataaagattctggctagctgtaattccaagaaaacatcctcagaataggcaccatggtgaatacaacgaaagagcttctttctcaaagaggtaatagagacacatgtgaggcagaagagcagaatgttacggaactcaaagaaaggaatgattcttgtgactggctgtgctgatcagatacttcacagagggtgaaacgagaggaaggagaggggcatttcagagaataatcaagaataagaaaaactactttagatactgaatatgaagagcctatacattggggaagatagatcaattttgagggcctgtcttctcataagagttggcatagcctgggaataaaggtactcaacctctgagaaaatgaagcctctgaacatacagaactcaaacctatgacaaaagtccacaccgagtaggagtgagggtgcaccattcagaggaaggtacctgaagcaatgagggaaacagtgtacccttgaagtaggggaaaagcaaagggacctacgaggccctcagaagagtagaagtggaagctttcagttctagatgaggttaatgatgagtaagagctcaatgtgtgtgatgacagtgcaggggctcaccagaaattaggaaaatgttatgaaggtaactttaggtcaattgggaatgtctggggatagaatggggctgaaggttctacaagacagttggtgagcctatggaaaatggga

SEQ ID NO: 203613 - DNA, 1000 bp, Homo Sapiens
aaatttgtaaatatcaagtcaatgtaactgagatttccatcacctcatactcatttgtttttccaaataaattttgaaatcattttcttttttaaaaatgtcaatattgacctcaagcagaatgagatcattttcttgtagcactgttgcagagaattttgaagctagcatgatttttgttctatgtataggtagcctgtttattttctagtatttgtgttttgctaggatgcttatagaagtcatgttttatccttaattttatgaactttggccagaaatctgtcaatatgagtttctgcattaatttgccagtattagggagagcacttttgatccgaaagacaaacacttttctttagcctctgagaactttctttaaatatagctttgaggagattggatcatcatggtggacgggaggcaggactagattgcagctccaactcggacagacaaagcagcatgcggaggctcgcatcgtgaattttagctccagatcaactgcaagaacaaccagcaatcctgagaggacccacagaccctctgaaggaagtggactgcttctgcaggacctgggagacaccctaaatactgtgctggtatccatggctgagggacccatagatggttcccatcacaggactctgcagacaacccccagtaccagctcggaactgggtagacttgctgggtggctagacccagaagacagacaacaatcactgcagttcagctcacaggaagccacatccataggaaaaggaggagagtactacatcaagggaacaccccatgggacaaaagattctgaacaacagcctttagctgtagaccttccttccctctgacagagcctacccaaatgagaagcaaccagaaaaccaactctggtgatatgacaaaacaaggccctttaacacccccaaaaaatcacactggttcaccagcaatggatccaaaccaagaagaaatccctgatttacctgaaaaagaattc

SEQ ID NO: 203614 - DNA, 1000 bp, Homo Sapiens
ccatctcttctccaccatcctgtgctcctctagtcatctgagtagtaagtgtgacctctggcaccacagagaggccaggatcataagacaccagatggtgatggagggaggagagtaaagttggagtttctgattattgaatgcagttccttggggaagttccctgcctccctggttctatgtggcctcatttgtaggatggacatgtccggcctctctcagagggttcttgtgaacattaaatcagaccatgaacttgaaagtgcttgatgaaatgcagaattttatagagatattttattatttactattatggttaatgtcattattatctagaataataaccacatccacgacagtgaaggaatttcactcctgcctcgtacctgctggcaaagtaattaagccactgagaccaagactgggagtagatttgccactaggtcatgtggatagtagtggagaagatgaggggatgggaggactcttcggcttgcagtgaagtaaactgggagctccgagtcggcttcctcaagcacatgggctctgtgtgggctctaggaggcaggtctgggaccagtgcgggaagctagcaggaggcagaactcacctaagtgtgtaacttgcagagctgaatgactatgcagtggactgcatcaagagacagtgagataattcaaaaatatgcctaatattaaattagtagcagtcagtctcttatgaaatcttactgtgtgcttgatgctgagttttacatacaaaatctaatgtaattctcataacaactccagtctacagataaagaaattgaggctcagaatctgggcaagagtattttgccaaaggtcccgtagcacgtggtgttgtgggatttgaaccaaggctgtctgtgttcagagccagagctctgatccactatattaaatgacctctactggctttcagaaaagcaccccctatgtccaaggcactgtgctttagatgctacctcactgtgtct

SEQ ID NO: 203615 - DNA, 1000 bp, Homo Sapiens
attttgtaggggccgtggtgttggaccacctcggggggctttggtacgtggtacaccagtaaggggagccatcaccagaggtgccactgtgactcgaggcgtgccacccccacctactgtgaggggtgctccagcaccaagagcacggacagcgggcatccagaggatacctttgcctccacctcctgcaccagaaacatatgaagaatatgtaagaaatttgaacaatgtgccatttcccagtacctagaaggctgctaaaggaagttgaatgacagggcctcggtcctttatgtaggtgtcatggactgcctgtaagatttgcaatctgccctcttctcttgcagtgaatgttgaactattagaagatttttccattttaggcagggttttactatacgcctgtagattaaacaagaaataaaatgtactttaatgtagtattttataatgaatttcttactactagtactgataatactaaagctcgattttgtactttacttcctgcccacacttcttctgtggcatatcatatttgtttgggttttctttgtttagtaaccctttctcttttgactattctacagtaggcattaacattttggagggaaatgtcatgtccttttaattcagaagcctacttactcccatgggatgtaattacctttcctactctctatgattttgatcttttatttcatttttttgttgttgttgttctagggatatgatgatacatacgcagaacaaagttacgaaggctacgaaggctattacagccagagtcaagggtgagtcaggcagtataagcactgttttttgtcctgaggatggatggagggagttggaggaacagagagatttagacagtacaaccctaaggagcagaatggttcgccttttgagggtatctcctctgcaacccccacagtcctgactggtcttgaactcttgagctcaagcagtcctcccactttagctctctctagtagctggg

SEQ ID NO: 203616 - DNA, 1000 bp, Homo Sapiens
gggactagaaaacctgggttccatgctgttgcctacctgcactctgtcctctgcccaaccccttcagctaagtatctgcttggttcttcttcaatcctgaccagcccccctgcataagtccagcacctgaagctcttcttatctaggggtgtggaaaagttaaagcatcaactcagaatatgtcacttttactaactaggaataagcaattacttctcttggcaatagttttttgcttcttggcatcttctcctggaacaaatgttactatctttgtctgtaaatataatagtttggaaattctagtacccttttggtttcttagtagggttatggcttcagctgctgtagttgtggtatgaaatgtctcagaaacatttgaaagcagcatgcttgaagtgacattcagggaaagagaaaaaaagcactcagaatgactaatgagctcaccaatcatgctttctaaaactgctactgtaccttgtgcattaaagacaattttctcctggggaagagaaaatttcccagttcctgtggagcacacatagacagcactttcgttatacagataggcagtctggtttgaaaagtttgggaccgtcaactgacacaaaatcaggtcttcagactgaaagttaaatttaagattacatttaacaagaagtaaaacaaaaatatttgtatgattttttaaattcatttttgtacattatttcataaaaatatttcaccaattctctttgtaaaaatctgaacactacccatgagatgattaacaaaacatgacagagtaagtttataaacatcaattagacatatattttgttgacttgcttataatttgcttttttaatttttttttttttttttttttttgagacagagtcccactctgttgcccaggctggagggtagtggtgcaatcttggctctctgcaacctctgcttcccaggctcaaacaattctcctgcctcagcctcctaagtagctgggattaca

SEQ ID NO: 203617 - DNA, 1000 bp, Homo Sapiens
tttagtagaaacggggtttctccatgttggtcaggctggtctcaaaccccgacttcaggtgattcacttgccttggcctcccaaaatgttgggattacggtgtgagccactgcacccagccacttttatttacttatttttactttttgcaacaaagtctcgctttgtcaccggggctggagtgcaatggcgcaatctaaatttactgcaacctctgcctcctgggttcaagcaaatctggctcagcctcccaagtagctgggattacagggatgcgccaccatgcccaggtaatttttttgtgtatttttagtagagattgggtttcactatgttggccaggctggtcttgaactcctgacttcaggcgatccacccatctcggcctcccatagtgctgggattacaggcatgagccaccgtgcctggcctcatgtgttacgttttaaattaattggtttaataataagagcttaaataaaatattttgtcagaaaagtgaaaaacataatgccttttatttagttcatgtgacttgggtaatctttgggaaataaagatgggtttaaagattattgataaaatacaaatgtcttcaaaatgtaaacatgtggtcaaaattatgttcaaatattaggtttgctaaatgctttaaggtcataaactgcttccttggcttttgaaaattgtttaacttgcctgttttctagctcggtaaggcctgggacatatgcagttggccacacctctagatatgctggaaatagtcaaaccttatgagaacataacttaccaggttctatattaaagttaaaattgctgaaattcacacttcagctgtaataggaaatatcctctccattgggcaaaagccgaggaaatgactgtaactttccttcatcctcgtcatttacatagggcataccccaagtagagggtatttaaactcccaaaaattctgtaacggggtctttgagccccagtgctcgggcccactccc

SEQ ID NO: 203618 - DNA, 1000 bp, Homo Sapiens
gacagtgtctcactctgttgcccaggctggagtgcagcggcacaatcttgactcactacaacctctgcctcctgggttcaagcgattctcctccctcaacctccagagtggctgggactacaggtgcacgccaccatgcccagctaattttttttttttagtagaggtggggtttcaccatattggtcaggctggtctcgaactcctgaccttgtgatccgcccgcctcggcctcccaaagtgctgggattagaggcgtgagccaccgcgcccagccaaaatcttttcaatgggtatccaatgtctttggtttaaagcctagattccttaacgaggcacagaaagacctcatgacctgaaccctgcctatttatccaccttcatttctttccatttccccaaatataccctatgccccagccacactgagcccctagcagttccagctcccactctccatgaggtcttttcatgagctcctccctctgctagaacatcctcccacactccccatttgttgtcccagggaagtattaacaccccctttaagactctgttccttactatcacatttgggattaagttaaagaaaagaaaagaaaattttttaattaaagaaaaacaaaactaaaagactctgtcctttacaactcctctgcaaagccttactgagcatctaccacatgcttagcattgtgttaggcaccgaggatgcatggtagaattaaatgcccttcttagttccatcagcaacctctgtttgcatctagagcatcaatgtcttctttgtattataactgtctcctctacaaggctgtgagcattctgaggacagggcttccgcattattcatctttgactccctattacctagtccatggaatgcatcagtaaatatttgtcaaattcatttactcacaaagaattcattgaaaatttttgtatcaggaatgaatgaggtgctgaacgaacaggattataaaactgaatgaacaggatc

SEQ ID NO: 203619 - DNA, 1000 bp, Homo Sapiens
tttcttctatacaaagtggaaatgcaaagaatatatggccaagcagttggacttttttgcttaggcagaacttgccataactgatatgaagaggatgagctcccccaaaacatttttggcatcaaactcttcctcagactgacaaagccccttatttccattccagttctgcattctgaaaccctgttttctagattctgtgctgtgatcagggtctcaaaaaccttaaattttttttaaccatctattattgtcacacatacacacacaaaattcatgattacctgcattcatgcaggctagatgttttcatattcaatgataaagtacatgtttgtaagctcaagtccagcagtgatctgtggtataaattgaagaaaggggtaaaccacaaatttcacctctctctctgttgtctagaacacagtctttaagatagaaataatgaccgctgctgctgacatggtctgtagaccacgtaatgacccaaataaccttcattgcgcatgacttgtaatgagattatattctaaagagggcaaggtatggaagacataattggtttttgttaaaattacatttttatgccctgattttctgttaaattcttgagggagaagaataatttcttagccaagcagtgttgcaaatcctgttctaaagttgtcagaacatgttttatttcacatagtaatcatacctactgcagtctagcaaagataccaatgacagccaaagagcattgtgaaatacccttatttttattctgaagaaatgtacatatgttaaagtactaaatccaaagagaacatatctgtgaattgctaagaaaatatagaaaagtaaagaaagttctagtcttcaaaacaagtgataaacttttaaaacatttttgcaccactgtaacaacatagtacacattttactatctgtcctagagggagatatactagtaaattataggcgaactatgacttacagtatagtacatagtgaattc

SEQ ID NO: 203620 - DNA, 1000 bp, Homo Sapiens
ataaaaaatacaaaagttagctgggcatagtggcatgtgcctgtagtctcagctgcttgggaggctgaggtgggaggatggcctgaacccaggagacagacgtttcagtgagctgagatcacagcactgcactccaacctgggtgacagagtcagactctgtttttttttttttaaataaaagactgtggtctagtagaggtaaccatagcaacaagcaaactcaactcaactttggttagattggcccaacctgtcacagtagtcatacacatcccccccacacatatatgtatacacacatatgtgtatgggtgtgtgtatgtatagtctcataagagacaggttatttcaatgtgtgaatacaatttatttcaatctctactattctacacatgatgtgcagcattcaatcagaaatatgaggcagctcgctggaacaggctggatggtgccagccacgttaggtggttttaccatgtggcctctggcatccccattgccaaccatgggcgagctcttggtgcactggtggcctggcatggtgctccaactatagctgtgtcagcgtgtgatgatgccatcccacaccaatctggctactggaatccctagtagcaaagcaaaatactcaaggctctccagcacagacagtggctacactcacctcctaaggtttaaaaaaggccttcctaagatgccttagaaggccattgcagtcaccactgtgctgtttctgattggcacctttctattatcataggctccctcctgctgttgggctacatcagcaaagtggggacagactaggttgttccagttctgatcactggcaatttggtgttcctgccgaatgcatccaaaagctaccagggttactcctaccatggccttccagactttgacgactagcaccacctcagccctgagaagagtcacagtggaactgtacctggctttaagattctgagcagaaactatgtctaagggctgaagaattc

SEQ ID NO: 203621 - DNA, 1000 bp, Homo Sapiens
ttccttctttcaacggcagtatcattgctcaaattcaagcttcatcatctattgcttggctattgcaataaaacttgaacttctcttcagcagaacttcagcttcaacctactcacaatactgctggcaaaattaacacagattagagtctgttattcccctgtacctatgtgataaactctaaactccgtaaaatgccatttaacttctgtcctgtcctttcagaacttggtgcctaccttgggtccaattcctccctcatcccctataatcaaaaattactaagattacttgtaattcaaacatatcatgatctttttttttttaacttctgtctttcatttttgtttcctagcatgccatagaaactccagaaatgtttgttaaactaaatttattttcttccttcttcaatttgtaatatagttgctagttttcttccagcccacctacccctgattttgtccttctccttaaagatttgccactgtctgggcatggtggctcgcaccctataatcccagctacttgggaaactgaggacgggggatcatttgaggccaggagtttgaggccagcctggacaacatagcatgatctcatctctttaaaaaatgtcagcctggtggctctatggcttagttggttaaagcgcctgtctcgtaaaaaatgtcagcctgagcaacatttctacaaattattatttttttaattagctgggaatggtggcacactcctgtagtcccagctactcaggagactgaagcaggaggatcgcttgagcccaggagtttgaggttcggtaagctatgatagcaccactgcaccttcagcctagacaacagagcaagaccctgtcaaaaaaaaaaaaaaaaaaaaaaaaaaaaagacttgccactagcttctggagaatagtcaacacagaagaaatcagaggcaagagacagagaaaaagaaagagagaaacaaaacggacacacgccttgtgatggtgctgatc

SEQ ID NO: 203622 - DNA, 1000 bp, Homo Sapiens
tctccgattaaaaaaaagaaaaaaaaaaagattgctgtctactaccacctgcattcttccctgggtgaagacaagaaccctcatgggctaagccctaatttgggggcttgctggccacggatcatctggtggtcatgaaaggacaaagatagcaaggaggccgggcgcagtggctgacgcctgtaatcccagcactttgggaggctgaggcgggaggatcgcgaggtcaggagatggagaccatcctggctaacacagcgaaaccctgtctctactgaaaatacaaaaaattagctgggtgtggtagcaggtgcctgtagtcccagctactcgggagtgccattgcactccagcctggatgataagagtgagactgtctcagaaataaagtaaaatggctgacaaaaataaattggggttagaggagaatcaaccaagagaaggggagaaggatgtggttctgtccagggtggccaagcaatggggtatccaaatccactgcttggctgccgtgagggaacaggcccttggacttgggacctggccggagcacagatctcacaggaggtggcggtgctgtggccgtcgcccactgctcggctccaccacaggccagaaaagaggatggttctgaaaagagcctctggttcgtgtggcagcgttgatcgcccaccgcggcacgtcttgctgtctcatgttgcctccactgccagtcgcctccattctcccatctccctgcctcttgctcactcccttgtttttttttttttttttttttgagacggagtctcgctccgttgcccaggctggagtgcagtggcgcaatctcgtctcactgcaagctctgccttctgggttcaagcgattctcctgcctcagcctcctgagttgctgagactacaggcatgtgccaccacacccggctaatttttgtattttaagtagagacggggtttcaccgcattggccaggatggtctcgatctcctgacctcatgatc

SEQ ID NO: 203623 - DNA, 1000 bp, Homo Sapiens
gggggtggttgctgtgtcagggatggtcccaggctgcccatagaaatgtcctatgcatcctattgggtccttcgatgggggaaaatgggaaaggctgaacccgtaaaaagcctcagagctgcccacccccatcccgttcgatccccaaagttgcacgagcaggggcaaaatcccaaagagattaggatttatgtaggggcctcttttccacagcgcccttaccttttccaaggaaccccccacccacccctgcagggtcaagcactttaacagcctgtgtcagtcactagcaaggcagaattccagagtaagcgtactcctacctcgacaaagccggagtgtctgcgcgaggggctgcctggaacagcatgcccctttggagtggttcccgcagaaagaatgtgggcctcctggagagctggtcctggagggatgcccccgtcccatcccccaactccaatcattctgaccttggcctgccaaggctgtgagggccgggccttccgaggatacccgccctgggaagcacgggctgagggggtgaggacgcactaggggtatggcgaagggctccaatgccccaggctgcggactcccttagtccttgcagttgcttccgtgtgccccgccctgagtccccatccctccttgccctgccccctgctccatccctcccctgcgccccgccccctgtccccatccctcccctgcgccccgccccctgtccccatccctcccctgcgcctgagtcctccccagggcaggggtaaaagacctggccacaagaaccggagcggtggtgacgccaggtcagcaagtgaaagctctccaattccgtcccgcccgcgggccgcgtgactggcagcggccaatcggaggcaaaagcgggttgttccaaaaaaaaaaaaaaaaaaaaaaaaaaaaaaaaaaaaacacacaaaacccacccagtcgcttcctgcttccgcctcggctcctcttcctgccggcatccgggatc

SEQ ID NO: 203624 - DNA, 1000 bp, Homo Sapiens
gatcctcccacctcagcctcccaaagtactgggattacaggcatgagctgctgtgcttagcctgtcctgccttttttttatttttttaacatatagtatgggcattcttgtgtgtcactaaatattctttgaaaatgtgatttttaatgtcctgttaacttactgtttcatcatatcttaccatatgtttagccagcccctacttggccacttgagttgtctcagttttcattattctaaataatatgaataggaacatctttctcacctttttatggctccagttctgctcgttttccttcccatgggcctgtagagtgagacaatgtcccactttcccttttctggctcgcccgacccacttatccagttgggaacagggagtaaaaaagtagttgttccatggggtcagggtccgagagaagtgggcatgtggggcaggttgtacgagtgtgatggggaaagaggggtgagatcctgagggccaccgcagggactgctgggtctatatacaattttaggatggggatacttatttatgtttgaagtagaagaaaaggagcccatggagaaagaatgaagatattagagagacaaaaggctcaagattagatggacagattagctacagggaaaaagagaaggaagaggaatccttgcttcagcaccttgaaggaagaacaaagacacagatgtaaaccttcagtagactttgggggtgctttcagagagttagagagtagtgtaccctccagtttggggtaagcagggcgttcctattgactgacttgctttctctttgaagagggcacagggcaggagttatctgctgagggtaaagggaaggaaggagcattcattagggggataaggagaggattttgagcgtaaaagagagaaaagtgaaggtctacctagaatagtcagacaagagaaagaaagaaaggtcatccaaactggaaaataagtcaaattatccttgtttgcagatgatatgatc

SEQ ID NO: 203625 - DNA, 1000 bp, Homo Sapiens
agtggaacacaggctttggagtgagacagacctagggaagagcctggctgtatgacctaaatttttgtgttgggtcctgctgtgggctgaatatttgtgtcccctcctttcccagattcgtatgctgaaacctaatccttaatgtggtaatatttggaggtagggcctttgggaggtgattaggttgtgatggcagagccatcgtgaacgagattagtgcctttataaaagagggccccagagaacttgcttgtctctttcaccatgggaggatacagggagaagatggccttctacgaataaagaagtgggccctcactaggtaccaaatctgcaggcaccttgatcttggactttctcgtctccagaactgtgaggaatacatttctgttcttaataagccactcaatttatagtaccttgttacagcagcccaaatggtctaagacaagttctcactttgctcctctgtaaaaaggggataatcaaacttacctggcaacataattgtgaagattaagtaagataatggacataaagcttgtagtctagttcccagggatcaaagggtgcttaataagtgatggctattgctgttatcatcttgctgcacttcaatgcaattgaaattggtttaaaagtgaatagaaacggttggtttcttgatggattcaattcagttcaattaagtgtccttttttagatggcttaccctggtaagtgtcatgctgaatacttgatacagatagaaattaagcactctcttctcgctaagctcttcttgtgcattctcaattttgcgttgcagctttcaacaaaagcatcccctcacccttcccagtgattctaaatttctttatctactcatttgaaggttagtttgactttcaagccttttgagatctgagcatcattcacctttgcggtctcacctctcacccctctctaatataccacccagttctgtgaggaaacaccataatatcttggctctagtatg

SEQ ID NO: 203626 - DNA, 1000 bp, Homo Sapiens
acatgatacactacatattgagttgagctgtattgtttgttaacaagtcaggctatggtcagaccaatatatcactcatagacagaaaaacaataaaataacaaaattagatccattaccattcagctgcttaaaagtttctactatttgggaagactgcattattcatctttgagtttgtcatgtattatatgacctactcctgaattgtgctaaaaatcagaaatgaatgtttcattgtgatgcataattgacaatttttttgtttgtttgttttgagagggagtttaactcttgtagcccaggctggagtgcaatggtgtgatcttggctcactgcaacctccgcctcccaggttcaagtgattctcctgcctcagactcctggcaattttttaaaattaacacttcacaaactcacctgcaaaagaaaatttgaaaatccaagtccagtataaacctaaatttggccaagcatggtgtctcatgcctgtaatcccagcactttggggggctaaggcgggtggatcacctgaggtcaggaattaaagaccagcctggccaacatgacgaagccctttctctactaaaagtacaaaactcagccaggtatggtggcaggtgcctgtaatcccagctatttgggaagagaattacttgaacctgggaggcggaggctgcagtgagctgagatagcaccactgcactccagtctggggaacagagagagactccgtatcaaaaaaaaaaaaaaaaaaaatctaacaaacaaacaagaaaacagtgggctgagttgctggcaagatggccgaataggaacagcttcgatctgcagctcccagcgagatcaacgcagaaggcaggtgatttgtgtgtttccaactgaggtacctggctcatctcattgggactggttagacagtggttgcagcccacagagggcgagcagaagcagggtggggcattgcctcacccaggaagcacaaagggtcagggaattc

SEQ ID NO: 203627 - DNA, 1000 bp, Homo Sapiens
agcaactgctaacctatagttgctttttttttttccaaacagtaatcataaaaatctattaccttaaaataaaatagcagattacatgtttgaatatctgtttctatgagagggacaatgtcctctgagggtatgcacaaaataaaacctattctaagagatgcctcaattcaaatctaagtggtaaaatgaatatataatatgagcatgctatgctctcaacctgttcccaaaacacactgacatattttattttttctttatttattttttttgtagagacagggtctcgctatattatccaggctggtcttaaatttgtggcttcaagtgatcctcccgccttggccttccaaagtgttgggattataagtgtgagccaccacacccggcccgcactgatgtattttaaatgaattaataagattacaggtataggaactagctgttatataacagtatcctatgttgtttggtgtttttttgagacagggttttgctgtcacctagctgcagtgcagtggtacgatcatggctcaatgcagcctcaacttcctgggctcaggtggttctcccacctcagcctcctaagtggctgggaatacaggcgcactccaccatgcctggctaattttgtatttttagtagagagagttttgtcatgttgcccaggctggtcttgaactcctgggctcaaacgatacgcctgccttggcctcccaaagtgttgggattacaggcatgagccaccatgcccagccttccaatgttgttttaacaatatagtctagaaccttcctaatcaaaggacatttactccaagataaaaaacagtcagcagagcccccttctccaagatgggcaaattcatcagagcaaattaactgttaacagacatggtaagatagagtggctggaagtctgcagtttcatctaacacacacagttaccggacaaaactacccccaggagtctcactgggacacattatttggaattc

SEQ ID NO: 203628 - DNA, 1000 bp, Homo Sapiens
ttgcaccattgcactccagcctgggcgacagagcaagattccatgtcaaggaaaaaaaaaaaaaaacagagagagagttaatgcaatgaaaactttttttttttttgaggtgaagtctcactctgtcgcccaggctggagtgcagtggcgcaacctctgctgcctgggtgcaagtgattctcctgcctcagcctcccaagtagctgggattacaggcacctgccaccgcgcctggctaatttttgtagttttttttagtagagacggggtttcaccatcttggccaggctggtcttgaactcctgacctcgtgatccacctgcctcggcctcccaaagtgctaagattacaggcatgagtcaccgcgactggcctgaaaactttctgattagttactgttttgtatctatctcagaattagagctttatataaattttgcgtagctattcttttgctagagaactgttaagttcatgctcaagaagtcctacttttataaaatgttatcttttgccccatcaatatatgatccagaatgtcatcagatattttagtcttcaaagttggaagaaaatttttctatttatatttgtctaaaacatacaaaaactaatattagtactaaatatggttgataatgttaccatcatgcattgtcagatggtcatttgtctgtgctgttcctaagagaagaatgggaattccaaaaagctgacaaattatggcagccagccctctccatttctttattaactttcagtgtactgtttatatctttttgtttgtttgtttttgagacagggtctcactgtcacccagggtggagtgcagcagtgcgatctcggctcactgcacctccacctcccaggttcaagtgattctcctgcctcagcctccccagtagctgggattactgacatgtgccaccacgcccagctaatttttgtatttttagtagagacagggtttcaccatgttggccaggctggtgttgaattc

SEQ ID NO: 203629 - DNA, 1000 bp, Homo Sapiens
acgcctgtaatcccagcaactccgggaggatgaaacaggcggatcaccaggtcaggagatagagaccattctggctaacatggtgaaaccctgtctctactaaaaatacaaaaaattagctgggtgtggtagcacacgcctgtagtcccagctactcggggggctaaggcaggagaatcacctgaacctgggaggcagaggttgcagtgagcccagatcgtgccactgcactccagcctaggcgacagagcgagactccgtctcaaaaaagaaaaagaaaaaaatgttaaaaggtaaatactattataatctctttgttttatagatgagaaaacggggggtggagccaaaggacagagaagttacataacttggctaaagttcataaagttagcatatgtaggaattaggatttgactctagatgagtgtgatttcagaggtggcactcttaaattacatgccattagccaagataaagttacgcagaagagaagcaagtctgggtatgttgaatatgaggccaaaagactaatgttaggactcatttacatttcacagtaaaatcctgatgattatcctgcacatctcttaaggaaataggtatttaggagaaagaagatagaacatccacaaggaggcaaagagattattaaataaaggaatatttttattatgcatgtctttctctgatttaataatggcaaccacagacaaactcaaagaggttatggttagcagccatataactacttgaagaatgcatatactaatatgcaaaattaaacagactttgaaacaaccaaagaacacaaatggctatgaatgcaaagaagcaattaagaaaaataataacaataatgtactcacttttggttttatactagaaattaagacttctactgtccaaaaataattggaataacttctgagtcattcctctcttccttaagactgttcattggtaattagattattctagaaagaccagaagtgaattc

SEQ ID NO: 203630 - DNA, 1000 bp, Homo Sapiens
gcacacgcctgtaatcccagctacttggtaggctgaagcacgagaactgcttgaacctgggaggcagaggttgcagtaagccgagatcacaacactgcactctggcctaggtgacagaacaagactctgtctcaaaaaaaaaaaaaaaaaaatccagataaaaactgagttaaaaatagctaaaaatggagttggaaattaaataggaagagggcaaaggttttgatgaactttacactttgataagctaattacacatctgtaatttgtagagtaaccactccaagagtacaaacagaacatataatttccaaactagtagagggagaaaaagagaataagaaaaattcctcagtcaaatccttaaaaaaagcaagcaagcagttttttaaaataaacaattttttacaaaggaataattcttttttttaaaaaaagtaagcagcaaccaaggaaacagaacaggtgggaaaagaaagcgtacagtaagatggtagaaataaatccaaatacagcaacaaactaaacactgagggcaaatgccgaggagggtcagaatgggtttaaaaaaatcaaaatccaaatacatgttgtttacaagacatgcagctaacccataaaactagagaaagtttggaaataaaaagatggaaaaagtatcatgaaaatactaaccaaaaaggaagtaacacagctatattaatgtcaaacaaaatagattttaaagcagtacacatcaccggggaaaaaagatcacttcataagtataaaaggttcaattcaccagaaatatacaagagatttaaagaacatcattaaccaacttaacctaatggatgtgtaaagaacaatggacccaatgtttgcaagttaacattcttttcaatacacacacgatttacggaaagtgaccatatactgaaccaaaaagcaagtcgtagcataaaggactacaatcatagagtacgttatctaatcacatacaattaagctagaattc

SEQ ID NO: 203631 - DNA, 1000 bp, Homo Sapiens
tatcacagttctcactcataagtgggagtcgaacaatgagaacacatggacacagggaggggaacatcacacaccagggcctgtcggggggtggggggcaaggggagggagagcattaggacaaatacctaatacatgtggggcttaaaacctagatgacaggttgatggctgcagcaaaccaccatggcacatgtttacctatgtcacaaacctgcacattctgcacatgtattccagaacttaaaatttaaaaaaaattttttttaaaaagcactaccctccaggatgcagtaatgcctgaagtcagtcaccattatatagtgcagtatccccaagagaatacctgggagatgaatccatggtgtgggagcagcagtgtccccacttgctatcagtcccagtgacccagttaaagaatttatgttttcatcctcacaaatgtagcccacagggtcgaaggtcttggtttccaacagggaaacatttccaccagggaacacagcaagagtcttcattgaactttaagctacctcatcatgcaggcactttgggcctttcatgccaagggccagcaggcaaggaaaggatcccagttggggtgattgactcttatcatcaagaagcagtccagctgttgttacacaatggaggcaggaagcatatgtttgatacccagatcattgacttggacatctgttagtaccagcttggccaattttgatggcaaatggacaagtgcagcagctacaccctgagaaggtacggcaaatgggacagaatgcctcagttttgagagtctgagtcacctcactagaaaagtcacctaaaccttcacagggacttgtcgagcagagggtggggggatgaatatcagctatagcctcaagaccagctgcagctgcagggaggctgtagttcatcctaccaaccctccttttacaagtcatccccaggaagagaggcccaccagtgtcccaaaggagccactcccagaattc

SEQ ID NO: 203632 - DNA, 1000 bp, Homo Sapiens
ttgtggactcaccctgaattctttcttgtgtgagatctgagaaccctctcttggggttctcagggcccagaacagaaagggatcaggacccctttcctgtaacatctttctggtgaccactgaagagactatagtatggaaacccctagcttttggtaagtggtgaggtccagtaacatgtttcttctggtgaaacatggaagggacgatactgaggagactccaatccaaaggaaatagactgcagaactgatcggggctgactttttctaggtaagacctggcacacgtgaagttagatgctggaaagaatcagaccttatctgcacttctgtctgctgtcctaggctctacacctagcacataattaaaatcccaaacttattaaggttttcaccaaaagtaaaagtcactaagagtcaacactgtaatatgaaattgagactacttaagaaacagttttatatgtgagtcaagaaaacttttcttttgagctatttacagcttttaacaattgagtaacgtatactcctgtgaacaaaatttggaccatatttgtttctctctacctgatttctccaaaatttgaaaactatttgtgagtattcttaacatatggcaacatagttatttgcataagtgcaataagaatctgttttcttttgtaacaggacacaattggaaaaactggttattttaccaagactttgactggaatgctatgctgtgctttaaggaatcaaacttgacttttaaagccaataaaagccccttggggaactggcctcatactttacctatgcagtccctgtagagggtttatgacctgtgataagtaaagaatgtcactttctcacagacccaggagccccaagttatcttgggaccccaagaggagaggaattcactcaactcataggtatttgagggtacaaacccatggtaggcttggcttaaaaaaaagtcttatctgagatttcttctatggaacagagttcca

SEQ ID NO: 203633 - DNA, 1000 bp, Homo Sapiens
ctttgtgctcttctgttcttgaaaattttattgcaaaacagaatcctttctcctgtgcctcttctgatacttgcttttagcttcgcttatgtcatgcaaatgtgtagtaacctaacattcactgtcctgtggtctgagtttcttgtatgctttttaacaagaatgtcagcagtattttcctgtcagaatcactctattatagctaaagcttagcatgaacttagtaatttttctctgcatctagtgatatgactgttgctgtgctagtatttccaaatggatcatgtttccatcagctcattttattgcatcagcatggaaggtgataatttggctgaaaatgactaaaatctaatatatggttaacaactaaaaattaatgcaaaataccaataacaaagcctttctaacatatggaatgagaagagagacttacagcaatggctacttagaatcttacaatttgttgtatttctaagtcagccttttttaggtcacatgaataactagactgagaaattcaaatttcctttctatgacatattattaaaattctattattctcaaaaagaattttttttctttagtaaacgaggtaaaaattttgcctagcttttgctagaaaacagctcagagcctatttgtgaattgacgatagagaaaaccattccttcatcacctgaggcatttcccttttattctgtgggtgaagtctcagtagtagtagaaacagctgaagtaggctctctggccaaggtttaggagtaggattttgtcacgttgtattttcttaccacatattgccattttaaatttccaataagtagtaacgtttgttggagtgatccctttcatgtagaccaagttctaaaatgcattaaattttatcataatacagagaattcctaacaaattaatgaactgttgttgcacctttatctacaaatacattagcaaagatctttgaatagataattggtagtataaagatctttattaa

SEQ ID NO: 203634 - DNA, 1000 bp, Homo Sapiens
tatttctcaatttggataacctcaaacacaagttcaaaaccaaactccccatttcaaacccttcaaaacccgaaacttcaatcagggttcctcgtttttgccgtagtggcctggctctggacacctccctcatccttctctttctcccatgaatgccccagtcttgaaagctgttccttggaaaagcctgcaaatgtgcttcattctcttctccccagtaccacatctttaggccctcaaagctcagactacaacagtgagatggtcttctggctgggctcttggacagtgtctgcatcttccaatctcccctccataaccagcaaatccttctcccttgaggattgatttttttttactcccttttaatggcttcttaatgcctgcatcaagtctagagctttcaagttccttcacaatcaaaatttatttcccaataacctctaagtatgttttactctttcatgcccatgacacaatctagcaccacaattttgtggcttttgttcctaacagaacacgctctccattctctgcccatccaagtgccatccacccatccgccaacaggaaaaatccacttgctgccctcatctgctcaaaaacactcaaacctatagaaattcatcttttttttttcttgacacaaaaaaattgtgcctaaaatgacacacccaaaccccttcacattccatgatcccaaggcacgcaggttacagactgctaaaagctgggctctggcatttaatagagcattatgataccacagattacaaaaggaatcttaaatgtctctcagaaataataaaatgtacagttttaatcaagctgtcatctatagccagataaggtggacaggtgaaaaattaaataaatattacagattttcatcagcaccgggatcctgcaaacgaggggcttaaaaggtctcacttacttaactgctgctcacatctggatttctctctatcaagggaaactttgctggggaaaaaaaaac

SEQ ID NO: 203635 - DNA, 1000 bp, Homo Sapiens
ctgtatgtggagggcaagtagaggcacaggtgtacgtctctctttcagtgagtttagtaagcagcaaagggagagagagaggagacccccagaggttgagaggaggtgggacatagccaaggaatgtcaagaaaatgttttattattaattttctcagcagtgatggttatatgtgcctcagtgtatttttaaggagcatggggccgggtatgatggctcatgcctgtaatcccagcactttgggaggctgaggcgggtggatcacttgaggtcaggagttcgagaccagtctggccaacatggcgaaaccctgtctctactaaaaatacaaaaaaaaaaaaaaaagcctggcatggtggtgtgcgcctctagtcccagctactcgggaggctgaggcatgagaataacttgaactcaggcagcataggttgcagacagagcgagactctgtctcaattaaaaaaaaaaaaaaagcaagggaaaaggcagaatgggctcagattatatacctctttatgagtgcatacatgagccagcccttctccagcagactcagcagttcccctggttctgatgtctccttccttgttatctccccgagaactcaggaacaggggaccccttctgggaagggcagcctagaaacagtcatgggactcacagctggcagtgggaagtcaagagcgggtgggaatcccatccccaagcagaggcctgggcttggtgacactgaaggagggtatgaggcggttcaggggctcctcaatagttaagacaaaggcggctctggcagatgggccgcagtgtggagcacctgtgtgaacaggaggcaagggaggtggcagggaacacagggctggcctgcctgttagacctgctaaggccttcaccccaggagccttctcacctccctgcacccctcctctattgcagtcgccacccccacccaaccactacaccattcacacaagtttctctcctacttcttccgtggaattc

SEQ ID NO: 203636 - DNA, 1000 bp, Homo Sapiens
aaagaattattagtccaggtaatgaatacttttattattctttggttacttactgaccactagaggtagtgaaaaagtgtaagacgaggtcttgccttaattgaattcacagttgaaggggtggagacaagacttacaaacttcccaagaatttttataacaagaaaattcctgtaaaatgataatcatatgttagactaccatgtaagacaaaagactttttttctcttactttgttgttttcattactttattaaaacatagttgtagcttctcacctgtctgctcaatggaagttggagcttttccaaaaatgagtcaggacctgtgctatttcctgtgaagctctggagaagtttatttcatattatttttaattcaattatatttatttaagatatttgaaatagaagaaaatacatggtatctgaagcatttttaaatgagtgaggttataagaatatagttgttaagtcactaacgggaaaataattgcctaatagcagacactgccatgataatgtggcatagttctgagaagaatgatcttaaatagaaattcatctgtagggaaaacactcagctcatgaatatatttttctaaattttctttgatattccactatgtctaaagaaaatttagacactttttttctcaagatagataaataatatttttttcctagcagagtaagaaggccaaggttggtgaaaaggcttcagaaaagcaatagtgggtataagtctccgttatatatggttgcatttaaaaatactttttcttaaggaaaaaatatttgaatatgtttacttaaatgaccagtgtactttccttttttaaaggcaatggtgggaatcttacaagtgaatggatttggagaagagaacactctaatgcaggatctaaagccttttcgcattttaatcagtttactggacaaacctgagctaggtaatgtatactgtcctagggcataaggtcatgtgtggtacttttgtg

SEQ ID NO: 203637 - DNA, 1000 bp, Homo Sapiens
ttttttgagacagactttcactctgttgcccaggctggagtgcagtggcatcacctcggcccactacaacctcctcctcctgggttcaagccattctcctgcctcagcaacccaagtagctgggattacaggtgtgcgctacaatgctgggccactttttgtatttttagtagatatggagtttcaccatgttggccaggctggtctccaactcttgacctcaagtgatccaccagcctcctcctcccaaagtgctgggattacaggtgtgagccatcgtgactgtaagtcttttgtttttctatatatgatagtttatatgcaaatagggacaatctgacttcctgttgtctaatatggatgctctttatttttttctcttccttaattgctctggctagtacttccactactgtggtgaataaaagtggtaatagtgggctttcttgtcttgttttggatcttggagaaaaagctttcaacttatcccctttcagtatgatgttggctatgattttgtgctatgtggcctttactgtgttgagatatactccttctatacctaacttgttgagagtttttatcatgaagggatgttgaattttatcaagtactttttgtgcatctattgagaggagcatatggtttttgtccttcattctgttgatgtgatatattgtgtttattgacttgtgtatgttgtatccctgagataaattctgcttgatcatggtgaatcatctttttgatgtgctgctaaatttggttgaccagtattttgttgaggattttttgcttctatatttaccagagatattggcctgtagctttcttttttttgttgtgtacttgtttggttttggtatagggtaatgctggcctcattgaataagtttagaagaattctttcccccttaattttctggaagagtttgagaagaattggcattagtttttcttcagatgtttggtagaattcagcagcgaggccatcaggtcc

SEQ ID NO: 203638 - DNA, 1000 bp, Homo Sapiens
cctgctatttgacttttgttgggtttgctgtctgtttcttatgaaatctgctctgattttgttgagctcctggacctctttcttagtgtgcagttttgatgagagaaattgatgatagagaggtgacaagtgagtgtctggaccgttaggatggtgctacagggaatggtaagatgaaaaaaacagccaaaggttagaaagttagatttgaccatatcagcagagtcattaaaatgagaatcattgtagacttactcactttgaaaattatttaaaaagctgcacctttctctcttctcttctgatagagaatattgaatggataacttagtaaatgaatgtttagtttagtcaagaaatttgaactcatgttgtcgttttcattttaaatggccatggtaagagttaacataatacttatatttttaatgtacactgagataaacagaatgaatcaataagtttatacaagacaaagttatgtcaacttcaatgcaatgacaaaatcaatcataaatttgtactgaggttgtgttggaaatccatgtcacatgtctcctaatagaaatgtgctatttaaaattaaaaatgaaaattaaaaattatgaatgtttataaaatataacccatacatgatcaacaccatattttatatataatctaaatcaagactgaatacttatttttcataaggaattttggaaatagttttggcttgacaaagtcaaaaacttactactaaaatgtctgagttcattaccaccaagttccttgactctgtttattaagtgccctcaaacccaaatgatatagaaaatgacgagtgtcatgaactttcaagcctatatcaattaatgttcaaatttaatgaagtatattacagttaattttaagcaacattcttcaaattcaattttgttaaaatattaaaatcaggtcttaggtttaagtctttgatccatcttgagttgatttttgtataaggtgagaaatgaggatc

SEQ ID NO: 203639 - DNA, 1000 bp, Homo Sapiens
tgagcacttgaaatgtgactggtacatgtgggtaaataaaacacattgttaaaattaatttcacccttttctttttagctttttcaatgtgactactagaaaattttaaattatatacgtggctcacattatatttttattggacagcactggtctagacctacagaacctaaaggtataaagatgacaaatttccctaagtaagtctctgatactgatggtaaatggaacacttctttcattcattggtacctgggcccatttattctactactgaagacacaccttataatggtctttgaattatcctggaagatgatgcctcattttcctgaggtatcgtcattctcccctagcattctggtagcttcaagctgctttcacagctgtgccttcaaaaagtggctccatcacttcatcaagccagcagctctcaaaggaaatagaactagtagatctcatcttcgtgggacccattggccattgccacaccttctttgctataaagtgtatcccttggtcagaggcaatgttatgtgagatcccattgagggatcaatcacttataagccccgaggtggtgatgctgtctgagaccttgcagctaagatacatatcagttccagtcaaaatgaattgctgctctttccagaatagaaggtgttcagtgtaatcagtttgtcactaagtggctggcttttattagggatgttactatactgggtactgggggctctgcatttgtttctgttgccagcaacttgagtgtttggcactcaaacatggggcacatgctgttggtctgtacatagcctccatccctgccacctagaactctgtccatgagctcactgtgccagcactacagtggcttatgacagagacttgctggcatcaactggcagagtgtcattctgtctgcttggttgtttagtgcctctttcatggtagttgttttttggagggctttaagatgcaatacaaagatctccacatgtca

SEQ ID NO: 203640 - DNA, 1000 bp, Homo Sapiens
aatctctggaaactcactaaatgtgtagaaactaaagagcattctttaaaaaaaaattccatgggttaaggtagaaattacaagaataagtataaaatatttgtactaaataaaaattaatgcaagacttaaattagtggtaggcagctaaagcttagaagaaaatgtcaaacattagatgattaacattagaaaagtagaaagaacccaaatcaatgatctaaacttctaccttaataaactagaaaaaaaggacaaattaaacccaaagtacaagagaaaatagagaaaagattatagagaaatcaatcaaaacaaaacttattttattttttaagatggagtctcactctgttgcgaggctagagtgcagtggcatgatctcagctcactgcaaaccctgcccccctgggttcaagtgatttttgtgtctcagcctcctgagtagctgggattacaggcacctgccaccacacctggctaatttttgtatttttagtagagatggggtttcaccatgttggccaggctggttttgaactcccgacctcaaagtgatctgcccgccttggcctcccaaactgctgggattacaggcatgggccaccatgtctggctgcaaaagctttttttttgagaatatcaataaaattgataagcctctgaccagattcatcagagaggaaacaagaaagatataaattagcaataagagaattagagatgattactacaaatcatataggaatgaaaaggataataagcgaatattatgaacacctttttgtcaataaatttagcaacaggtcagatgaacaaatatcttaaaagacacaaagaataaaaactcactcaggatgaaatatataacctgaataacaatataactactaaataaattgaatttaaatttgaatttgaatgaattgaagctgattttgtactttaaagccttctcacaaagacaaccccagggccagatgactttgctggtgaattc

SEQ ID NO: 203641 - DNA, 1000 bp, Homo Sapiens
aaaagtctagaagaaaggattttaaatgttcacaacacaaataataaatttttgagataatgcatatctggtttgattgttatacattgtatacagtattaaaatatcactatgtatcccatgaatatgtaaaattattatttattattttaaaaataaaaggggaggaaagagattgtgctttttgtcccttcgggttcatttgtctattactattctttctcactctctttttttttttttttttgagacagggtctcactctgttgcccaggctggagtgcagtggcaccatctcggctcactgcagcctcgacctcctggcctcaagtaatcttccagcctcagcctcctaagtagctaggaccataggcacaggtcaccgtacccagctacttttgtttattttttgtagagaagaggtcttactatgttgcccaggctggcttctaactcctgggttcaagtaatccacttgccttggcctcccaacgtgttgggattacaggtgtgagcaccatgcttggcctctcactcttaaaaaagaaacaaagtcaaacacatacccattttgggaagaagttctttatcagctcccttgaaaaagcacacgtagatcaccagtcctctttggacctatgagaaatcaccacagtaaactcagattacaacaatatctgtaaagatacagggctaaatgggtacagtttcacaactattaatattatagacatagaggttaaaagcacagaaaatgaactttacaaaagatttctcatgtgagaaaacaaaatatttttcaattttcaatcatctcagttatttctttcaaatttaagtttaaaatatacccaagagcagtgaagacaagttataccttcaaacatttatttctaatcaaaatcattaagaggatcaaccagccttttctcaagtaagggtgacagacttagaaacatttcgtttgctgggccccatttattcaatgccaagtgaattc

SEQ ID NO: 203642 - DNA, 1000 bp, Homo Sapiens
tccttcttgcagggcgcaggatgaaacgtgtctggtctgggcaagttgtggcgaggcgggtcgactggcgccgctctagggccttccagactccggaccacggacgactcaggataccccacccccctcccgccccctcccctccgcgatctccctccggcctcttccctcggtgtcccggctcctctggcaactgggcgggaccgcgagcgtctagaccgcagcgctaaaatgcgctcagccaatccggcagctggcgcagacacgtggttcgggggcgcgctccgttgctggccctggatgctaaccctaggaaggcttttcaaagagaaaccagattcgctcctacccggttgttggtctggccctcagcaagctaatttcccagaggagcttcaggtgaattatcttccaaaaagagatgcgttttaatcgcagaagtctgcagatgcgaaggaccttgaaaaggctatctaatgtggccctgcatttgagtgacgtggaaaaccgagattagggacttttcaccaaagccctctaggatttaaacccacgtaggtttctgcgtctctttccgttatgcccacttcaggatgaaaggcacggatctttgttggtagaaagttaggcactgaattacaggagatgtgggtccggagtagtgtgctcatttatgtaacctaaaattggaacacgtgggacaaaagtcagtatttttaagtaacaagtaatccagaacgtatgtatataccatcatgagaaatgaaggcatcttttgcaaaacctaagtgtctaatgcagctatatatatatatatatataatatatatatatatgtttttaaattagagaggagtagctgcagaacttttactggaccaacatgccgttgtaaaagtgcctttccttgtgcttctccctgacagaatcaactttgtaccatactttagcacaaggcttcaaacatagcaacagctaaatatgtatttatgttgaattc

SEQ ID NO: 203643 - DNA, 1000 bp, Homo Sapiens
tgtcctgaaggtatctgtgggttttctcttatagaaaacaggtgtgaaagttcagtgttcaacagctctaccattctctttaacagatttattttatcttattttattttatttattttttgaggctcccgctctatcactgggctggagtgcagaggcatgatcccagctcactgccgcttacacctcccaggctcaagcaatcctctcacctcagcctcctgagtagctgggactgcaggcgtgtgccaccacacccagctaagttttgtatttttttcatagagatggggtttcaacatgttacccaggctgacctcgaactcctgggcttaagtgatccgcccaccttggcttcccagtgttgggattacaggcatgagccactgtgcccagcaagcaaatttattataaatttcattttgtcttttataattcatcataagatgcctcactttgctctaagtatcaagctttgtttcattctctgagctcctagaaggcaagactttctgtgtaccagtgaggggttgtagttgatagctgtgatttgagaaggtatttcacaagcaaaatcattttatctgtgccaccctctgtgtatttctattgcatttttatgctcattgtatttaaaaaggtacctaacaacaaagagccaacaatttcaccctcccattccattgcttataccttctgcttcatttcatgtgtctgacctacatacagagtctgtgtcatggtcctgggtctatactgtagcccagataataccttagagatatttttcttaatgaagaacactggtttatagtccagtatactggaatatacatatggaatttaaattgggtgacactgaactcatataaagctggagggtaatgcaaaccatatttttctctttatactctcctgcttcctgataggctgctgtggcctagaaagagctcttctctgggtttctggagaaatagaatagaactcccatctggaattc

SEQ ID NO: 203644 - DNA, 1000 bp, Homo Sapiens
tgggattacaggcgtgagccaccacgcccagcctcccttcctctttaaggctgaatcatactccattgtctggatagaccacattttgtttattcattcatccttcagtggacatatgggttgcttccatctttaggctattgtgagtaatgctgccgggcacataggtgtacaaatatctgtttgagcccctgctttcaattctttggttgtatacgcagaggtgggattgctggatcatatgataattctatgtttatttttttgagaaacctcaatactgttttccacagtggttgcaccattttacattcccactgactgtgcatgagggttccagtttctccatgtcttcagtacttgctattttctgtttatttttagctatggccattctaacgggtgtgaggtgggatctcattgtagttttgatttgcattttcttaatgattatcgaggttaagccccttttcatgtgtttgatggctgtctccattgaagaatgtctgctcaagtcctctctctgctttttaattgggacgtttgtgctttcattgttgactttttggagttgctgcctattttaaagctctttgtggtaggcatcctcatgaataagccctaacaacccccagccactcacctttgagagtccttttggagtctgacctctgcagccacatctccttaatcgtggtcatctcagctgctcttgttgcaaccttctccgggtctctcctcttcccttgcagcaggagtaagaagcgcatggtgttttctggtgcgggctcccagtggttccctttatgcaggacaggtgatgtgctattcctgggacctcccctcctgcttggggttccagcagcatcctgggtcaatgacctctgcaaacctttcacagaattcctctaacacctcttcctgggtcagagcagagagcccagtgccaaacatttcataattaccgcttcaaagattctgcatcacacgcacgtcagcg

SEQ ID NO: 203645 - DNA, 1000 bp, Homo Sapiens
ctttgtattattagtagagacagggtttccccacgttggccaggctggtctcgaactcctgacctcaagtaatctgcctgcctcggcctcctaaagtgctgagattacaggcatgagccaccgtgcctggccttgcttcctaaaattatcactgtttcccttcattttctaagccctccaattcttatgtaacaaatttcctatgttaaatcctttctgttggaatcatttgtttttctggctaggccctctctgaaaataatttgtgatggatcttctcatctcttcccctgtgacacgtatcttgtgaacgtcccaacagcatagaagttctgcaaccttacccaacaagccccttgcagtatataaaaacctaaatctttcattaaggggatcaagcatgctgaaacaactgtgacagtgacaatgactgtgatcttctattggatactactccgtagtatgacagttagcatcacaagctgaatcttagatttggaatattttcatggtaaacttttaacatatgatttttgcatatgattatatgcaaagagatacattggatatattgttagtagcactgagggtgtagttaagcatatgaattactgctgggaagagagccaaaattaacagaaaattaacttactaggggtttctatcaagttttacaaggaaggaataaactgaaaaagtgaacataattgggagcaacaggaattccgcaggtgaaggactcaccattatcttgtcgctgtcaataatggtgttcaatctgtgtgcaatggttagcacggtgcagtgggcaaatttctcccggatttttttttgtattaactcatcagttctgcaatcaaagaagttaagtttaatttcgtaaagatgcaaaaagtagacttaagacttaaaaagctctacttcacaatagagatttaaaaaaaaaagatcatatctatttaatgttttaaaaatcatgttaaaatgttttaggacaatc

SEQ ID NO: 203646 - DNA, 1000 bp, Homo Sapiens
acagtggttatgacgaaaatagccaaattcagaaattgacaggacaagacttactgatcgattggacatcagcggcgagtgaaagagaggacacataaacaactcccggttaaaattttggattggacaattgagtggatggtgagcatcacttactgagacatttttttcttagtatatgttccattaaactgaaaaaaattaaagttaatccccctttcttaacttccttctacactggcaaataataataataataataataataataataataataataatgagagacatatttttcagttaaatgacattatcaaattagactactagaaaataccatagatcaaatcatctgggaattaccaccccagagcatccaggactgaactcagacaggcaatttgattggctcacaatgatatcataattctatttcagggcagaactggaggtctgcctgttgatgcccagagcctgaggtctggccacccacgggtccctaagccctcatctagattcatgctgtgctgagaccattctgtgagttgataaaaggctgtagggtggctgggccttagggtagagggttgtgtaatgcagtgcataatggcagtggaggtaagattagaaaccagaaaatatatgtcaatgtggtccgacccctttctgggttcacatcaaaatccccgtttgctttccagaaagtagtggtacaaaccattattcctgttcatgagctccttgggacagttcttctaggacacaattctcccttgcactagaaactattttaaaagtaaacaacaccagacaccactacttaaagaaagtctggctctaacatccttctcagaaacattttgttgttgttgcacaaaaagtggcctcattacaaagagctttattcacagatctacaaagaaggtagagaccatagggtcacacacccaggagacagaattaaacagtgtctttccagaaaggcagcaatgaattc

SEQ ID NO: 203647 - DNA, 1000 bp, Homo Sapiens
aacaactagatacaaaattagcaaggatatgttttgtatcacttaacacttacacaacacgatcagcagactactgatccaccaactctatccaccaaacaaaagcagaatagacattcctcacaagcacacacagactgtcctccaaaatagaccatattctaggccataaaacacatctgaatagatttaaaaggaataaaatcacataaagtacgttctttgactgtaacagataaatgagaaaccaccaacagaaggtaaaatccttttgtggtgatggaaacattctaagactagattgtggtgcaagtgagcaactcatttactaaaaataatcattgaattatatacttaaactataaattttatatgtaaattatacctcaaagctgttaagaaatgaatgaaaggagaagcacattcactatagcaacaaaactttaagaatacctttactaaggaatatttgtgacctataggaataaaaagtgattaagctttgaaagaattaaaaagagataaataatagacaaactatgtttccatatatcaaaaataatacttccaaatgtcagttacctccaaattatagatttgacacaattttagtaaaaatcataatgaaagtttgattttctgacttaaaatcattctaaagtttatctggaagattaaaaacacacaaaaattcacagaatattttgaaaggaagagaaatgaattacacaagctatggtagacactgaaccatattttaaagctacactgtactagctaaaatataatatggatataggagtagaagattaaacaaaataagaaataaaacattttatttgtttttagtatgtattaaaaatacattgccaaacattttgaaatggataattcaataatttttattgatataaagagttgcatttgatctagcagttatacttctgggaatttttttaatggaaataatcctgaaactgggtgaggcaaatatgaattc

SEQ ID NO: 203648 - DNA, 1000 bp, Homo Sapiens
ataacacggctgaacatcacttaaaacaacactttattatgcccctttacattgaaaaggaattgtagtttgaggggttttgagtattatttgatttgaaatcttagaccgtatttatagttttagtagggaaaagtacactcataattctaggatttcagatgaacctcaaagctgaacccattcttcggatgcacattgaccatatctgtgtgttgtagattcctaatggcaagaaagatacttggggtatgtggagtgcacgctgtgctacaggagccccatgagacagatgctcggcagatgtcacaggtctgagggcagctgggtctcttctgagggtcttagagctgagagtgcatctcatgactgtggacgctatagttcactgtgtttaactgtctgcggagccatgtaaggagcgctgaggattctttgcagagttgtaaactttgtaagtaaatcttagatatgcctctgatacatcagtcatagccattggcaggggaggcgcttgagcccttgagtgggtgtgctcccttgcgagtcgctgggcggtgcatggatgtggacgagggccctttggagctctggttggttaggttgccacctcctgcctgtttattgcctgagggacagtgtgtcatccctctctttaacaaatgaattttctccatctgaaaggtgcattgtctaagtctgccatcaatgatccctaactaaaaattcttctgcctccttgaaagcaagttctttttttgtcttttgaaatttatttttttaaacatcgtttgttactggctgccatatatttcatttaggtgagtgctggtatataatgtatatcactgtctgctttacaactctctggctctccctcacctgagcctctgtgttcgagaattctagccccttcccgagacccaggcaccgggcaggtgagggtgtccttctctgtagtacgtcctcctcctttcccaagtgcacggcgcgtccctgg

SEQ ID NO: 203649 - DNA, 1000 bp, Homo Sapiens
attttgcaattaaattaaatctggctttaaagacaggccagaagacaaaggaggagttcaaactatgtcagccagagccctccgtgggtgtgcctgttttccattcacacgaaaattcacattccatgtgtcagcagcatagcatgatgccatttttcaggttggttaaggatccagccagctctgagcctattaagggcaaacagcaaaacctaaacaaatcccaaagccacaccagtaagaggtggtgggtgagggcgggaaggaagtcagcagatgcaccaagagggagacaacaattataaaaggaaaaggcaaggaagagggcgccggccttgaaacacggaaagagaaagggaagctccaccaagaaagggactgcggaaacctgcgggaggcgcacagctgagggcgcgattaggcggagagccacttaaagtgggagggaggtgaggcaggtctcgtcataagaaaggggccagagggcactgggaatgggattccgtggttctcaaatgacacagaagcctttaagatgggttccacaagctatcggcacctcagagatacaatacaaaaagcacgttaccttaatagtaatgtagttctttaatgatttggacattttttcttctttgcctttggcgtgcaaatgccctgaaacaaaaacaaaagcattcagtctgagctgggtgaggagactctctggcctcagggacacatggctccccaggaaacgaatgggaacctgcacatatccaatgtatagaccagtgtatgttggtataaatctgcccccaaatcttcacccgtgctgggccttccgggaagacaggacctgcccttgttccacggtgcagggacacccagccccacactgagagcagatggcaggggtgccccagctgactcagaagctaaacaagagccagcaaccgtggtactgacagcagtatttcatctattttctcctctcctgtaattcagagatactgaattc

SEQ ID NO: 203650 - DNA, 1000 bp, Homo Sapiens
cagtatgatattggctgtgggtttgtcacaaatagctcttattattttgagatacgtcccatcaatacctaatttatttagagtgtttagcatgaagggctgttgaattttgtgaaaggccttttctgcatctattgagataaccatctggtttttgtctttggttctgcttatatgctggtttgtgtttattgatttgcgtatgttgaaccagccttgcatcctagggatgaagcccacttgatcatggtgcataagctttttgatgtgctgttggattctgtttgccagtattttactgaggatttttgcatcaatgttcatcagggatattggtctaaaactctctttttttgttgtgtctctgccaggctttggtatcaggatgatgttggcctcataaaatgagttagggaggattccctctttttctattgattggaatagtttcagaaggattggtaccagctcctccttctacctctggtagaatttggctgtgaatccgtctggtcctggactttttttggttggtaggctattaattcttgcctcaatttcagagcctgttattgggtgattcagggattcaacttcttcctagtttagtcttgagaggttctatgtgtccaggaatttatccatttcttctagactttctagtttatttgcgtagaggtgtttatagtattctctgatggtagtttgcatttctgtgggattggtggtgatatcccctttatcattttttattgcatctatttgattcttctctcttttcttcttcattagtcttgctagcagtctatcaattttgttgatcttttcaaaaaaagcagctcttggattcactgattttttgaagggttttttgtgtcctatctctttcagttctgacctgatcttagttatttcttgccttctgctagcttttcaatgtgtttgctcttgcttctctagttctttaaattgtgatgatagggtgtcaattttagatctt

SEQ ID NO: 203651 - DNA, 1000 bp, Homo Sapiens
ctttctatttatttggatattttaaatagtattaggtttgtaaaagcctaagttttagagtttttatatgcctaaaaattaggtccacaaaaaatctttgtgatcttttgtaagttatagaaacaggcccaaagaggttaaattttcacaaaataaatgggttgaatttgactatctgtaagtgttttagcctccaaaatgaggtgatttttgcctttttatgtaaagtaaacataaacatatacatatttttgaacaaaatttcctttctcctttgcttcctaaagacactgctgtgtgatcctattatataatacttagctacatcatgtaatcagtcactttgaaggttgaaggtcaagtactggttttcccaaatgtgtgatgaagctgattgtgcgttatgttattataaccctaaaaatacacagaacagtttttttagattaaaaaatataaatatgctgggttttagtgattacaataaactcttcttacgctatttggaatagacttgagtatagagtgactgtttcagatattagacagcaggctgtacatgatagtaatccctgaggcaagggaaacaaataaggccaggcttttgattaccctggcttttgcctggaaacctattccagactgtgttgcggggaagaataccaggcaaagcagagtgaacttgctgagtggaggaagcagattggagtttgaggaggctgaggcagttggaagttgaggttggagttctggagaggaaggagtgatctagaaaaagagctccagaaaatttatataaggccttcttgagtcgttgatgagtagattgtgtggaatagaaactctgcaaataaggcaaagagctgttgaggagctgtgagctgtgaaaagtttgcagagcccacacagggctgggaggcacttgagtaccagttggttgaagtggaaagtctttgttgcgttggacatttgggacattcagtaaagacttggaaggatc

SEQ ID NO: 203652 - DNA, 1000 bp, Homo Sapiens
aacccgtgctatgctcaatggagccactcagagggggtgcccttgaaagggacatctttttctattcttcacaaaggtgccaattatgctactggcagccgtggctgggaaagactgtacccatctgtgcctctgctgcctgggctcagctcagctcagtggcctatcccatagcccccagcctggatgttaaggctgagtgggtcctatcctgagcacccccatcattcctatataatccctatacttgacacctctgccttcatgaagcttctgatggggtaaggcctgggaaatgcacaaaggtcccttgtctttacctttacccaagttttactcctgcctccccaactggcagattgagcacatctttaaaacttactatgtctaccaatgggtcagtaacaacaataacaacaacaaaaataaaataaaataaaataaaataaaacgtactgaagcttgtaaactttttttaccaagcacacacaaaaaaattttccttgtcgccataatgtatagttctaatgtctagaatgtgttacatccagagtccattcaaatcccactactcagggctggcacagattcagggtggaaagtgaacgctagaccagggaagctcagcatcgatcatgccctcttaccctgggaggagaaggtggaaaaggtccttgtccagagctgacctctcagctttcatatctgggcagctcctatgagcccctatggtgttcagccaagctcccaagtcaactagtgtcagaaagactaaggaacagtcttgaaccccctccccacagctgccacatcccccaactgccctctcaccccactccatagccacccctaataccaacagggaagacgcccttgagttggcccctccccttgcccatggatcctgcagttacaaaccagaggcccccaccccaggccctgccccatctcccaactagtactaaagaaaggaggtactgacctgactgttctggaattc

SEQ ID NO: 203653 - DNA, 1000 bp, Homo Sapiens
gtgtggtgacctatggcttccctggttggcagctttgcagctgcctttttgtgaaggagagtcttcatatttggaggggaaggagagaggccagggaaaaacattaaatgtatgagtttttttcttctatcatgaagtccctgtgcaccaggtacattgccacccatgttgttcatgtgtgtccagtagcaatgttagatatcaagacactcttggatgcctgcctacaatgtcttccttccaggcttgtttagctgcacaagagagatagagaacaggtaggtgtggtggccgtggtagttgagagcacagcaaaaggaagtgggctactttgcctattccctgaccctctgtcgccatcctatcacatctcccaacattctccattttttagctcccacctcatttttccatttctgtacatgcagtctccatgtcccctccccatggctctgtggtattcatcccccgtacattcccatccctcgcctcccgcctggtgctcacctctctttcctgtctcttcctggtaaactccattttccttctgggctccaaccacaaacctatttccctttctggccacctttgtataccatcctggtgctcttcaggtcctcatgcccccagccctcaaatcacccttcccagtctcctgcatttcttacgccagcacccacccgaattttcacgcctggcccccaccaacccccatcctccggttccgcagcccagggcccacctcccgcgccgcccacctcccgcactgccggagaggtggcagtgccacctcccgcgcccaaatcagacccctcactgttgcctctgctaggagcctgtggcgaaggaggatcagcaggccactaacagagtgagcgcttgcaaaagctaggagggtaggatctgtaggcgtggaaaacgtctagaagggttgtgaggcaggcgaaagggaaggcagcagcatccccagcactaggcttgttagccctctgccttcctg

SEQ ID NO: 203654 - DNA, 1000 bp, Homo Sapiens
actcccacctactcaggaggctaaggcaggaagactgcctgcgcccaggagtttgaggccacagtgagctacaattgtgacactgtactctagcctggacaagagatctcatctctaaaaattaaagaaaaaaaaaaaagttgtaatgtcttcatatttaaaattttcttagaaatttcctttaaaaaaaaaatgggtcctggctgggcacggtggctcatgccctgtaatcccagcacttttggaggccgaagtgggtggatcacctgaggtcgggagttcaagaccaacctgaccaacatggagaaaccctgtctctactaaaaatacaaaattaggcgggcagggttgcgcatgcctgtaatcccagctactcaggaggctgaggcaggagaattgcttaaacccaggaagcggaggttggggtaagctgagatcgcaccattgtgctccagcctgggcaacaagagcaaaactccgtctcaaattaaaaaaaaaaaaaaaaaaaaaaaaatcctaaattttaaaatgacgattataaacttgagtattgattttctgttttccttgagttagacagagtttttttctgacaataataggtacagtttagataagaaatgcttaacttagtcaaattttagtaatttcagtaatgaaaatgatggagttggtttagtctcctataatcttgcttaagaaaaaaatcccctggtattcagtttatatatagcatgcaatctagatgaataggtttaggttttgtttggtttttaataacaacatgcataaaggaaatataatgatctcatcaaatctgtctccttctgagagacagtagcctactggtctgcctctcaggatccttctaatatagttttcttggatattaggtggttttgtttcattgaatctcagcagtttattgctttagaggctttttactgagttgggtcaacattccacattgaggagatttttctttctaatgcaagaattc

SEQ ID NO: 203655 - DNA, 1000 bp, Homo Sapiens
gattccttcctgttcttaaacatgggtgatgagaaaggtgctgggctctttttactggcagggccacctgagaccatggagaccctggggcccagggtggatgaggtcctagaaggcaaaggagcagggaagaaaggctgctttcagggcaaagtcaccaacatgagccaacaggcagaggtgctatcacttctccagaactacatcagcacacagagtgctaggaagtgagggctcagggtgctcacctcctcttaccacagaaggagtcttttggataattaaatagcttgacttgaaaaaaagaagtgctactgtttttttatgttaattttctatcctgtaattttactgaatttgtttatcaattctaatagtttttggtgaagtctttaggtttttccaactataagatcatatcatctgcaaacaaggataatttgactccttcctttcaaatttggaagccctttacatctttgtcttgactcattgctcttcctaggacttccagtactatgttgaataacagtggtgatagtgggcatcctggttgtgttccagatcttagaggaaaggcattcagtttttcgccattcagtatgatacaagctgtgggtctgctgcatgtggcttttatgacgttgaggtatgttccttctatccccagctttttgaggtttctatcatgaagggatgttgaattttatcaaatgctttttcagcatccattgaaatgatcataaggtttttatccttcattctgttgatattgatgtatcacattgatttgtgtatgttgaaccaccttgtgtctcaggaataaatcttacttgttcatgatgaatgacctttctaatgcattgttgaattcagtttgctagtattttgttgaggatttttgtattaatatccatcagagatattggactatattttccttccttccggagaggtcgagtaggattgatattagttctttaaatgtttggtggaattc

SEQ ID NO: 203656 - DNA, 1000 bp, Homo Sapiens
tacaaaaattagccaagtgtggtggcacatgcctgtagtcccagctatctgggaggcagtggttgcagtgagctgagatcacgccacttcactccagcctgggcaacagagtgagactctgtcctgattaaaaaaaaaaaaaaaaaaaaggatatacaaatatccagggctaattggagattcagatttgataatgcataggaaagatcctagtacactataagacaccttacatttataaagtagtataattgtcatccacataccattattattacatcatagtgaaaaaatacaacttacaagagttcagctgagcttaaagaatatattcatttgaagcccaatcattgttgtgtgagcttcttcatattatcttatttcaattattatgcttttatcttagactctaattatatatccagttttacttacgccattaaatgaattttaaaaggagtcacattaaataaaggccctttaaattttttatgagataaagagttgccatagacacactcttttgcatcttacccggtacagtcaaactcaattaactattcagactggcaaagcatcttttacatttttcgtaaagattctaagtgaaaagattgtactatttttcaattaagttatatatctttcaaaaatagctggtagattaaagcaaaggcactgtcacaatcacagattctatttagtgccatttagaggacaaaaatgaagccagctagacttgaaaatgtgttcatagtgatttttcaatgtatcaaaatctactaaatggaacattgaatggcaagtccaaaggcatgtgatggttaagaaatctggtcacaggcccagcgcggtggctcacgcctgtaatcccagcactttgggaggccaaggcaggcggatcacctgaggtcaggagtttaagactagcctggtcagcatagtgaaaccccttctctactaaaaatacaaaaattagccaggtgtggtcgcaggcacc

SEQ ID NO: 203657 - DNA, 1000 bp, Homo Sapiens
gtccattgggtcagaaggaagagctgaatagatggtggtaattggtctagtgacaggaaggtctaccagaagacaacagaaatagtcagtggcattgaaagacaaggtagcaacaaggaagcatgtgggatgaatgacatcagtggatttataattatagtatgaatgaggctggggagaggccgtgggcctgtagttaacaatctaaaaaatgttatgtgctggctgtaaattcattagaaaaagagacatgtacccataaccagctctcttgacttatcctacatgtccaggtcataatgcaaacctcagaggaagagaaagtgctgctagtcgatttaagaagtgtcaagtgttccataacggaccgctctgggggagtgtgttttagaatgaaattctaaaaggggctctctttaagcacagactattttactttcctgaaaaaataacactggtgacactagtttcctggggtgactttcacagtgcatacatggtgcccaaggatgtggatcttgcaaacttgattcattcctattggctttgtacctgcataaatctttccatagcctagaccaagagtccactatctcttgctgcctccacccttttcactgtggatctgtctacatctgctgtcttagggtcagtcccctttatgaattaaaatttgaagaattgtttactgatgcttttctaccagccttggagcctccctttttcactgaatgagttccagttcaacaagaactttattcatggttctccttttcgataactctgtagtgatgaacagtagttgctgcaatcaaattcagtccagtgacagtctttaagtgtgctgctgtggatttctaagaatagttcctccaaggtaccttgtatactaggaaaatagaattgagttaagaagggaagaggcttttgttactcttagtttttcgccctgttgactatggaaaccacttcatttctgctgtaacactcctactgtgtc

SEQ ID NO: 203658 - DNA, 1000 bp, Homo Sapiens
aaaacttaatttatctcagtcttccttacacataacacctgctgtcctgcactaaacttttctcctgccaatacatcacacaattttctcttacgatttggaaaattctattgctgattaaattctatttttattattacaagggatcatatgccttaaggttttatttttaaaacttttttcaataatattgtcaccaataccaatatggtcatcacactgtttcatcatcattagttttgtttttttgtttgtttgtctttttgagacagagcctagctctgtctcctgggttcaagcaattctcatgcttcagcctccctagtagctaagactacaggtgcaccccaccacacccaactaatttttatatttttaggagatatgaggtttcaccatgttagccaggctggtctccaactcctggcctcatgtgatcgacctgcctcggcctcccaaagtgctggtgagaggtgacagcatgctggcagccctcgctcactctcggcgcctcctcggcctcggcgcccactctggctgtgcttgaggagcccttcagcccaccgccacactgtgggagccccgctctgggctggctgaggccggagctggctccctctgcttgcgggaggtgtggaaggagaggcgtgggcaggaactggggctgcacgtggcaatcgcgagccagcgcgagttccaggtgggtgtgggctccgtgggccccacactcggattggctggccggcacccctggccctgggcagtgaggggcttagcacctgggccagcagctgtggagggtgcacccggacccccagcagtgccagcccgacggcactgtgctcaaattctcgctgggcctcagctgcctccccgggggcagggcttgggacctgcagcctgccatgcctaagcctccccccgagctgtgggctcctgtggggcccgagcctccctgacgagagccaccccctgctctgcagcacccggtcccatcaac

SEQ ID NO: 203659 - DNA, 1000 bp, Homo Sapiens
cataaaaatattaaattattttgcatcatttgaaagaaggcattggtataatgaagagagaagtgacttggtagtcacccctgaatctatcagtaacaagatttgtgacattttcacaactctgtcaatctcctagagccttagtttcctagcctataatacttgaggacctgaggcaaaccagatgattctcttctactcttaatatttaattctaggtcttgcaaaaagaatggaaaaagaagttaatgcattgctttcctttgaagtactcacagcctagtttgggagatcacagaaaacaagccactccatttataattgttcttttttcttaatcacactgaataaacacaaaatcagttgcaactttttttctatatctctctctctcacctgattctgagtgccacaaaagtagggactatgatttaattagtcccagcgatgtgagcctggaagctggagcaccttaaatgcttagtgaatctctatacaaatgagaaaattaaaaaaagaaagaaagagagaaagaaagagagaaaagaacaaaaaaggctcaaaaccaaaaaccataaaagttatcattaaatccaggaaaaactgagtgagctcttcttgaacttggcacttaattgtctccatgctcctgccttttctgagtcctgccagtccctctagaataatgcacacatgtatgcaagcacacaaactacaaacaaggaaatctgtcaagcattgcatatgccatgaagatgagggaaaatgtccggggaaggcttgggatcagctgaaagggggaagatgctgagggcatctagccaagaactcccaggtcatgaggtgggcaggagaaggctttccccaatagttctctatgttccgtgggagggaaagtactcattagtctctacttctgcactgtgcccataaagtgaaaataaaggaagtaatcaaccagacttagattctttcagtaccatgtaccctctcctattca

SEQ ID NO: 203660 - DNA, 1000 bp, Homo Sapiens
tgatcattactttctatcagtgcctcaaaagtgtgagatccagagcagcagcagcagcatcacctggaaacttgttgcaaatgcaaactgtcaggccccaacacagacctgctgaatcagaaattctaggggtgggtggaacccaggaagctgtttaacaagccctccagataattcttacgcctgttaaagtttgaaaaccactctaatgcttcagcagccctggacagccagggttcacttaggtgttcctctttcctcaattgctaatatatggcttgtctgttctcaacaccttggagagtcaaataaaggtgtgaatatatcaaacaaaatgttaaaaaggtagctaggaactgtcttcctaccaaagattcactaaaattcttctcttccatatcccttcttcccaccaaaaaagccaccttcatttagaatagactctttaagaatgtagtaatggcaattataaaataaataattaagccaaatttaaaaggctaaattatgaatgactttttaattaattgcaactagataatcagaacagacaaggagaaaagagccctttgttacctgtttaactcgagctagttaatgtatgctatctaaaagaaaaatgatgactttttgtcactagagtatgctcatctgtgaataacaatctaataaatctgcctgaatgttccagcaaaatgttctgctccctccagcacagggggacgactgaactcttccaagtgttggactcagagcagctgaaggccaagaacataacctgaggaatggaagggaagcccttgtagataaagaagaggaatggtcatagaaagtataagaagtaaaagccatacagaaatttttttaaacagaaaaaattttatcaggataagaaaatatttttgtatagttgtactgtgtttatgttttaagctaagagttattacagagaagccgaaaagttttttaaaacttaaaaagtttataaagtaaaaaagtt

SEQ ID NO: 203661 - DNA, 1000 bp, Homo Sapiens
aatcaactttaaagcagaaattacctttttttttttttttctgagacagagtctcgctctgttgcccaggccggagtgcaatggtgcaatctcggctcactacaatctccacctcctgggttcaagtgattcttgtgcctcagcctcccgagtagctgggactacaggcatgtgccaccatgcctggctaatttttgtatttttagtagaggcagggttttaccatgttggccaggctgatctcgaactcctaacctcaagtggcccacccacctcggcctcccaaagtgctggaattacagcatgttccttctcctggcacacaataggcacaaaataactgtttgctgaaagaacagctaccatcataagggaatagttaagaataaaaatcaaatacataaaatactcctaaacaaaaccagttctgactttcaaagggatcaaaacaaaagatatctgagcctgaattaatatttttatttagtattctgcttaactaaaaacttttcctcgactggtttttgttaagacaactaaacctattctcacatctacctgaaaaaagtatattaagtttctattagaaaatcaagtcacatctccatgtacttatcaacagtaattgtgaagaagatggagagattccaagatagagaacaattaacaaaagaatttagacttatgatcaagtaaagaatatagctggtctttgtccctggttcctggcacagagtttcaaaaacccttgtaattacccaagtgacaggaatgtctctgttacgacagtgagatgaaagcctgaggtaacttcaagatgggggccggtgaccagaaagaccaaatcacataattaaaaatctgaaactttgggtcaccccaacctcaagggagtggagaactgaaaattgaattaaaaaacatggccaatgatctaatcaatccggcctacctaacagagccccaataaaaactctggacactgaggttcactggagct

SEQ ID NO: 203662 - DNA, 1000 bp, Homo Sapiens
tttgcctgggtatcaccagcagaggctgcagaacagcaaatattgcagaacagcaaatattgctgcctgctccttcctctggaagcttcatcccagcggggcacccacctgtatgaggtgtcagttttccccctactgggaggtgtctcccagttaggctacacgtgggacggggacccacttgaggaggcaatctgtccgttctcagagctcaaacaccatgctgggagaaccactgctctcttcagagctgtcagacagggacatttatgtctacagaagtttctgctgccttttgttcagctatgccctgcccccagaggtggagtttacagaagcagcaggccttgctgagctgcagtggtctctgcccagttcaagcttttccagctgctttgtttacctactcaagcctcagcattggcggacgcccctccccctgccaggctgctgcctcacaggtcgatctcagactgccacactagcagtgagcaaggctctgtgggcgtggtaactgccaagccaggcacaggatacagtctcctggtgtgtcctggagactggacacaccactaagaccactggaaaagtgcagtatttgtgtgtgagtgtcccgattttccaggtacagtctgtcacgggtttccttggctaggaaagggaaatcccccaaccccttgcacttctattttttctaagaccactggaaaagtgcagtatttgtgtgtgagtgtcccgattttccaggtacagtctgtcagggcctcccttggctaggaaaggaaaatcccccaaccccttgcacttcccagggaggcaatgccctgctttgctttggctccccctccatggactgcacccgctgtccaaccagtcccagtgagatgaaccagatacctcagttggaaatgtagaaatcacccatcttctgcatcgatcacgctgggagctgcagaccagagctgttcctattcggccatcttggaacagaatcaagatc

SEQ ID NO: 203663 - DNA, 1000 bp, Homo Sapiens
aaaacaaagtttgggtcaccataatgcctggaaaataagcagtgaaatttctaaataaagagtcagagtggtatagccttatattctatgtattaactctacccaagtatctggccaacccctgaattccacatgcacggggccacctccaagctgtccaacaatggctaaaacaactggcaaaatatttcaattattgcttactactggaaagacaatttggggcttgagcctgctaaaaaaacaacagatttttatttaaagatattcttcagaggaatacaacataatttaaaatctcttcaatttgtcatttaaaatattcaagatactagccaaaattattagacatattaaaaaataggtaaacaaaaaccattcttaagaaaagaggcagtcaatggagaccaaacccgagatgttccatatgttgtatttaattagcaaaaattttgaagcgattattacaactatgcttaaagatacaaaagaaaatattcctgagatgaataaacagatagaaaatctcagcagataaattttttaaaccaataaaaaagggccaataaagatactagaataaaaacatacaatatctgaaataatatcattataaagtcttaaacacagattgggagggcagaagagtcactgaatgaaaagatagatcagtagaaattaacccacttaaggaagatagagttagaagattgagaaaataaaggaacatagtctcatgaaactacatatttaggatcaggaagttggatgctaccttctcccttagggagaaactaattcctcatagttatttttacagcattaaagtgttcacaggttattgctctgtctgtaagtacagaaatggtagtagagaatcaaaagagcagcaacatgactgatctaatggattctattagttaatggaatctagtagccaactgagtaagcaggttaacaaaacattttcacctgctccatgagactctgactctggatc

SEQ ID NO: 203664 - DNA, 1000 bp, Homo Sapiens
aagagaattcattatcagaactatattattagaatattagtgaaaggccgggcactgtggctcatgcctgtaatcccagcattttaggagaccgaagcgggtggattgcttgagccctggagtttgagaccagcctgggcaacatggtgaaaccctgtctctactaaaaacacaaaaactagccgggcgtggtggcgggcgcctgtaatcccagctactcaggaggctgaggcacgagaatcgcttgaacctgggaggcagaggttgcagtgagccgagattgcaccactgcactccagcctgggtgacagagcgagactctgtctcaccaaaaaaaaaaaaaaaagaatattagtgaaaaagcatgtttccattggattactgagtgtgttactatagtagaaccaaaagagatgcacacacataaatggctatcatcaatatgtaaatataaacacatctacatacatctctccctttaaacttctttctgtccttttgctgccaacctaatgagcaagttctgatatacactactcagaggtggtttaacaattccatgttcaagatgcatttttttctatccatttataacaaatatatatttagaaactgatttagctttactttttatcatcaccccaagacacctataaaacttaactgttacaaaataaagaatggacactgctgatgggaatgtaaatttgtttaagactctttcctgtctcaagtgaagggaaggagtatttcctggggcttgagctgtgctaactggagttgggggaggggtggcacaaacactcccttgattgccccagctggtgtctcactgggtcgtatgccccccacatccactggctcccagcccagcacagcaccaggacttgcccaggaattgcagtccttgtggcctagactgcttttcaagtttatttaggaccccagagcactttagcttgtgttggtgaggcttgctgaaactcaggttccaaccact

SEQ ID NO: 203665 - DNA, 1000 bp, Homo Sapiens
ctggaagatgagctcagaggaaccagtacagtgtagtcagtactgggcagcctggactctggggacacagctgggttggaatccttccctgctacttcttagctctgggatccccagccttggccccctcttctataaaatcagaggtgatattggcacctgcctcacagggctgctgaaggagagtccatgaaataatgcagctaaagggcgtggcacagcacttggcacatactaagcagtgaataaatgttaactgttacattaataactagcgaaagtgctagtctcacccctaacaggtccacctggccaggcccccaggccgacccaaccaggcagagccaccagcccaggaggagcgctggtacatccccagccctgctctctcaaagtacaacagcacacatgggtgggaggggacaaccccagggcctgcccgagcagatgacaggcagaggtggcagccgccccccttcctgagcctgtggagtactgagcaccactcatgctgatctcaaggagtgtgtcttccagcaccgaaactccaagtcacctgcctgggaagaagcaagaaaaaaaaaaaaaaaaatcccatggccgtgccctcccttggaaaaaaaaaaaattctaggaaacaaaatacaacgacatctttttattttgttttttttcggtaattatactaaagatgaaaaactcataataaacatctcccagtccccacctgctaacagtaattataatagactcaacaataaatggtaaagcagggcagagctgcatctcgggaattctctagggcatgtggattagctcggaaagcctgaatgattaaaatacactaattaaaattttgtgttccttggtaactcgtctgcctgggcccctggtgttggcaaaatgggaattaacgtgacaaaagcaacacagagggtttttgttttaagtaaagaaaaaaagagagagagaaagagagagagagggagaagggaagatc

SEQ ID NO: 203666 - DNA, 1000 bp, Homo Sapiens
gatgtcagagactggtcacaggccaatctgcagggatagttttgttattgtattcacagttctccgaataggccaggtatggacggagtttccgtatggctggatatgcaggaaaacacattttccatattttcaagtctagaaatcatttgaccaagcctccgttgttcaggtgaagacccagagatactctggtcatcccaggctagtggctttggccagtagcagagccaggacagcggggagctttcctgactgagtgtaatgctagacattaaagcacgtgatggctgtgatagaatgtgggccccacaagagcaggggcttttgtctctttgttctctctccatctgtgttgcctagaacgcacctgtgtgcctggcacacaggaagggctcaataaatagttgttgagtgaatgaatttgtatagcagtttacaggggcttttccagatactattttacgtatattatttaatgctcacaactttttttttctttttttaaattttggacatgcagtctctctctgttgcccaggctggtcttgaactcctgggctcaggcagtcctcccgccttggtttccctatatgccaggattacaggcatgtgccacaaccttttttttttttttttttttttgacggggtctcactttgtcacccaggctgagggcagtggcgcatcattgctcactgcagtccccgtctcctgggctccagtgatactttcaccttagcctctcaagtagctgggactacaggtgcatgccaccacacccggctatttttgtatgttttgtagagacggggtttcaccatattgcctgggctggtctcaaactcctgggctcaaatgatctgcttgccctggactcccaaagtgctgggattccaggcatgagccaccgcacctggctacaactcttttttttttttttttttttttgagatggagtctctctctgtggcccaggctggagtgcagtggcgtgatc

SEQ ID NO: 203667 - DNA, 1000 bp, Homo Sapiens
agattagaaccaatatctcttgctttctactgcagaactcatcccctgcacatgactgcccatctcttagacatacgtaccaaatgtctctcccctgctcaaaaatgctcgatagtggctgggcacagtggctcacgcctgtaatcccagcactttgggaggcggagatgggcagatcacctgaggtcaggagttcaagaccagcctgaccaaaatgatgaaaccctgtctctactaaaaatacaaaaaaacaatggatgggtaggtattaatgtgaccaggcctgcttcagctgaaatgtggtggcatgcgcctataatcccagctacttaggaggctgagacaggagaaccgcttgaacctgggaggtggaggttgcagtgagtcgcgatcgcaccattgcactccagcctggacaacaagagcgaaactccgtctcaaaaaaaaaaaaaatgttcgatagctccttatttcctaatgaaacacaacagcatccttggcctgccattcaagattcttcatgaccttgccccgattgacatcttcagccttttcctcacaatccagctcttcctgtctttcatctccatgcctttgcaggtcctattcattctgttaggcgtgcctttctcctctcacttccatgagtataaaccagcttgcaggttaccttcagaacaaaatctctttcattcccccaggtcccaaggcttctcttcctcttctgaatttctacagcacttactctgtctcactccctttgctacaggttattttcaatattatattgagaatttctgtccccggccagacctctttcctgtgtgctacacctatagctcctgcccttccctagacagctccccctaatgtcccacaggcatcccaaactcctttcctaaatcaaacccatgggcaggtgtggtggcttatgcctgtaatcctagcactttgggaggcagaggcagaaggatcgctcgagcccagaactcttgaattc

SEQ ID NO: 203668 - DNA, 1000 bp, Homo Sapiens
tgaaataaaggaatcttgtgccacgtacacttgtgaaagcaaaacgatttgtccaaatccttaaaattccttgacagggcttataggattatctgtcgctctccagagattaataagaaactgaatgacattccaaaattctaagacatgccaaacccttagactgctatacattcaaaatttatggtccattctcatgaacatttttttaaactgatgggaaaattacaccaagaataatgtatggccattatggagattgttttggccttccaagcttgtttttctcagaaatgaattagaaaagtgcaactagagggctaacatatagtcttttaagtttcctatttttctattttatctctgcctatttgaatatactgacgtttttgcttgcattggaagagaaactctctgctgcaattgttcttgaaactaaaataggtcaaagtctgcttggagattatttttctcatggcatttcaatgaaacataaacagcaaggaattaatccttaatctaatttaacactgagaaaaaaaaaaaggaaaagaaagtaaaagggacttattaaaacaaagttgctagagaaactgctttacccaaaatttgatgcacagccttcataatattacccatcaggacaaatgaaaatcttaagtttagccatgtgaacatttcccattgtgtcagaaactgaatttagattcaattgtccttttataaaccattgagtttatattactattttactgtctcatgactaaaatttttaaatgaaagctataagatctttgtgtgtatatgtgtttatgtgtgtttagacacatatgcatgtgttatgttgtatgttgtatatacataatacaatctggcatagttggccagaaatcctttaaggaattcttttcaagttggcttagagataagatatgcaaatgacacttaaaagtgtaaaaaaaaaaaaaccccaaatgccttttagctcatgggattcata

SEQ ID NO: 203669 - DNA, 1000 bp, Homo Sapiens
ccttctccatgctcactaccattgccttggtccaagttctcttcatctcttgcttgaactactgcaatggccttccaactggtcacctttaattctgtttatcccctcacatccatcctccacactgccactagaataacgtaaaatataagtttgactctaccactcacatatggaaaacctgtaatggtttcttgttgcatacagcataaattctttaccttagctcataaggcttcctagataatctggtccctgcttactgtaccatttcttaccacttggcattgccctctaagcttcaaaaccagcaaactgcttgtatttcccatctcatgttatatatgctgcttcttttcatatacgttgtaacttttcattgaagaaatatccaccctatcattggcccaactatcctttgttgtctctcctgtttaatccacctaattcacactcagtcaactttggatcaaatactacatcttccagggaaccaactctcacccttcagaatgggttacatgtaactcatacattttactgtgtacatctccattattttactttactcaattgtattgaattgtctgccttccttttaggtggtgagctcctaggagcacacagtattaatagatgcttcatgaacatctgctgaattaattacaagaatgaaagtataacattcaaagtgtatcagtgcaattgcttgtgatggtaataatgtccaaactccagaatttacatggagccagaatatctcaaatatattacataatggtttggttcactaaatttcactcaatttaattcagttactgatctccaagtctcaccacactccgtgaggtcttctttgctcagcaaggtagatttctgacaacaacccttagatatgaagaattcagcaccttcattcttcactgtataagtgccctcctggtgagttttcattgaacaaactttgcaaataaacatttttattatgtcagagcttgct

SEQ ID NO: 203670 - DNA, 1000 bp, Homo Sapiens
aatatgaaatatagcttgtaggccatgggatattctaactatttctattgaatttggttagactaattttagcttgaaatgcatttttcctttggtagtatgaaagtagtttctatcctgagcataatcagatgaaggcatgtaaatttttaatagggactgtacatataattacagagattgctgtaatttgctgtttgtattattaacatgcttatgatgatataataatcattccttctaactaagtacttcgcatgattactaaactggccatgaaaactatagagcctctaggaaaacatgtatactctgttgacttaaaatgtagacatcatttttgcattgttctttgtctttcttcccagaatatcaaaatttgcattatgattttttatgttttattaattttttaaacattttaatagagcccaaaatgttaatgttatgccctggagattcacttatgcttctttgaagcaattcttggtttaggaaaatgggagataagaaattaagtcattctgggggacaagcctaaacctgtgattcttcctaggaaaggactggtaggggcccaggaaagaaatgagtagtaaaaatgctttattcctgagagaagagagaggagctgaaacctgagcatattataagcaaatgttataagcaacatttccaaaattattcaagaatcaaatatttgtaaaacgttattttcatcacattattctttctttctttgatttttttttcttacaaaacagctttttttaatttggccactgaaaaggaagaatggcatattaatattccagcagaaactcttacaaaatagaagatgatagcagtgaaaactgcaaaggcaagtcttgttcttggcatcaagtttacgattatggtgaattctttaggctttagttgggggaaaaagaagattatttaacctaagcctatttttctaaaatctgacttcaattttaataaaatggagtttttttgc

SEQ ID NO: 203671 - DNA, 1000 bp, Homo Sapiens
atgagcaaatatgagccacaaacaacattctctgggtcttcaggatcttccctttgccacctctccttccccaacactgaccaagtgccctctatctttcacttgccatgaccagagagtgggtggtccagcatcctggcctcctgctcagtcctccaggcatctgcttctgacccctgttccatcaataaccatcaaagccattgatgcatagaataggagtagtgttgaaattactagaaaaaagaaatgaaaaagactggcaaaatacaagccttgatgatgatgatgatgatcatgatgataattgaattcagctgataaaaaatcactcttgtctaatggctgtcagagcttctaagcactagctctcaatttctgcacctacctgttggtgggcctgtccagtgtgtggcctggtgcaggtctgcagaacacattttgaggagtcctgctccaggggaacccccagcctccattgtccaagccggggactcttctctgcctgccaactctatgatctcccctcaactcctgaaactccttgttatttcccctgttatgaaatcaactccttcggtttccaaagcagtgggctcttctggttcttctacttctcttgccaatgtgtttcagtcttcttttcaggagcctttcttcaaggttccattctcagctccttttccttgtgtattttctcccttatctatctcatgctctccaatgacgtctactctgatgacaatcacatctcccaacctgtgttctgagttccaagccctcattttctactgcacctaaatattccagaggcatgtcataagctccttatagtcaaatattgggatgattaattttatgtgtcaacctggataggccatgcatgctacccagatatttgatcaaacactagtctagacgttgctgtgaaggtgttttaaagaggagataacatttaaatcagtagactttgagtaaagtagataccctccaccatgtg

SEQ ID NO: 203672 - DNA, 1000 bp, Homo Sapiens
attctggaaaaccaccagggtagaaccctgacttctatttgaccacagctcaccattcttatatgttttgtgattttcattttcccttaagaattgtctccaattgcgacattcttcagaacttattaaagatatctgaagtgtatacggtgaaaaatgtatagaatggtggtgtcaccacttgatgttgagtgtgaaatgtgtgggtagtaaacttctgaagctgctgctgtaagggccaagggaaacttccccttcaccctgtgaaagtttgcagaaaaagcaactcactaagacaggttaattggagaaaaggcatgcaaatgtatttaacatgcacacggggagaatctcagattacttattccctaatagagttaagaagcttatacagcatcctggccaaacaagttatgggagtagggagaagaggaattccattgagaggatcactagggagaatgaatggatccaggaacagagataaatttgtaaatagtctcttgacagttaaggtttggttgcattcttggtattaacagggaggggaagcagaaaccattggtctctttggtgcctctgggtcctgggcagatacagcctttgctgtgggagggatgtgggggaccttgaggcggcttcttcatttcagcaggccaactactcaggaggctgagtcgggaggatcgctctaagcccagtagttcaaggttgcggtgagttctgatcctaccactgcactccagtctgggtgacaaagtgagaccccgtatctaattaaaaaaaagaagacacctcttcaaattttgacagagtttaactctttcatcaaaatacctatatattttatgtaatatggatcatttatatatacacatatctgtgtgtacatattgttatctgtatacgtatatctgtattatataacatatataatctgtgtgtatatgtatatatctttttatgtgtctatccttcctgacacccattccctgaattc

SEQ ID NO: 203673 - DNA, 1000 bp, Homo Sapiens
cactactacgctgggctaatttttgcatttttagtagagacggggtttcacagtgttggccaggctggtctcaagctcctggcctgaagtgatctgtctgccctggcctcccaaattgctgggattagaggtgtgggtccccgcgcccagctgagaaactcattctttattagtcttgtgaaaaaggcatattttaaagatattctctttgttcttggtttcccaaaatttcatgatgatgtgctttggtatggatccatttccatccattatcaaagacgtttcctagtccatttcaatctagaaatgcttttccttcatttctgaggatgttttttgattcattgatgatttcatcttcctcttccattttctttgttctttcttgagtcttcagaattgattctctatttttaaaagttcctatattattttccatgccttttactttcgcttggctttctagattccctgaacttcatcttacaaaccttctattgagttgggttttttttgttttgttttttggtttttttttgagatggagtttcgctcttgtcgcccaggctggagtgcagtggcacgatctcggctcactgcaacctccgcctcccaggttcaagtgattctcctgtgttagcctcccgagtagctgggattatagatgcccgccacctcgcccggctaagttttgtatttttagtagagacgggtttcaccatgttggccaggctggtcttgaactcctgacctcagatgatccacctgcctcggcctcccaaagtgctgggattacaggcgtgagccaccacacccagccctattgagtttttaagacctgttatcatactttaattttcaaagattctgctagaatgtttcctttttactgtatcttgtctgcttccatggatgcaatattttctgggttttgtgttttgttttgttttgttttttagaggcagggtcttgctttattgcccaggctgatcttgaattc

SEQ ID NO: 203674 - DNA, 1000 bp, Homo Sapiens
agccaaatatttattttttaaattaatacatgcacagcagaattccatgataaacacctgcttattacatgaattaagtctatcacttgccaaaatgtctgagccccacaaatgactgggtctactgagtatgcttcccgacacttttatttttatttatttatttattttttgagatggagtctccttctgttacccaggctggagtgcagtggtgcaatctcactgcaacctccacctcctgggttcaagtgattctccagcctcagcctcccgagtaactgggcttacaggcgggtgccactacgcggggataatttttgtattttttgtagagacagggttccgccatattgcttgggctggtcttgaactcctgggcccaagcgatccgcccacctcagcctcccaaagtgctgggattacaggcgtgagccactgcccccggcgccaacactcatttgctcttcaaccaactgagatttgactctttctctttagtttgctgaatcttctgttgctttataatggctgttgccatctaaaatccaaacttacggtcgtgtgttaatttctatcttatttgatagattcacagcaggtttttgtgccttcttactaggtcccacttggcattcatgctgggttacacatctatgttctgtacactcttttctgtgtacctgggatgtgttctcaatctcatctgcctggcaaacccatttttgaagatactactcaaacatttcatcctctttgaagcctttctgacccactcttcctgtgctgggaacaactggcttctcttttctgaactaatgttatgccaataaacaccagagtaagggaatttattccatattccattatttctttttgcatgtctgtatcacctactgagaattcattgtggataatgattttctttttaatttttatattcttaggcattgcctagtgctctcaataagtatttgttgaataaataaatgaatgaatt

SEQ ID NO: 203675 - DNA, 1000 bp, Homo Sapiens
gcctcctccccaggtgagctttcaaatactatagcatatctgatcttctcagcaagaagtgtagactctttctccactcttaaatctgagctagtcatgtgagtttctttgactaacgggctattaacaaatacagcaagcagaggcttgaaatatgtttgcacacagggacttgcccttttcctgctcttggaaccatgctgccatgatcacccttctaaatgagtgacacgtggctcagctgcccctattgtactaacttatagcctatacatcaccagacaagtgaatgaggccaccttagatcatctaggcatgtgccagtgcaccaccttgcaacagatacatgaaagcccagcagagacatgctgagatggccatccacctgggcctcagaatgaaaagctaaataaatagttgttgttttgaatcaccaacttttggggtggtttgttatgcagaaaaagctaactaatatacaggaagaaaggacagaacagaaatatatatacaagcctatctgtttccaaagccttgttctttctattaagctatacctccctctctgggatggaagagggatcttgaaaagtcaggtactccattcacgcaaaatgaatctaacagatatttactgggtgaccagtttagcacgtgtcaggcactttactatgtttagatgcactgtattgaacaagaaggaaatagctctgtcatcaaacagcttacagtgtaatggctaggggaaaggagtaacgagtaataattacataaaaaaagaatgtattattttacccttgatcccaggaggtcaaggctgcagtgagccgtgcttgtaccactgcactccagcctaggcaacagagcaagaccctgtctcaaaaacaaaaaacaaaaaaagaattcattattttacattgttatgagagatacaaagaaatccaacataattatgagaaaactatgggatagaagaaaaacagggagttagaaaaggagc

SEQ ID NO: 203676 - DNA, 1000 bp, Homo Sapiens
gccacacagcatgatggcagcagagccaagcaggagttagagcccaggatttcggtggcccaaacaggactcttccccctattcctgctgcccccaggctggggcagtgccagggccctgggcaagacagttctggctgtttcaggatgaggggtgagggaactgagcatggggatgcaaatgtccacagccatttgactgccttttgcagcctagtggggtgggcaggacttgtttggagctgagagttggggctcaggtgctggtgcagggactgcagagtgtaaatggatggcgttatgacctgggaggcctggcttcagcaccccagccccctcagagtctcagcagcccctgcccggtgtcagtcctttgtgcccctcacttctagtccaccagtggcctgacctcgagggcttgttcttccaggagaagctcctttctatggccccttcctcctgtctcccaccctctcactcccaacatgcacctgccctcctgtgaagggagaagtggcctggaggggagaagggagcagtcttgggcatggtggagggtggggtcatgagccaggatggatgggcactccccaggggcctggctcctgctggatgagctttaaggagacagatgagaagtgggtgctaaagggagctcgctactgggctgctgtgcgtgctgtcgcctctgggccctggggaggtggcggtgttcagaggccctcaggacaatgttcctattgagatggagaagcctaaggcagttaggctgttggggaaagagcactgagtctggagactgagttcaaatcccagttctgctgcgttcttgctgagtgtcctcgggcaagtcacttcccctctcagccttagtctcctttcttggtgaaagaggatcaaggatcccttcttcaaagggatactgtaaggagggaatgaggagaagcacagcgcctgtcacacagccaggactctgtcaacagcgggctctctcccctcag

SEQ ID NO: 203677 - DNA, 1000 bp, Homo Sapiens
gtcaaaaggactatggctcttaatttggaattggtacctttccgacggactccaatacattgtattttctttcatagctgttaacacactgaattgcaattaactattaatatatttctctgtcctccccactgggctagaagtttcttgtaagaatgggccactctttttttcttttctttatccctattgtttctaatacagtccttggtatacagtgtgttcaaaggacggatatattattattcagtataaacatttgcaattgattttccatattattatggtaatgatatgttaattaattatattaatatggtaatgttttgcttctctgttctggaatcctagagtccaagggctctggttttattttcttcatcgactagacctcacctccagttttctcttgataaaagggaagagacacagtcaccagctgcatggaggcagaaaaataatctggccttctaacagcttcttaaacagattttcaaccaactctcttgttttctagtcctaccttcatcctctaacagaactacctggtgcagctcaacctggttgcatcttttttgtgtgtgtgtgtgagatggagtctcactctcacccaggcaggagagcagtggcacgatctcggctcactgtaacctctgcctcccaggttcaagcaattcccctgcctcagccttccgagtagctgggattaaacgcgcctgccactacacccagctaatttttgtatttttagtagagacagtgtttcaccatgtcggccaggctggtctcaaactcctgacctcgtggtttgcccacctcggcctccaaaagtgctgggattacaggtgtgagccactgggcctggcccctggttgcattttgactgtctccacttctgttttagggttaaactttcttgggtctcctaaagcaattaccaagtgtccatttgtttgtccatctaatattctattaatcaccctctttgtctttatggatc

SEQ ID NO: 203678 - DNA, 1000 bp, Homo Sapiens
cccagcctccagaactgagacataaagttttgctcttataaatgacccagtctgaggtactttgccatagcagcacagactaagacagtgatgttttcttccattgtttttccattctcatttatggattatttttatattgatgagatcatttctgagtataacattttacatctttcttcatttagtagtataatataaccattttaaatactattaaaattattcataaacttttcttttccttggagacagggtctcactctcaactcccagcctggagtgcagagcctcaatttctggagctcgagtgatcctcctgcctcagcctcctgagtagctgggaccacagatgtgcaccaccatgcccagctaatttttttgtattttttatagaggtgggatttctctgtgttgcccaggctagtctcgaactcctgggctcaagtgatctgcccgtctcggccttccaaagtgctgtgattataggtgtgagccaccgtgcctggcccctttgtaaacattttagtggcttacagtgagccactatataagcatattaatcattctctgctgttagacaatttttactatatgagaaataaccactatagtgaacatcttcgagcatagttcctgtcatcatatttgcatttatttccttaaatgtatgccacatatatcaaaggttctgaatattttgaagacatttaatatatttttttcaagttgctttctataaggcagggcctctgttagcccgtaatcggtctttgttcaggtgacaaacctctaggcagacacacccctggaagtccaagcttcatgatgggttccgggctgtgttgcctctgctcacactttgggcgcctcggtgccattcacaactgcactctgtatggaagaccctatttctattcctccaggagctcacacagagtacatgtttcatagaaccccatacagcttagctattcatgtctgtaaaaaacttgaattc

SEQ ID NO: 203679 - DNA, 1000 bp, Homo Sapiens
ggagtcaatcatgttctgactgattttaaattaattttaaattagaaaattcaggtaagaaatgcaagaatttgtttaaattaggagcttcccaaactggtattaagggaaatctcttctgagagttgtaaataggtaaactgagtacaaagtctccctttgcacaaaaaaaggttgctttaattgttaaagtcaagcaggtttcttttctgtgttcttcttttcttttggctggaatttccatattttcaatatgctaatgtttgttttgatttgtcaactgagagacaaaaatatggaagacacaaaatttccaaagtttatttgatcacggaacgtcccccctctgtgagggtgggacttctttgccacggaaaagccatcttaggacattgttattttgaggctgttacttataatagcttatgtatgtatatccttcttaccatattaccataccgcctgaacaaatgtccaggtaaaccattcaatttaagcatacattcattttattccaaattcactgccctatataaaagttctctctaccactataaaacgcagctcaggaatagggtcctaaagtatattgtgggattcacacaagtgtgggccggcccagtgcaggaccaagattgacacaggaaatcacactcacctgtccacaatgataccatgagggatgaggacatactccaagtctccataatagtgctgtgggtacgtgaataaattcaagtcataccctggccaatcatccataatctgcaaatcaaattattttggttatggtattttttcatcagaaatttgtttaaaacataacaaaagagtatcacttgagaggagaattccctcaacttatgaaaagtttagtggaacaaggttatttgtttccacaacctgatacaaggcgcagtactaaagtgaacagagcactccattcccaactattggcatcataaaatatttgttttgttttgtttgagactttgagaca

SEQ ID NO: 203680 - DNA, 1000 bp, Homo Sapiens
gatatataattaagtgaaatctgcagaatagtgtgcttccatttgtgtaaggacaaaacatggaagggagcctgtggatgcataggctggacatatagagcaccttggcacccacgatgagagtcagagctggtgagagacttagtaccctgtggggttgttttcccttgtggttatgtggccttaaacaaaactctctctaaagtaacgtacctgcttgaagtgcagtggtgagcctgtgtgtgaggaggctatgccctcatggcaacagctacccttggcagaatctgaacatctcagagacatggcctgaggatcctcatgagttgtctctgccacggtgtgggaggcactatttagacctccatttacttgaagcctagtgttcctcaggaattcctacatctgcctgtgggaaaatggtgatagatttcaaaggctctccaaggttcgatgtttccttctgagtgccatttcagcaacataggaatttcggtctgtttctccaaggtgaagggctttcattgccctgttgcctctctgtggacttctggccaggtggccctacagaaaagcaccttattctttcttggcagatccagtcatggctcctgcctcccaccatgagtcgggatattggggaagcgaagcagatgccagaagtctttctggtttcccaggccgaaggagctttcacactaatagcctgtccttttcaagtctgacagaactggcaagcaggaacaatttaggtttttggaaatatccacaaactctttgcttccatccggagtgaatgcttctcttccttcacaggggctaccctaagaggctgggaagcctcccagcctgggctagtgagatcccagcccagattccaggcctggatctggggccttgaacaatgaggatccttgtatctctcccacagagaacaccttctgcagtggggaccatgtgtcctggcacagccctttggataacagtgagtcaagaattc

SEQ ID NO: 203681 - DNA, 1000 bp, Homo Sapiens
ctcactgcaagctctgcctcctgggtttgtgccattcccctgcctcagcctcctgagtagctggaaccacaggcgcccaccaccatgcctggctaatttttttgtatttttagtagagacggagtttcacagtgttagccaggatggtctcgatctcctgacctcgtgatctgcccgccttggcctcccaaagtgctgggattacaggtgtgagccactgcacccggccaaaatttctttaataagtataattgctattcaaattatctctttttgcttgagttctgataggttatttcttctaaggagttttgctattttatttagattgtcaaatctgtgggcataaagttgttcataatattcttttatcatgctttaagtcttagtgagatcagtagtgataacccctctttcatttttactattagcattgtgtcttctcaaactagaagagaaacttttcaaaatggaaaaaaaatttgataaattctcaaattttccatgatctgcaactgtaggtacatagtaaatacatgaaaacagatgtttgacagagcctgctaggaacctctttcctgtggcaagatggtatgcctctcaagatgacaatctcaggcagtagaaatgtgaaaaagaaagaatgtgttctgttctcagttgggagccatcatatgactctacccctcaactgcacacagtgatcttaatgtgcatctttctagaaggaagctgcatctcaggggctgccacccaagccatatgggccagggaaagacttgagtctgttattcattttaacaaattattgtagaaaatggctagagtttttttgaatgctatttgttcacattttattatatagagtagttccttagtattcctggcaacttgattccaggactcatttcggatatgaaaatccatgcatgcaaaagtcccttatataaaatggtatggtatttacatataatctatgctctacacattctctcatata

SEQ ID NO: 203682 - DNA, 1000 bp, Homo Sapiens
actttgtcatgtaactttgggatttttcccattaaggaggagcatatttacctgccctttgatttttcagctgagtcgtgtaacttactttggccaatagaataatgcagaagccacggcatgcccagtccaggcccaggccttaagcagcctggcttgactctgcccacgctggtgaacttctacacatgcggaggacatgctctggctggcctgccagtctaggagaacgaaaggcacatggagaagacctgccccagccaagccaccccatctgtgcccagcctagatcagccaacctccagccaattctcaggggcatgaacaaaataagcacttattctttttttttccttttttctttttttttgttttggagacaaggtctcactctgttgcccaggctgcagtacagtggcaccagcgtagctcattgcagccttgaactcctgggctccagcaatcctccttcctcagcctccagagtagctaggactataggcacatgccaccatgctaggctaatatattttacatatatatatgtatatatattatatattataaatatatattttatatatatgtattttagagatggagtcttgctatgttgcccaggtttgtcttgaattcctggcctcaagtgattctcccaccttggcctcccaaagtgctgggattacaggtgggagacactgcacacggccagcacttaattttttttttttttttttttttttgagatggagtctcgctctgtcacccaagctggagtgcaatggtgtgatctcagctcactgcctcctctacctcccaggttctagtgattctgatgcctcagcctcctgagtagctgggattacaggcatgcgccaccaagcccagctaatttttgtatttttagcagagacagggtttcaccatgttggccaggctggtcttgaacccctgacctcaagtgatccacctgcctcggcctcccaaagtgctggaattc

SEQ ID NO: 203683 - DNA, 1000 bp, Homo Sapiens
ggattaacctatgtgtgctatactctattttccacttcattccactaaactctaagcctcccttttttggagactgaatttatccgggggaggggactggtggacggcatcctaagtgaaaggcgtagcgtgacaaactccgggagctttgagggcaaagtgtgatctgggtaggtttccagatttagtaaataaaaatagagaacactcagttcaatttgaatttcagataaacaatattccatagcttgggaagagcaagacattctgtgtggctggaacacaggtgggtgtgagaaaatggcagaggcgagtctggcgtgtattgggatcatgttgtgaatgcttatgagagaataaccatcttttctgtagcctcttgctcatattgaaggataatttgagaataattattgaatgcttgaaaagaaatttaaaaaatacacacagaaaatatgtaacccttgagtccttagctcattaacaataaaggtggaatcctcgtgtgtgggtggaatgattattaattattaaccattgcatctgagtaattctttcttttatcctgatgattttgtttctaagatgcctttgtccaggtgtttagttgagaagggggaatgagcacattttgccacatatacttcttattatattccagcctgaagcaagaatttaagttattaacagtaatggaattaataacgtgtgtgtgatcaactaagcaagtctttgctctgtttaagtagttttccagatgtcatcaatgcaggttgtctgtatttcatcctctcttccctgtttgtggaccctgatcttcactatatcatagacatggctcctggcaagccagggaagccacctgacccaagctgaaccagacagaattcagtctcatttgtggttttactggtaactcaggagctcatggtagccatgggtttttttttttttttgccatatgcaaaatcaaagaaagccagtcaacactatggaattc

SEQ ID NO: 203684 - DNA, 1000 bp, Homo Sapiens
ccagagcttgcaaggctgtggcctaacgaatgttctagaagttcacagcttcctccctcaatgtcttccacttcgacattttccccagagttcatgacatatgataaatgccaacttataaaacaccttaagacagttcactgtggctgcattccatttttagaaaaatgcaaaaaagagctggatgtggtggctcatgcttataatcccagcactttgggaggccaaggtgggaggactgcttgagtccaggagtttgagaccagcctgggcaacatagcaagactccatctctttaaaaataaaaatataaaaaacagccaggtgtagtggtttgcacttgtagtcccagctatctgggaggctaaagtgggaggattgcttgagcccaggagtttgacattagagtgagctatgaccatgccactgttctccagcctgggcaacagagggagaccctgtctcaaaaaccaaaagaatagaaaagaaaaagaaaaatgcaaaaagttctcttgaaaagccagttgctaaactgagaataacatccaagtcttcttatctttaatatgaatcagtttttattaaaaactctccggcagttattaacgttgccaggataaaagtggtatcaatgctgtattggtcttcgatttagtggtgtttttttctttgagatgatgtgcctgtcttctgcagcctatactcctcacgaaacaaggaaagttagaatgatctactggggaaaaacaaagatttctagcaatatatcaaatagagaatttgccacagtgaacagcagatttaaccaagatgccacaaagtgaagggagcaaaaattaaacctgagagggaaggatgaggaaaatccacaatgtgtttgcttttctttaaaaaacctggaaataactttttcaagaaagtccccctgggtcaaatgagatgtatgtaatttgtgggagaaacttgggacgaacagaataggcttagcgtgaaagaattc

SEQ ID NO: 203685 - DNA, 1000 bp, Homo Sapiens
cctgtggagggtgggagtgaagagaggtttgaggttgtcttattcttcagtctgggtgtattatcatcagtccatgcaagaacacttgaaaacattttttcatttatgtattttattcccagactccacttctattggcattcctaataggtagccattctaatgtatttaaaatgcacgtttctctttgtgtgtagtaatgtgaactatttattgctgtcttgtgtacctacatttttttttttttttttgagatggagtgttgctcttgttgcccaggctggagtgcagtggtgcgatctcggctcaccacaacctccacctcccaggttgattgtatgttaacatatctcatgatatttccactcaatatgatgttttgaagatcaatccatatatatgtacgtaaataagtcaataaacttttgtatattaacctgtatatataattcatatatttgtaagcatcatgtatatcacacacatgcatacacatatatctaaatatacatcatatatcatatatcatatgacatcatatacatcatatatatcacagcaccttgcacaaacttggtgttaaataaattagtatcaacagaaggatcaagttttgcttttcatacccacaaaatagtttctttctaaactaatctacctttttgaaatgcaggataaatataatactattattcaagataataaaatcacttcatacacacacgcacacacacacatatatatatacacatatacatacatatgtatgtatatgtatgtatatgtgtatgtgtatatatatactggaggacaaggactttgctgaagtcatctttgcatcctcaaggacgaatattgtattttacgtgtaccagatatatatattccattttgcagtgggtcttattaccctcattttaaagataaagaaactgaggctccaagaagatgactttgtacatattcacacctcttgctgctgacaattcaaactgaattc

SEQ ID NO: 203686 - DNA, 1000 bp, Homo Sapiens
agtccccgacctttttggtaccagggacccgtttcgtggaagagaattttccccaccatggcagggtaggggatggtttggggataaaactgttctgcctcagatcgtctggcattagattctctgaagggaacgcacagcctagatccctcgtgtgtgctcctccgagtcaggtggtaatgttggcccacccaccacccacctcctgctgtgtggcccgcctctcagtgggctatggactgggtactggtccacagcccaggggttagggacccctgcgttagacacgtggcctcatgttgccaggaaagaaatctttctactgggaggagccattcggggatagtcccccacccgctaaagctgatcttacctatctccaagatgaacataatagtgcgtttgctagaatccctcctgttcagcaaaaatacatccgatggacccatcacacctgactcaggttggaatttcactctggagtcccattgtcccgtccatcctgggtgcgtgaccccacatctaggattgtagccacatctgattctaggagtccacctgggctctgtgaccagaatttatgatgaaagtcagaccaagccaggcctgcatcttggttctactcctcctggcctctatccttggcactctgggcaagttaaagcaattctaggacctcagcttcctcatctgtaatatggagataataacttcataaagttgtcataatgagactatagatacagcacttagcacaatatctggcccctaggaagtgcgtgggggatgacggctgctgttgttatcagggaggaacttggtgccctgggcctgtggagacttctgggcttgctggcattgggtcagcctttggataccctcctgtaacctgagggatttcttctctggggcagcaggaacacccagacttggggaggggaaatccctggggtctcaaggccatggcctgaagtctttttttttttttgagatggaattc

SEQ ID NO: 203687 - DNA, 1000 bp, Homo Sapiens
ccagtagtctcgtaatgatcagaatttagtgtaaggtgaattcctctttgtccaacaaatatttattcagtgtccactagaggacaggcgctgtatcacaggtgctagggataagaaatgaacaagcagacaaaaaatctagcagaaatcctctcttttcttcccgtgacgtgcatgggcaagttctgcccactaatattcatttcccactatgtcctgcatctgatttaacataaagggaagtagcaatggaaactatttcttctggcaacttggaatatgagaagtccctggtccttgggccatttttcaaatcagtgagtgtgggaggtataatatttgtgtgtaccaatttcttccttattccattctctccactgctgatgctgcctatactgaatgcaatgaaagtctggaacctaaggaagcctttgggtgttagcttaccttggagtcaagctgagcagtcttcttgttttccagagccatgaagtgagaagagacacaattgccaaagctgtgatggaaatcatacagctttgaatttgttttagtaacatggaattctaacatgtgtcactgttcattagtactggcttttcagagcctcgtgaattacttgggtacaaatccatgacattagaggcatgagggattagaagacaatccaacaccactctaggattgatagtttaggaagaaatgcaagaaatcatctcattttgtttggttggttcattcctaccccccattctccacatttttatgaaaaattttaagtatatataaatgtagacaaaatagtaaaattcactcttatgtatccatctttcagcttcaaaaatcatcaactcatgccaattcttctctaaccccttgttgtccccctcctctgattatttgaagcaatcccagatgacaaataaattactcataaatgttcacaaagtgagatctcctagttttaattcctgtagttcacaggttcagcggtgaattc

SEQ ID NO: 203688 - DNA, 1000 bp, Homo Sapiens
tgccttctatataccaagcactatgaaaggtgccaagaaaacaaacaagcaaaaaaacaaacaaaaaaaaaaaggaaacaaacctggttcctaccctcatagagcttacaatttagtgggaagaagagtcctcaattgaatacttacacaaatagcaatataattaaacactttgatggatttctcaagactctttcagcagcaagtaacaaatcccagctcaaaatcagaatttcctgctttatcacattgggcagtccaagattgcctatggatggctctagacttttatcttcccaatgcaacaactcccaggaaaaaaaaaaaccttctcttttccggagcatagttagagaaagaccagttagcctgaggtccaggggtgaagatacactctgcatggccacttttgagacacaagctgatcacaggaaatatgccactattaaaagaaacccaggagaacaacatagagtggggagaggacattcctaaataatgggagggtgctgttaccaaaggatgggggaaagagatactgaggagatagaaatatcagatgttcacaccataccatgagtatggaagagaggaagaactctggagaatgtttcaagaaaaacagtaaaagccaaggtaagaaaaaaatgtgctctgagtataagagaaacaaactgttgattacatggtagatgctgacctgaacggattaaaacgtcagcaagtggatcacattaagactgtgaaaagagttaactcaagtccctgagtgtggtactaagagattgtattgattcttttgttgaaaaatatttaaaaggctaccaagtgatctgtatctgaaaaatctcttaaatatctatttcccagggggtgtttcccagttggactcctttgccttgagataggtggaaagctatttatgcaaatttcatggctctatctctaatttctatttcactcattgtttacccatatatcatttttaactatggaattc

SEQ ID NO: 203689 - DNA, 1000 bp, Homo Sapiens
gacagagcgagactccctcttaaaaaaaataaaaagaaaaagcaccttaaaaatagtggagcccctcacaaacacaagctttttttcaaccaccaataaaggtacacagtgatgtgaaaaacatttggcatgaaaaggtcttctcattctctgtgccattaatatccttttaaagtcaagaagggccttctgcaactagacagcttaaagataagagctcacttgcttatttataattcagaagtcttctgatcttttgatagcttgatgtttacacgtaagcaaatgtatttccttagcaactgtcaggtgggtaattcaagtctcagagacacagccgtggccaagggaacgtatctgtgccaccatctggagtcgtgcagtgcacaactgtcttcaccttccttgaggtcgcctatgacaagactttcttggtttttgactgtttcacacttatttcacttttttctcctttttttcataatgatagaacatgtacttttcctcaacatggtgatacatgatttaaaaataaaaatttataataaacaattaaaacagatccaaattcagttctgagtggggggaaaaaagtacagagataaactgcttttcttttaactttaaaaatgaattcaacatttcttattataaaatattcattccaaatggttaggtgaaagaagaatttgtttgcctgatttgtttccctgccatgatggttttttcacactcattttttgttgcctggtttttgttttgatgaccgtcttccggaaggttcctgcttctcagttgaatccctagtcattccatctttgcctcacctatttactcagtaactggtatcttcccagaacagaactttactgatggacgaggcaagataaatcatttcttgaaagaagaaatgtaagcactctaggacaatttgtctcctttataaaagagaagagttttgcttaatattggtccaatcaacttttacaatttagaattc

SEQ ID NO: 203690 - DNA, 1000 bp, Homo Sapiens
actctctgctcacaatatcattatcctaagagataaataatatagtttcttttaaaatagtgatatctgttccaggaaaggacttgggctgtgaattgctagggtacagctactagggatgtgttgttgggtttccccggcataatattccaccacctgtactttgacatcattgtcaattgaactcctggggaccctttcttcttgctctgatctggactctcacatgccatcttgaaatattcccccatcagttttctggtttagatttgctgtatcacacatagttatttttttttctgtctgagttcactgatatatgttctctagtgtaagaaaaataattctaattctcccatacaaaaaaaatttttattctgctctggcacttgttcagtgtatcgacttggtataaaattctaagttaaaaattttagaatttaaaaattatttctgtcttattttcctgaatccaattttactttctaattccatcctgattctctctctctctctctctctctctctttttttggtctgttcccaagttttcctcccctggaaatgctaggtttctgtctttattcttggtcttacctgaattttttgtttgttttgttttgtttgtttttgtttttgtttttagagggagtttcgctcttgttgcccaggctggagtgcagtggcataatctcggctcactgcaacttctgcctcctgggttcaagtgattctcctgcttcagcttcctgagtagctgggattacaggcaggcaccaccacacctggctaatttttgtatttttagtagagaagggatttcaccatgttggttaggctagtcttgaactcttgatctcaaatgatccacctgccttggcctcccaaagtgctgggattacaggtgtgatccactgtgcctggccctgaatctttttcattcattttttctggatgctattgacctttgtaacctgaagatttatatatctgagaattc

SEQ ID NO: 203691 - DNA, 1000 bp, Homo Sapiens
cacactcaaatagttgttcttccaacttgcctgggtaaagggtggagcagtgaaaagtcatgatgctgcttggtgaacacacacctcttccacccaatttgtaaaacattacaaataatgatatcattttagtatgggaagcagggacaattttattagcagaaaagatataagttaggaagtaataggcatcatcacaagcacgactatccaggaaaaaaacaggacataaaatttagcatatatagctgatacaggtttttccatcatttactagtttgcttttaccatctgcttgtagacaagcaaaacactaaaaatgagaaaatatcactcattaaagttgtagcttatattagttatcttaagagttgaatagtgatacagcctgaagaccatccatggtcaaatggagcacagtgaaaaccatagtgtcctccattctctgtgtaggctgaataaagctctaacttaatgatgtttcaatgccataaacatttcaagactggggaattctattataaacctgaaatagtactcattaaatcaataaagagaggagagaataaactgtatgtgttaaattcaagaatattctctattttaaggacagctactaaaagcaactgtaataaactaaggaagtctaaattcactcaaacaactacaggtgtccatgaaaggtaattatgtctcaaactgataactctgctaatagtactatctctgtttctgacactgaaagatgctggggctcagaaaatgatgtaacaaaggcctcagaaggagctctctctgccctcctgtctctggtctctcattctccttcgaagcaagccatagaaactagaatccctcttcccaaagacaggtcatagaaactagaatcccttttgcccaaagctagctataaaacctaaacgtattaactcttccccgctctctgtataaaaactggccataaagaaattatctgaactaccatgtttgattgtagatc

SEQ ID NO: 203692 - DNA, 1000 bp, Homo Sapiens
tggtctttttcgatcatgttttggctattttagttcctttgtttttccctgtaaattttagagtcatcttgttgataatattccgtcttccaatccatgaaagcagtacatttctacacttatttagatcttcgattttgttcaccagtattttgtaattctcagcatgtcgattctgtatattctggtattttgttagatttgtaaaagctattttgtttttactgccattgtaatggtacaattttgttcatttcaatttctaactgttcatcgttagcatacagaatatacaattaatttttagatattgaccatgtatcctgtggctttgcttttctatagattctttgggattttctacatagagcatcatgtcttcttcatataggcacttttatttgtaaatctgggttagctttttttgttttcttgacttactacattggtgaagtctctagcatgctgctgaatgaatagaagtggtgagagcagccacccctgctttgttcccataaggggaacatactgccttttactattaagaatgctgggggctgggcgcagtggctcatgcctgtaatcccagcactttgggaggctgaggcgggcagatcattcaatctccttgagttcaggagttcaaaaccagcctggacaatctggcgaaaccccatttccacaaaaaatacaaaaattagctgggtatggtggcacatacctgtggtcccagctactctggaggctgaggcaggaagatcactggagcctgggaggcggaggttgcggtgagccaagatcatgccattatactccagcctgggtgacagaatgagaccctgtcacacacacacaaaaagttgaatgctgggccagcgcagtggctcacacctgtaatcccagcactttgggaggccagggcaggaggatcacttgagcctgggagtttgagaccagcctgggcaacatagcgagaccttatctctacaaaaaaaaaaaa

SEQ ID NO: 203693 - DNA, 1000 bp, Homo Sapiens
cacatacacatatgtgtacatacacaccatcaagataatgaacatacctatcaaaccagatggtttcctcatgcccttttataatttcttcttctcctcacccttctctgcctgtcactctcctgatccactgatttgctttctcttagaatagacgactttatattatgtacagtttttatataaatggaatcatatagtctggcatctttcaggataattttttcagatccatttatgttgtagggtccatttcactgctgaatagtattccattgcaaggcataccacaagctatttatccatgtgttatttctaccttttggctattgcaattaaaactgccttgaatacccatatgcagattattctttaaacatgtgcttctgtttctttaaatagttaagagtggaatgatcagatcatatgttagtgtacgtttaagtttttaagagactgctaaacctttctcaagtagttatgccatttgacatttccatgagcagtatataagagttgcaattcttctgcatccttgccaattattggtatggtcagtcttttttattttgaccattttaataggtgtgtagtagtatctcatggttttaatttgcatttccctagtgactaatgatgttttacatggtttcacgtgcttactggccttctttaagcctttggggaagagtctgttcaaatcttttgcctgtttatattggctttattttttatttatttttattttttttttatatagagacagggttttactctgtctcccaggctgaagtgcgtggccagatcatgtggttttgcaatatttattgaattttgagagtttaaaatttgtaatatatttaatattaaacctattagtgtatttgatattaatactttatatttaatataatgtacatttaaatatataataaaacatttcattttaacagaggtaacataaatacacttcccaatttatggagaaaaaaaaaaaaaa

SEQ ID NO: 203694 - DNA, 1000 bp, Homo Sapiens
actactaccaggatctctttctacccagataacactctgacaccaaatgtgtaggtttcttacaccaaaaaattcagttctctgcagacaccagctgggtgtcctacgatttaattcaattctgacactacctggagttagggcagagcccacaggttaagggctctgtcccacaggagtgcctcacacttcagacaccaatcacaagtagtggttcttcagattacccacacttctgtccaacttggctacaaatcagggctcccacaaccccttcctcaggctcaataatttgctgtaatggttcatgaaactctgagaagcactttactcactattactagtgattttaaaggttattataagggcacaggtgaccatccaaggtgacgatgtacatagggcaagttccagaagggtccaggagcttcagtccccatggagttggggtatataccacctcctggcatatagacatgctcaccaaccggaagctctctgaacccctcagttagggtctttatgggggttccattatgtatgcatgattgattcattcattggccattggtgattaactcaatctttagcccctctcccctccccaaggcctggtggaaggggctgaaactttcaaccctctaataatgccgtggtctttctggcaaccagtccccatcctgaagctatccaagattcccgaagcccggtcatctcattagcatgcaaaagacacgcatatcactctggagattccacgggttttagaaactctggtccagcctggccaacatggtgaagccccatctctattaaaaatacaaaaattagccaggcatggtagcatgcacccgtagtcccggctgctcgggaggctgaggcaggagaatcgcttgaacctgggaggtggatgttgcagtgggccaaggtcgcgccactgcgctccagcctgagcaacggagcgagactctgtctcaaaaagaaaaaaaaaaaaaaaaaa

SEQ ID NO: 203695 - DNA, 1000 bp, Homo Sapiens
cccaaaacgagttgtggttaacccagagaataacccttcagtgcctgatgttggtggagagaagaattgcctagttacatctcatatggctcagcaggggagaggagtgccctcatggttgctaaatgtgggaatggaatgtgaggcaggaggcaggtgagaggttagtacaggtgggaggtgtccccgctgtgtggggaggagggacttttgccactagttctgttacaggtttgggattctaggacactggacactaatgtgcctaatctgtaaggcattctagactgcatcttgtgcagttcattcatcttcccgcctcgcaagccagcagagcctgacttggggcctcagctctgcatggagctacctattgggccttcaacagcgagggttttagtcagaaacacagaaatgaatccttagtgcactgggcagtgggtatcgtattttactaggaggtttttgtctagaagttggtcatttctctgggatatggtataggatgggtgggaagggtgccacaaggaaaaacatgagaatttgtactgtgcaacagtttggtgtttccagttgggtccacccacaaccttgactccaaacttccaaaacaaacacacctgtgcattttgcccaagattctattgctgggtgtttttattgtaccttctggcaacctacatttggtttctcttcctcattgttgctgttttagggaattcttactgacatgtgttgttttttccacttggcctagttagatttggtctactaaaatacagaggagattgtctctatcttagggacttttctttctcctcctagtcaagctcacttccagcctttctttttcctccctgtatataatccctgtgacaacgtttaaggcagaaccgagatttgtatgttttagctctgttctttctttgctggttaaatttttagagtttaaggaagagttcattaatcagaaccttaacattaaaaaaaaaaaaaaaaa

SEQ ID NO: 203696 - DNA, 1000 bp, Homo Sapiens
tgtaacatgcgttgataacaaggaattttccccctccctaaccaccagatgactctttgggtgccttctttactctggggcctagactttaatgagggtacaccttggcccttttagctgccttcagttctttgatgaaaacataccactcacacatcctcttactgcacttaattctgacatatacagtcatccctctactaaacttattggccagccacccagccaccgtttcttgaaacccgtgtcctttcctaatcctcacccctctttatcacacagggttttttgttttgttttgcctttggtgagtagttcacaatttgggccaaaaattggaattatggcaacttaaaaaacaacgaagagtcccaaccccagagatttagtaggcctggagcacacacctggacatcagaatttaaaagcccatccccctgctcccaggaaattttaatgcacattgacagttgaaacctattaaactccacaaatttggtaatgtaataatccaaaagccacaattttcctagacttctgaaagtcttgtaggagttatttttgcaaatgcaaatttgtcagagcttcagagccatgtttctccaaacttttatttctgagtgccacttgaaaaaaacaatccaaacatgctttcctcttcctatctgcatttatcttgggttctaactccttcctactaatccctttgtcatttgcattcacccccttacactgttctccccttcctcttactatgctttgtagttctactcacaaagggcgttaactccaatgaagaagccctgcttttcaaaattgagatttaacttgaaagttactaatgcaaacacaaattctgcagttttctactttatttacttcctgtctcctaacacttggaaagcttttgtctggtcaggtatgtctacgttcttttactctgcagttcaactggctacatttttactttataccaagttctctccaaacactagaattc

SEQ ID NO: 203697 - DNA, 1000 bp, Homo Sapiens
atagctttgagatttttttatttccacttccttttttaaaatacatcaccctgctttttttgtgttaaagggtgagctcattaaaaaggaaaactaaaaaaaaaaaaaaaaaaaaaaaaacaggaacacccacatttccaactccacctcccctctcaaattgttcaagatgcacacatgtttattgtatatcagtagacctagctctttccacagttatcagtggttaacacaaaactaccagggatatatttttcctttcatttaaatttaaattccattccaacaaagcaaccaaaacaactaatgtctagttttttagcttctggggaattaggttcccaggtaagaactgaaaatggagaaaaaattgtgttgccatctttattcagaaagtcattattttcagcaaaatggagctgaggcagaaaatccaggttgcaggactgggaaaaaaggagtgtctgccccatgggacacttataaattgttcactatgacagcagccctttctagaggtattaatgtcattaggttgtgataattctccagaaaccccaacagccctggattaagaacatctggaaattgttcagatgacacaaatttctctgtttcctgctgttaaggcttccgtgatgcctctctgtggcatctaccacctccatttttttcttttcaaacctcctcctttcaaatcaggaagtatacataaagtgcaagtaaggttcattccctcgctgtgctcctaggctcttctcttgatagtattaccgaatctatcaggtaaaccgctggccgagtaggatgtctgcaggaatttctggagttagcaaataacttcatctggcaaagagagtatctgaagatcaacacagtcttggcaagaaaacatgaagtaccacacacaagacagggatgtgaaggatgcaagaagtagcagggagattgttgtcactgaagaggccatctttggatctcaaagaatttaagagaattc

SEQ ID NO: 203698 - DNA, 1000 bp, Homo Sapiens
ctacctggaagtcactggcttaggatgattttcattgagctattaaaggcaagaaaaaatatttcccaaaggtgcttatgggtcattcttttgcagaagtcttccgtaacacaatagaacataaaagtaagcttatagaaaatgaacttgaatgtgtatgtcagacctgtggacatgtcaccttctcaaatccaaagcaacagaaaaacaacattaaggaaaaaaaaaatgagagatctaaactttttgaaattgaaaagtagagactcttttacttatttcttattataataagcatggcttattataatttacaaaaatacagggtacaaaaatagatggcaaaggataaaaacaaaacaaagaatatatggaaaacacatggagggtgcttaaatagtaagccaagaaatgcaagttaaagcagatttaagatgtactcttgtacctattataattgcaacaaaagaataatcaaaataaagtggtattgaggttgcagcaacaaaataatacaaggtgctaaaatatatgacaaaggataaacacacaataaagtataaatagaaaacaccattacagacattaaaatggtaataatcattttaaaaagtaacatggaaaactacttggagccacgaaaatgtttatacccataatctcattgctaaaaaattttgcataataacaaaacaacaaataacaaaactgtgacaagcacacacaacattaacaatgaaacctaaaaattaaaaacaacctcctaaatcctgagtcataggtgcaagacctaacttagccactctgggaagggaaagaaacctaagtcaggagactatcttcaaataggttagaaagcaagatgtgtctatgaaaagattccaccacaaggcagtaagtaataattgctaagtaagtggtctaggccatcctaattcagaggagaaagaagtcacttcccacttcccactgggctatctatgaaagggaaatggaattc

SEQ ID NO: 203699 - DNA, 1000 bp, Homo Sapiens
gcagagcactccttcagtgggcaggggggcaatctccaggaccatccaatgtctctccccatcctacccaccctacagtacagtctgactgctgggctctcccagacactgccatgctgttttcatgcttccattttgttccctttgccttggaaatcctttctcccttgtctacttggcaaggtcttgcagaagcaatactagctctttacttctctctgcctcagttttctcatctgtaaattagagatgacaataatagtaataatacctaccccataaagtcattgggaagatcaaacaagctactccctatgaaatcctttgaacagtggttggcccatagtaaatattcagcagacactagcttattattacagttatcattaacactattatagtgtgatggttaagtgcacagaccttagaatcagacttcctctgtacaaatcccctgtgtcaacttaaccaactacttgacctctatgtgcttcagtattctcatctttaaaaggcggttaataatagccccacctcataaggttgttatgaggatcaaatgagacaacactttgcacagagcctgacacatagtaagccctcaaaaaatgttagctgtgatgataaggatgctcatcaacaattcagcttcctttcctcttgagaaagagaggcagcaggtactcttggggaacgtgtccactggaacatgagctagggagagacatccatgcacccatgcaactcttagaccacatcacgttcctggttctggcttgtgagattccccacctctgtgacttcatgtggcctgttctctatgcctaggttgccctgtccccaggccaagttccaaggcctcacctttgggaggcctcccacagttcctgcatgttgactgaattccaggttcctgtaggacacacccaacaggccatctgaagctctatccgatgctccccaaagtctgcttggggtggagttagttctgcactacagc

SEQ ID NO: 203700 - DNA, 1000 bp, Homo Sapiens
aaattagccgggcatggtggcaagtgtctgtagtcccagctactcaggaggctgaggcagggaaatcacttgaacctaggaggcggaggctgcagtgagccgagatcacgtcactgcactccagcctgggtgacagagtgagactccgtctcaaaaaaaaaaaaaaagaaaatattaagaataatacattctttacagtgggattgtgaggataagaaatagtatatcagcaattagtacagtgccaggcacatagcacttgggatatagaggtcaacaaaacaggtaaaaaatcccggccctcatggagcttacattctagtgattattgtgactgattattgtgatcttgcccactgttccaatattagtggtagtaaactggaacatatttccacttaaatatatctccaaactcagaaggatctcaaggtgaaaagtagttagggtcagctctggctcccatgggattcccaagcacttaccctccttgtggtgggccaggggccggggagctggtctctttatgtggaaagagggggtcttggtgggcccagagcctggcatgggtccattggtggcctttggggtgatcttggtccctccatcctgcagcctagacaccaacttccccacgtccacctctgggcagggctccaacttgccatccaaaataggcctgcttggggacttcctcccaggatcagtttccccactcctctgaataggtagtttggggtgttgtggtggcttggggggttctatgctgctggtgatagtaccattcggtgtttgatgttggatttcatctaggaaaagttggtgccaagagggaagattaatgataacttttaaaaccttttcattttgatacatgcatacatacttaattttgaaaatttgtatacattttcaaagcagttatgtcactgtggcacaaaccaactatatcccacaaaatcattctctacccttcccagttcatgtaaagccacagatc

SEQ ID NO: 203701 - DNA, 1000 bp, Homo Sapiens
aggactatatctctgtgtgccgagatgctcccctccatgagctccaccttcattgtgcataggacgctgattcttagtacacagcagcaacagagcttcagcagatgccttcttgggaccgcgcttgactctagttccttctccccgggagggagaaagggaaggagcctttgaaatttcccctttcgctatgtttcactggtttttaaacaaatagggctaaatagagaccaagaagttaaccatgtaccttaacgtgcggctttaggcaaaatgttattcaaaaaaaaaaaaaaaaagcttctaaaaattcatgtaccatcaaggaaatcttcacatgaatgggtttagaagcctttcttgatagcaatgtgaacttgaagaaatgtgtgacatcccgtttactcccatcaacaggatctatttccaaaactcatgctcctgccatttccccacaagcatgctgcggccttgcgtgagaggaccagagatctcctgtcgtcttccaggcttgctgcaagtgcagctgagatgaacataagtaatagactcattaattgtttcatcgtgactcaggaaaaccactctgtaaagtcagaggctggtgtttgtaaaattcttagactcgtcgaacagcatagacagatcatgacagcacagaccactgaagatttttttagatacagcccatactgtgtctgaaaaatactcactcctgaattaaaacttcccattctgtgtggctggagatgcagcctcagtttaattagcacacgtctcttcagagactccttgcaaaaattctggaagatcgtgtactcccttgtcatagacagaggaaggaggtggcccctgggaactagcctcagccctgaccctagccacacagtaggtagattgaattagcgaccaccacatcacctgggccctcccccgtctcctgctgtctactgggacctgcaggcatgtgcagggcacagcatgagatcctgcctccagc

SEQ ID NO: 203702 - DNA, 1000 bp, Homo Sapiens
agcaagtctagcagatgggacattggaagagggcaggcttgggtgaaggtgcatcagatccagaaggtagcatgaaggcagttaacacctgaaggcaaaaaagtgaggtggctggaggcacaatactgttttgcttttttgtattgtagttattgcctatgctccttctgactgctacttaaaattctgtgctacatgtggagttttccaaatgtggtgtttttagatggctggaaaggaaggaaaatccaggtgctttaaaaatcatatggagctcatcatttgacctcacaatatattttgtaaaaggacttgtagttttttccaatgtagctaatttagtaagacccatttttcttgaattcccagtggcaaattactcaggatttgttagaaggacaagtatttcttccttgaagcagtactagggtttaggacttttgttgtttaaatctctggagcactctaggaaccctggtctcagctttgctttttggaggcaaaggaaaaatgatctcctggtttacttttggaatctgcaaagcaactctgaggtcccaggtggatttagtgtttggaaaagggaacttgggggactgaggttgaccctgagcccccaggtcactgttcacgtttacaaaagcaaacctggtatccccaattgcttttctcttgaggttggcttaactttatttatcttctgtcctgggtcactgcccctgaggtgcttcaaaagcaaaacccaaaagacccaaaacaaagaaagctaaatcagattcaaggaaaaaatgacctggcactgtgggttcacttttaaaaaggcaaaaagtcacttcaagagtttcatagaatagttttaagtctgcctagattcattgtgtcatttgtacaaagtgatctcaacaggtctgaaaccccaagttccttgggcatggatcgagaatgagtctgtaggatgggaaactgtcagcaagctaaatgggttgacacaaatgaattc

SEQ ID NO: 203703 - DNA, 1000 bp, Homo Sapiens
atcgcttgaaccccggaggcggaggctgcagtgagctgagattgcaccactgcgatccagagactgggcaagagagagagaacctatctccaaaaaaaagaaaagaaaaaaaaaaaggaaagaagaaaggaaggaagggagggagggagggaggggaagaaaaagaaacaaacctcagtttttttggcctgaagaactagggtaggggtcagtcaggggccatggcagctggaagcggaagaggagaaatatgcagaagaagaacaggagcaagaaaccaggaagccctaaattctccacaggaactctgcccaaatgcttggctgatgcctaaactttgcttgcaaccattagacttcgaacagcccacctaaggctaaaagaactaaatggagattttagctattgttcactacttattaaaacaaacaaacaaagaatcaacaccctctgccagtgatcctccagcgtgtggttgggatatggcagggatatcccttcttgcactgtaagagacagccccataccacgaagttctgctctactcaaaatgtcagttgcacacacagttagttctgctctaaggagaggtttcaaacctccctggttggaacttggaatgtgtttttctatttttttttctttttttgagatgcagtctcgttctgtcacccaggctggagtacagtggcgtgatctcagctcactgaaacctccacctcctgggtttaagcaattctcctgcctcagcctcccaagtagcttggattacaggcgcctaacacgacgcctggctaatttttgtatttttagtagaggcggggtttcactatgttggccaggatggtcttgaactcctgacctcaagtgatctgcccgcctcggcctcccaccgcattgagattacaggcatgagccaccatgcctggccagaatgtgttttccactgaaattctgtgataaatgatagctcctgtggagccaggtgcacaatgaattc

SEQ ID NO: 203704 - DNA, 1000 bp, Homo Sapiens
acaccagtctttgtcctcttggggcttatggtccagaggggcagacacattaactgaagaactgccccaagtgttgaactctaacaatgacagagtcaggagggagaagcacaatgggctacgagcaagtatggaaaaggcccaggccagatgggggaggcatgtgaggcttccctgggcagcaatggctcgtggagaaaggagagggcaggtggacagggcttccaggaagaaggcgagtcctagagaggaggggacactgttaatgggaaaacagtgcagaaatagacaaggtgcgtggcatgaaagggatgaacaacaggcccaggagcaccgggaagcggctgctgtagaattgcaccagacagaggagagcagctcagcagagggcggaggcggcagcagaaacgaaagaagcagagagactccggcatgctgaagtgctgaaatctatggggcttgatgatgacagactagaaatgtagggaaagatggagggaatgctgcatgcatgcgggggaagctggtgggtccaacgactggcacaatgcatcttaagagaagagttcagttttgagcttgttaaacttcatgcgctcttgggacatctaagtgtcaatgtcaggtaggccgtggacaggtgggtctgaagttcccaggggcagcaggggcaagagataaaaatgtgtgtatctgtgcatcagacattagctccccagaggagtggatgaggtaacctggagaggggccggtgtgatggggaggaaggcggagaagcagtcttcaagaacgggaatgtttccaagcctggagaagaggatgagaaaggggaaaactgccatcgaggcaggaagtgaaaaagcacagggccacccaatgggagtgaagggaaaagggggttcaaacatgctatgggatgatcatgatgcttttgagaaggcagggactgggaaatgtcagccagattgaacggcacaggaggtccttggcaaccttggca

SEQ ID NO: 203705 - DNA, 1000 bp, Homo Sapiens
cccatggaggcatccctcccatcttcgtgggtactgctaactgccaccttgctgtcccactactggttcgtgggtactgctaactgccaccgtgccatccctcccatcttcgtgggtactgctaacactgccaccgtaccgtcccaccactggttcatgggtactgctaactgccaccgtgccatccctcccatctttgtgggtactgctaactgccaccgtgccatcccaccactggctgtggagaagtccatgccatcctccactaaagaccagcacaaacattttccacaggagaaactctgattaatcaacccaagcaaaaatcaccatgtctcatgtacttaccgccacaaaaacctatcacttatgtttgggtctgtcctgccagtaagttatagcagaaggagataatgctttctacacagtgggagagtattcgaaagttttgaaggaaaaacaccgacaaacaaattgctccgtggaagatgcttactctgctcattgaaatgaatggctccagtcatttcagactctccggtacagctgccacacagaagagctcacgtgcacacccgtgtgtaggctgcagtgcatgcgacagcaagttcctggccatgcctgtgccacagcacaacacgcctgtgcactgtggagtcctgtgcagcacatcgctatttccaaaacctctacagttgcttcctcctaggccagccagggtgtcagttattacttagtggatttcacgttacaagtcttttgaaatgctcattcttgtgccttaaccttaatccatttaattaaatctcaggtttggtataaattagatttaaatgtcttgtgaagaggtatatgctttatgtactcactgtaaacttctcctcccttttcttccggtagccaaaggaattcttcctagaggagtggaaagtgaaagactgttatttttttcccacttggagaatttattattgagcacgtttgcactcacataatcaaa

SEQ ID NO: 203706 - DNA, 1000 bp, Homo Sapiens
atgagaacagtggctttcttccaagtgtcccattcagaaatacatgtaaaagaaactagagctaggatgaaaatatgactggctggctaaattatcttctcttgaaatcatgctccccttgaagaagccaattgcttctccaggcggtcaaggaagtcaggtttggaagttgctgtgaggctcagagctccaaagagcaggctgtattttgaaaatgtaagatcctagtaacagcactgccttccacgtgagttatgctatatggtttttcaggcgggcccatgccttcatccattcaaccatctctcctgactcctcctcacagcaggagctgctagggatgagactccagtcttagagttggatccatttcttccacctcctgataggacttctaggaccagaaacaggatggacatgccaatcttgtgttggagtgacaaatcacaatcatgtgtggatatgcttgcacactaaccttttggtacatgccttagacactagcctaagattcatttactccatggtataaccacgaatgtgtctttacagcaactgtggggtaggcagaagggtggtggtgtctttatacccttttataagtgagacagctgccagaggttacgaggacatcaagagtcacccacagtggcagacctagaatgcaggtcttctgtctccagcttagttgctggctggaaacctcagggcatctccaagcacctgtgagctggccctggcttgcttctgactgagccatgcaaagtgctttcacctgaaaacaaccgtctatctgtaatcatagagccttggtcaggatcaaggtagcagacatttctttgcattgacgtctatttttccccattaaaaaatagacaaaatatttctatataaatctctaaaagacgagggttccccttttgaaatatgccctaaataccatcctcccatcgtaaatgaacaattccttaatatcatcatcaaatatccggtcagactt

SEQ ID NO: 203707 - DNA, 1000 bp, Homo Sapiens
tctcagatcttcttgatgttgctgtttattgggagggagtgggaattaaaattcttaattaattttctgtgtgaatttttttcagtgcagtgaaaagaaaatgaccctgatattgtcacttatcattttctagctgtcccagagaactgtccacccagtcgtgtgtgtgttcacggattcttgggtgtttcccacagggagggtgctgggctgtgtgctggggaggaagctgccacctgggaacttaccgtttgttgtagtttcctaccacgaacttggtggttcacaacagcacacgtttgttattgtggtaatgctcctaaaatctaggtgctggaatctaccacattcatcctggaggctacaggggaaaaagcccattcccaggtgacccagggtactccatctcaagagccttcattctgtcacatttgcaaagtcccttttgccatgtagggcaacatatgcacaggttcctgagattaggatgtggatatttttgtggggtattatttcacctacctccctgtagtgtgctatttagttttcagtgacttaaggatttgccagttatctttgttattgattttttttttttttttttttgagacagagtttcactctgttgcccaggctggagtgcagtgttgcaatctcggctcactgcaagctccgcctcctgggttcacgccattctcctgcctcagcctcccgagtagctgggactacaggtgcctgccaccatgcccggctaatttttttgtatttttagtagagacggggtttcaccatgttagccaggctggtctcgatctcctgacctcgtgatccacctgcctcggcctcccaaactgttgggattacaggcatgagccaccatgtacggccttgttattgatttttaatgcaattctattctggccagagagcagaataggtatacacacacacacacacatgaattcttttcaatgttgggggacatgttttataacaccag

SEQ ID NO: 203708 - DNA, 1000 bp, Homo Sapiens
tgtgacagctactcagactttccttgttttcgctgactttcgtgaggggtactggtcgtgtgttttgaagaatgttcctcaattgggatttgcctgatgtttctctcatgatgagacttggattttgggtcttggtttttgggaggaagaccacagaagaaacaccattttcatcacgttttatcacagtacatactatcaacaggacttaatcttatgttgatgttgatcacctgtcaaagatcgtgtttggcaggttcatccactgtcaatttaccctttccccttcctttacatattgtatgccttggaaaaagtcattccatggagcccacactgcaggagtgagagttaggtgtcgccttcttaagggtggagtatcttcataaggtttggaattattctccacaggagattctttcttctcgtccaattattgattcattcaattatgcattgatatcataggaactcattgatatttattttatattttgggttattaatcaatactactttattttgtggctcaaatagtttcccattgtggccattggctgctctgtagcaggctcctgtcgtgtctttttgttgttgttcagcacttccttacgttctggttctggcactacaggacgctctgagctcacattgtatattttgtttcagtcccagaatcaacaatcagccatttctccaaaaaggtctagttctttttgcagggattggctttagaaaccaagatctagacacaaagtgtgcttggtttcgagcagtaggagtggagagggggattttccatctacagacacagatgccacctaagtccataaggtcttatcatttgcctgctttgttggacatgagcagactttaagggcacagatgggtcagaaattcatcacaaacatctttagaagggaatgagagtggctgaagtaaaagccactgaaggaaatgttatttggtcctcccaaaatatgaaaaagttaatgaattc

SEQ ID NO: 203709 - DNA, 1000 bp, Homo Sapiens
ggaacaatactatattaaccctgaaaataattaaaaaacaatttcagatatagttcagaagtaattgtgaaaagaggtgagattagggaaagatgactctgagtccagataaccccaaaaagctttttagagaaggatgagggtgggaggcaggtagggggtttataataggatttaaaaagagaaggaagagctatttaaggaaatttgattactgcaagtaacattcttcaaaacatttaaagaaaaacaaaagtttggcaggcaagactagaaaaagaaaacaacactggggagggaagtcactgcttcttttatttccatgacttttaaagtcatatttagtttcagccaaggaagagcctttgacatcagagcacacaaagtactctaggaaatgaagaggatgaaagttctactgcatcaacgcccagaactttctccatttggccacaggtcgttctcatacatggcctagtttctatgcactctaactgggtccctctgaggcttgtgaatggaaaaccctcttgctttcaaatgcttgaaaacaagaaagatgctactattgatgcctcaaatacatgtaggtatttagtgggaagcaattaaatgttttgaaggtcatttcaaacggaaattaatcaaaaacagtattttactcttttgtgtattagagtaggcaagaccttggtgttttcattacattctctgtttttatttgctgtttacattaggatgtgaataatggcttgggtaaggggaggatttggtaccaacctaggctttggttgccaaacagacaccagagtaaatttgtgtgtggtcagaatcaggttgtaaggtgccaacacagcacatggcttcagtctttttttctctaattgtaaaaggaccttgtccccatggagggaccattgccttggcttgtggggtcttgagtgatagccacagtctttcttcagcactttctcgacctcatgaaaagatactgaagctt

SEQ ID NO: 203710 - DNA, 1000 bp, Homo Sapiens
tgctaaaaaaaaatataagacacatgaagggaaaattttaaaacaaaatgtcattttcattaccattacaaatatatcagagagctatccgtctcagtttttactccaatctctatatatgtatgtatagtttgaactgtagccaatgacaataaagtatttatcccaacagtaggtactgtttagatactctctgcaacccaaaattgtatgtcagcctaaacctgcaacattaatttaaatttcaaattccacaaggggatattgagcaccaattatgttgaccaaacaatataccaggttatggggaacaaaaaaattactttagacctggtctctgccttcagaaagctaatagaagtgataagttggaaagggaaaagcagcagttcaatgctattaatataagtatgataataaacaatggcaagatgtacaaggtggctcagaaaaaggatggttaattctgtggagtgtttggggttggaactccagaagagcaggtcaagggagcaagaaattgagggttcggatgaatttgtgatgggaccaattagtgaagaaagtgttcctggaaagggactgataaattaaaatgatatagatctgtgtaggaactagaaatatgctaaggttgaaaaaaaagcagtcatagtaggggtgagaaatgagagaagacaggaaattaagaagttacattgctagatggcttcttctaacattccttgttgctgtccatggccacattctgggtctaaggatcagcaaaacattacttctgagatccagaggatggctacaggagaaatctgctaaagaggagttgagatgaggtttagtagaacagagaacaaggaactgtgaagatacattgttaggtgactctcacacatggactttgaattcactcagaatgatggcaagagttggaggggaataaagaatcatgaaccgggtaccaggaaattatctgaaggtcagtgcacgatagcaataaaat

SEQ ID NO: 203711 - DNA, 1000 bp, Homo Sapiens
ttagattttccatgttttaattaatttaaataggaattgtattttataatggtgaaaatgcagtgaggaacaaatgctgcatggcttcagagagaatgccaaaatctacatcagctgataaccacaattttgaaacattgtgaataatatgacctaaatggccagtaatgtagaaaacctttttgttgacacaaaggacattttcatagcctcaggcaaggaagaaagcagtgccttccattccccctctcacatgggggcatttgcctttgggggccatcacttctttactctgatgtttcttggcacccctatatttcactgaccaattctctaagaggactgtatttcctttggtggtggagaaactggatgacccagactctccttaagaaagatgacaccgaaggactgtaggtaagccacttgaaggaagctaacagatggtaatttctcttgctcctaaagattgcagcctacccaaaggacaggaaatcagaccaaactcatgaactggttctctgatgactgaacctcccacagcaggcaagcaagtaagcaacattgaattaaatctctgctctatttagtccctacattcatctgaggtgaaaagtatcattccccacacgatctatacaaatgttttggggatttatagaagttaaatgtttctcaccttcacccaggacatgaactcctgaaatgggcattctttgatggacagatttagagagacagcccagatggtgatgtataaggaggaggtggaacatattctttggccacattcccggtggcaggagaacctccacttagaaagatcctccccccactcagaaacagttggtaggtaggctgaagtgttatagaaggtgctgaagaatagaaacggttgcagaattccaccaaagacaccagtggctcacctgagctcacatagtgatcatgcattcaaaggggcctacttagaccttctggagaatcttgaacaaggcat

SEQ ID NO: 203712 - DNA, 1000 bp, Homo Sapiens
aagcacccataaggcaccctaaatacaccattctgttacttgcctttcagcgctcagcagtttcagtggaactgtttcctgccttctaaatgttctgtcattgacgcccatgacaaaattcatgaacgccccaggagacacggtcattcccagcctcatgcccctgagctcccagcccacagcatcaactccaggctggcctcatgagttactcagctgaacgcttgcagatactgttctgtatcaggtgagcaatgatatttgctcgcccactgagccctgtgaagaggctccaagcccttcatctcatcaaggggcagtgaacatggatcagtccatgggacagtgctccctgccccatccctgcacgtggcagtcattaccaatccattggcacaacagtcccagtgagtgctcggacttagtcctccctcacacatggcagacattaccaattaacacactattcccagtgagtgctcggactgagtcctccctcacacgtggcagacattaccaactaacacactattctcagtgagtgcttggactgagtccttcatcaaatagcccataggaagccactgctaatttattaagttaggactatggttgaaagctttataccatccttattctgattctctctttgtcactgtgaagtggtgtcatctttggctaactgcacctattgatcttgactttttcatctgtaaaataaaaagggacttatttttcaattctaccataattagcctgactgaaagaaggaaggtggaatatataaaatctgatactttttccaatttattattctatcatgaaaaacatatgatattaggttgcctgcaagaatttgaacacttcacttgcttattatgacttatatgttagcaggttactttattatagttattgagaaacatttataacaattctatttacaaaagaaacctagattattacccagaaattatttttcagtggtgatcaagaattc

SEQ ID NO: 203713 - DNA, 1000 bp, Homo Sapiens
tgatctcagtggaacactgcacattcatgcttgtcgacctcactgaatctctaattccagtttgtggatatctttaagaatacatgttctgtaatgtagaatattaattaacttcatatcaccaggcgtgtttgataacactgctaaacagcatagagctctgtggcaaattattaaattttactccccatgggcaatgatacatttattacaaaaatcaatctttggataatatttcctcagtaactctcttagccattataaatatactgttatcaatcacatttattcctgtcatttctaacagaataggatgattctgcccaatgtattactaatccaagctgcagtcttccttctgacttacactgcttggccagtccgatagtctcatccattaataagggggaagtgggttaaacatgacatgacttgtccttgatacacacatgctaggtctcagagatcactgtgtcctcatctcacaccttctgaatgcaatctctttcaaataatccagtctttaatttcatttttatttttcttttcttttttttattttttgagatggagtctcgctctgttgcctaggctggagtgcagtggcactatcttggctcactgcaacttccgcctcccaggttcaagcaattctcctacctcagcctcccgagtagctgggactacaggcatgcaccactatgcctggctaatttttgtatttttagtagagacagggtttcactatgttagccaggctgctctcgaacttctcacctcaggtgatccacccacctcagccttcccaaagtgctgggagtacaggtgtgagccactgcacccagcccagtcttttaattttaatactacttctgccattaacatctaactcacaatttagaattccaaacactattgttcctttcctggaaacttagaacgtttacacatgttcatctccctggaaattgccatactctccataattgtcagaaattac

SEQ ID NO: 203714 - DNA, 1000 bp, Homo Sapiens
ggttgttcatcaggatatttcaagtgaccaaactatataagtgatttctttatgaatacaatttctctgctcataactgttatgcctgtgtaactgtgggtagcacacctgagtgcttatcattgcaaaattatgtatatacaattttattgtataaagtagcccacaaagtgttctgttgtgtttttatgtttctaaactcttttaaaaatgtaaatatgttttaaagaacttttagaattatttttatcagaattatgtatttggggttttgatctttcaggattcaacactggggattatggcatcagaaactatcttttgggattctggcccaaacctctagccttgtaccctcgctccatagatcttctaacagctcctgggcttaaatatctcctcttttatgatgcttctcctgattcaaccaaccagtggtgcttcccatagcattttagaaagacctgttttatagcatttatcaaggtattgacatttgttcagttgtctgccccttccgtgatctcagtagcaaacttgtagtacaactaatttaggttctttatttttccacttgcatcctgagcaacctcaataaaaggtgcattttctttcttttgtaaacacaaagtgtagcattgtttggtctacttgattagagttacaacctctgtacattcttgaaactaagaagaccagcagacagagaatatctgtagaatcttctcaggaattggtttcaacataagggtccaagaccttggcattgctgaggttttcagaattctatcttttaagttaagcctgtgactatttactaatctgaaaatatctttaacttcttttttttaatctgtaggcatttctaagaagcacatgacattcagctttgaatagaagattcatttgaatgacagtttctttcatttagtagaggggattttactttaaattttgctgacaggttttcgtgacagccctcaaatggaagcttgaattc

SEQ ID NO: 203715 - DNA, 1000 bp, Homo Sapiens
gaaataagcaggcatgagggaaataagctttctgtatggacctgaaaagtgctttaagatttaaaaacaaggccaggcacggtggctcacgcctgtaatcccagtactttgagaggccgaggcgggtggatcacaaggtcaggagatcgagaccatcctggctaacacggtgaaaccccgtctctattaaaaatataaaaaattagctgggtgtggtggtggatgcctgtagtcccagctcctcgggaggctgaggcaggagaatggcgtgaacccggcaggcggagcttgcagtgagccaagatggcgccactgcactccaacctgggccacagagcaagactccatctcaaaaaaataaaacaaataaataaaatcttaaaaaacagccaggtgcagtagcttacgtctgtaatcccagcacattgggaggccgaggtgggcagatcacttgaggtcaggagtttgagaccagcctgaccaacatggtgaaataccatttctactaaaactacaaaaattagctggcaggtggtgtccgcctgtaatcccagctacccaggaggctgaggcaggagaatcacttgaacctgggagacggaggttgcagtgagcccagatcacaccactgcactccagcctgggctacagagcaagactccgtctcaaaaaaaaaaaaattaatcttaaaaaatactctgtggccctaaagcaaagtccacacttcataatcataaataataaatttaagttcaaggattaaaggagtgaattttagaatgtgaactggctaaatccactgggtattctctctccaagaaagaagggttcttcatttggcaaaacatgtcaaaaatgccactgagatttagactaattaaaaattcaatctggggattagaattcaatactacatacatatcaggaacattcaacgtataaggtattgtgaatacattagcttttcaaattatatttaacctgagttgaaggattaatg

SEQ ID NO: 203716 - DNA, 1000 bp, Homo Sapiens
ccacacctttcaaaaaaggtgtcaaggtaatctagtggcaaatggaaagattaaaatcaatgatattagaaattctgaataaaagtgtgggaaaaaagtaagcttgacccctacctcatgctatatataaaacttatttcaaaattaatcacatactaaaaagttcatctataaatcatatagaagataatatagaataatatctttggtactttgggatagacaaagatttctttaggagaaacacaacagcaccaataatagaaaataaaagataaattgaactcaagcaaaattaaaaatgtctgcttttcaaaagatattctagaaataaaatggcaagtcacaggctgaaagaaaatatttacagttcatatgtctcaaaaggacttgtgcattcatatccacaatatataaagagtatgtacagatcagcaataaaaaaagcccaatacaaatgtaggcaaaagacttgaacagagactacataaagggaactgtatgtatgatcagtaagcacatgaaaaggtgctccattattcctcattagggaaatacaaattaaaatcacttcatgacaattagaatagctaaattcaaaaagatcagcaatgccaaaatgttgatgggtatggatttaagtgtaattctcaaatgttgctggtgatgtataaattgttactgccactttgtgaattggttgtcagtttcttataaagtaatcatatacttatcctactacctagcagatgcatttctaggtatttgcccaagagaaataaaaacatacattcataaaaggtcttgtacaaaatattaatagcagttttattcctaatgatcccaaactagaaacaacccaaagttaatcaataggagaatggatagcaattaaaaggaacaaactactaacaaatattgcaacatggatgaatctagaaaacattatgttgagaaaaggaagtcagacagaaaagagtataagctataatattctgtt

SEQ ID NO: 203717 - DNA, 1000 bp, Homo Sapiens
gtgtgttattagattgtcttccagtcagaattcctggctgttaaactatttcatcagcaggagttacatccctatgttgtaagggtgatgtccaaaagatacagtaatttttaaaaataatgattaaaggactttgttagaaacaaagagctattttgtatttagtatttgctgtgaagtaggtgataagtcgaattttttagcttctctctgagaaaaatgaagtgtaagtgaggcgttacttttcgacattttctacatgtagtttccttttgtctattttttaactttttttcctctattacactgaaatacatatttaatctgataaattctagtcaagtgcaaatacaaaataacaaaaagaattaaaatcatccatggctctaaccacttaggatacctcctattatagtctatgtacttccagtcagctctcattttctctcactttttcttgctccatatctctgtcattttatttttaagcaacatattataaaatgctattttctaaaactttttaaaaatttaaacataaataaaattttatttaacttgtatattatttattggtttagtttttattatgaataatggtgcaaattaatctgattttcaaaaggaacagaattgtcttagagtttcccagtagtcttgtcaccttagtcctaatgtcaaataatgtcctcattgtgtgcagccaggacagagattcagcagtgttatcaagggcccagactcccgctcccggctgtgtcatcttcagcatgtatcattcattctcatgatcacagcgcggctactgaacctctaggcattgcctcagacaggaagaagggctagagccaaaaattggggctagctgaggtctggcccaactgcaaacctttcctggaagatcctcccagcaactttcacctacatttcattggctagaaataggtctttagtccctagctgtacaggattctgagaaaggtttattttcgctttctaa

SEQ ID NO: 203718 - DNA, 1000 bp, Homo Sapiens
gattgcttgggggtggagacacttctccagccattgctctggttttctgaagggaggctagcagggcctggtgctagtacttgactgctcacttctgaaccaagtacttggcaggactgagcattccgcagggactttcaggtcacctcctccaggggtaatggatccgagttcctttgtgtcctgtaacttgaagctaagagggaccccttgaggaagaataaacagaggggtgaaggggtcagtgcagggaagagaaggcagtggggaactgggcaagtagggaaaggagggatgctgggcacgatgcagtgcgattcctgccaaagagaaaaggtgctttgaatgaagtccaggaagcttcagatctgaggcccagtgaggagaagggacttgcccaaggccaggcctggaggaggatctgtgtatctgaatcttcaggctggcacccagatggctggtgctggtcactggcttgccaggctggaaagcaggaggttgggcttaccttgagtcagccctcctcctccaggaagcaggcagacttcctcagctatgccgggtctgtgtgcagctctgatttatttcgagattttccttgtctgaatcagagatggtttttcttggcaaattgcgactttttcagaaggcaaaaatgcagtctcctcgtagtctgggtcagcgtaatcccctgtttgtttatccaggctcagtgtgtttgaggctagagccagagccagccaggggtgagggtccgacccagcccagacagctttatagctggatttgcaaactccagcgaggttccagctctggatcttcctgatccttggtgtggtgtggctgggtgccttggggtttctatgtgcactactttagaggtgctcattgcgggggggtcccttttctgcttcccaggactttatttcagagtacaagtgaaacaagagcctgcttcacatatcaatttgggaggaaagtctagattaatggagaattc

SEQ ID NO: 203719 - DNA, 1000 bp, Homo Sapiens
ctgcatctctgggaaaatatccaaactcctttcctttctgtcaaaatgaagaacaaagattatcgaggaagaatgatcaaagcaataataattattgaacctaattttgtcccatgtccttggctttcatctactctgaatcgcaaacattactcgactatcaatttccatataaaaaagagtgaaataatattcttttgttattcaaaagaagagcatttatttaaggaacaaagagccaaatcataaaatgtcactgtttcaaacttcagaaggaaacctgttccacttactcattttattcgtttttctgttctttaacgacctttcttgtccaggtcaactgcagatttacactagtagacctgggatatcaaaaggcaaggcaatggcggcggtagccaagctagatggagtagtgacatattcaatgttttcaggatgttaaaatcagacaggcggtttaaactctgaagggccacaaatggattcatcatgatagtaaaggtctacaagtccttcagggaggatttggttccattctacttttctggggctgccttgataacagagatcctcttcacccagttcaagcacaggcagattgtgccccaagggtgaaggcttacccatccaccctcagcgcatttcctaaccctgttaaagttttaaagaacatatttcttttggccctctaatccagcaccattatacctcaactgtgatttgtccagctctccagttgccataactatttggaaactgacagactgtgggtccacagtgtggttccttaaacagctaactgcatgaactaaacatcaaatgcacaaaactaaatgtgcctaaaacttcaccctggctgcacacattaaacactgcttttgtgtggaaccattattttcacgtatagtaaataaaaaagaatgctttctttgccttttatgacacctaagatgtcagtttttgtatggctgcattggatgcctccaatgaattc

SEQ ID NO: 203720 - DNA, 1000 bp, Homo Sapiens
ttttgtgggagaaagatcataaacaaaaaaacatataatatctggttgcaatatgtgctatgaaatgatataaagtgggcaggagattgagggagtgatattgtaggaggccacctgattaggtaatcagggaaggccctaggcctcctctggtgatgtgggggctgggtctttatgaataaatttttccaattttcaaaccttaactctttaaatgccaaaaagtttattcttacttattttgacccgaattactttaaattcattgtacataggaatccagaataatctaatcttgttttaaagattcaggatcattattgggaacaccaatatatgccaggggttctcaaagtgtggactctggaccagcagcatcagcaacccctcaacctggagacttgttagaaacgcagattctcagaaatgtaagtgcagacttcaccctggacatgctgcatctgaaaccctgggggtggagcccagcactctgtgatttaacacgccctccaggtgcttctcatgcatgctcaagtttgagaagggccactctgctctgaggtgtgcccttgagggcggtggaggcaggtagcctctctgcccatcctcggcagactgctttgctccctgagtttctgcctacttcctgtgggttctgcctcactgtgggttgtcaatgtttatccctcactgctgacattagtatgtctctgtctaatttgtgtctccttctaatttgctgcttctaatcacctctgagaaaccagatccccagccataaattcattatgtagaaagtaggaataaattccagtgctgctggcacccatgttaatactttggtctttcgccctcaagacattcagcataatggaaagaacagacttgaatttcagtctagaattccaccaatgtggggattctgcaggctgctgagtaagtctattccaattatgcattctagaaatggggaaataaccacaggatgggttcagggacc

SEQ ID NO: 203721 - DNA, 1000 bp, Homo Sapiens
gggttagtatgttcaaagaaactgaggaaaaatatgagtaaagagatagagattttcagcaaaaaagtgtaaagttttttgtttgtttgtttgttttttgagaaagagtctcactctcacccaggctggagtacagtggtgtgatctcagctcactgcaacctctgcctcccgggttcaagcgattctcctgcctcagcctcctgagtaactgggattacaggcgtccgccaccacacccagctaaattttgtatttttagtagagatagggtttcaccatgttggccaggctagtctcaaactcctgacttcatgtgatctgcccgccttggcctcccaaagtgttgggattacatgccaccgtgcctggccagtgtaaagtatttttaaaaagagcccaataaacactctagagctgcaatactgaaatgagaaataaaggagaaaagaaaaatcactggctggtcttatcagcagtttaaaagcaacagagaagattgaataaaagtgaaaaagactgactgtcctataagacaatctcaaatagtttaatatatatgtaataggagtccaagaaaaacaagagtgtgagaataagtcaaaaaaaacttaagatataatggttaaatatttcctaaactttacaataataaaaagaatcaaatcaaagatccaagaagctcagcaaactccgagaagtataaataccaagtaaattatacctaggatcattatcaatcctctaaaaaatcagtatcaaagagaaaaaaaaatcaacccaaaaaaaaaaaaagagaaacattacaaacaaggtaataaagatacaaatgatggctaacaacttattagaaagaatgaaggccagttgacaatggaacacctttgaagggagaggggcagacaccaccagctatcacccagaattcaacatccagcaaccatgtgcttcaaaagaaaaaaaaaaatttgttcagattaaagaacaaaatgagagaattc

SEQ ID NO: 203722 - DNA, 1000 bp, Homo Sapiens
aggctggtctcgaactgctggtttcaagcaattcatccaccttggcctcccaaaatagtgagattacaggcatgagtcatcatgcctggctttgaattctttccaagtacgtgtgaaatgtttatgagaatcaattgtgttctggatcacaaccaaacacaaataattctaaaacattgagatcattaaaaaaaaaaattctattgctcagttgcttgggtggcacctaacctcaggcagtttcatgaagctgcccagcctcagagctctcatttcctcactgtctcctagttttcccagggaattccctcagcagggaattccaagttcctgggtcactgtgttgttcacccaaatctgccctctccaagtagcaaggtccaccccacagaccctcttcctcctcccaactagcacctcccgaccccgagaaacttgtcattctcaatatctttcccttctagtcttattttcagatttttcacccaaagcgtagcttaaatgcaatagatttctagatcagaaaagagagatgagtgtgagggagagggtgtgacttttcattggcctttcagtggctctgcatcagcttctttagaccttggactccaagaagcccctctggatcaccaggacccatggttagccaaatcttttcctagaatcctattttaacaaacttagagaaacttctaagttccaccttcttctgctctgatggggaggggtgggctgtaaattgatgtaatcaatggagaagacgatttgccgttgtttcaaacttaggatgcacttcctgtttgtccctacaatatcacttccgaaagtttttcataggaaaataatcagagatgtttacattgaagttttatttataatttatactactattgatcattattttaaataatggcacagtttcactcttgtttccctgcctggagtgcggtgggaccatctcggctcactgcaacctctacttcttgggttcaaggaattc

SEQ ID NO: 203723 - DNA, 1000 bp, Homo Sapiens
agaaagcaaaagagaaatcagagaatgaattaagataaaatgaaaacacaacataccaaaatgtatgggatgaagagaaagcagttacttaaagatttattagaagaatgatcttaaatgaataacctaactttctacaataaaaagctagaggccgggcacggtggctcacacctgtaatcccagcactttgggaggccgaggcaggtggatcacgaggtcaggagattgaaaccatcctgactaacatggtgaaaccccgtctctactaaaaatacaaaaaattagccaggcatgatggcgggcgcctatagtcccagctactcactgcactccagcctgggtgcagaacgagactccgtctcaaaaaaaataaaaaaataaaattagaaaaagaataacacactaagcccaatccaagcacagggaaggaaacagtaaagattaaagtgaagacaaatgaaatagaaaatgggggagaggggagcagaaaactgaataaaaccaaaagttgtttctttgaaagatcaacaaatatgacacaatcctgtggctagaccaaggaaaaagagacagaaaccaaattactaaagtcagatatgaaagaaggggacactactactgacctgtatgccatcacattagatgaaaatggacaaattcctagtaacacacaactaccaaaaaaacccactcaggaaataagagaatctcaacagattggtaacaagagactgaatcagtaatcaaaaatcttctaacaaagaaaatcccaggaccaaatgccttcactagtgaattctaccaaacatttcaagaagaatcaataccaatactgaaactccttcaaaaaactggagagtgaaaagaaaataattcctaactcattccatgaagccagttattacactagtaccaaagccagacaccactagaaaactacacaccaacatcccttatgattcaaaaaccctcaacaaaaaactagcaaactgaattc

SEQ ID NO: 203724 - DNA, 1000 bp, Homo Sapiens
ggaaaaagtttgttataatattaatttttaaaaggcaagaaaaattatatcgatataaacacatgaatgcacatgcccatataatccaaaaacagatattttaaggaagaggtagcatttaactgggttggatgtgtggagacagcagtgagactacatggtggacagcccttatatttgtttatataatatccatgtccctttcttctgataacagcacctccattttgggtttgcggaaattcacatccctctttcctcacacacacacactggatacattcttgtagatttttgagttaaggtgtcttgttttcctctgacttactgctgagcaggtgaactgacaattaagccaaataggtatttactcttgggaatctgaaactaccccctcggccttcctaagtggcatggaggttgcagatgcagaaatcaattgttcataaactatccacgctcttctaactcttgaaagttcttccaggtagcccatgaaggtaggcctacttggatttgcagactgatgcaggccaggcacaggagatttctagacagagcaatggcataaatagaactaccatctacaagccattatgcaacactttcattcagagcttctggatttgggacagcatgtcctgagttttgtcagtagaacagacaaagcttcaggcttttgagaacagtgttgagtgaagatgctgagtttcatgtagccagaccagaagggatgctagtcttgtggcatctgaaggagacagtagaagacaaaaggcagcagaagaggggcttccaccttgccttgtctccacccaggagagcatgaggcaagtagaaggtaaagatgaagatcaagcggagtgtgcctagagttcatcgttaatagagatgcttggtgaattccatcccacagccagacaggcaggcttctagacagtctagaagcccatgtctcttccagatctaaacttggggacttatgctgcctagcaggcca

SEQ ID NO: 203725 - DNA, 1000 bp, Homo Sapiens
tcaggttggtcttgaactcctgggctcaagtgatcctcctgccttagtttcccaaagtgctaggattataggcatgagccaccatgcccaggcatttataattttaatcatgttttaggtgtctgggtgagaggcatgaagtacatttacactattgtgtaatcatcacctccatgaatctctagaactccgttcatcttggggacagaaactcttcccctttaaacaataactctccatcctcccctccccagcccctggcagccctcattctactttctgtctctataaatttgaccactctatatatctcatataagcagacttagacatatttatccttttgacaataaatatttttaaatgaatgaatatctagtacaggcgaaggtggggtgaaatagggattttcttacatgttggtgaataagaacatttgaccgcacctacccaaatgtaaagtatacatttaacaagccaaaaaccccacttcaggggctctttcctgaagaaacactgattaatgcacaaatatacaagtgcaagggtgttctctgtggcactttttaaatataaaatttattaaaataggaactaagtactgcaacattcaagaaccataagcatcaagccccatgcaatttacaaggtgaacctacctgaatcctgatctgaagttccagcaggctccctctgacctcctcctagtcactatctccctgcttgggtaagctcaactctgccttttcacaccattgatgagttttgcctatttttaacttgatataaagggaaatcatatagtgcactctcttttgtgtctgacttcttttggttgacattatgtttatgagattcatttcatatcaatgcatgtaatgatagcaaatttattctcattattttgtacaatattcatattgtatgaatatgacacaattttatttagatattttgctacccgtgaccatgttcaccatgtttccagttggtggctttt

SEQ ID NO: 203726 - DNA, 1000 bp, Homo Sapiens
tttccccaaatggtggaagttaagtgctagctggaaataatgtagaggaatacttgttttttatgtaggtgggggaaaggaggtaggcggacccagaaaaatctttcctatctcatatcccaagaaatgagatgtcccagcctgattaccccaatgttcacccaaaaacgccattctgggaaaccctatgtaatcattttcagaagggaagcctggcctgtgtgcttcctaagttttggtcttcaaaggcacacatattggtcctgcaataagaaaccagaggggtaattgtgggcaccaggagaagagagaggaatgcccgcacagcagagccagttttctgtgggtggcaggcaggtttagctagaggggcaagcagccttcatgatagaggtgtacttctgattcagctctgaagaagccagggttaacatcatccttgtgataatatttgaatagaaaatgatgcatccctttatttccagggcagctgcttagaaatctccctcatgaatgtttgggggcaacaccttacaacacaatttggaagagctattatctagggcctagtatgttggttacaggagctctccaatcattccttgaagagaacaccaccaccccatcagtaagctgattagctgtgtgggctggctgaatttaatgggcaagaaagaagtgtaccataagccacagcaaagtcttctccattacatttgtctatgtgcttccacacttctgtagcccccagttctcagaagtgatggggatggagttcctcatggaaactaaagttagcaataattagcatttagtgagcacctaccaggggccaggcactgtgctgagtgctctgtgcacatcccattgcattgtctcaacaacctggtggtaaagaagttagtattatttccaccttagatctcaggagactgagtttcagagatgttacatggttttcccaaggtcacacagctagtaagaggcagagctggaattc

SEQ ID NO: 203727 - DNA, 1000 bp, Homo Sapiens
gttcctgggcttttttttggttagtaggctatttattaccagctaaatttcagaatttgttattggtctattcagggattcaacttattcctggtctagttttgggagggggtatgtatccaggaatttatccatttcttctagattttctagtttatttgcatagaggtgtttatggtattctctgatggctgtttttatttctgtggggtcaaaggacatcaccattattttaaaagttcactaaaagtaactttctgagttgcatctgatctatctgtctatctatctatctatctatctatctatctaatcatcttcaatattgataataatatttagcatcaaagttgtacacatttaaaaactagaagccaagaagtagctgtctggagaattaaattgtctaagaaattattaaagaatactaaacaatagtttaagtaattatgatttctaaaaataatagcagaaagaacaattttatgagaaagtataatgtgaaaactgttcatttagcaaaaaaacaggcatttcagttttttaaaataaactgcaagaactagtgtcaatttttatgtagagaccaatcatcttttcctgatactttaaaggatttagtgaccagaaataactggtcattagttacattcagctccaatgatttacaatcttcaaagcagcagcttcagcagaatgaagatgaattcaagaattagacaattaacattactctttggctaattctgattagacttcacacacatttttttctattgtacaaacgtttttgaggttgaataataaaatttaaaaaaattgttaatatacttaatagctgtaatattagacattaaaataaaaaatcatgatacatttctgaagtgtcctttgcggtcaactagtctcttcaaccaaatgtactcatactttataattataagcagtagccctattttggaaaaaaagaattcattttctgaaagcacatgatgaattc

SEQ ID NO: 203728 - DNA, 1000 bp, Homo Sapiens
catgcttattgcttaccccatcccacagatgacctctccagtgggctttcatctttttgcataataaaatctaaagttcttaccatgtcaatgtttccagagcactagtcttaccaattttctcctggcctatcagctattaatatcattgcactatcctttcctttcttctggccgagccagctcattcagccctggggtctttgtctgcagtctcctctgcctggaatactcatagacttttgcatggcttgctggttaactttattcatagcttggtccaaatatgagcactgcagggaccttccccaactcctttaaccaaacagctccccattcatcttgtgtccatgaccctgttttattttctttctacctataaatttgtatgtttagtgtttgtcttctttggtgaaactgtaagcttccactagggcacggaaattgtcttaccgttgagcaaagcctgacatcatagaaactcaaatatgtgttaaatttaatgagtaaataagggaggtacaataattttctgctatttacattctgcattttctacccaaaagcctagcaatgtaccccataaacactcagtttaggagaaggctttgggctcagtcacaggcttcaacactagacatgcaggcagtaacagaggggacttgggaaccagagagtgcaccttccagacaaggagggcaagataaaacattcctgagtttgggcagttttatatgacgatcaggatagacaactataaaataaagtgagatgagacgggaggaacaggcaatggttagacagtccctttccagttccttgtctgccctatctttgcaggtgaaggggcttctcttgggtgtttggcaaggcaagttttggtctgattctgcatgggtgaagatacgaacaccaggatggaagactttacagggatatccaagttgcagccaaacaaagtctcactctgtcgcccaggctggagtgcaatggcatgatc

SEQ ID NO: 203729 - DNA, 1000 bp, Homo Sapiens
agagagagactctgtctcaaaacaaaaaaaattccaaaaagtatgtaaatcacgggtgctgtgagcggtggctcacaactgcagtccaagtgctttgggaagcagaggcgattgcttgagctcaggagttcaagagcagcttgggtaatgtcaggtctctgagcccaagctaagccaccatatcccctgtgaccggcacgtacacatccagatggccttaactgatgacattccttcacaaaagaagtgaaaatggcctgttcctgccttaactgatgacattcccttgtgaaattccttctccttgctcatcctggctcaaaagctcccctgctgatcaccttgtgacccctgccacctgcccgccagagaacaatcccctttgactataactttcctttacctacccaaatcctataaaacggccccactcctatctcccttccatgactctctttttggactcagcccgcctgcagccaggtgaaataaacaaccttgttgctcacacaaaccctgtttggtggtctcttcacacggacacgagtgacacgagtgaaaggtaacatggatagtgagaccctgtctctccaaaaaatttttataaaataaaaaaacaaaaattgaaaaaaaagtatgtaaatcaaaacttatttaattcaatgaaactataatactgaaaaccgggacaggacagcagccagtttctttctcctccttgatgagaaccacctcagttcccagaaagggaggtttggtgagataactgactcagataagaaagcatccagtttagggaggaatgccggagtaccctctgcctagggctagagagaactctcaggctctcccattccctccccagcaacaagctgagcaaatcagtcgaaatccatttctctctaaggtctctgtccatatcaaataacgatcaaactcatgaaaattacttctagccacaaatcatcaatcatcatgtccagaaacctatcctgaattc

SEQ ID NO: 203730 - DNA, 1000 bp, Homo Sapiens
ggcacttatttggcaccataaaccacgcttgactagagactgagatatccttacatagtggtccatggacatggcctcttcctggcactgccaggcatttggaaactattaatttccttgagtatatttgccttctcagctggggtttctcgtctgaaatcacagaacatagaaaatgatttgagggactctactggagggcacctgacttttctctatatatatttcttgaaggatactaggtaatttattacatacaagagatgcctaaggaattaggggttaattctttccatgaaaccttggtttaaaaggcccaatgtccatactatgtccagccaaatagatgcacaaaattccaatcccagtaaaagaccttttagttatagttacagtttttttaaaactatagttttagttacagtttttttaaaactatagttttagttatagttttttaaaactatgtagaagatgattcatttatgggctgtcaaattgccccagactttgtcttttttcaaaattttcagtcagttggcagtggtacctttaccttacttcatcagagaaagatgaatttttgaatctgaacttcctctgcaaatatttattgttggtgtctcatcattaccaaaccaagggaaaattgctaagagaaggtgaatagctgagaatcatacacagtggtgaatcttgtagtgttttagtttggagcaagtgacaggaagttatgagggctagttaagaaataggagcaaggataacattagattgttgctcattgagaattgatgaaaggattgacttacaaatcaatccttgattgggggctaaatggcggttgaaaggaacattatagccctctgttgccgttttataacttaagctgggtagctgtgcagaggaacagagagccagggtgtcctcccaaggtgttaaattggagcccaagggttatagatttgaagacatgagagcctaagatacagcagaattc

SEQ ID NO: 203731 - DNA, 1000 bp, Homo Sapiens
cttggaaagtatcccccacagatgaaaggggactactgcatcctatataagttttggggggtaattgggcctttctaataatagtttctagaataatgttttttattttttaggagagacagcaagaatgctttgatctgcttataattattatttactggtctattatgtattaaatgggactctgtgctggactggaccatgagtgattatccttatctgtatgacataagtgtccacaaagtttcaagttaccagcttcgttggtagtcactgatatggttgtgtgtctgggtattttgttcttttagcataggctgcacccctcttccctattagtcattaaggtctttgacatcagatactccgccttttgtaaaataagattaaaaagtacagaggtctatacatagtgtggcaggaaattctcactggagtttactgcttggggcagagataagattgaggccatttagctacaaatagaatgcactgcacgccccattcccttcactgaggctctggtagaggcaaagaagtcccagctgtcaattctgaaattcccaggtgcaccaatccagattactttaactattattaattactggcacctcacaactcattgccccacaccagtgcatcttaatagcatggctgagaaccatggatttaacgtatgtgttgaaggtcgaccaaagaatccatttgaaatctagaaatatctacagatccagatgccaatggcctgtaacctagggcaaagcactccagctttttgtgcctcatttttctcgcctgtaaaaaaaaaggataacaacatttacttatcagggattcgttataagaattaaatgagacatatgtaggcactcaataaaggtcagttgctgctgtgtggccttggacaaatcatttaacatctctgcacctcagtttcctcttttgtaaagtaacaggaatgggttacataatttctaggactcttaacaacagggaattc

SEQ ID NO: 203732 - DNA, 1000 bp, Homo Sapiens
tgcagcagaggatcggataaggacttgggaaccccaatgggctaagggagcctatgtagagtggatgctggtacccccagttctctccccctagacccttggaatgctcatacccaggctgggcctccaggctggggacttaagaaatcttccttatggaggttgtcctgcacaagagcaaagactgtgaagagatgaatgcgcaggtgtttagatggacatgtatagggaagttcatagtagtcattccctactcacatacttggagtttctaaacagattctgagttcctcacatttaaacatgagaaaatgaccaaggattgccagacatctaaagaaagcatctaacatgaaagaaagataccaaagcaaactatgagaggaccttgagcactacctaccagacactacacattaaagtcaatttgagaggactaataggtataaatgtgaaaggtataataataaaactcccagcaggaaacataggagaatattgtcatgacatggaggtaggcaaatatttcttaaactggacaaaaaaagcactaattataaaattaaaaattaattaaaattcattaaaatttagaatttctgttcctcaaaagacaccatttagagaatgaaaaagtaagccacagagtggaaactagatattttcaatttatacattagacaaagggcttctatccagattatacaaagaactcctataaatcaatacaaaccagccaataagaaaagactgcttgaaaatgaaacatctgctagaaatgacagacccaaaataaggattggaggataaagttgaggaatcactcaaaaattgaacaaaaagaccaagggatggaaaacaaaacgattgcgaaattagtggaccagttcagaaagtaggaagagagaaaatagaaaggagaaaataataagtgaaataattcaagaaaaattttccaaatgaaaagttacagtttcaggttgaagaggttcatgaattc

SEQ ID NO: 203733 - DNA, 1000 bp, Homo Sapiens
tattagctgggcatggtagtgtgtacctgtagtcctagctactcgggaggctcagacaggaggataccttgagcccagaagttccagcctccagtgagccatgatcacatcgctgcactccagcctgggcaacagagcaaaatcctttaaaaaaagaagaaaagagggagggagggagagagggagggagggagggaagaaggatggcaggcaggcaggcaggcaagcaaaatcctgtaaaaaagaagaagaaaagaaggaaggaagggagggaggggatgggaggggaggagaaaagaggggaggggagaggagaggggaggggggagcagaggggaggggacaagaagggaggagaggggaggggaggaaggaaggaaggaaagagggaaggggaaagaaggaagttgacctcaatggacctttgagagaaattacaagtacagaatacacttctgtcaacttctactgtgtcaatggaaggttggggtttgggagagggtaacacaaggtgccaatctgaaggcagctgctgagagatcagtttttttttctgactggggcaggggatttattggttagaacatgctgagtttaccttagaaggcttcctactctaaagtaattacattaatgaagtgtttacttgagaaaaccatttttaggttggaggatacagctgataactctaagagaggcattgtgattgagactgaagagatgaggagaggtgccaggaaagaggaataaggagagagagaggaggaagaagaaggtggcacagggaaattgggagagagccagagaaagtgagatcatcttgatggactgagagaaaaaaactgcagcttcagaaacagagcaactaggctcactaatataaccctaacaaggttaaaaaatcaacgacaatggtgttaacagaataactgatgttctggaagctgctggaagcttgtcagaggtgattggaacagttcactgagggaactcattacac

SEQ ID NO: 203734 - DNA, 1000 bp, Homo Sapiens
gccgagacacactttgaggttcccactgcattgttacacctcccccctcacttcagggccaggtgagcaagggaaaggagcgtggcctgggcgtcccgcagggcccccactaggaaagctatgaacgctcccgccttgagcacagccacaggcctgctctggtcacaatgtggggtcgccccacggacactggtgaccagtgggagcatgaccaggaggtgattaccttctgatcacccttggctttatttttaggtaacaccaagaaggacgccatgagagcgaaggccgttgggtcaccgccctttgctctcgcgctgcgcgtctccctgccatcaaccgccgcaactggcgctgggagcggttgagggcggccggcctcgcgctggaacctcgcccgcctcaaggctcctgcggcggcacacggggcaggccaggacccgccctaggagggccccgctggagatgtggaaatggagggacgcggcacctgggcgcttcctggggccagacaacgccccctcattggaacctccatgaccctgcctctgagaaaccagcgcgtccgcaacgatcactcctaattttcggtaatacaaacctgcagtccatgcacttaggtaacacccttgctgaaaggtttacctttggagggtttatcctaaagcaaagtatcctcaaattgcatgtcttgcattccctttggatggcattgatttcattcctgctcatgcctttcaaaaaatagtatgccctgttttcctactcagtctggaggttccattaaagagtatttctggcaaagatttttagacctgaaaacacactccaaaatatattttcttctgactccattcccagagtttttcctaccgcattcaaatgatttctagaaatgtttttgttgtagccttgatcaatttcagtcgataaagcagcagatagtaagggaacaattccacgctccccacccctgactctgcaacacagtgcagaattc

SEQ ID NO: 203735 - DNA, 1000 bp, Homo Sapiens
tgcttttcatgttttaccagcaaaaaaatcccttcccccacgcacttccctccacagcattcttcttattggccagcataaacgtggagctcaggctaagccaatctcttcaaaggcaatgaggccaccatgattggctggaactcttcacttataccccctgccgctgagagtagctgtgaagcaccttgtgaagcagatgacggtaggttcttaaacgaagttgaagttaggaaagttgaaggggattatatctattaggcagcaatcagcatctaaaggagagaaatgttcctctctctagtaatgtgtcctgcaatcatttcagtggatttagatagaatggattaacaatctgcccaggctttgccctgaaggtgttgaagaggagaaaaggcgttgaagacggagtcactaccacgtgataatctgggatatttctaagccgaatagaaagtcagttgtataccatgtaagtttcattattctattagtgtcttttgtaaaagtatagtctggcagggaaatattatttctcatcaatgttgcagtaaattgatctcaaattttatctaaattaattttttgaatgcattattcttttgctctgtattatctttttctaattgctgctttcatattgacaccaacgtttttgatttgagaaatattaacacaaggaaagatcagtagtagtagcaggtgttgttcctgtccttgactcagtctgaatcttggcattgtgggacatatgcacttttgaaagctgcatttgttttagcttaaaactactaatgttatccacatagattcagaatctttgcttaagcatacagtattcttttaaaaagaatagaattaaaattcagctgtggtctcagtaaagaacttgaggctactacatgaaaaatgtaggaaaatgcaattccttacacaaaagataataaagattattgtacaacatcaactggcctgcttcacagggatattgagagaattc

SEQ ID NO: 203736 - DNA, 1000 bp, Homo Sapiens
gaacggttaagttaagggacaccatttgctggatgtttcattttgaaatgttgagaaataacaagaatgccaacctgaggatgcctgtagccactccaacacaggaacttcaaacacctgtgcttaggaaaatggaggagaaatttggtctatgtcttgggacactgcaaaacccaatggccaagggacagctaggtcttagttggttcaaaatacgaatagggtggccactctgaaataggccagtaacaaggaggttgtggggtgtctgctgtggaaccccttacctgtgggtacccctggagtaggtgttgttggtgcccaaccacattcctgttcccaggccccagtgtccagcaaccaggagggctacatcaccccatgccctcctcagttgcaaccaatggctgacagaaatggaggtgcaaagaccagttgtctcatcacaagggggtagagtttatgccccacaggtctcctttgcccccaggctccacccgaggccacgtccttgcccagtacttcccgttccctgtcttcctggccttagccctgttgctgtgctcctgaagtgcattccctcagtctcagccacatttgcccaaatccctgcctcagggtctgcctctgggagtctgacctaaggcggaagcactgtgagggagcccttgtggtttaaggtgtcgcaaacagactacagagcacagaggtaccctttggccaatgaaaatctacccactgaaaagaaacccatgcttcagatatgtgaacaaatagcaaaatatgaggaaggaaatattacattcacttaaaatttccataagggtagagatagccagaacaccagttatagatactgtgttaattaaagactttggatcagtttcctagggctgttgtaacaaattaccaaaacctggttgcataaagcaatagacctttattggctcattgttctggaggccagaagcacaaaatcaaggtgtcggcaggtgaattc

SEQ ID NO: 203737 - DNA, 1000 bp, Homo Sapiens
ggaaaggagtttagagacacctagattggagggataaagtcagcactgcttatatttggcatcgtcttttccctggcactgccactgtcaccaccatcccccttctggatccctactttaccccttcatgctgctctggtggcagtgcctctgctgccatgctgtacttgagcctgctgctacagccatgcctgaagatgcagccccttcctctcttcctgtcccaccaaatatgaccagctctaggttccattacttctggactttgctccaaataaaacttacaccattttattccaaacccaggtctctttctgcaacacccgagaaaaatattgggctgcaggagccagagaggagagagagatttactggtgagagttgtaggtgggaattgaaaagccaagtcatgtctttgccccaccagaaactcactaggatgtacacaatgccactgtgatggttttaaaatatgtaactaacctgcacgttgtgcacatgtaccctaaaacttcaagtatatataaaaaaagaaagaactgctgatacacatatcatgaaaaaagaccaaataaaataaaaaaataaaaaaaaataaataaaataaaatatgtccacaaatgctttgatgttcctttgtttcttgatctgtatgctagcaacacaggttcattccgtttgtgaaaattcattgagctgtgctcttatgagctgtgtacttctctacatgtatgttaaatgtggacaagaacttcacataaaaatcattttaagaaaaataaaatatttagatgggggcatttgaataaacatttgtaatgtttttattacaaaaaactcaagacttaagaaattgctcaaagaaactgatagatcaggagataactagacactatacaaaaggtctttcttgacttacagtaggactatggtggaatttctttgtttttctgaagtattaaaatcagaatctattgagacgtaaaactctttcaggatc

SEQ ID NO: 203738 - DNA, 1000 bp, Homo Sapiens
atctgcatttctagccttcacatgaggaaaaaaagttgcttttcttctggtattgctaaacttaaaccttccaaaattccagaaattctatgtgtacctctaaaagatttagttttgtcacttaagctttatgatcatgtttattttcatgatatcccaatatttcactgatttatttttgaagaataagttgattccctttaatctattttggtgatcaaaaggtaaaaagtggctgggcacagtcgctcatgcctgtaatcccagcactttgggatgtcagggagggcggatcacgaggtcaggagatcgagaccatcctggccaatatggtgaaaccccgtctctgctaaaaatacaaaaattagcagggtgtggtggtgggtgcctgtagacccagctactcgggaagctgaagcaggagaatggcttgaacgcaggaggcggaggttgcagtgagccgagaccacaccactgcactccagcctggtgacagagcaagactccatctcaaaaaaaaaaacaaaaacaaaaaggtgaaaaggtataaaaataaattatcaaaaaaaaaaacaatggaaacatggctgtagaatgttgcatgaaattttgcacatttaattgaggtccttttaatgtctaccttgactcggttattatgaatctcaactaatgcttagctaacaaatcactaattgtagtattaatacatatttcagtgattaaatatgtgctagttagtacagtgtcaagggatatatcaggtagtgtagcgctcaagcattttgctctgcccccttcttttttctgttctgattcccgactcccctttaagacttgattcagcagcagtcatttgacacttctgcaaaagattgtgatgcttttgacaaatgttaattgagaaagcactgaaagcctggctgcattgtaatcaaaagaaaattacagaggtttaacaagatgtcaagcaagtgctttaaagaaaagatagacaggt

SEQ ID NO: 203739 - DNA, 1000 bp, Homo Sapiens
gagctagtgggatgaatgtctgagagtgtcctgggttgaggaaatgtgcaagggccctgaggttgcagtaggtgaaaccttgggagcagagcatggctggagtatagtggaggaagaggaacagacaggaagtccaagaaacaaaaacggccaggtcctgtaaggattgcctctataaggatttcagctttcatctgaatgagatgggaagtgattggagacctttgaacagagtaagatataacccaacttaaatttttcaaagatcactttgctgtattgagactagagaacaagaatggaagccaggagaacagtaagggacactgcagtaatgcagatgagacgggtgctggccggggccagggtgacagcactgggggtggctgatgggttgattttgtcctataggtgataaggagccattaaagacttgatcagtgaagggacatcggatttgtatgtggaaaatatgattttggcagccctgtggaaggattggagagttcagacaaggagatgaatcagtttctaaagctctgatcactaaggataaagatagagaccttacaaggatgcagtctcatgcttgtgggtaggttgtccaccctggccagcttcttgacaagggataggaatggaaaagattaacacattaggaaattcctctgtaaacctagccaaggaagcaaggtgaatgactatgatcaggtttatcctagaggtggcctgctcagcacataaccgcagccccttgccataggccagggatcatgagtgctgtaagtacatttcctcatttaatccttaccacagccctcagggagggtggtgaccacggtctccatttcacacgtgaggaaactgaggcacaagagggttaagcacaaggctgttttgcctctaaagagtctccaccatgatgctttcttctagaagatctcattgggagattcagaattgtctggttgtctcaaaaattaaatgtaaaaaagtgatc

SEQ ID NO: 203740 - DNA, 1000 bp, Homo Sapiens
aaattcaaagcgtatatatcattggaattttccgaaatcccttttatccgaaggatgtgcaaactgtgactgtattctttgagaagcaaactaggctcatgaagattggtattgtcagacggattttgctaactttaggtaggaagataaagtctattaaccttgtgttacaaatcatatcctggaagtattcaaaaatattactcaattcccatatttgtgtggtattataccatatacaagtgtttgttcttttatgttatggttttttgtttattggctttttagttcatcgcttaaatgtgctcataaaaaatgtgtatttgccagaataaaatatggtagaaggagctattttgccttaattaaatttctctctttttgttttgttttagtatcaccttttgccatgatagcatttctttcattggacagttccttacaagggctccactcagtgtctgtctgtattggattcacaagagcctttagaatggtaatcctaatatgtgtttaatagtattttcctattgctaagttttattgtaattttgtttaatagtttgcttagattatctaattctacctgataaaaatggataatttgtatactgcaggtatggcagaatacagaaaatgctttattggagacagtcattgtatcaacagtacacttgatctccagtacagacatatggtggaacagaagcctggatacaggactcagactcttactggtaagtgtgtcttttaacagctttactgaaatatattttacatactataatatttgtccatttagtggtgtatattcagttttgtagtcatcaccacaatctaattttagaacattttcaacatcccaaaaagaaacctcaactgttatttcccattccccctctccatctcgcctactacccactgtagtcccagcagctactaatctactttctgtctttatggatttgcatattttagatacttcacatgaatggaattc

SEQ ID NO: 203741 - DNA, 1000 bp, Homo Sapiens
caagcaattcttgtgcctcagcctcccgagtagctaggattacaggcatgtgccaccgtgcctggctaatttttgtgtttttagaggcagggggcatctcaccatgttggtcaggttggtcctgacctcaagtggaccaccagcctcagcctcccaaagtgttgagattacaggcatgagctaccgtgcctggccacattctcttgtttaatacagtacatggaatgttgtgaacagttggcaaattataattgtaattcctttcttattcaagcaacttctcccctgaaaacaaagttgtgagtcttttccaagctgttgaaagttttggcacagaacctcctctccactctgcaagctccttagagaatgtaagctcatcacctcaccaggcagttcttccatagatgttggaagttctggcaattggaaagtttctttatgtcaagtagcaattggcctctatttcagaaaagggcaaagtcaacttccatccactgtagctgaggctgacaccagttttttcttgctcggcagttaacagagtatctgccaagcccgggcttccgtgatggtctacgatgacaccagtaagaaatgggtaccaatcaaacctggccagcagggattcagccggatcaacatctaccacaacactgccagcaacaccttcagagtcgttggagtcaagttgcaggatcagcaggtcagtgctggaattacagattatacccgtgagcctgcgcaccacctcctcaccgcccaccccttacacacatgtatcattaagaggtcagaacaaaaaggtcaatattcggaatcagaggacctgggctcagattttgactccatatcctcatagttcaaagtatgacaccttaagcacactgtttcctggatttcactttttacctgtgtcatatggagacagtaatccgcaccctgcctatttcactgtgttattgtcagattaaaataaataatagatgtgggaaagctt

SEQ ID NO: 203742 - DNA, 1000 bp, Homo Sapiens
attctcccatcctgacccccaggcccatagtcctcctctccaaaagaaacgagtttcttattaacaacctgaaattttccatacataggcaagtataatcaatcatacatatataacatacatacataaaatcatgcatatacatcaatttttaaattatcattttatgacgataacaaagtaaccagagaacctaggagcttcaagcaatgttggagagcatttaccaatcctcttgttttatacaggtcaggaaactgaagcccaattaggtaaattgtccgaagctattcctaaccactgagaagctccgaaattttgtttcttgcatgattttaaagatattgctatctccgaatagacctgagaatatctttctcaccaaggggaaaaaaaaaaaaaagattcctggagtttagtttaaagtaaatatttttcaaactaaagtttctccaactgtttcaatctccattggggtgggagggtgtggtcattaagtttcatctgaaacaacagttctgcctgggcagacttaacagcctatttacatctgtattcttaagaaaactagtaaagtataaactttatgaatttctccaactcctgtgcaggcatagtaaaatcatgcatttgatttcctcagttgagtgcttaagaattcagagagctaacaagccccaacctgtaccctgcataataaacaaataacagtatctcattaggtagctcaagagggaaagttcttggtttcatcaaaagtgaatgaagtctatcgtggatttcttgtaatccacttacaagaatcatgtgggccaatattcactcaattggtatgtgagcagagacatgatgtcaacaatgtctggagataaccctattccaaagccactgtgttcagagagactcctgcagtgatgaaaggtactttactgaatgactgctagtagaatatgcaatgaagtggggagattagataactgaattttaagacacagaattc

SEQ ID NO: 203743 - DNA, 1000 bp, Homo Sapiens
aaatgtatgtgtgtacacataaatatctgaaaataacaaagaaactccgggaataaaaaccagaatgatcagctttcaaaaaaccaaggaaaagaatgagaaaggaaatgtagtatgtgaataaatagacataaaaaacaaagtacagaacaaggtgagagaagattcatgaggaacagccagttgtcatgctaaagtaattactaagataagacacaatttaagaatcatatccctgaggggaaaaagagtatcaactttgtctatcactccatttctagcttggggaacagagtgcccgaagccagtgcccagtgattcctgaattggatgtaaataaaaagccaaaccctaaagacatttcctatgatttttatacatggacgttgaggctggatttgctagtattttgtgaagtttagcgcatctatgagaggcaagattgaactagaatttttctttcttgttttaccattttcagcttttggcatcaatgttagaatagtcttataaaataatgtgagaaagcactgcctccttttccattctctcaaaaagtctatataagaatgtaagtattgggccgggcacagtggctcatgcctgtaatcctagcactttgggagaccaaggcaggtggatcacctgaggtcaggaggtcgagacaagcctgacaaatatggtgaaaccccgtctctactacaaaaattaggcagatgtggtggtgggagcctgtaatcccagctacttgggagagtgaggcaggagaatcacttgaacctgggaggtggagattgcagtaagccaagatagcgccactgcactccagcctgggggacagagggagactccatctcaaaaaaaaaaaaaaaaaagtacttgttctttgaatgattagtagaattctctagtaaaataatgggggattgtgttgttggtatgaatagatttttaagtaaacactcagtttatttaattactataggtctttctatgtagg

SEQ ID NO: 203744 - DNA, 1000 bp, Homo Sapiens
attaagttagtacagcaaacaggcctttatgccttttatacttactaattgtgtgataataaaggagttatgtaacatattaaaacctcagtttcctaattttaaaatagagatacattcatatggttggattgttatacagattaaacgagataactgcaagtgagctttgatttacttcttgttttttcatactttttcctgtgttagtcgtgtttctgcagtttgttaaattcatgtgtacattttctagtggtgtttgaaggtgtaataatccttccaatttgttaatacatttagaatagtgcttttggggctagaagattggtggtgaccatgctgtcacattgtttctcactgttctaaagtgaaagaactttataatgaaaatatttatttcatcatgaaagtgtgtctcttgggacccaggacatcaatgaatatgagatctaagtgtaaaagtgcactaaggacttggcgcaacttccactatcattatttttgcaccattgttaatctgtatataaaataactttttctttccttaaatctttcagaagcccctttgaaacttagcccttaacagatttgtcaactcatgcctgttgctgctgctagcttatttagtctactgaaaggttatttattaatgtctacaggttgctggagccactaactgaaacttaagaaaggtgcaggtggggactcttttaagcctcatgccatgatggatgttcatccagtcatcatggttaccatggcaagcactggctgctacctgtttcagcagcttcctcctactctttcctattttcagactgctatctacattttacaagctcattgtcaccttgtttctgccagtgttacctaattccatccttgatttctatgcttctaattgaactttcctgtttttatttttaaaggcaccaaatctccagaacagtcttaaacaatgttataataccataagctttaagtatcatacaataatagc

SEQ ID NO: 203745 - DNA, 1000 bp, Homo Sapiens
gagatctgcctgggcaatatagcgagacctcgttctccacaaaaaggaaaaaaaaaagaccaaaaaaaaaaaaaaaaagaaaacggtggttctggcactaatttttgagaatattgttatgcatagcaatagataactgttagttttctaggacccctgtaacacagtaccataaactaggaggcttaaaacaacagaaatgtattccttcccagttctggaggacagaagcctgaaacaaaggtgttggcagggccacaccccctctgaaggctcagggggaacctgtgccatgcccttctcttagcttcccatgttactgcgaatctttggcatcccttggttggagacatggcactccagtctctattcttctgccacctgacctcccctctccctgttcacatggcgttctcttccttatgtgtgctcgctctactcttataagaatactaatcatagtggatcagggcccacccctcatcttagttatatccatgaaatatatctgattagatccatgaaaaccctatttccaaatcaggtcatgtttacaggtaccaggggttagaacttcaactttttagaggacataattcaacccacaacaatagtcaaaacacaaagatttgagtacaagttgtttatttgagggatgattctaggaagctccagtgggggctggtgggaaggcgggagggggaaggtaagaaggtcagaataatgggcatcgtggccctgtgggcactgggagtcaatgccaccaggaaaaatctggcagacagtgtagaaaacacctcaaagtgattctctctgcactgccccctccctcaggggtgggcaaggtggacaattggtccttccattcccatctctcactggctgagggctgctgcctgggagcattaacttcctcgcacttaaggctcactgcccaaaaccaagagcaatccctcaagtgaagagcagcaggtgcttgcagcagggccctgcgggcatc

SEQ ID NO: 203746 - DNA, 1000 bp, Homo Sapiens
agcatcaggtttcttgctactgttcttttctactttcatggttgtctgaacataatcaaaaaaaaggtttaaaattgtgtattgtgtgatattttaggagtaggagaaggtacctagctttctaaaatatattttttagtttcttaagaaaagtcacatgagaaaagcaagggccagaaccactgactttccatagcacaagtacaaggctgctatattttagtgagcctgcaccagtctttacatcatataacatgatgtacaagatagcttgcagcttgcatctaccctgagaaaaccttcctactcagttttagatctcctccatgtgctccttactccattaacaaggcctgctgctactttccttcagaactagttcaaagaaaccaataaaaaccaaattgtttctatgcctactaagatctgtctctgatttctgactgaaatgatacaactttcctctcctgttaattgactttaagatgttcatctcatattcaagcaaaactacatctgtgccaaaagccactttatcccacaggtaccaatgggataatggacattgaaataactcaataacacataatataataaacacttggcatctgaaggataaattttttgaaatcctgtatttcctgttagcaatataaccaattatcttggttttcctgctgagggtcttcccaagatgcagaatttttattgttaaaaatgaaaatgctgggaccctgcctggtaggcagtaaaatctatggagtaagatccatatttgattttgcattcctagcaccctgaagtatattagaagaagatcaggtttttaagaaatgtatactcaatgtaaacataaataatttattatcatggttcagaaatgggataaaacaagagctagaattcacccacagactttttgaaaagatttcataaattgcagatattgcctaacaatggaattaggttaacccttattgctaagtgatctgagctcttg

SEQ ID NO: 203747 - DNA, 1000 bp, Homo Sapiens
acttgtttctatcctgctttagagcacagggatatatgcagaaggacagccaccctagagtagtttttgaatagttacacaatggaaacaatgaaatgtccaataacaggggattggttacataaattctggcccatccatgtgacaaaatgccaggcagcctttgaaaaataatagagtgtcatggaaacatggccagatttatattgttaagtgaaaaggataggttgcttttcagaagaatgtataatgtcatcacatgtttaaaatgcatattttggggccaggcgcagcggcttacatctgtaatcccagcactttaggaggccaaggcagcagaccacttgaagtcaggagttcaagaccagcctggccaacatggttgaaaccctgtctctaccaaaaaatacaaaaattagctgggtgtggtggcatgcacctgtagtcccagctactcgggaggctgaggcataagaatcacttgaacccgggagacagggattgcagtgagccaagatcatgccactacatttcagcctgggtgacagagtgagaccttgtctcaaaaaataataataataatttttaaatgcatatttttgtgtatgttgcatatatatgatatatagagatatagcttatttagtatatattattttctaattaataaagtaatgcttggttgatgcaaaatattttagtaattggaaatgagacaagtgagaaaccgtttatatcctgatcaccctcacgttaacactgggtggtaggatgaaacctatatcaaccgcgtgtgttgaatctattgcagtaagtatgtaacactttgatagtaagaaaaaataaggctattggtaaaattatactcttttataaattggctaattattttgtggatgtgtgtcctggtatccccaactagactgcgagatcaatgagaggacgagatcaataaaagcattgaatgaatgaatggatggatgaatgaatgaatgaattc

SEQ ID NO: 203748 - DNA, 1000 bp, Homo Sapiens
gtggctgcctctgccctggaggcctgtgagggtcagggtctgagggtctgaggtgcactatgacccgggggcactgcctggccacggctgagactcgcagagggtctgcagttcccacctgcctctcggaagctgccctgggtcagccgtcagtggtgctccgccttgggttttctattatcagaaagtcattgagcaacagcagtgctgaggacgcaggcagggctgtgggcactgcaggggccgctcccagtgtccacacgcgtgctgggctctgccaaggtgtgggaagcctgtgtttcaccctgaggttgtcctggtgcccctggtttggcccctccccacctcggggccctggcgtgcattaagggtggcgggttcccatagcggcctccctcagctccctctctcttcactaggccacggcatatgcctccaaggacggggtcctcactgaggccatgatggacgcctgtgtgcaagatgctgtccagcagtaccgacagaagatgcgctggctgaaggcggaggggcctgggcgcggggtcgagcaccccctatccggagtccaaggcgagaccctcacctcatggagcctggccacggacccctcctacccctgccttgccggcccctgcacatttaggatatgctcctggatggggactgggctgtgcccagggcctctgtcccccaggatgtcttgtggtggcggtcggccgttctgccccccagggcaccccctgttgtaggcactggctagggaggggcaggcctccttcctgcccctcgagacactcttgggagatgcattttccgtctggctcacagggggagggtgaggctttgtaccccagcccctgcccaggccactgtgagggtgggtgctggctgagcccctggggcagaaggagtggggcaggcggggtctttgttctcggctcccacagcagagccaggtgagggggggcctgccaggactagacagaagtggggcggc

SEQ ID NO: 203749 - DNA, 1000 bp, Homo Sapiens
ctcatcaactgccagagggtttctttctttctttttttttaagatggagttttgctcttgttgcccaggctggagtgcaatggcacaatcttggctcactgcaacctccgcctcccgggttcaagcgattttcctgtctcagcctccggagtagctgggactacaggcgtgcaccaccatgcctggctaattttttttgtatttttagtagagatgacatttcaccatgttggtcaggctggtctcaatctcctgacctcaggtaatccacctgcctcggcctcccaaagtgctgggattacaggcataagccactgcgcccggcccagggtttcttttacatataatttctatccttcactcccctgctccaaggttttccatagctcccaccattttcaggtaaagtccaaactccatctgcacattttttaagttgctttctggggcagagagtagcctgggaggcaggtgagaaagggttgtggaagtgcaagttcagtaaatttttgatattttgtttatcgtggatttttgcactattttcatttaaaaaggccaagcgtggtggctcacgcctgtaatcccagcactttgggtggctgaagcgggcaggtcacttgaggtcaggagttcaagaccagcctggccaacatggtgaaaccacgcccctactaaaaatacaaaaattagctgggcgtggtgacaggtacctgtaatcccagctacttgggaggctgaggtacgagaatctgagaggcagaggttgcagtgagctgagatcgtggtgctgcaccccaacctgggcgagagagtaaaactgtgtctcgaaaaaaaagattttttttttttttgagacagagttttgctgttgttgtccaggctggagtgcaatggtgtgatcttggttcactgcaacctccgccccgcaggttcaagggattctcctgcctcagcctccggagtagctgggattacaggtgcctgccaccccacccag

SEQ ID NO: 203750 - DNA, 1000 bp, Homo Sapiens
gcacgtcactagcattttcctgtatctgggtattccctccttccaggcaaatcgcaaacagcacgtcacaaccttttgcaggtgggtggaactctgactggttctgacaaataggctgtaacaagaagggaatgatgggtgatgctttcattctgggtcgatgaaaacctcatggaccatttccagtctctctcccctggatggagagtacttccaatggtgcagacacttcaccttgcaaagggcggttggcctgatgcatctcctgcatcagaagtgaactgccaatggaaaacaaaaatgactttagtgtattcatcagtgagatgttggggttctttgttacctgaaacaaagcacagcctgtctgatcctgttcaacttatagacagaccaatagactccaagagtgcccagaaagagatctacccatgtatgaacaattgatttttcaacaaaaagtgaaactgcaaagtagtggagaaaggacagccttggtccaactgaatattcatttgagagaaaaaagtagaacttgtctctactgcatgccatacacagaaatcaattctaggtgggttattaaccttatttgaagggcaaaactgtataaagctttagaagaaaatatgagagaattctttatgactcaggaaatgatttcctaaataagaaacaagaatcattaaccataaaggaaaaaatagttcaattgtattctattaaatttcacaagaaaaaaaagttttgttataaaaggaaataacaaagtgaatacctaaattttaataattgttatctctgggtgattacaggctgaatttatttttctgattttgcttatctcttttttccaattattctctgacgaatatggatctcttttgtaatttaaaaaaaaagaaaaagaaaaaactagaaagttgttagtttttgtttatgtttgtaattaagaagaggtggtaatcccagcactttgggaggccaaggcggacggatc

SEQ ID NO: 203751 - DNA, 1000 bp, Homo Sapiens
ttttaaattaagaaaaaaactttatagactagaatttgggcgttaggaactgacttctttcaaaacaagagggagcataagcatagcttccaggaaggctctgaatgccctctatgcagcagctccctctagctttaaattactcatggctatacttggctttgagccttaggttttgttggaagtccatggcagatttggaaagagaacttcagatttctcacttctgaaaccctgctcatctgtttctcctgtctctgcctctgcaaggaggaagcatgactcaggcaacactctgtcatcaacagaagagaggactgacaaagaacagctccgataagtccctggggacttgaacagtgccttcctattctttaaaaaaatatcctcttaagacatttaacgtggagccaccagcacacaaccaaagaaaatggtcttcaggttgagatatggccaagtgaagcaatttgtgggagaggaagagacccaaccattagcacaaattattctgtcattcaggaaggaagctgtggaggcttccttatttctcatttgtctgggtttaagtatcagtctactaaatgctcgtggagtgaaaccctgtctgtttttgattcttggtatgaatatagataatgaaagagagtttctagattattttcaggagttttcaatagaagatgtcagaaatgtttccaaaggcataataggcttgtggctgtccatgttccaataaggagctcaacttgatcctttaaagtgattcttcctgtgaagaaagcgggctcagcaagcactggattggtcaccccagtggagacaaagggggctacgtaagtccatggagaagggatgaaaactatcttggaaaaaattcagccagagcccaaagagtcttctcctggctttgcagagggcaagaccgtctgtaatggaacttcctcatgatacttttgccttggaaagcattatgtttctctctcccttgggtgaattc

SEQ ID NO: 203752 - DNA, 1000 bp, Homo Sapiens
tggccaggatggtcttgatttcctgaccttgtgatctgcccaccacagcctcccaaagtgctgggattacaggtgtgagccaccgtgcccggacaaaatagtctttattttatatatataaatattatatgtaagtatattcatatataaagatatttaagggatatatatatttatttaaggagtgaatacacacacacaaattatactggttctgtttctctgaagaatctgatacaactcagatgagccttattagtggagtgggattattcatgcccgctgggagcaaattagatcaatgattctaaaacaatgggcctatggaagtgcatcaggcactgctaatggggagaaggaaggtgctgacagctggtactctgttcccccttcctgagcttcaaccagagtgacttgacttctgtttatttcatatattggagggtggtatgaatggtacttaaaaaaattccagtgctaaaaataaaacttacagatttatggttaagatagaccaatatctcaaagtttaagtatgtatggtgtctgcatgaaattttttacaaaataatttttcattgatgatgaggtcatatctcaaaatggtccaaatatatattttgtagtcaataagatattcctatgataaggattttttcaggacatattccatcccagtagcttgatgttacccagctctatagttttataaatatgtaggaaaatacaatttactttgtttcccaaatgtaagtccatcttctgaagtggcctttaattatggcagtaatctctaaaatcataaaaggcagggaaatgtgtatttgatgtcatgttcctgatttgtttttataagattcatgaaaagactaaaccaaggtgtggacacaggatcggggactagatggatcctcttttggctgttatagcaggaactataacaggaagggactatgacaggaactatagcaggaagaaagaaaaacgtgccttggaattc

SEQ ID NO: 203753 - DNA, 1000 bp, Homo Sapiens
atgcaactctgatcaaataacagctgtgttgggggaagggagattcagctggaagagtttaaacatgagagaacaatcagagaaaatctgaaaaaaaaactacctaccaggttttaagatataccataagactacagatgctattcatataatagtatcctatatctataggatatagatctatatcctatatagtagtatatagtagaatactactatactagtagtacctgtagtcttatagtatgtcttactataaacagatcaatagaggagagatcagaaatagacccaaatacatgtggaggattggcataagatacacttgtacttcaaatggcagtggggagggagagctatgccattcagtgaatgatgttaggaaaagtgactaggcaatgtggaaatcaataaagctggactaatttcttcaaccaaaataaatttcaggtagctcaaatatttaaactgaaaaagaaacttaaaagtataaagaaaaaaattggtcacttttcatttattttcaatcttggccataaagcccatatgtcataaaagaaaacactatacaaagacttaacatttttatatgtcaaaaatgtcataaagtcaaaatacaaacatcacgttgggaaaaaatattaaataaaaatatgacaaagaactaacttctgtaatacacaaagagctcttattaatcaataagaaatgaaccaatatttaaaaaggaatataagcttaaaggatatgaagaagttcatagaaaaatgaaatgtgtggctggctagtggctcatgcccataatcccagcactttgggaggccaaggcaggaggatcacttgaggccaggagttcaagaccagtctgggcaacacagcaagacctcatctctacaaacacacaaaaaaataataaaaataatccaggtatgatggtgcgtgctgtagtcccagctactcaggagattgaagcaggaggatcactggagcccaggaattc

SEQ ID NO: 203754 - DNA, 1000 bp, Homo Sapiens
actttattgaagcaaaaaaaagaaatctcaagtaatatttaattgcttttcaaataataaggcatgttatctttcctttaaaaatagaaagtattttcttttcctttccctgagctagaaattctcacttataaatgcccttttgcatctgtgttgaaagcagaatttcagagctatgtctgcacccggccgtgctggccagtgaggcccagggagctcagggaggaatgtccttgcatacccaaaatggcgctcctgaaagtaaaagccactacttcttctgaatatgaagaccaaatatcccatttaaagaagctacagtcaccttaacctgagataggaagagggcatttcttgagaataaaatgaggtgaagtctgcagttcagaggcccctggtccctggctgacaaggtgtcaaaatgtcagtgtgctcattgggtgaatcttttttcttctcaaagcacaccactcgatacgcttctctcagagtcagaagatagagaaatctcacttagttagtactcatttactcaaacagctaaatccaaggcagaggaagcatgccctgaggcaggcctctggggatgagatcacacccttagctaaccagccaggaagagcagagccccagctcaaggattggagagcttcaggaggaactatgacaaggccagctgtcccagtgactaaagggcgagacagtcttgccatacaaaagtattcaaggcaacagagttcagctacctggaacagattaggaagccagaatacacaacattccagaatgtaaacaaccaactagatttagagacagtgacaacatcctcctcagaaatacatcaacttattgagcccacagaagaaggtacttcatacaataatttttttttactgatgcttatgattgcagacttttataagtattgcttcaagttacaccaaaaaaaaaaaaaaaaaagaaaaccccaacatgagatgcctctcttttgatggaattc

SEQ ID NO: 203755 - DNA, 1000 bp, Homo Sapiens
tctaggggtggtaggagacagtgacagatttccaggcattagattctcataaagagcctgccattaatctacagcatcagtgttacgctgtagaatggttcagaatcttagccaccgagatccctcgcatgcgcagttcacagtgtggttcatgctcctatgagagcctaatgctgccgctgatctgacaggaggcggagctcaggtggtgatgctggctggcccacactcacctcctgctgtgcagcccggttcctaacagataccagtccgtggccctgggggttagggacccccgtcttacagcatccagcggggccaggcacttggttaagtagatccttgatgactgaaacgtgacaatgctgaaatggctgtggagtactgtttggagtttgtgggggtggggtttgtaaactggagaactttatgttagagtttcttattattgacatttgaggctaaataattctttgttgtctgagtctctcctccacggtgtagtatgtttcgcagcacctctggcctctaccctccacgtgccagtagcaccttccccaagtttgttgtcctcacagacaaccaaaaatgtcttctctactcactcccaaatgtcctgggggggcaaaatcactcactgcggagaaccatggcattagggtgatggagtagaaagcctgctctactcagaaggacttctaagtgccagaaggtgcaggtctgctctctggggccactcagtgctttgaaggacacctgatttattttggagatggacacttaactgctgaatacactggcatgggtgggtggtcccatcgagagtttttctcaaaggttttcaatgactcctcttgtgttctctggcctatcctactccagctctcaattctgctaggcttgagttccagcgtcagagcctttctgagcctctcttctcagtcttagcctcccctccttccctctctctccacccaccttctggccgtctgggaagctt

SEQ ID NO: 203756 - DNA, 1000 bp, Homo Sapiens
agcacagacgagatttcagacattttttctctatgctttatgctaagctgtcagttttccaaactagggaatatttctctcagctttaaagcacaggaggctgctttttaagtcattaaaatattctctttgttctccactacactcctggtttttggcacctctggagatctctgcactgctgctctgctttcatccttcagacagtgactacagaaaactgccagagtgccatgatgggatttctctcagctctcctgccctgttctcagcctgtaacaggccattgccttgctttgtggaaaaaccacaaataccttagagagaagtactattggcttttctagcctattcttggccttctgcctaccatccttctgcacttgaacatccatgggaataacctggagactggtgcagggattgctttgtggttggagatccttattattctaaacagccaacatgtggccattccaaattagttaagttgggctactttcttctcactctgacaatgatagattcctcctcttgccagcactttgccagggatgaaagcaggcctcagcttgttctctcctgaaagggcttgtcacttactcagctttatttgtgtgtgtgtgtgtgtgtgtgtgtgagagagagagagagagagagagagagagagagagagaaagagagagactggctctcctactagctcaaaaaataaaaaaatctatgattttgttttttactctcatttttaaggcaggtgtgaaggttccttgcaactttctacacatgttgaatcagaaccttacccctacttttaaggcatgttgaattccgaatgcatccttcctcctggaacccaaggttcctggccaacctggtcaactcatgtgagcccatttggtagccctggtagcgcatatcaagcattttactgaaagatgtctcaggcaagctctgagtttggacatcctagcctaccctgaaactctcagtggaattc

SEQ ID NO: 203757 - DNA, 1000 bp, Homo Sapiens
attctttatatgtttaccattacaaacatataaacaaaatactctgaaagatctgaatggaaagtattatatgaaattttatttttctataaatattgaggtatatatataattattttttgtttttatttcttagctacatctgctggaatgagatgtatgatgatttagagttggttctcttaagtgcagtatttctttaggataatcagtgatagtgcatatatgattgagctactgttgtgaacataattgatggcagaatgccttgatgcagctcttaccaacaatttatggagattaaaagggtggtagaactggtgggttagaaattgctttctaaagaactggaggatcgaagagaaacctggggtttccagtgccctctgaaataatctttacataaaacccaggtttagtaggtacaattgttgtttaagtgcgctgctcatgaaaaaaatttatgtggcagaaatattatttggtcatggatattgtatgaacaaatcagggcttctgtacccatgttaaaggaaaaatggagaatgttctgtatatttaatatgcacatgtgattgtatttaactttataggtaataaatgatacaggtaaacacacttatgaagatcaaacacatttcacgcccaagaaagtctaatcacgaattgtccttagcttcctgtatatggattgtcccgtttccatatgttcaagcaagatgtatctctctcacatagatatttttacttagagactcaagaggacatatgtaaggcaaaaaaaaaacataaacatttattcttcctctgccttgatatataaaaaatctgaggcagtttataaataaatatatttgtgcgctttaaacatttagtaagactcaagacctcataaataaggatcttataaaagagtaggaaattaagatataagttgaaaaaacatcaactaaacaggctataaagcctactgaattcctatagttgagcctcacatttg

SEQ ID NO: 203758 - DNA, 1000 bp, Homo Sapiens
ctatgtgctagtgcctttgggaagacctttctctttcagttcagaggaactgagcttcaacttgttaaaaacaatgatgcatacagttacgattttgggtaagttgatactgttctgcttggcagttgcacactgaatccccaaggctatcctggaagacatacatttgattaggaagcataatctagccagactaaataaattttttaaaatgttgctgttttctgttttaattttctttcaggaatgcgctataaacgaagaggagtggataaaaatggaaatgttgccaattatgtggagactgagcagttgattcatgttcataatcataccctgtcatttgttcaaacacgaggctctgtgcctgtcttttggagccaggttgggtatcgatataacccaagaccgcggctggacagaagtaagcaggtcaattattgggtttgcaaatgatgatttcagagagaatagtttttaagaaattagttacctgttaggtttggatttgctttgccagatacttctttcaaaacgataacttgtatttgaaaaatgtaatagaaagtaatgtaataatcatagtaaaaatagttgactaagtcatttatttaacaataaaaaatttctctaacagtagagcaaaacggcttacctcagagattttaaattgctatcgctttgaagagtactttattgaatgtttaactttggaaaggagcgaatctagccaatatttgtagaagcaggaactatcttaagatggaatctaccaaaaatcaataagatgcctttactcaaatatttttctgtgaaagtttttttttttgttttgtttttcttttttaatcgaatattttgtttcttctagtattttaactttggtcttggaatagctaagtcatttaaatctaattagattactgaatgagcttgattttaaaaaaaatgttaaagtaaatttctctctcaacttagttggtattctttgtgagaattc

SEQ ID NO: 203759 - DNA, 1000 bp, Homo Sapiens
cctcttggtacagactatgtttgaagtttcgttcctcaaacgtgtgaacttgtgcacgcaatacagcaagggagacacgggaatgataaagaaggataagacgtgaaagatacagtctaactgctaatattgtttcgtgtatgtaccttttaataagagtaaagcttcccagctaaattgggttggggctctcggtggaatttccgatatcagctagtacaagagaaagtggagccaggggtgggtgggctgggaatggcattcagccaggctggggacttgctggaaaggcaaattctcaggctgtattccaggagtactcgggactggtcccagtgctgttttaaccaacgctccaggtgattctgagcactcgctagttggagaaccactgggttagggagctaaggtctctcaacgctgcttgagaagggctgccacaaccgccagtgaaggagatgggttgagtgattgcccaggggcactgggctggtaccaggaagggtgtggatttgaggccaagccttccaattctaagtccagggacttttatactctgccaaataatactagaaacaaacaaaatctcctgtctcacccaaccttttaaatttaacatgtgaattaacttagctccataaaaacaataaactacacttgggtctttaatatagaaaacagaacaaactgtttaacaccctgagaagattcagcttcctcacttgggctaatattgttaatttagttttgttgggggaattagccacctcttgctttgatgggttctattctttctaccctgccctgcccagcatgaggaataatctctagtcccgcagtggtgtagagctctgtctattctgggatgagactggactttcttgtcttttgttcaggcaggagcaatggcattgaaaagttgaaagacaaataaagtcagcaggagatagacttttgagattctagcttttgaagctaaacagattgatctaaggaattc

SEQ ID NO: 203760 - DNA, 1000 bp, Homo Sapiens
cagtgaaagttggaggagtcagggaccatttcatggaaaaagtgagtgttgagctggcatagcggggatatggggatttgcacaggcattgcacagttcagaaggcaccaggcaagaaaggccatgtaatatagtttggctgtgtccccacccaaatcccatcttgaattcccatgtgttgcgggagggacccagtggaaggtaattgaatcatgggggcagggctttcctctgctgttcttgtgatagtgaataagtctcatgagatctgatgattttataagtgggagttcccctgcacatgctctctctttgcctgctgccatccatgtaagatgtaacttgctcctccttcccttccaccatgattgtgaggcttccccagccatgtggaactgtaagtccaataaacccgttttcctgtaataattacccagtcttgggtatgtcattatcagcagcatgacaatgaactaatgtagacaaaggcacaagggtgggaatcagtacagtctggctctgagacagtgaggtgaccagactggccagggcagggagcatctggagaggttggaaagcaaggttttggagaggcagaccgagaatggactatggagagtcccaacaaacactgggtggattgtgtaggcttgatgtggtagaaagaaatcctagaatttagagatctagagatcttggaggttgactgaagttcaagtaccttacccaagcacccagggcaagttagtgacagatccagataagcagatttcttgacgtcttatagtagtccattctcacactgctataaagaacttcctgagactgggtaatttatgaagaaaagaggtttaattgactcacagttccacaggctgtacaggaagcatgggtaggaggtctcaggaaacttacaatcatggcagaaggcaaaggggaagccagcatgtcttccatggcagaggtggagaggtgccacacacttttaagcaatcagatc

SEQ ID NO: 203761 - DNA, 1000 bp, Homo Sapiens
aagttacgtattttatttaggccaggcacagtagctcatgcctgtaatcccagcactttgggaggccgagatgagaggattgcttgagcccaggagttagacaccagtgtgggcaacatggcaagactcagtctttacaaaaatgttaaaaattaggccaggcctggtggcacatgcctgtggtcccaaatattcaggaagctgaggtggaaggattccttgggggtcgtggctgtagtgagctgtgtttgtgcccctgggtactacagcccaggtaacagagcaagaccctgtcttaaaaaaaaatgttatttttcagtaaatcaattattaaacatttacacttattgaatttatttaacaaatactgagtgtcttcatatgcccagtactattctaggcccttggtatatagtggtgaattgaacataacaaaaatgcccttatggagcttcaattccaggggtgtttgtgttgtctaaactgtcaaagtgaagactattttaattgtaatatgaatggtatgttcaatttataccatttaatctttcagggtttttaaactagaggcaacttttttttttttttttttttttttttgaggcgaagtctcactctgtcacttgggccaactggtgacaacttcttttatttatttatttatttattttttttttttttttttgagacagagtctcgctcagtcgcccaggctggagtgcagtggcgcaatcttggctcgctgcaaactgtgcctcttgggttcacgccattctcctgcctcagcctcctgagtggctgggactacaggcacccgccactaaggccagctaatttttttgtatttttagtagagacggggtttcaccgtgttagccaggatggtctcgatctcctgacgtcgtaatctgccggaattgacctcccacagtgctgggattacaggcgtgagccaccgtgcctggcctgtggcaacttcttaatagctgaagttgaattc

SEQ ID NO: 203762 - DNA, 1000 bp, Homo Sapiens
tgagttgagatttcgccactgcactccagcctggacaacagagtgagactctgtctcaaaaaaaaaaaataaagaaaagaaagtaacaaaaggtttgaatgctcctgcaaatacagtcaaacagggataagttcaactgagatttttaaaattttgtgaaaagtcagataaagagacatcatcttctcctccaaacagaaatgtcatgactgtgcttgagggatactttcaagatgacacaaaaccaggtttttggagtgctttgaagatggagaatggcttattaacactagtcacattggcagatgtttttcataacatcaaccagttgaataagcctctgcacagccctggagaaaatgttttcaccaaaaatgtcaagagtttttggatttaaaagaaaactaaagttttggaaaaaaccatgaggcaaaagaaatccttgagatgtttccattgttgcttgggcctggggccatcagtaagtctcaattcttattgagcagaacctggcagcactgtagaatgaaactgaaccatacctaccctctctttaaacacaagtgcatgaccaggcgagggagcgtttcgttgaatctttgactcagtctgagaacagagtctggagagaagaggaagaatcctgcaccccatgcaaccccagactctctagatgggactcacatatcactctggaggcgagtcctgggtttctgggtaagagagtgctctgtcagcctcagggaaaccatgaacacttcactgcagttgcaacttcccgcacataggaacaaattttctgttatttaataaacaccaagagcaagggaaaaagttgtagcccttcagttgacaatgacatctgtgtgtacctcaagtttgactcagaattgaatttttaggcagcacatgtgtcacattaaagaaggtcaagttgatcaccaatgaccaatggtttaatcagtcacggcttcgtaaaaactaaaaaggacagaattcc

SEQ ID NO: 203763 - DNA, 1000 bp, Homo Sapiens
aaccttagtttctaagttgatctttaaaaaagtggaaatagtttctgaaacaaagacaatattttacaaaaaattttagaaatatctttttttaaagcacctgtaagataatttgaagctcttttagtgaaggattgttttaaataagagctctcagttcaagacaactactgttaggagcttaaatcggaaccacaatcagcatataaaggtcctaatcctgaccttaatccctttggaatattggttttataaatcatcaatcaacagtgttccactatgaaagcatattctgtcttcttcttttcatgtattccttcactgctggtgcttaatgtctttccttcctcttctgccatttctctttccatgaattataattgccttttgaattcagaaattaaaaccactccacagaattaatttggaaggggaagaaaagacctttgtcttaacgaaccatgaagaggcatatttccatgcttctgtcttgattactggaagttttttaaagtacaatttgttattttagtttttgttttcagagaggctaccatgctaacataaaaacattaggcttacttaaattcacagtggttattttaatagttgttagggtatcggcaaaatactctaacgttttgaaaattaaaccttttttttaaagcagcatataagaaaatggaaattaaaaatttgagagaaagaatcccggattttactgtcttcaaatttgggaaaaacatttctatttcttagagttcagtagtctctaaaatggaactgttttttaataacgtgtcagtagtcataaactacagataccgataaggagatggcatttcaggagagaaaagacaaattgtcatctgagaccatgagggcagatatttactaataaatgtaaaaaatgtgaggcagcagagtgtagtactgtatgaagagagagactctgtagccagccctgaagggctgcattcagacggcagggattgaattc

SEQ ID NO: 203764 - DNA, 1000 bp, Homo Sapiens
caactgctaataccacaaacagaatgaacctggggatttcacctctccaagtttatacgtcacttcaagatgaaaacaggcagctagctacgaagaggacaccacacacatttgcaaggtggcatcaagagcctgcaagtatcgctgctgccattatcatacaataaaacatagagagtggggtgtagagattcacgtaattagctgccctcagttttctcacttaggggatcagatgaattccttcaatgcatttatcatgtccagcccattcttttccagcaggctttctccccctcagcactgctggcaggctgagcctggtaattattggttatggggctgtcctgtgcattgcgggggtttagcatcatcgctggcctccacccactaaatggtagtagcaactcccatggccctgaccaaaaatgcctccagatattgccaggtgtcccctggggggtaaaactgcccccggagagaatagtggctttgtagcaactaaattgatcatatctatatgggctttgaccactcccttgagaccaatgtcatttctctcatctgtatggttttctttctttctttttttttttttaattataccttaagttttagggcacaagtgctgtatggttttctaaaagcttgacaccctgacagtctcccaacaagacagatgaaaagttattagagaagcctgcttaagacactctgttactgttcaaatgtcgacttgctaaagcagaagaaaagcaacatggccaatcaccaaacacaagacctcaactcctgatgtcctttcagccttcctttcttaccctccaattcctgatgtcctttcagccttcctttcttaccctccaattcctgatgtcctttcagccttcctttcttaccctccaaaaggaatttaaggattaggcatactttcagttccgaaaagccaagtttggctccattgtcagcaccagctctgacatctgaaaatgcactgatc

SEQ ID NO: 203765 - DNA, 1000 bp, Homo Sapiens
tggttactgtagccctgtagtatagtttgaggtcagggagcatgatgcctccacctttgttttctttgcttaggattgccttgactattcaggctcctttttggttccatatgaattttcaaatagtttttttctaattcagtgaagaatgtcaatggtagtttaataagaatagcattgaatctataactctgtctgtagaatacaggagggggttgctggaggccctggcttggaggacccacccagcaaggaagaatagattggggtcccatttaatgaagcagtttggccatgcctcaacaaaacagctatgccatgctggggaactgactcttccctagttagcttggactctccaaagctcacgaagatggaatggccaagtcatccaaacaacaaagacagcagcctgcccttcccccggggtacttcgtcccagggagagattagagctctgtccatagaacacaggcaggggtggctggaggccctgctgggaggtcccaccaagtgaggaggaatggacagggttcctgcttaaagatgcagtctggccacattttgataaagcagctgtgctgtgctagggagtcccttcattggctggaccatttggactccaaggcctgccagctggaatggctaagtcatccaaacagcaaagatggcagcctgcccctttcctgggcactctgtcccagggagagatcagaactctcttcataatactagctgacaggggtggctggagacccctgctgggatgggtcagtgttccatttaaagaagcagtctggccacgttttggtaaagaagttgtgctgtgctggagggaagggtcccttccgcatctggaccatttgaactcttcaaagcctgcaggttggaacagctgagtcatccaaacagcaaagatggcagtccatcccactctccttggggtccctgtcctgtctcaggcaagctgtaccctgttgcgggtggctggctggaattc

SEQ ID NO: 203766 - DNA, 1000 bp, Homo Sapiens
cacctgaggtcaggagttcgagaccagcctgggcaacatggtgaaaccccatctctactaaaaatgtaaaaaatagctgggcgtggtgttgagcccctgtaatcccagctacttgggaggctgaggtgggaaaatcgcttgaacccaggaggcagaagctgcagtgagccgagattgtgctactgaactccagcctgggcgatggagcaagactccatctcaaaacaaaacaaaacaaagaaaaaaaaagaaaagaaaatcaggagatctgaagtctagtctccgcttggccacagtcatcatgaccttaaaccagtccctaaatgtctctgggatttctttcctaggcagttgcatgggaaaagcattcccttccgtcacctgccacagaggtggtgcagcctttgagatcaaggttcttgatggtgcttagcttagtgccttgtaagcacttccagtgggtgttcagtaaatgcttgtttatcgggtttcattccggggtcaggtgaccatggctccaagttctaagcgctgcagcctctccccgcgtgtctttgccagagtttgttactgaggctggggtcaggctgagtcacgctgccggccactgtctcatagatacgagattgtttggaaatgaagactgggcaggtctttgaactttgcttggcttacacagattcactaatcattcttcctaagcccaggtgctccaaagacgtgactccacagataaggaaagatgcacaggccaaggttcccaggagggcaaagcgtgagcctgggctcaggatgaggcctggtggcattcccttaggtcagcccactcatttggattcacggttacacttgggcgtggtgtgccaggttaggcagcttacaggagtaactggaaggccctctagtgaaaagtcactcaaaaaaccagagcaattccattttcaggcatagaaaaaaatagtgctgattgaaaattcagtatctattaatgcaggagtca

SEQ ID NO: 203767 - DNA, 1000 bp, Homo Sapiens
gcctagcctgggagggtgccatggggtggcccgggaactcagagtccctgggaggtgatttataagaggcaagacaagagataaattatggaggagggagtttgtagcttcttcataaaaatcctggtgcctggcaattatgaggagaaaagccatggagcagattaatgcagtgtcctttgcttgctattttgctagtttatgttccattgggtttgactgttcctgtccagcccccagtcttgcccggcatgctgctggccaggtccctgagcactgagatcctcattcctttgctttctctaatgacactcttgggactctgctgttggcctgccctgagacgtggtgattctagaacaaacagtcatcctgtggggagtgtgctggcgtggaggaaagtgtgttggggcctgctgcagtacctacccagttcccatgtctgcttgcagaaggggagctggattcagccttgcctctaaaaagagccctgttcactgggaatgtggatccccacacacctccccacataaagtgggcagttgcagacaggctgtgccccagagcctcgagacctccctgggcactaactcatgtattcatccctattggagtctcagtttcagacagggtggagcatgaaagtccctttcttcatctccttaggttaaagggaaccaaacatctgcatagatactcagcgtcccctgaagtctaaagtaaaaggcagcagggaggcagagccagcagttccattttccttaggctccactgcctgagttccatgaggcctgcctttttttcttctgggccctaaagaggaggctttggccactgctacatggaccgcagccttgtttcccgcctctgggcgctggctcccattggtccctcgctcttgatctctcaaggcccccagctgagttccaccttttccctgcaggcttccaagcacgctccagcccttggtgattctccttccttgaacctgagcacttag

SEQ ID NO: 203768 - DNA, 1000 bp, Homo Sapiens
caaggttatacaactattatagtaagagagagtgaggtagaattccatcctgatctgactctagtagctttgggtgtattggtctctctggatgctgagccttcccagtaagattaacttgtccaatttccatgtttcccagagttcaaatgggagtcccatatgtgccaaactatgtatgcaagactgtttcaagggttcagtaattaattcaacaactatttattgatcacttactataggccttataggttccggagatatatcagtgagtacaacagatggataacctcctctcattgatattccattctggtgcacaaagacagaaaataaggggatacagaaaacttaagatggtaaagaaagtaaagcttgattaacaaatagaaaattatacagcatgtgtgtgtttggaggagagagttgatatggaggtgagaggagggttgctaagttcagaggacctggaggagtttgctgtgtctggagttagaatgggatataggctgggagttgaagtgagaaattagaaagtagaatccacaagaaaatgagccacttaactttgagacttagtgtttttactcggaaaacaaggattcagacatctgagatcatgtgtaaaaatgtagtgtaaagctcaaatctgaaaacattaatgttattcagctcatttcttgaacaataatagcagctggtacttttgaatgcttgctgtttgttaggccatatgctagttgctttccatgttaatttcatccgctgcaatgaaaagtagttagggtttttatattttatacggttggatagcagtagattccaggtattaggattgaagcccatgtccagtctgtcaaatttcaaaacccttgttctttttcacaactttgtgcttccagaattgtaaacaggcaactggtagtgaccaagatgagttgagtggtcaacatttacaaggcagttataaaaattactttgcatagcatttatagaattc

SEQ ID NO: 203769 - DNA, 1000 bp, Homo Sapiens
aggtcaggagtttgagaccaacctggccaacatggagaaagcccatctctactaaaactacaaaaattagttgggcatggtggcgagcacctgtaatccaagctactagggaggctgaggcaggagagtcgcatgaacctgggaaaaaccagtgagccgagatcatgctactgcactccagcttgggcgacagagtaagattccgtctcaaaaattaaattaaattaaattttaaaaagtaaaatggatttctgatagaattatctggagtcatgtctagttgatgttggagccatctaaattcacaggtaaagtcatgaaacctaatcacagagcctcacaatgccttgtctccacagcctatggtcgattggagagacacaaacataaaagagacattcttgaatctatgtgctaggtgttgtactgagtgttctttaccatatgtaatgcagttggagaataagtttggctgaaactccacacttttgcaccctgagcttggaaagggtaatctggctttagaacacagctttacacagctgtgtaatcagctttacaaagagcttccctgtgcctagcaaaagatgagtttgtgtacaactgactccttttcggccttcttgaatatgcaaactacaaaatatgcccagatgcctcagggaccaggcaagtaaatgaactatgtccaaccttaatccatttagtcagcacagcattttataatgttttcatttgcatactgttacacaatcctacactctccagttccttacagtctgcctcaaattttcctttactcattctgttcaacagtttaacacaagtcactttattatatagttctgctacctcttttctccctgaaggcatgtgggtttataccagctcacataaatgattcgtgaagctttgcttgtgatgggttgggaaagaaagtgatggggagtggtccaagaaggggtgtaaacattttatctaatccttgcaacaacctaat

SEQ ID NO: 203770 - DNA, 1000 bp, Homo Sapiens
gctatatagctttgatttcagagacaattcaaaaataaaatgtttaaaaactaagccaggtttggtggctcacgcctgtaatcccagcactttgggaggcagaggcgggtggatcacaaggtcaggagatcgagaccatcctggctagcatggtgaaaccacttctctactaaaaatacaaaaaattaggcgggtgtggtggtgggcgcctgtagtcccagctacttgggaggctgaggcaggagaatagtgtgcacccgggaggcggagcttgcagcaagccgagatcgtgccactgcactccagcctgggtgacagagtgagactccgtctcaaaaagaaaaaaagtttaaaaactaaaaattaaattcaaacaacaataaatgagtcaatgtgtatgacatactgacaaaagagttgtttcaagtgattttagaacataatattttgactatgtgtgcttatagagatatattctaagggcaaatagaagtgcaagtaaatgttagagttgactgggtagtttaattttaagcaggtatactgtattactagtattttgaaatttttacatagtgtaggataataaaaatagataattaggctgatgttattaataaccaaaattttcagtatgacaaaagagaaacaagtataaagtcatagccaaaagtgcacaatttgggcattaataagaaaaatatattcattcaattaaatgagcaaattgaacatatgagagaaagagagctccagctcattggacaccattgcaaataccagggcaccaattccttactctgaaaatttacaattaaaagagatgaattaagcactcatcttgtctttcaggataattaaatagctctaattggagagagaaaattattatttactgaggaattccagctaatagatgaataaggaatgacagaatcagaaaaccatcactttgccacccctggtgaaacaattgagtcacacagcaatcaccagagga

SEQ ID NO: 203771 - DNA, 1000 bp, Homo Sapiens
agaaagctttaatctgggactgcccccaaggagaaagggagataaagtcttaaatccatctccccatcatgtcagaggtgttcaaacaggagcaactccatcttgaataggggctgggcaaagtaaggctgagacctactgggctgaattcccagacaggtaggcattctaagtcataaagtgagatagcaggtcagcacaagatacagatcataaagaccttgctgataaaacaggttgcagtaaagaagccggccaaaacccaccaagagggggatgagagcaacctctggtcatcctcactgctacactcccaccagcaccacgacagtttacaaatgccatggcaatgtcaggaatttaccctatatggtctaaaaaggagaagcatgaataatccaccccttatttagcatataatcaagaaataaccataaaaatgggcacccagcagccctaggagctgctctgcatatggagtagccattcttttattcctttactttttttttttattttttttgaggtcttgttctgtcgcccaggctggagtgcagtggcgcaatcttggctcactgcaagctccgcctcccaggttcatgccattctcctgcctcagccccctgagtagctgggactacaggcgtccaccaccacacccagctaattttttgtatttttagaagagacggggtttcaccatgttagccaggatggtcttgatctcctgacccgtgatccgccctcctcggcctccgaaagtgctcctttactttcttaataaacttgctctcactttactctatgggtttgccttgaattctttcttgtgtgagatccaaaaaccctttattggggtctggatcaggacccctttccggtaacatctttctggtgaccatgaagggacaatactggtgagacttcccccgcccaacccaaaggaaacagactgcagcaccatcagttagactaggtatgtaagcgtattcaagaattc

SEQ ID NO: 203772 - DNA, 1000 bp, Homo Sapiens
atgtcttttctgcccctcagatacggttaagtaactgcagacctaaggcaggggctccatccaatctgatggtgggtttgcctttgggacagtaacctcatgtggtaatagaggaagagatcagggttctactagctttgttcttttctgttaagagctcctcagctccctgcccactgctacctcctccatgctaaaaataggactgtctcctctcttggctcactcatattttcctaaggtttttggctactgctaaataagagtgaccaatgcaataggaataagaagcattgctcttatgacctgttccttttttatccaactagatccaaaaaggatagaaaggtaactgcagatactaaagtaattagactttagaaaacagtgtctaagacactctgtattcttatgggtgctccagacaatgaacttgccaaatctgaatctctcttctgtacatgtatgcttttgtgtgtgtgtgtctatgtgtatatttacatatatatatgtttacatctagcttttaatttatttagacctcactttttgttgaaggatgctgcatgagttattgtcatttcactgaaggcagtgctcatggagtaaaaaggtacagagccatataaacaccacatgattttctctttttttgacactagtagcaaaaacaatttttgcaccaaaagtagtttttccataaaaataaaatatcaactatacacatatgtaatgggtgagggtatgcaaatcctaccacgtaagtccagtaagtaaattccaacaattaacaaagactcatttttcaatggccaattaattaaacaattaaatgactatataaaaattaaacctatctacatattagaaatatattttaattcacccatgcctccactgtactataaaatgaatagagaaaatttttatttactggcttaagaaatcaatactacatattcaactgatgtactactgcttaatgagcaattacagaatt

SEQ ID NO: 203773 - DNA, 1000 bp, Homo Sapiens
gacttttacattgtagccattttggtgaggctataatgatatctcattatgagttttgtttctattttcctgattactaatgtcaaccaagaagaggtgaaagagcagactgcaaagcagttagacaaggcattcctggggtcttagaaactgcaattcaggagacacaggttcagctaaaggccaataagtgttctgaagagaggaaggggagttgagatttttaaaaggaagctaagggcgaatacacagttgttgtgaaagaattattgttggaggcggttggcttagtacatgagtccgttgagctcattggttgtcgctcttcagaaggtgcagcactggcaaaatctagctgttttccaggatgttgtggtcattgcagtttagcccagttcagaggttcaattcaagttcctgttttttgtttttgtttttgtttttcagcatttgaggtcatgcaggcagtccttagaatggctccctgactctactttagagctctggaccagagtgatatcatttttgtatgtcacatttcacattagtgggatcgattagcttttcatagcatcattagcttttaggaatttctttttgtaaaggatctgctcaagtcttttgcccatttttatattttttcttactgatgtataggatatcctgatgtattctggatacaagcctgtttcctatactttctacctctgtcttgttctatgtgatgttggatcccttttctagtcttaatattgttggagaattgattctttctttcccattatttttacttctttaagtttgttttcttacctttgggggaggatgcttctatgagcctaggtatttcaccatgaggcaaaatatgtttatttttatttttatttttttgtagagatgaggtctcactatgttgcccaggctgggctcaaactcctgggctcaagacacccacctgcctcggcctcccaaagtgctgggatcaccggtgtgaaccacc

SEQ ID NO: 203774 - DNA, 1000 bp, Homo Sapiens
gcacatacagtgattgaaacattccttggactatacattctatccatacatatacgattccactaattgaccattatctttaacaatagtcctgaaaatatatgtgatgtagacccattctgtatgaaagctagacaagtttggactcaaccaaggaagtctgtatttattgtcaattgtcgcatggaaacagcttacgttggaataatttcgcttggtgattgttaatccacctgcaactgcattttccctctctgtgtctacggaccctcctgaccatgcatgctctggtatttggacacatttataaatccctaggtacgattctttttatttgcccatatatcaagtacatgtgttctcactgctagtgtttcggtttgatcaacccatctatacagataaccgacactttgtgggttcccagccacagccatgtgcattttctttcaaacctcacccatccatcttattcttttttgtgacagggtcttgctctgctgcccaggctggtgtgctgtggtacgatcatatcttactgtagcctcaaactcctgggctcaagtgatccttccacctaagcctcccgagtagctgggaccaggtgcacctcaccactcctggctattttttaaacattttgtagagatggggtctcactatgttgcccaggctggtctcaaacttctagcctcaagaaatcctcccaccttggcctcccaaagtgctgggattgtaagtatcaactaccacacctggcgtcatccaccccattttctaatctccttcctttgcctgtcatctagtataacaagatgctaatttatcgtgaaattccattagatcccctaagacaaaagatgctacttctacattctgaaaagacaattaagccctgtctatgcaggacttaataaaatataacagctggcctagtgaacttcactttcaacaatccaagaggtcaagaatttgaagggaaattcatggaagggaattc

SEQ ID NO: 203775 - DNA, 1000 bp, Homo Sapiens
tcgataaaatggcaggaaaaaaaaccccataaactgctatgtaacagtctaccacaatttctacataatatttagcattttaaacaccaattacctacttattgaattcttaatgaattatttaggggatacgtgtatgtgcagaaaatgaatctatcagctacagattatgtttcctcctatgtggcattaaacagataatgtgatgaaaataaacaataagctatgttataggtaaaagatgaatgccaataatgcttagcaaaattaacaaagaatttcaaaactgtttacttatcaaatgaaaagtctggtggtacaggagggagagagagaggcaagagtcactgctgctccctggtgatgcggtaaagctgtgtgccggggcaggagtgagaactgttcacactcaaatgaatttctttcgttggtactcaagatcctgggagtgaatggctttgactcactgtctgaagccacagacaaagtaagaggataaaaacactcaaaatggatatctttgtttcttttgcttgtgatctgtaaataatattaaaatgagtttctagtttataagcggttgactcttttcatttattcactagttttcaaaattacaaggtggttccctagtatcctctaacgctgaacagttaagtttttaatctttggaaatcataattaacttatagattttagcctatttgatgtatgacaacccactgcagttaaaatctttattgatgctcaaactaccccatctttgaccagtgaggacttagttagattggctgtgaagtccttttgacatgaccaaaatagtcatcaataacttcctgttacctggtatcacaaaatgttccaagctcatcttgtacctttcctcctcagaccttgattccttttagtggagctacatttttaaatgtaacgcttttgctcacatcatgatcaagtttatttacaatagcaatgatttcatatggtatgttctgaattc

SEQ ID NO: 203776 - DNA, 1000 bp, Homo Sapiens
aaaagcaaagtccagggtataactgggcacaagaaaacattcattcccgtttcctacgtatttaaatcactggacaatgaggattaatattcagaatcatgtttccttcgcattgtaagttctgtaattaatgcttaatttttaccactatattctgcttcctgagaaaaggagatttataaatgctcatttaaaaaagcttacccagagagggtcaatacaataggttttccagcataacatacagttaattcaatcagttagtgggaacaactcaaatactacttcttaaaaatcacttgagctcccttttatgatttttaataccttaaactatctttaatctttatgacatttccagacaaaatggtagtaatgattgatctccactgatcaaacacaaagtaactatataaaagaaatagagaaactataagtaaatataaatatatccatgtggcagagtaattctcaggcctaaatatgtcttcacaagggctgcatagggaaaatttaagtacgaatttgtctagacaggatatttttgcgaagcaaagctaaaaagccccaaaagccaatttaaatgactagttttatcccacttgtgtgcctgtagaagctcaatccacagacctattgatttagataatctatggatagagaaaaatttcctttcagcatctttccaaaagctgcccagaggaaggtgattggccccttaggcttgttgacataaaagttgagattgaaaggccacctcctctcaaactgtgctgaatgtcctcatcctgagaaattaagaggctgaaaaaactggctaatgtctgaaaagcagagattagaacaaaagagtaagagaggttgagaagcagggtaagaatcgaggcctctttacctttgaagaactatgaacaaacggttagagaatcacacagtaataattagtagcactattcttatatttttattccttagatgtggcttgttttccaaagaattc

SEQ ID NO: 203777 - DNA, 1000 bp, Homo Sapiens
ttcctactttgtgctatgtatgttcatatacacatttttaaaaaatattatttacctttccactttaaaataaagttatttcaaacctaaagaaatgttacaagaatagtacagagaactccctaagtccctttacccagattcacctaatatgccagatttgctttataattttttctgtctttcactcagtctcatatcatttttttttctgtactattggaaagtggggcacatgcctaataatcatttgatcttcaatagttcttcaatgtgtttttcttaaaaacaaggatattttcttacatctccacagtgtagttatattcaggaaatttgacattggtacaatatttttatctaatttacagtccagattctcatttttataaattgtccctataatgtcttttgtagcatctttattctttcagcccaggatctaccgctacactcaatggctaagtctctttcatcttccttatcaggaacaattctttagtctttgttttgttttagctttcatgactttgatatattttaagaatataggccacttgttttgttttggtagaaaaaatattttgtagaaatttttccattgggtttttccgtttgtttgtttgtttgttggtatttcctcatgcttagatttcaagtctgtatccctaattagaatattacaatagtttatatgtccttaacagggcatcatgtctggatgtacatcatatccatatgtacctcattagagatgctaattttgatcaccaagctaagatatttcatgtttttccactgtgaaattaacatttctttccattcttaaatataacaagaaattttgagggagacacttaaggcaatgaaaatcatcagagtccaactccagcagatttggcacccactgatgattcttgcctaaaccggttctaactccaatggttgcaaatagtgattttccaactcatgctccatacacacttaccagttggaattc

SEQ ID NO: 203778 - DNA, 1000 bp, Homo Sapiens
agaattagattcaaatcccagatttgctattatcaaattaactactccaaacccatgtcttggaatgaggataaaaataaccatcacattcaattgtcatgagatttggtgaatatatgtaaatcatctactttatggcaagtaatcagcaaatggctctaagtctaggaatcttatttcatacaagagaaagttccagttgacaagctcttctccaaataggcgttttgtttgctttttaaacaaggtcttgcttctgtagcccaggctggggtgcagtggcacgatcatggctcactgcagccttgacctctaggacccaagcaaccctcctacttcagcctcccaagtagctgagactacaggtgtgcaccaccacacatttgacaaaaaggcatttgacaaaaagaaaatgatcactgattcctcaaattgtgactggctatcatgagagattaaaatgtcactgatctttttcctttttgatattttgactataaaattgtaaatttaccatgacagaaacttaaataaacttctgagtatcaccagtcagcaaattaaggtgtgaaacactagctaattatactctataatgtgttagagttactcaagcaatgttttagtttgactgtaggaagacaatatagtgcaacagagacatggactctggttaacgttctgctagttactcagtctcttttgaagcctcaataacccatatgtaagattaaggcccttaaaaggtaaaattctacaattctaatcaactatctctttctacaaaacagaagttgtatgtgtctctcatgatttgccaaccactttatctcttgcttttcatagcatcctacccaacagtgtatactccatccacactgaagtacatcgtggctcccagaattcaacacgctctttggcctcaattcctttacacatgctattttctccacctgagcccacctttactcaccactgacataaggactcaagtcaggtc

SEQ ID NO: 203779 - DNA, 1000 bp, Homo Sapiens
cttccttaaatgtttaagtacttaggcatatggtgcactacataaaaagaagtaaatattccttaaatacagagtaacttacagattcatattatgtagcagatttctccattctataagaatgacaagtataacctacagataatccaaaaaataagtgtttgaatgatgatttgaacttctatcaagtttttgaccaaagttagagaaatgcagatctaacttttgagtttcgttattagttacctgggtctgctttgaattgcccacaagacaaaaagcagaagaaaatagaaaaagcatggatttatctataaatccgatgagaatcatgaatattaatgagttgagtgaacatgtcacagcaaacgagaatcaaaaatttttcttaaattttctgtgattgaaaaagagtaaaatgaagttgaattataataaacaaggaaatttgcttttaggtgactaaaaagtacatattccctgaaacttaaggctattcctctgtaatggattcagatcagatttaagaagcaaaagagtaggtggaaaaattaaatcagatcttatgtatagtaataccagtcactttttattgtgttccctaagagagccagaactgttagaatgtaaacttcaaaaatgcattccagatttttaaaacatttcctcaaaatattatacttaaacgtagtgtaattgtactttgtatattcaaccataaattagatatttctgtcatatagttttaattacattttctttttccttctcttctatgagttatcatttatagatttgtttttttactttgctgtgcattttaggaatattccataaaggcttacaaattatctttcattaggtaagatgaggtatggttcatggctaataagtgtcaagattagatttttatctgtaatataaacaatagcactcctatactcgtcagtcatttctgtaaaacagagtaaatctttgtgctgttattaaaagtgaattc

SEQ ID NO: 203780 - DNA, 1000 bp, Homo Sapiens
cctcatcatgccagaacactctcagagaagaaagagctatcttcatgtatcttctaaaagtatgatcatctccctactcaagagtccccctttcatacaaaagaaaatgtctaaacaccacgacctaagtccccaaattaagccccaaacacctcagactcaatcatcttcttcaggcatcctctgctcttatcaagaatataccactcttagcccctcatttgccttcctctcagccttcactcatccgggcttcactggcttaccccaccacaatgtatttgtttgtcattcatattcattcacactcattcagcagttgtaggtaataagcaacattcacacatcaacgaacaaagctgatgaaaatcccaacccctaaggaatttagagcagggtagaaaataaaaagaaaatagccaagagctaaaaatagaaccaccatttgacccagcaatcccattactgggtatatactcaaaggaaaataaattgttctaccaaaaagacaaggcactcacatgtccatcatagtattattcactatagcaaagacctggaatcaacctagatgcccatcagtggtgaattaacaaataaaatgtggtacatatacaccatagaacactacacagccacagaaaagaacaaaaaaaatatcccttgcagcaacatggatgtagttggaggtcattatcctaagcaaattaatgcagaaacagaaaaccaaataccctatattctcacttatatgtggcagctacacattgggtacacatggacataaagataggaacaatagacaatgaggactactagagtgcggaggaaagaagaggcacaagggttgaaaaactatctattgggtactacactcatgacctgggtgataggatcaatcgtaccacaacctcagtatcatgcgatatattcatgtaacaaacctgcaaatgtacccatgaatctacagtaaaagttgaaattaaaagaaagaaaaaga

SEQ ID NO: 203781 - DNA, 1000 bp, Homo Sapiens
gttaagcaatagacatttatttcttacagttatagaggctaagaagtcctacataaacttgccagctgattcagttcctgctgagggccctcttcctggctcacagatagctgccttcttgctgtgttctcacatggctgagagaaagctctggtttctcttccttttcttataaggtcactaatcccaccatgggggccccaccctcatgacctcatctaaaactaattacctcccacaggtcccatctccaaatgccattatattggggtcagggcttaaatatgtacattttcagaggacacaattcatattagtatgtgactggtggctttaaaatgtgattcttagagtctagcctggtgatgattatggaataaactttattttcggtgtataccctaaacatttaagatagacggagattgtcctagttttttcttgcctcctgattatttcattcctttttattaggggaaaactgcaacctggcttggctacttaatctaacgttataagtactagttagttgagtttacttctttggcaaaaggttgactggtattcttactcaaaggtgctattgcagcatttgacttttgttggttaaatcttcagagaaaatgtatcagaatctggcacgtgtcaccttgttgccactttgtttttttttttttttttgatacggagtctcgctctgtcgcccaggctggagtgcagtggcgggatctcggctcactgcaagctccgcctcccgggttcacgccattctcctgcctcagcctcccaagtagctgggactacaggcgcccgccactacgcccggctaattttttgtatttttagtagagacggggtttcaccgttttagccgggatggtctcgatctcctgacctcgtgatccgcccgcctcggcctcccaaagtgctgggattacaggcgtgagccaccgcgcccggcctaccttgttgccacttttacctgaaaggataattttta

SEQ ID NO: 203782 - DNA, 1000 bp, Homo Sapiens
gcttatacacagaagtggaatgctggatcgtattgtggtgctatgtttaaccttttgaggaactaccaaactgtcttccacaacagctgcaaaattttacattcctaccagcaatgcgtaagggttccagtttctctacatccttgcccacacttgttattcaccctcattctcacctattttgctaagagccatcctagtggctgtgaggtgatatttcactgatatgcacttccctaatgactaatgttgttgaacgtcttttcatgtgcttattggccatgtgtatattttcagagaaatgtctattctagtctattccatttttgaattaaattttgtttttgttgttgagttgtaggagttaaatgcatgcatttatattgttttctttttggtttccaagtcatactaacaaattgtactgttaagttgaaaataaaatgtgaagatttagctcacgtactcttgatatttcttgatagtgttgaatacggtgtttatatagttaatagttgctttaaaaatgccatataagtctcagccttcatatttctaggattgagaagacaagtggtcatgccactgatactcacacctggtacttaaaaaatgccattcccaaagtgttgggattacaggcatgagccattgaacatggcagaatttttcaatagaagttatgcttttcggtaaaagttgctttgccggagaataacacagtggtttgggctatcctgcttcatggctgcagctgctcctcagctaccattgagctcccacctccctgctcttaacagaggaagacatagggaaagaaaagtagataaaacctaaataagctgctttcccagtttgctgttggctgggatgatatcttattacctgctgcacaccttcatttgtcagtctcctttgatttgaggaggacattttagtgggcatgtggtgtctccctgttatgggctaaattgtgttctccctaaactcatatgtgatc

SEQ ID NO: 203783 - DNA, 1000 bp, Homo Sapiens
tctttaaaataataagcttaaatgaagaaaaatgttaactatgttaccttaaaggaggaaacacttcattatcaccagaaatgaataccctgtatcacttgccttaaatagaagattaccatagagaaaaatataatgaaaacagcacagtgttactgaattctaactagatacacttgcttgctcagggcctgagatcagctttctgttgagagagagagagagagaaagagaaagtgttacagagtattacagactagcacactgaattgaaactttggtagtgatgtaatcagaggattaaaaagaattgaacaaggaataatgctgtcactatgtgacttaatgttatttaatggtaggtgtgaggcctgccaaaagccatctctgaaattatctctcctaccaccatcagtagtacaaattccacacaatgggaaaccactgttctgaagagactaaaagcctagaatcagggagaagaatcagaacagtgctttattttttttttactccattttctatacaggagaattataactcaaggaatatctcaagctggggggtctggcattcaaatcttttctgcaacacttactagccttggaagtgacttatcatctcttagttcctcacctttaatgtgggggaaaataataatgaccagtttgtagtgttattatgaagattaaatatgacaacacacgaggagtgcctagcacaggttctgactaaaataagtcctaataatatgtgttttgtattacaaatgtgatcatgcattactgacttgctttttacttgcaataataacttctctctccatgtgagttcctataaatttacctcattttaaaaaatggctacatagaatcccaaattatgtatattccatatcttctttaaccacccttttgttggggtgtattcaagttgttttgcatgcattttttttaacaaatgaggggattgaggctcaaagaggtagagaagcctgatc

SEQ ID NO: 203784 - DNA, 1000 bp, Homo Sapiens
aagaacttgataacgtattggttggtttgcatatgaaaagttgccctcactgtcaggttctttcctgtttctaggaattggctagccctggaaggactgccccttccagggtcagcaaattcccaagatagcaaagcatcaaaaatacagaataaaaagacatgcttagtagagtatatagaaatacaattggttttgtttattttgtgatgtatcctgtgatactggtaaattcatttataagttctagtaattttttggtagaatcctcagcatttttgataaatacaatcatgtctgcaaataaaaagttttatttctttcatttcaatctctatgtcttttatttcattttcttaccagattgcattaggtagaacctccagtgttgaatagaaatggtggtggtgagcatcctttccttgttcctgattttatggagaaagcattcaatatgtaatcattaagtaatagaaggttgtttgtagatgatctttattttattgaggaaattcccttctttttctaatttatttccagaaattttatcatgaattggtgttgacttttgtcaaatgcttttcctgcaacaattgggacgatcttatggttttgctccattattctgttaatgaggtaaattgcattgattcattttcaaatgtcaaagcaaccagtatgactggaataaaacccacttggtgatggtgttctgacctttttatatgctcctggttctatgttctattattttgttatgttcatgagaaacatttgcctgtaatttttttttttttttatgatgtgtttttgccaggttttggtattaggataattctggccacataaaatgatttggaaattatttctgcccctctgttttctgtaagagtttatacagaattggtactattttttccttaaatagttgacagactttcccagggaagtcactttggccaagagttttctttgtgggtatgtttttaatgaagaattc

SEQ ID NO: 203785 - DNA, 1000 bp, Homo Sapiens
agatgatctgatagcgtcttcatatgtgcaggacttagagaaatccttgtgccctttcattagattaacagcatgtacattctgacatcagctgcaacatgagctggtattgcaaaatgtgctttggaatcctgacgcattaattgttatgtttggctttattaccaacatatctttttactcatatctgaatgccgatggttatgggccaacatttttggaaaaacgataccttgcaagctcacacttgaaacggctctgaacagtaagagaaggtcatagatatgggaataagagaggaaagtcggctcacaagagtcaatgtcctgagcggctaggcaggaaggcaccttttccgtgacagcctgtgcgtcttcagaacacaatgcagtgaataatcagccatagatgggcaagggggaggcctggtcgggcttttgacacagccctctgtaggcgtgatggatgtggagaaactcaacccttcccaggggggtcaggtggcaccatcaaaacaaagagtgcaaacagttcagtcctggaaaagaactccccccacacttacccccctttctttttgctgtttgtgccaaaaagttacagtatccagccattcctgattaagttggaaatctatgcaaagaaaagaaaaatgaagccaatgtgaacatgcacatatttaaattgtgcaaaatttctacagaaataaataaataaataaataaacaaactggcattgatttccaaggctgggtgaaaaaaaaaatccactttctggattagagggcaagacattatccaaattggcaaaaaaaaaagttctcccaaaactttcctttggaggctgtcgataaaaacaaaccagaggaggatggttcttcctctgaccctggggccagcctgagaagatgaagaaaagaaacagagtatgtgtgtgcctgctgtcccaaccagaaaacctttgaaaaataatctttttctgccctttcattgttttctt

SEQ ID NO: 203786 - DNA, 1000 bp, Homo Sapiens
ccctggttatccacagcctcgcgggctcagccctggaccgcagcctccgtccttccatcatgcaccggggccctgcaggactcatgctcagcgctggctgtgggagaaatttcagccgcctcccccgcgacttctgcgtctgcttgtcttggtgatggaactgctggcggaggagctctgcgggtttaggcccgtggtccatggggaaatacagaccagggttcaaagccagagtcagagggcggcagggggccttggagagggagagagataggagtcgtgtgtagccagctctcctggaagccgggggccaggtctccccctcccggcccctgtgtgtccttgaagctatttttatatgttgctggaaaccagaatgacagccagagccaaagcgctaggaggtttcccgtgcaccatgggtcttgcccaggggaccatgggccattcccagcagattgatggagacagtccagaagctccactgtgcggatcggggagcctgggtcccccatcccttaccagcttggaggtcactgttggaagatccctggctggcacaaaaatgaggaacaaggacttagagaagcgatggtgaggctgcaagtgttctggggtctttgagccctgcacgaaaatccagaatgctcatggagttcaaaactcattcatggctgggtgcagtggcttcacacctgtcaatcccagcactttgggaggctgaggcgggtggactccttgagtccaggagttcgagaccagtctgggcaacatagtgagatcctctcatcactccaaaaataaaaaaaattagctgggtgtggtggcatgcacctatagtcttagctacttgggaggctgaggtgggaggattgcttgagccacagggaggtcaaggctgcagtgagtgagctgagatcacgccattgcactccagcctgggcaacagagcgagactctttctcaaaaaaaaaaaaataaataaataaaaaaggaattc

SEQ ID NO: 203787 - DNA, 1000 bp, Homo Sapiens
cagtcccagatgccttcactggtaaattctaccacacacttaaagatgaattcaggcctggcatggtggctcacgcctgtaatcccagcactttgggaggctgaggcaggtggatcacgaggtaaggagttcaagaccagcctgaccaagatggtgaaacctcgtctctactaaaaatacaaaaattagccgggcacggtggcaggagcctgcaatcccagctacttgggaggctgaggcaggagaatcacttgaacccagaaggcagaagttgcagtgagccgagattgtgccactctactccagcctgggtgacagtaagaatctgtctcaaaaaaaaaaaaaagatgaatccatagcaattcttcgcaaattcttctaagaaacaaaagaggagaaaactctttccaactcagtctttgaagcaaatattgcttcgatattaaaatcagaaaaagccatcacgaaaaaactacaagtcaatatatcttatgaaataggtgcaaatccctcaattaaaaactagcaaactaaatccaacaacataaaaaagggctaaataccacattcaagtggaatttatcccagaaattcaagattaatttaacatccaaaaatcaatataatgcatcatattggtggaacaaagaacaaaccccacaggattatcttcatattcagaaagagcatttgacaacatttaagtggttctgttccacttgaagatttatatcttcaagatgaaaatattcaacgacaaactaggaggagaaggtaactttattgtgatggttaattttatttgtcaacttaagtaggctaggggatacccagatagcgggtaagacattattaatggctgtgtctgtgagggtgtttctgaaaaagattagcatttgaatcagtagactgagtgaaaaaaatcaccctcaccaatgtgggccgcatccaatccactcagggcccaaataaaacataaaagtagaagaagggtgaattc

SEQ ID NO: 203788 - DNA, 1000 bp, Homo Sapiens
gcctccgctagtgatacccaagcagacaggttctggagcagaactccagcaaactccagcatacctgcatcagaggggactgactgttagaagcaaaattaacaaacagaaaggaacagtatcaacatcaataaaaaggacgtccactcagagaccccagccaaaggtcaccaacttcaaagaccaaaggtagataaatctatgaagatggggagaaaccaacacaaaaaggctgaaaattccaaaacccagatcacatcttctcctccaaaggatcccaaatcctcgccagcaagggaacaaacatgtatggagaacgagtttgacaagttgacagaagtaggcttcagaaggtgggcaataacaaactcccccgagctaaaggaggatgttctaacccaatgcaaggaagctaagaatcttgaaaaaaggttagacaaattgctaactagaataaccagtttagagaaaagcatgaatgacctgatggagctgaaaaacacaggacgagaactttgtgaagcatacacaagtatcaatagccgaatcgatcaagtggaagaaaggatatcagagattgaagatcaactcaatgaaataaagcaagacgacaagattagagaaaaaagagtgaaaagaaacaaacaaagtcccaagaaatatgggactctgtgaaaagaccaaatctgtccaagatggctgaataggaacagctccagtctacagctcccagcgtgagcgatgcagaatacgggtgatttctgcatttccaactgacataccgggttcatctcactggggagtgtcagacagtgggtgcaggacagtgggtgcagtgcactgagggtgagccaaagcagggcaagacatcgcctcacccggaaagcacaaggggtcagggaattccctttcatagccaagcaaaactgtgacagacagcacctagaaaatcgggacactcccaccctgatactgtgcttttccaatggtcttagcaaac

SEQ ID NO: 203789 - DNA, 1000 bp, Homo Sapiens
cgccccaccccgcagacagcctggcgtcgggacaccggggacgcctgcgcagaagaacccgcctggccccttggctccaacggtaacaatgctcccctccgaaagacagccagagtagtccgggggcaccagtacacgtctgcgcgctccccgacgccttggcgcgcccctggtgctcaaccttccccacgtgagcgcgcccgccatcacgatactcgctgacggggtctcctcacctgagtcgggctccgcccccctcctcctcgctgaaggaggcggtgacccctctccgatcggactcggcagtgtcagaggaggtgggaacgtcctgaccagcgtctccgttacgggacttcctcccccttccacccgcccccctcccaccccgcctctagtcccctagctcctccagccagttcgccgcagcactctgagaacacggcggcggcgcccgaggataagcggaagtgacgtaatgcaagagcgcctactccgccccattccgcctctcccagttgggctgcaaccaatcagcaatgggaagggcggggccggggtaggagtgcagccagccggcgcgcggaacctggaggaatttacttagcccccggaaaaactgaccaatccacggtccctgaagtctggttgtgtttactaccgactgaatccgtgagctctctgaccaatcaccctttgccttacaacatgtaaaacggttatcaaatgccttttagggcgggatttatcactaaactgctccaggtttggactatagaaatgcggctgttcgctgcaaccaatcaaaaccctctgtggtttaggctagcgggctttccgcctaaatccgccaatcacaacaacgactgcgtgatgtctgagggcgccggagaggcgggccctcagggcaggccgtaccgccattggctggttctgaaggatttttccaccctcgtggtgcccggcgctttagtgacccagggctcttctccggggtgaattc

SEQ ID NO: 203790 - DNA, 1000 bp, Homo Sapiens
cagcagaggtgtgggcagggaatctacttgtctcttgttttcctttaagccgttgtgaaaatcaagtatgtgactcttccttggaaaaaataatctctcagaaaaggacttctaatacatcctcagggtagaatgtgtttccgtgattactttttttttttgagatggagtttcgctcttgttgcccaggctggagtgcaatggcgtgatcttagctcactgcaacctctgcctcccgggttcaagtgcttctcctgcctcagcctcccgattacaggcatgcaccaccatgcccggctaattttgtatttttagtagagacagcgtttctccatgttaggctggtctcaatctcctgacctcaggtgatctgcccgcctcggtctcccaaagtgctggaattataggcgtgagccaccacgcccagccttttgtgattacttttaaaattcagctgggtttgacacttggaggcttaatttctgggaatgactggacacagcatgtggctgggaccctctgaacaacctctgacctagtggagaagcaggtggtaatgactgtaggtatggatagggaaagactaggcgggcaaatacttgtcgtgtgtcaacaggtgtattttgctaaatgtcggggacacattccaagaggctaaaaagcaaatttctgtacattaggagatttgtgagtccttaggaaaggctcagaagagggctccacctagcacaatacctgacatagaaagtggtcagtgtctgcagaatgagtcggcatgaaccgtactttccttggcagggttattaggtggtaaatacctgcagaataatgggattgtactagggtttcttctggctttagaaacccatttgtttactaatagattcccagaggataccttgatctcaccaagctatttgccagaatgtctcctgatggcctcattgaagaaagggggactatgagccagatgctggtgccctgaagatttgtagtttgt

SEQ ID NO: 203791 - DNA, 1000 bp, Homo Sapiens
tgagtctaaataaaggagaacaaaacaaaaaaccaaaataaaaaaatctcagtcttgagacagttattttttattaagtgaccatataaacacatctgacttacgttttttgttggtagcatcaagcaaattccctgtacatctttttcttcaaaatactctttgatctaagaacaaatttaaatagtattgaaactagtattattacagatacaaggcattcttccttggtttctgtgattctttttagtattgctgaataaacattagtaatgtctatgtcttgaggaagctgaatttgaatagaaaattactagctttattataatcacttacagacttttaaattatgctgtcaatattttcaataatacatttcacttgttttaaatgtttggttagataaccacctcctttctcctcttgctccagctactcctaattcaatataatcattgaatagggtatcatggttcctcccaaacaggcaagaattaaagtcacaatccttaggcaaagactcattattactggcttgttggaattaatcacatttaaggcagccatttaacctgataaccttcaacctaattgtctcaatcattctattctcttcataccatagctactttccccaaaactgctacaaatctgaactgatgacccaagttctgtctgttggctggcatccacggctatttctatgcaaagaaaacaccatggggtcatttcactacatttatacttaggtggttccaagagaaaagtttcccctcaatacaacttcaccagcaaaatatacctgacgtagtttagtactgatataattggcaaggaaattaaatatctttacacgtgttagtaaaactacattttttccagtttgacttctccatttataccttaaaaaaggaaagaccctggagtttcccttgaactgtacattttaggtgtcttgtattagatactattaagggaagaataactgatataagaattc

SEQ ID NO: 203792 - DNA, 1000 bp, Homo Sapiens
aagtaggatagatttaagaatttggcttgccttcagtttgtgtcatggattagtaactacaaacagggaatccttggcttgagagtggtgtggtctagtctgtttctgagacatcaagagtattcattagctaggagcatccactctcagggtgcctcaagggggcactggaggtaatgatagattattggtcaggggatttaaggattctagatataactaccattaaattattggattaagatttgttcacactatgtatcattcgattaattacatattaattcaaaaatgtcctctgcaattattttcccaccccctttctttcagtgttatatcactaccagtatgccatcaacatcttctacaatatagttttaatcttagatacttacctatatgtcactttgctgccaaaagtaaatgctaactcctcaatgcaaccattttctggaatagccggtttaccacatgaaacagcttaacaaaggaaaaacaaacacgtgacttttttgagactgtgtgcaaaaatctttgaaatttcaaggggcagctcaagatctttttttgtttgtttgttttcttttttttttttttggtgtgtgtgtgtggggtcatgtttaaacatgagcctaatacctcagttcaaatacaaagaacattgatacaacataacacttcatatgtctacgccttacctttctaggattgccaaacataagaaacgtggtaaatttactaaacatacctttacaatatggtattagatgattccattctccagactccaaacatgtgattttggttactcccatcaactggtatccttcctgacacgaaaatgtgactgcggcacctactgtataaatctcacctgaggagtggccattttccggatttcctggagccttacattttataggttctagaaacagacagttttggtggaataataagtggctttcacacaaccatgcaaagtctcacagcaaaagaattc

SEQ ID NO: 203793 - DNA, 1000 bp, Homo Sapiens
gtgtcgggctcagtggctcacgcctgtaatcccagcactttgggaagccaaggtgggtggatcacctgaggtcaggagttcaagactagcctgaccaaaatggagaaactccgcctctgctaaaaatacaaaattagtcgggggtgatggtgcaggcctgtaatcccagctacttgggaggctgaggtgggagaatcacttgaacccaggaggcagaagttgcagtgagccgagatcgcaccattgcactccagtctgggcaacaagagcaaaagtctgtctcaaaaaaaaaaaaaaagaaaaaaaagaaaaagaaaacaagctgcaccagggcaagaatttgggtctgttttattcactaatttaataacatgctttgaatagggccaagcccgtaggagctactcaatatactacatagtgaatggatggatggctcctaagagccatctcctagggttatagtagggattgtgtgatttaatgtgcattctagtgctcaacatgatgcctggcacacagtgggcacaggacgcacttagacaagattttcattagtagttcatggctcttgagagaacgccatccaatcagtcggtcttgattttgatcttctagcccccagatctccccccgctgaggatgccatgagtttggctttacccactgtgtgatgaccattttcggagccaccgatgggcttctccagccctcctggctttgcggggtgtgggtgtttgggtaatgtgatgaaaaaacctacaccccaggcagtgggtgtctgcctctgtactccttcacctttccattctataaaggttcctgggcataaaagtatccagctaaatccacacactggttaagaaatgctaacagctgtgaggaattacatgagtggaattttctgacacttggcctgatatgtggggtggggagccaatgtcaagcatgttccagatttgggagaacaatgggaaaaatgctactatgtggagaattc

SEQ ID NO: 203794 - DNA, 1000 bp, Homo Sapiens
aacgtgagactatcccaacagcaggatactttattatcccttggaattcaggcttaatgaaccctagtcaccagtccccacagatcaggctcctcaaagcctcatcctaatccagttcttctggatcatgcaagctctgtctgccttcccaaaagaaactagcctgggccttatcctaaactaggggctaagagcagaggctacacacagtcctcgcagtccctgaggtgactaatattatcaagtaccttctaaatgccaggctcatctacggccataccaccctggacgtgcccaatctcgtctacgtgccaggcttgggggcatatgcagatacatgggacagatcccttggaggatacagacagataagctcatggttcctgcacagggtggtgtgggctcttactgctgagctgagacctatgtggtgactgtgttggactgaaccccagggaaaggtgtggggtcgggtgtgatgggcacaaacagaaaagtggctgttatgattcacaaacttattgcatgtcattgtacgttacaggtaactttcagtgctctctgatgtatggagcattaacaatatggaactaaactagtgtttctcatatctttcaatcaccacttccaataaaaaatattttctattgggaggccgatgtgggaggatcacgaggtcaggagatcgagaacatcctggctaacatggtgaaaccccgtctctactaaaaatacaaaaaattagccgggcctggtggcgggcgcctgaagtcccagctactccggaggctgaggcaggagaatggcgtcaatccgggaggcggagcttgcagtgagccgagatcaagccactgcactccagcctgggcgacagagcgagactgtgtctcaaaaaaaaaaaaaaaaaaaaaaaaaagaaaagaaaaaaaaattttctacatcatgatccagtacacatatgtacccgtatcactgaaaaaaaagtttgccgaaagaattc

SEQ ID NO: 203795 - DNA, 1000 bp, Homo Sapiens
atgatagagtccttccttcctttattcattcaactatgttttggagctgccccaagctaatgtcactaacatccctctgtttgtactaggtgttggggtagagtggggaacaaactaattaggatctttacctcacagagcttcttttattgggggacagcttcctcttgtgttggggcagagcttcttttgtttcgggagagcttcttttgtgggagaagagcttcttcttttgttgggggagagctttttattttgtgagggggagaacttcttcttttgttgggggaagagcttcttttgtggtgggagcttcttcttttgtgggctccagcaagtggtaagcctggtgatgcaggtgccagggtgggtggggaaagctagcccagatgaaggcattggggagggagcccagagaagtgtgcagccagatgagagatgagagatgggcaggaataggtccagcgaagggactgggagtgccaggggtgggggacattgcatattcaagcaacttatgaagtccactttaataggaccatgagatgtgaaagtggcgaggctggaggaagatagtccagatcatgcagctgcaggtaaaggattttatcttgagggcatggggagccatgagaggttttttaggcaagggagggacctgatcagattttttttggttcagaacaatcattctggctgctgggtggagactgattggggagggttattgggagcagtaattcagtcaaagtattaatagcctgactaggttgctgacaccacagggaaggccaggagccctcactccctcagggtcacccagtggcagcgccagtgtctgtgcagacccagatattgggattttagagcttcccctgcctgcaaaatactgtgaaccactgctcctaccctccatgaatttccatcttcaaggagtggctccttggctcagagcttcctattcatggtcaaatgcaaacatctcctggagtgtgaattc

SEQ ID NO: 203796 - DNA, 1000 bp, Homo Sapiens
tttgttccttggaataatcctgtgaagtgggtattttttatcactagtttcatataatgaatatattactgttaatgtcaatacattctatttatccagctcacttattctagtattctctctgcagtgattctttaatctcattgagaagcccccatgcccaatacacgcctcctatcttcatacacgcctcctatcttcatttccctccttccccaactcacacccttgaaaacattcttatctctcttgtttctttttctgttgtccttgactggcaaatttggaggcatggatgtacccaactctttgccatttggggctacccccaactagccaaatactgctagagaaactctcctgaatgatttcactctaagttctatgaacttcaaatgggcatttaaggatacctggcagtcctactatgttttcctaataaatttcattttcctctttcaaaattgttatttattctcccgtctcctccaacctcccatatccccacctccacactcactctctgctgctgatgacctcacttcatactttattgaaaaaaatagaagcctgcagaggagcaacactttcatactgctcccactgtatctaaaaatctctaagtttctgtgcctgtcttagtcagcttgggctgccataacaaaataccataaaatgagtggcttaaacaacagaaatttttcatctcatattttgaagactcaaaatgttggcatcgttggtacctggtgagggctctcttcctggcttgcagacagctgcctgctggctgggtcctcacattgtcttttcttggtgcatgcatgagggagagagtgctagtgtctcttcctcttcttataaagacaccagccctatcaaattaaggggtagctctatgacctcatttaaatagaattatctccctaaagaccttatcttctaatatagtcacatttgagactgtggcttcaacatgaattttggggagacagaattc

SEQ ID NO: 203797 - DNA, 1000 bp, Homo Sapiens
tgtgccatttgtatgaactacatataatatatatatacacacacacatacatatttataaatatctagaaaatctccagaatagtatagaataaaatggtgctcaggatttcttccaaagagaggtacctagatcctagatatgagagaggtagaagatttacttttcactgaaaacatttttactaatttttaaattttgcacatggtcaattttgtatatcacctacttatttaaagcaaattcaaaaacaaattaaaactgttttccaacctaatgcacagttttggggaagatggatagaataaaagtaatcagaatggtctcttatgacagacatcctctatccattccttagagagaagtgaataacttcctgcaatttttcacagtagagattctgaaatgcttagaaaaaaaaacaaaaagccattcactttcctcagcccagacatttgtttcttaaaaatgcagtggacagatagcaggaaagaactccctgtaaagattataggaagagagagttcaatgtttgtgcatgggtatatgtgagagatcataagaaatccttaaaaaaaataaacatggcaggtaatgaaccagcaccaccactgtgtggctgaaatagaaatgggtatgtcacctccatgccaccaaagaaacggagtctctcgtgtcctacaaagcatgcgaggcatcttgccttgccaaatttaaacagcgatattatttttaagctactataattagtctccatttgtctgtgaatcagcctttatgaggcaatagcatctaagccccatcagatgaaacatgaagccacatcatgtctgtttattattttgaaaagagagggtgccaagtttcctgtaacacccaattcaaacactgaaatttggaggacagaatgtcctgttgtccacgtttgaagataggaatatattttcatctaatacatcagagccccaggttcagctggcaacaggaaggaattgaattc

SEQ ID NO: 203798 - DNA, 1000 bp, Homo Sapiens
aggtctcatttagtcctaactcctgtaattctcgaatgtttaacaacaccctgcatgctacaagagctagttcatgggcttggacacgaagtcgaaattccttcaagagctctaatccgcaccatttcatactatataatgactatgattcatcttttctccaattattttgaatgagtcagttttatcctaataaaataatctcacaaaatgaaatcattaaaagaaattcatatttgcatgctgtatttgagctttcaaagcatcaataaatgagactttcaaaaagtaagcatgccagcactttaatacccaaatgagaagtccttccagttcatgatcttgtggaaccaagcactcatctcactgatattctccctgtaaactggcctcagaaccagcttctctcacttcaccttccacccaggctggcagctactcctcctgaacatccaccttgttaatcagattggattcaaatgatgaatttttaaaagatcaaattcatcttcctgagttgagttcattaaaagtcatgagctctggtctttgaagaccttctcaaaaagaagctcccaaaagtctggggcaaggacaccagcacctatgtcatcggacgatttccctggtggttgctttgtggcatctaaaactgacttagaaaaacacaagctgtggcatctgagatcacctcctcgtccatcttatactctgctgatctgcacggcgacccctaagacactgggaattgttattcccattctgacggacaaggaacgtgggtacatccgggtcaagaattccattgactgaggtcacactggatgttagtgggcagagagacgtgactgcagccctcgcctgcctgtgtgtagcttgtttcacttcggtagaacattagctgaccggacacatttttgccacaccgttttaggaaaggcataggattctggctttcttataaggtttttcccaccatgggatggcctccaaagaattc

SEQ ID NO: 203799 - DNA, 1000 bp, Homo Sapiens
ttttggacagttgatacaaaacagcatagagagaatgagtaacttctcaaggccatgggaccagtgaatgctttgctgtgctttgaggagcatgctgatgatgactgtgactttggtaactgtttctgtagctcagagcaggggcttaagaagacatgggtgtgcagagctcacctgcagcatgctgatgtcactggagggagagctgtgctaggtgggcagcagcaaccacggagggacctttctgaagagactcaccagtgacatagttggtttctgtccttctctttctttgttacaagaccccactatttagctactgatattgccatagggcagagagatttattcagctgcagctgcatccatggcatctgctgatccactcacagcctttgtttttcagagttaggaagtgccttccttactccaaaatgcaactttcttaccagtgtttctgcaccatcctgtggtttatatttctggctctgccattctttctctgtgtgacctctagatggatctatgtgattcacagaggactggctcattgtcaatgacatgacaagtgattgaaatgtatttgatagttagatgatagaaatttctttagcttttagggccaaagtacatctgtattagtccattttcatgctgctgataaagacatacccgagactgggaagaaaaagaggtttaattggacttacagttccacatggctggggaggcctcagaatcatagcagtggcaagagaaaatgagagagaagcaaaagcagaaacccctgataaacccatcagatcttgtgggacttaatcactatcgtgagaatagcacaggaaagacaggcccccatgatgcagttaccttcccctgggtccctcccacaacatgtgggaattctgggagctacaattcaagttgagatttgaatggggacagccaaaacatatcattctgcccctggtccctccaaatctcatgtcatcatatttca

SEQ ID NO: 203800 - DNA, 1000 bp, Homo Sapiens
attattcaaaagtgatagcaagctctcctgtttaaaagaatacagtctgtctgtctatgaagaaaacgattgtttcacactgcctctgctttgcagtcctattcagctcagacaatttgcatcaacctgtgactagtgacactgtcacttagtggtgccccagaaagccatgatctcacgtgctcttaatattgaagttcttatttatacatagatgtctctggaatactcatgaattcttacttgaatacaatggtgttttattaatagttattaattaaattttaaaatgctaatacataatttatcaatttacttagaattggtatgacaaattattcagcagggcagctttgcataacaagcaggaaaaacgacaagcaaaagtgacaaatacatccctgtcactacataatataaaatacagcacaaaattctgcatctgtgcatactttctaagctaagaatgctaattaacataatcattaagtgctatttattagaggtaaaggcatcacactatgtttgttttaaaaagcagaatgctcataaactcattgttagagaatataaatctagcagcatcaaaacacttcgtattacaatacagaaagcaaaacaaatggcagcagatggcttcaaagaggggaaataaagaagagaactatagaatagtaaagcgcaaattaaaattgaaaggaaaaattttaaaaagaaacagctaaggaaaagaacagataaactcctggggaaaagtcaacgactaacagacagcagaaataatattcataaataggaaagattggtatatgcagattagacaattatccaaagccatggacatgaaaagaccagaatgcatcattgttagagacacaattcaagaactaatggatccctggcactgagctagaaaatatcacatattttttgcaaatttagaaacaggctcagagtttttaaagaattatctaaggttataaaagacaagatagaattc

SEQ ID NO: 203801 - DNA, 1000 bp, Homo Sapiens
catgaagagaccagcaggatatcaaccaagctgaagttggtaaaacacctaaaggaggatatgacaactagaaggggattgtcagacacaaagcctagaaaaagcagagttagagacaaagtgaggctgtgcctctgaaggcatgtcccatcaggccccaaaattcagcccaaaaggtcattccaatcatgagaacacatccatctggctgcctgaacttaatactgttctacttttgaattacataaacagccctttttgttcagattccacattgaccaaaacctttctgatagtttggggtcctatttggcctgtccacagggaattttctccggtcaggctcacctggccagccagctctcctgacccggcatcccactcaaacacctgtgttctcttttattttagaggttaggcaggacaatctgacccagatgggggaggaaattgcaatcatgtttttgtctaattcacagctctaattaggggataagagaaaaatagagcatgagaagaaatggtccaagagctggaaaatttgtaaaagcacccacatccctatggggaaggcacccttgtgaactttgcctctacagctaagctgacctcatatcaactctgcaaggaagacagggcaagcacttcacattgtatttatttatttacttatacccagcttattccttaaaggacttaaggcaagcaggctttaagggccatcttccctgactagtgataaaactaagtgataaaaataagtttgtccagaatcacatactttttatataaaagtccagagaccaaaccatgactttcttagtctaggtcaaagctcttgccaaggaaccaaactgaagatgagaaaagagtgcatttgttctaaacagaatgctgaattcagaagacttaaggatggctttagattaggactgaagtttgtaatctgtgattcagtttttgtgcttttgtaatttccttattccagtcttttgaattc

SEQ ID NO: 203802 - DNA, 1000 bp, Homo Sapiens
aaagcaagatattttaaacccattacattgggaaaaattataataattccaagtgatagcaggatgtgagaatgagaatctcatacacagctggtggggatgtaaattgataatgacagctttggagtgcaatttggcaacacctcaaagttgaaaataagtacaccttgcaacctcgtagttccatttcccagtgcgctgtcacatatacaagtaaagacgcatgcacgggagccttcattagcattgtttgtaatagcggaaaatagaaacaattcaaatacctaccaatgaagggttgcagaatcaagctctagtgcatatatatcatagaatactatatggcaccaaaataaataaattagattccctgggaaagaaatgtatttacaaaacacatgccacaggattttttaaagggagatagagttgaaaaaaataagatgaccctaagggttcctgctatgcacagtgcaaggtttgactcccctgctagagctgggtcatgagttggcactaaagatttagcggccaatgtaaaaaaggaaatgtgatcaatgacagaattagactgtgttataaaaacatgcaactattcctggcactaagatcagagaaaaatttcctccagaactttcataaagaggccaccatgcaaggtgggtggtaggcaactttgtcagcctcattctctcatccgtaggactgagacttgtttcctcaaagacgagtgtaagtgctgcagtctccaagtgctttatctgaagattcatttctaagagcaagagttagaaatcggtgtacccaaagtgtttcgtttggccagaacactgttttacatttttattttattttaagagacacagttgctctgtcacctaggctagagagcagtggcatgatcatagctcacttcagcctcaaactcctgggctcaagtgatcatcctgcctcagcctctcgagtagctggaactataggcacataccaccaaacctgg

SEQ ID NO: 203803 - DNA, 1000 bp, Homo Sapiens
tttattactttataatgtatgatttagttacagtggcataacttcagctaacagcgtaaaaataaatgttgtcctccggtttgccctagattcaataattagaatacatttaacaattgtacctgtaatgtaaaacattgcattttttgcctttatacttggccaaactagagatatttcattttcagttgacactgacagaataaggttaataagttacataaataggacaaagatataaaattcgtagaggattatgaaacatcacagaaaattgaatattaatttgaaacgttatttgatatggtgttttgatgtcatcacagcagctacgtggcacttagaatctgtgcatctgggggagggagagcgcgctgattgtggaacttaccattggaactcagtgctgccctgtcccaacagaaagcaacaccaggcagaactcacattgtgtccacagagaaagcaattaaaccagctctagaaatcatcaatcccagcagtaggaacctaagttccagcaagcctctcaccatgggataaaatcctctggaaccctaaacaaactggaaaggcagtctaggaaataataattgcaattcttgggcaagtcctggttctgtgcttggctcagagccagtggacttgaggggaatatgacctagtgggacacctcttgggttgccaaggtagtgcttgttccaccccctccttaatcccaggaagcacaaatagcagctccaggagaaactccttccctctgcttgaggggagagggaagagtaaagaggactttgtcttgcaacttggataccagttcagccacagtaggacagggcagcaagcagagtcctgaggcacctgcctcaggccaaaggggagtccactgccttgaatggagaattccaggcctggcagcattcatcacaagctgaaggtagagcctttgggcctttttggtgccagctcagctgcagtagaaagagcactggctagattc

SEQ ID NO: 203804 - DNA, 1000 bp, Homo Sapiens
aagggaacacttggacaacatttgctcagatgaatgtgagaagaggaaggaaaggagaaggggatggcagggaaacaaaagtacgtaggaggtaggacattaatgatagaaggtaatggacaggatggaggaaagagagaaagtaaagggcttgacaggtcaggtggatgctaacaaactccccctcctaagccaagaataaaataataactgggacaggagccttccttaaatgtataaatggctccttctatccccttggtagcaggtacttattcctacatgtagggttctgtcattggacctcttgctgcccatgggtctgcatttccccaagctgttggtagggcccagtgtgagatcctagtagtggtctgctgctttagaaaatatcatggtggttaatttaaagcacagggctagcaaaagagaagggcctaggtgttgtgcaaaagccagagtggagaggggctgggaaggggcttcctcttgcccggggttgtcagatgtttcacttcttgcatgcaaagcaactaggagatctttggcaagctaaggcagcttagaatattagaagctgaaagcaagatatgcaacacatttgggagtttctctctcatgctgaagaataagatgaactgattcctctgtgagggtacctttccatttcttgtcagtatccatgtaaaagtcatgtaaaaaaccttaaatgtttttcataacttacaaatattatatatttttaaaaagtcgcagtatgtatgggatgaaataggggttaaggcaataggacagctccctttccaagaattcaaaatcttcacattgctgttccatggcaaacctacatcagaaaagagattcttcctgggacaaggctatgttctgggacagtgcctggaattcattaataaatacatcttatataaatctctactcagagaaaatggttaaaatgatatgcctatcctcatggagtgggaaccctcatgtagacaat

SEQ ID NO: 203805 - DNA, 1000 bp, Homo Sapiens
tgtccaggctggtcttgaactccccggccctgagcaatcttcctgcctcagcctttcaggtagctggaaaactttttttttttttttggcgggggggtcaccagaccagtggttttgcaggtgaaacaaccacagtggtgaaagggcccacttttaatgaacagaatgccacttttacatgttctttcaaaacaaagaagatggctgggcatggtggctcatgcctgtaatcccagcactttgggaggccgaggcaggcagatcacctgaggtcaggagtttgagaccagcctagtcaacatggtgaaacctcgtctgtactaaaaatacaaaaattagctaggtgtggtggcaggcgcctgtaatcccagctatgggggaggctgaggcaggaaaattgcttgaccctgggaggcagaggttgcagtgagccgagattgcaccattgcactccagcctgggcaacaagagcaaaactccgtctcaaaaaaaaaaaaaaaaaaaaaatcagaaatggacttgtaagtagctagattatatacataaactccttttagtttttgctttccttcatgctaagctttacctatttgctgtcatctcttataacaacattttgttttcctaaatgtattggagtcagtccatgctgcagaactggcttataggaaattaagccccttcataagatccataaataggacctattgaatatctaactttgaaaagaatgttataggttttagtgcagtatccattttcaaacatttcagaaacctcgcgagtagttttaaatggtcaattctaagtaatgtggagtctgtaagcatacaggtctgaggtttataaacattttagtgagtcactgaaagtattgtataattgtttcctctagaactcttcagataactgctgccaaaaagtgattctgcttctggccaacactttgtgagtaatgaaccatattttccacctgcagggagaagttttcttggaattc

SEQ ID NO: 203806 - DNA, 1000 bp, Homo Sapiens
aagtttttacggatcaaaaaattgtatgcacataccctcataaatgttgttggaaagaattatggaaaaactgagagaggcagagaagtgtgaaaagattacgcttccccctcgcttgtcacagtaccacagaggaggctgcctcagtttcttcactcaaaatgagctactcctaagccacataaaactagttattcctttactaaaaaacaactgatcatcagatttggcgactgtacatttttatctacatatatgcaataaacagctttaattattattcatgaataaggaaggtgctattggatagtttcctctgacagtttgcagtcaaaaaaaaggttaaagataaataacccctaatgtttaaaaaatgtaatattttaactttaataagggtctgaattaaggcagcagggtaagtgtgaaaaagtaaatgaatattatttctagtatatattattaattctttgaagaagaatgatacactcctttcatataatttattttaaaaatagtgatagaggcaggatgaagtagcctgttggatgtgtagtatgtatgatgtgcattatttaggtgtgccttattaaagaagacatatattccaccatcttttaaaataagaaactttctgctatattaaaaattaagctaaaaattttacatttgtttatttctttgtaacaataatgttagtacagttaggcccagcagtagctatatgtatgggcaagagacatgcttatatttacttttttaaaactcatattgaagaaaatttggcaaacagagaaaaaagataccacccatagtaccatcaacccagtataaatgctgttagcatgttgatataacatgtagccttttctctttgcatttttagacataggtataaccagtttttaatcttgtttgttatgtaacagtataggatatgtcacatattattgtgtaatggaagatatattataaaaattttttgaagatttacttaaaa

SEQ ID NO: 203807 - DNA, 1000 bp, Homo Sapiens
gctgctggtattttctttttttttgtttttgtttttgagatgagtctcgctctgttgcccaggctggagtgcagtggcgcgatctcggctcactgccacttctgcctcctgagttcaagcaattctctgcctcagcctcccgagtggctgggattacaggtgcctgccaccatgcctggctaatttttttgtatttttagtagagacggggtttcaccatcttgaccaggctggtcttgaactcctgacctcatgatccacccacctcggcctcccaaagtgctgggattacaggcatgaaccaccgcgcccggctgtctgctggtattttcttagcataacttcattttgtaaattctactttataatattattttataaagtccctgaaaatcatgggattgtttagctgagcacagaaatttctaaatgggttgtgaccaacatttacaggcttatcaggcttagtagttaatttgtttcttgagtttgatttggttgcatggtatcaaatcctgatcaaacagataagtggttgcttctttttttttctttttcttttttttttactggtttgccttgaaatcttagcatccacttcagttaaacagaaatggcattacctgttcccgggggttccaccaaaaccactggttggatggtagtgtgtttaatagttaatgaatactacattgaaatgtaaaaataaagtttaaaagtaggtacgtgtactatattatctctatatttatatgttataaaaagaaacattcacatcaaacatatgtggagtctttgaagcatcttcacaaaatcctagtgttttaaggggtgcagctaggaaaatacttggttataccacattccacccagattgaggctcggtctggaaactggcatgtctgtgtctttggttagtagtaggggctggatgagataggatgacttaatgcaggacttctcagcctcagcactgttgacattttgggctggagaattc

SEQ ID NO: 203808 - DNA, 1000 bp, Homo Sapiens
atgaaggcaagtgttactcatttcttgtgaatacttccatggatagttcatgcatatgtagacaaatataacatgtacatttttttcttttttaaaaaatatggacaataggctgggcgcggtggctcacgcctgtaatcccagcactttgggaggccgaggtgggtggatcacaaggtcaagaaatcgagaccatcctgtctaacatggtgaaaccccatctctactaaaactgtaaaaattatccgggcgtggtggtgcacgcctgtagtcccagctactcatgaggctaaggcaggagaattgcttgaacctgggaggcggaggttgcagttagccaagattgcaccactgcactccagcctggcaacagagtgagactccatctcaaaatatatatatatctatatacatatatatatcggggaatctgccctgatattcacgtaggttcttttctgttttccttaagcattggccagcttgagaagtaaagggacagagtacaaaaagaaattttaaagctgggcatccgggggagacatcacatgtcggtaggttccgtgatgccccacaagctgcaaaaaccagcaagtttttattagggattttcaaaaggggagggagtgtgcgaataggtgtgggtcacagacatcaagtactttacaaggtaatagaatatcacaaggcaagtggaggcagggtgagatcacgggaccagggcgaaattaaaattgctaaatgaagtttcgggcaccattgtcattgataacatcttatcaggagacagggttttgagatcaaccagtctgaccaaaatttattaggcgggaatttcctcttcctaataagcctgggagcgctatgggagactggggtctatttcacccctgcagtttcgacagtaagagacggccacgcccagggggccagttaagagacccacccccaggtgcgcattctctttctcagggatgttccttgctgagaaaaagaattc

SEQ ID NO: 203809 - DNA, 1000 bp, Homo Sapiens
actgcaagctccacctcccgggttcatgccattctcctgcccgagccgcccaagtagctgggactacaggcgcccgccaccatacccggctaattttttatatttttagtagagacggggtttcaccatgttagccaggatggtctcgatctcctgacctcgtgatccgcccgcctcagcctcccaaagtgctgagattacaggcgtgagccaccgcgcccggccttttcttttcttttctttttttttttttttttttttttggagacagagtcctgctccatctcccaggctggagtgcagtggcacgattttggctcactgcaacatcccaggttcaagcgattctcatgcctcagcctcccatgagtagctgggattacaggcacccaccaccacaccaggctaatttttgttttgatttgttttgttttagtagagacagggtttcaccatgttggctaggctggtctcgaactcctggccagaggtgatccaacagcctcagcctcacaaagtgctgggattacaggcgtgagccaccatgcctggcccaaaatatttatgtaaataatattcatttgcactgctgtagaaaagcagagacgagtcctgggttggaactaaaatgtccaatttccagacttcataagtgagattctattataaaatatcgtggaaattttttgcaatggaggatcagagttaatttaatataaaggctgttacaaataagtttcagtacactggagtttgaggtacagggactaatacctggattccatttaaaagctacacgacttatctgaaaaataatctatgtgctggggtttcaacaatctccagggaattcaaaaccccaaaattcccccagctcctttaactcttgaagaaaaaaatgaattctgcagttagtagacaaaacttccaactcttcaggaaaggacagaggtaaaaaattaattcctgggagtgaatgaggatatccctatcaagctga

SEQ ID NO: 203810 - DNA, 1000 bp, Homo Sapiens
aagcttccttttaattgctcacttcatccataggaatttaataatatttacacctccagtccaacaaatattaactcattacaatatacatggtagttgatatttccttttacaaatgaggaaactgagacacggagagattaaatgactaacccaagcacacacactagttactggtggagctgagatgtgaacccaaatattgagtcttcactcttaatgtctacttttcaatcttactagatagtttcttaaatgagtaaagattcccgcaactgcgtctcatgcttgtcaccttgaatacacccaccccattgacagagggagaaaagtttactcttggcttagaatttcctcctcaatctcaccatcctctcttcaggtgttagtgagttctcctaactaaaactgtctgcatttaacctaggggaccagggagtgttcttatccaggatagaaatatgggttggggcaatgggacaatgccaaaagagagttgtaaaaaaccatcattacactcaagccaaaataggaaagggtaaaaatctatacatcattatcatagccattggcatataggccctgccaagtccaccaatattggccatctggtttgcaaatacagtggaattgataaaagaaccattgagaagtttgagaaggcagtacctgagctgggaaagagatccctcaaataagcctgggccttgaataaatcgttaagttaaacatgaacgtgatggcatcaccaatatctttctatggacattcaacaccttcaaatcctatgtgctcatcattaatgtctcaggacacaaatgttttcttctaaaacatttacacatacacttaagcctgatggaattggctaacataaaataattgtttgttttaaaaaatgaattccaccgagacactctacaaccgggaaatatatgacaaaattgttaaagaacccagcccttacttttcaaaaatggctacaacccaaacagtagta

SEQ ID NO: 203811 - DNA, 1000 bp, Homo Sapiens
gtcaagtaatgcaatacaggaaagcagaactttagacctaagaaaaacctgccatgactctgaaaactccacacagaaagcagaacacccccgcacagggtgagtggtgcctttattctgagttatttaaggatccaagtcattatgatacaggagtgagaaagaaattcaggcagataaggagggtaagagagtcctcagcaaggtttccttttaataaaaagcagcccccaatcatttctttcctaacaaaaagcagcctgaaaaatcaagctgcaagtatagataaacaagctaaaagcttacataggtaaatgctagcagctgtggtgatagaagagggatacctggaagccaagtctgttcaacatgaaggatcccccttcccttttcttggtcgccacctgtgtggtaaaaggcaggcaatatgacaccggccaggtagagaccccatctggataataaaagattagggtgggtcggccagcttctttgtgcactatgcaaatggcatgcctagtctgaccaatctctcatgtcctatgtaaatcagatattgcctcctcaagctcgtctataaaacctcgtgcatttcaccaaggacctggaagacccactcagacgcccctctctctccgcaggtgagagagctatcctcttttctctttcctttgcctattaagcctctgatcttaaactcacttcttgtgtgtctgcatcctcaacttccctggtgtgagatgacgaacctcaggtatttaccccagacaacaacgccgcttcaattagaacccttctgtagacatttttttcacttggtaccaaagatggcaaaagggcttcccctttttgggagaaatagggtggaagaaaaataaaagaataattttttaagaaaggaagcacacagagaaatcaagtgaatgttttttttttctcttttgcagcttcaaggaattttagccaatccagagggcttgttacccatagtgtggaattc

SEQ ID NO: 203812 - DNA, 1000 bp, Homo Sapiens
cgaaaatggcaagaaaaatgacttgtctccatatgtatttttttgtgcctgttctgaaatatgggactgcctcgaaatgttggagtccatgcaacagtgatatacaatggtgtggtttgctgtgctgtgctgtgggggcgagtgggagggtactggggaagaccttgcctgctcacgaatcttgaagacgtttggaccagaggacacaagtgatgggctattttggtttttaaagtttctttaggcattaatagcaagtatacttggcctggttggaaaacagtgcagctcatgcagattgagctatggattttcacccattctttgtttaccttaacataaagctagaaagctccattctatagatttaagatgaaccatcctaatctacagatttatcaaatgtaaaccatcctagacctccctccctccaatctttaaacgtgtatttttattttagaaactctaagccttgatttctccaaaagcctccttgtttaagagacaaggtcttactctgttgcccagggtggagtacagtggtgcaatcatagctcactgtagccttaacctcctgggctcaagcgatcctcctatctcagcctcccaaagagctggaactactggtgtgtgccactatgcccagctaatttatttttttatattttttttgtagggacgggggtctcgctatgttgcccaggctggtctcaaactcctggcctcaagtgatcctcctgcctcagcctcccaaagcattgaggttacaggtgtgagccactgttctcggtccccaaaagtcttctttccttttacacagatttcacaaatatatgtgctataaatatgtgtgctatgagaaggcataatatttttctcttttaatttttttctattttgtccattttttctttttgctgagaaagcacaatatttttcatatttttatttctgtattttattttgattttaaaagaattatttcaaatatacagaattc

SEQ ID NO: 203813 - DNA, 1000 bp, Homo Sapiens
attagccaggtatggtggtgcatgcctgtattcccagctattcaggaggctgaagtgggaagactgcttgagctcaggaggtcaaggctgcagtgagctgaaattgtgccactgcactccagactgggtgacagcaagacactgtttcaaagaaaaaaaaaaggaaaaggaaaatcaaagtacatatgtggtatgtacacactatggtaagctatcagataaagataacatgatcatataagaaagtcttacccatagtaatttacaacaaaaaagtacttgcacttacataatcttactctgacattaataagacttttttcttttaagagacagggtctcgctctgtcacccgggctggactgcagtgatgtaatcacagctcacagtaacctcctctcatgggctcgaataatcctcctacctcaacctaccaaagcactgggactacaggtgtgtgccactacacccagcctaataagttatttttatattcatttcttcaatatttattcaccattgtgagcaggcagctgtattgtttatccatgcctggataactaattactccaaaatttagcagctggaaaaaacaaatattttgtaacttaatttgtggaagtcagaaacctggacatggcttagctaggtcctctggagagtctatcacagaccggaatcatctcaaggcttaacagaacacatgaaggatccacttccacacttactcaagtggttgctggcaggactcagtttgtacatgggcctgtccataagataacttacaacatggcagctcacttttatcagagtgagcaaaaagaaagcaaagcccaagtcttttggaagctaatccttttaagtagatttaagtccaccatctcgccatttgttgtctttggctcaactgttctttaacctatcttaaacatagatagattaaaagaaaaggaaaaggaataggaaaaaaatacagtcagctctccataccgatgaattc

SEQ ID NO: 203814 - DNA, 1000 bp, Homo Sapiens
ggcgggacggcgagcgcccccgttccggcgggtccgccgccaccagtgggcgccccgacggtctgggccggggtccgccacgggctccttacccgtagtagcggaaggcattaatgatcttccagaagtgctcacgctcaagcctctcctcctcctcctcggtgctgcgcgtggccgccgccgctgccgccgaaaccgccgcggccgagccccaacgcccggcggaaaactgcacttccacctcctcgctgccaccgcctcctcccccgcagccctcgggcagccgggaggtgggcggcggagggcgacgccgtcgctgcatcgccgccgcggccctcggcctggctcgcttgcgtctctccgcgaccgacagcgtggtggcggctgcttggccttcctctagacggcgcccgccgcggacatgcccccagctcgcggcgcgctccgcccccgccaccctcaggcctccatccgcgctgggctccgccaggtcttcagggctcccagaaccaatgcgcatgcgtgtgccttggtacgcggagggcccgtgcggtctgcgctcatttgctgccgggcttcggagacagcgcgctgacgtcacaaccacgcttccaagggcggggccaaggccccttggtgggaggcggaggaggagctcgtaggtggggtgggactggcactgccgttacctgtgcgcggccgcgtgggtgggacttaaaagccggcgagtgccggattgttgagctggaggctgaacgcggtcccaggcactagcaaagaagggaaaggcaaaaaggaaaagttcggctttgatgattttattcggaatttttatttcagaaagtctagaaggaacgtcttgtatccaccctaatttaagttttaattcacttcctaaatgaattcctatttttaattacttaagggggtcggaagtgggcgccatcatcttttcacttttttttttttccccactctgtcgcccaggctggagtgcagt

SEQ ID NO: 203815 - DNA, 1000 bp, Homo Sapiens
cttatctgataaagaacttaagaacatagaaagcgcccttacaagtcactaatacaacaaaccaattaaaaaatgggcaaatgatctgagaaaagggagagatggagagtgacattaatggatagatatagggactctttttggggagatgaaaatgttctagaattagatagtgatagttctacaacaccgtgaatatatattaaaaaaccaaactgtatacttttaaaatgatgaactgtatggtacgtgaatgtatctcaatttttaaaatgcaatagagagaaaagagagcagagattctttttctgcctctggaatactttaactgtatgtgaagcctagaactgtcagaggcatgtgaaccagagcgactccatcttgaataggagctgggtaaatgagactgaaacctactgggctgtattcccagacagttaaggaattctaactcaaaggatgaagatagggaggacaagatacaggtcataaagaccttgctgataaagcaggttacagtaaagaagctggctaaaacccaccaaaaacaagacagaaatgagagtgatctctggtcatcgtcactgctatactcccaccagtgccatgacagtttacaaatgtcatggcaacgtcaggaagttaccctataggtctaaaaaggggaggcatgaataatccaccccttgtttagcatataatcaagaaatagccataaaaatgggcaccagcagccctcggggctgctctgtctatggagtagccattcttttgttcctctactttcctaataaacttgctttcactttagggacttgccctgaattctttcttgttcgaggtctatccaggaatcctctcttggagtctggattgggacccctttcctgtaactgaactatggcagccatcttgagaccatgagagccagacaaatcaacacaccgaagatggaaagaacctggtccttgacgcaaaatcaaggaccaatcctggaact

SEQ ID NO: 203816 - DNA, 1000 bp, Homo Sapiens
agtactaagtatgtgtgtggcccttttagcctataaactcctttaatcctcataacaaccctctgagctgggcactgctattttctccattttacagatgagaaaactgaggctcagtgaggcgaaggagcctgtccaagctcactcagctggtaaatggcagactggttccagagctcaggctgttagccactgttcagcatggcctcttgcagtctctaccctcttcctgagagtaaatttcagagccaagttatagttcaagaaaagcaaagcaataatcattcttctacttcagaattgctaccaatgaacaatttattttgtgcctacaacagattaagtatctgaataaaaatataaaaacatgaattgattaaaaaatggcctctcataatgtgcaaaacagggtctgtcggggaaattttgagaggtttttgtggagaacaatggttctgaatgttttgtagaaagagcaaccgatttgccccaccctttcccactttccaatggaaaagaatctctgataaagctttgataagcaaccaacgtaagcaaattgtactgccctcttttacacatgattttatactatcatacgatgccctataatgtaaaaactgtacattttaatacctaccctggtggtagatgcacactatttatacagagcacattcaacaggcagcatgtcaccagtgatgcatagctgtttacgcatattgaggtgtgggggtggatcctgtctataatcactgtaagagtatagttaggaataattctatgtgaacaaactcaagtctttaagcctaattattaaaaaattacaggtcaagtaccataaatttgcctatgtgctgcaagagtaatcaaagagatctctacaaacaatgatttgtaatgaaaaggcaagaataacatcaataaaaaccatggtcacctgaacccacactgatgatgtattgtcaacacagagtctctcctggaagtgcaggaattc

SEQ ID NO: 203817 - DNA, 1000 bp, Homo Sapiens
tctggtggctggaggcattccttggcttccttggtttgtggccacattaccccaatctcttctccaccttcacacagccttcatctctttgatatgtctctcctttctttctctctctctctctttttataaaatagagatgggggtcttgttatgttacccaggctggccttgaactcctagcctccagcgatccagtgtgagccaccatggcagcctgtgtgtctttttttttttttttttgagatggaatttcactcttgtcacccaagctggagtgcagaggcccgatctcagctcactgcaacctccgcctcccaggctcgagcaattctcctgcctcagcctcctgagtagctgggattacaggctcccatcaccacgcccagctaatttttgtatttttttagtagagacggggtttcaccgtgttggccaggctggtctcaaactcctgacctcaggtgatccacccgcctcggcctcccaaagtgctgggattacaggtgtgaaccaccacacccggccctgtgtgtcttttataaggacacttgtcattaagttgggggctttcttggagaatccaggataatctcctcatttcaagatcctttctaacatcttcaaagactcttttttcagataagataacacaggttccagggatttctgtgatggttaattttttatgtcagattacctgggccatgatacccagatatttggtcaaacattgttctggatgtttctgtgagggtgttttggggtgagatttccctttagattgatggactttgagcaaagtgaattgccctccataatgtgagtgggctctatctaatcagttgaaggcctgaatcaaacaaaaggctgacctcccccaagcaaaagggaattctgccagcatatggttttggacctcatctgggtttccagcctaactgcctttggacttgaaccgcagctgcttcctgggtctcccccatcagattttgaattc

SEQ ID NO: 203818 - DNA, 1000 bp, Homo Sapiens
tattgagaaggcgttgcaggggtccaggtgagaatgaggatggttcagagtggagagacagggacaaggtaagttggagtgtgggtctgacttgttagccatgtggaggaaataattatcataataactatcatgtatgtttttagggggctctataacttcagtatgttttcagtgttcacatttgtaggtttacagagtttgtacttgataaggtacagaagtaagtcacttctcaaaaatcatgcctttagaagcatatatcatgcttctattatagtaatgataataatagaagtctactgctagtcataaaacttatctgttcagagaaggctttttttttttttcagagaagtcttccaggtttcagctgttgctcattaatgctcaccacagccctttgaggtcgatgcaattatgctttggaaaagctaagtaacttgccaaaggccatgcagctaaaagaagcaaaagctggattcaaatctcagctctctgcctccagagagaacaccctcaatcccgcttaacagacattagctctgcttatttgattggtggcagtggagatgaacagaagtgaacagtgagcagagaggggtctgtaccccacacacatccctgcaccccaactgtcaactgtcttccatcatcatttactatatccacgtccactcctgacagcatcagtggctcagtcttaccgacctgcatcagggttttgggctctgcctctgtttagacagagcacgatttgggaagtgctgctaagtcagccagtggctgagtagaaacagccctgcagtgggcctctgcctgctctgtggctcgtttatcatgtgtctcatctttaaaagttggggctcagtctaggtgcctcctggcctgagcaccccagaattctatgctgatcccttcattgtgacatggcctgtcatctactcttctgggaagaccatctgcacctcactgatacttgaagctcattgagtattgt

SEQ ID NO: 203819 - DNA, 1000 bp, Homo Sapiens
ggcagagggaacaagggggacatgtgggtaagactctttttgtggttgtgaaaaggaacaggtaaagtagactaagcaggtttaggattgactaatttgaataatttcagttgactctgtggtgtggtggctgtctctagttgtctagtacctggctctaggtgattaggcaaggggactaatgtcatcctgtgtgagagctcaataaagatggttgggagtatggactctggattggtgaatttgtattcaaaaagtgggctcagaggcaaataattaactgtctctaggaactgggtagcactggaaggggcagtctttcctgcatcagtgagcccccagatgtcaaagcagcaggataaaaaggcatgctcaacacagattaatttgtgcatgttgacccatgatgggaaaatacctgatcccaaaccttatgtatgaagaataaaggaatatctgtccatcaaggaagggaatttttctgagaatttcatctgtattttttccccctttattttccctcctctgactcatacctaagcctctttgtacttcctttcctcaagcacttttactgggtagaaagctgactccaaggctctttgcaaagattactgtgtctcacacagggcaccaaagagaaggattttcaatctgcaagttttggatcatgaaggaatatgcagtgattaagatgactctagaacacaggcacttaatctcaatttctagatgccatagaggcctcctatgtgaagagggtatttgtttattaattcatgcagatttcccagggatcgaatgccccactgtgtatttaaacatgaaccaaaagaatttacaacaccttcttgcagccaggtaaaaatatttaaccaggaggatgaagaagggaattaagaattcctttacagctccaagtggcagcagaagagactcaccaaatggcaggacaagttctacccgagctgtgagccatactgagctaccacctggtatc

SEQ ID NO: 203820 - DNA, 1000 bp, Homo Sapiens
ttgacccagggctctggccgcccttccaactcccatcaggtggccaagcagttgggatgggcagagccccacagagtagaaagcaggcaaagatcattggatgcttagtttttgtttttttgtttttttaaaccttttagtttatgaattatgttttgcctgagcaattgtttttaaatcaagtattttaaaagttcaactaaggcttttcccattgggttttaacttacagtgccatattttcttcagctactgaaaatccggttttctttgtaaacagtatcagaattttagcgaagtcctatgaccctccatttcctactttttcttattacatgttcagtgtggagatatggacgtcacaaacatcaaaccacttctctgaaataaacttttttggaaataagccattagcaggaagccaggaattctgttgtttgtccttgtcattaactaccttccagtatgcattgcctttgaaaaagaaaatggagttgtatgcataggagtaataagcggaatctatatttctgaaaggatgattttgtggtattactgctggaaaaacttcagtaatcctctttggataagaattaagtactcgatttctgttgacatcaaatgcaaatacctgcaaagcaaataagatagactggctcttctgaaaattattaatattttttggttaatttataacaatgagataagtaactcaagactttgtaccaaattctttagacttgaacttcttaattttccatcatgctctgccattgctatttagatctgaagtgagtacacgttttttgttttttttttgggcccggtctcactcttgcccaggctggactggagtgcaagtggtgcaatcacagctcactgcagcctcaacctcccaggctcaagtgatcctcttgccttagcctcctaggcagctgggaacacaggcacgtgccaccacacctggataatttctgtattttttgttgagaccgaaaca

SEQ ID NO: 203821 - DNA, 1000 bp, Homo Sapiens
ctgcaaaaagaaatccctattaaagtccagttcttgaacatatcagataaattgttccaagcccactttcctttttccgtggaaagattccatgtaccagtttatcaattatttttctagaaggtcgttccactttctgatcatatctcattgtaggcttacttccttgaatttgtctttcatgttttatgactttaactctagattaattctatgcctcttgggtagggggtggctatctttaattaagccccaaatgttatataaaatctttgtgtttaaaaaatatgtgtagaaagggaatgaatgtatgtaaattcaagtatatagatacatgtttctttactttttccatcagctctcctcaattaacaacatcaaaaataagcatgttcgagttgtctctaaataatcagcagaatttaaaataatggctgtgagggaagtgatcctccatgcctatgaaaaggtttttaggcattatttcaaattctctccaaaacgaggtagtcactccattattaaagagacactgtttctgtgacctccaaatgccacttccttagtgcttgctgtggcaactgtgatactgtaattactgacaactcatgttttctaaagaatgcctgttacccatttacaaaagtctttccttctttccctgaacccatttggttctatctaaacagaaatatatgtgataaatatcatgaagaaaagattattgggcaaaaacatttttcccttaagaaatatatcaaataacttaaggaatgaattttgcactcttccaaaatgccattttaatagccatttagtcaaaggtttttatttgaattattcccttctgatcaataatatatacacaagaaattatctgttttaaagaattctctgcatgatcaaaacaatatgtaattgctacttcctttgacttactttgtaacaaagctaatatttggcttttcaacccacaataaataccttcctctctgttctc

SEQ ID NO: 203822 - DNA, 1000 bp, Homo Sapiens
cctgcctcagtctcccaagtagctgagattacaggtgtgagccactgagtccaaagctaataatttggttttttgccatttaaataaggtggttatgtagtaggcaaactctttttggtttatgagtgtcaatctgaagatataagacttagaagcagtagcagatatgcttattttttctccatttttttcttgaactgcaactagaggaggaccaaatcagtctagcttactttctctctctctctctcttttttttttttttttttgagacagggtctctctctgtcacccaggctggagtgcagtagcacgatctccgcctcactgcaacctccgcctcccgggttcaagcaattctcccacctcagcctcccgagtagctgggattaaaggtgcttgccaccatgccagctaatttttgtatttttagtagagaagggtttcaccatgttggccaggctggtctcgaactcctgacctcaagtaatctgcccgcctcggtctcccaaagtgctgggattacaggcatgagccacagaacccggcctagcttactttttctactgtcccatttttcctcccatcttaatgacttttcttatgttttcatattcatttttttctttggacagatctatacttcagaaaaatcactccagtgggctttaagcagcagcagcctatctatttgtagatttcctacatatgctggtttataattcattttggaacaaagttcctttattaaaaagttggcttcatttaaagcaaataacacagtaaataacttggtgatactgatgtattctgattatttattttttagacttcttcaggacaaagattaagtcttggtatccccttgattgcctagcatttattcagtcatttaacaaatatttatggggcattttctgtatgacagatacagaacttgatgctggtgacactaagataaaatattgctccgttactttcagaaatgcataacttagca

SEQ ID NO: 203823 - DNA, 1000 bp, Homo Sapiens
tgatttcattatccaatgggttgtgacttgtagtttgaaaagtactgccctgggggcacggcaccccagcagggaaggtttggtgacctcagcaactgtcagaggtgagtggtgccttctggataaactaacaccttgatctgactctgcccagtctcctgctcctacatcgcatgttcacacacaggccttccactcccatcctacccaacaacttactttccccaacatggcaaaccagttgggattccagtgtctttacaaatgattcctctgccaggaataacaaaacttcagtgccatccacctagaaaacaccttgttattctccaagttgcagctcagacatattatctctacctggacccacttcctctttgctcctcttaccccaagtccataaaagcaaccattacacagcatggcaatcacaccgttgctggtccatctgccccaggagatggtgagtttcagtaaggtaggtaagatcttttgttcatctgtgcatcctggcgttcaccaaggggtcagatgcatggtcagtgctcagagcataaatgtagcatagttcacccctgtttttatgacaactggaatccttcctgtctgctacactagacaaagagctaggcaaaaagccctccaagtagaatcctgcccttcccacatccttggcttggggggtgggttccccttcccttgtatttctgggccattttacccagtatggtgggttaacatggtgactcctgtttcctggctgcttatgtgtctctcattccttgcatcctccaccttggtactgatggacttctctttctgtttcctactgatatctggggccacggggtaaaatttcccagcttctttgatatgggaaatccttattttgtactgtgccttacagatggcaattagtttctaatcatgttgcttaaaagaggatctcccttttttccccgttcctatctgacctaattttttaatgtctagctagatc

SEQ ID NO: 203824 - DNA, 1000 bp, Homo Sapiens
ttttcatcaattcagacacaaaaaaagtaaggcctcagtttaacaatttccatgcaatttttatttgtttccacagaattcttttttaaattaaaaaaggtctcactttgttgcccaggcttgagttctgtggcatgatcatagctcactacagcctcaaactcgggctcaagtgatcctcctgcctctgcctcccaaatagctaggactacaggcacgcaccaccacgtccagctaatttttattttttaatttttgtagagacaagcgtctccctatgttgcccagactggtctcaagctcctgtcctcaatcctcccacttcagcttcccacagcactgagattacaggcatgagccaatgtacctggcccatttccacataattctttagtgaaagacaaaacttcaagaaagctagttacgatgtcctcttacctttattgctctataaaatggcaggcaaattaatttatgcagtactttcaaatggaggaaaagcattccctgaggagaaaaactgcagttatgccaaagaaagactttctttgaattaagcagcaaacaaaaaagtattttaatattttagtttctaattcacaccagaaaggatgtgaagcagcctacacaaacatatgcaataggataattaagaacaatagcagtaataatcattgatacggagcctctcccctgtgccaggcataatgccacatcttttacctggagtgtctccttgaattcggatagtaactcttggaacaaaggaccatcattatccccgttttacagctaagaagactgagactaagagagactaacgctaactagctccagattacataagctgacaagtggcagagctggggtaaaaagaaaaaggacattagtaaatgggaaactgaggccaggtcagcaacacgaatctgagctgagatggagagaccaccaacgcaagcatcggtctttgtttagtcaacttgcatcctgagaatggatc

SEQ ID NO: 203825 - DNA, 1000 bp, Homo Sapiens
gtaatttggtaatatagtttgggaatgtaatttggttcaaggtgatggtggggcttgagggtaagaccaagggaaccagaaattctgttatccgccatattctggtttacagatgaactgtttcatttggcctgcacaggatttgaaaatctatagttccctctagctcctctatttccctgttagatttggcccattcccttataccttcctggctaccctctctgtcttttgaggttgccattcttgctctagggaatagggacctgttcttaaaaggatttaggcagaagagtgacatgattacatttgcactgatttgcactaatttgggcttagttagaaacttcctctttattcctttttactgtatatggctttttactaccaggtcttaaatttgtatcattagcaacattgtttagctacttataagttaagtagagtttttgttttgttttgttttgaaaagttgattgaggacctaataactgtctatgaaataaaaagttataaatgtcaaataagtcattcagttctttagtaagttggaatcaggcctgtatagataattcagtttctagctgctgaatcctgagttaacatttgaaattgttccaaatgggttctactgcaatgataagtagtttcataaactgaagtcatttacaaataatgtatgaaaaaaattcaaagtttttttctcaatttgtccatttattttagtgtgttataaatttgaaacattttaagagaaaagtggtgttttagaggaaaaaatttgcttaaagtattactgtactgtatttaaagtagagattgcaggaattttgatattaagaatactgaatgatctctttatcctttaaggtttattgctaaatgaccttttctaaagattaattaaagctgagttactcttatagataacctttttcaactgcggttccccaccttgaccacaaaacacagaaaattatttgaccatttttttgaattc

SEQ ID NO: 203826 - DNA, 1000 bp, Homo Sapiens
cacagtgcttcactcactcactccaggggcctgtgtagacatgggcacagtgcttcaaacactcactgcaggggccagaacatgtatgtactcgaggcaaggtgcctgggagagtgaggcatacatggaggagccatgcgctgcccaagaaagcaaagggccctggcagtcacaaagagcagctcgtccaggccctgggagaggccgctctggataccatgtcctcggtgactgtgatgggcacagagctttgcacattggaaagagtcacaggaaaggttgtcatgcttgttagtgtgatgagacctggtctctctccactggctgtgatattcaggcagccagacacagggtatctgcccaggacagggctggggggtgcacctcagaggggtgcacacagctggtgggtcgcagttcacttccggtctgtttcttcagtccctttgtcctggaaaggcacctgcttaccctgattgcgttggtgaccccagccagcaagatggcaaatgcctacatccctgatagtgcccacctcttagagcgagcacacgcttggctgctccaggccatcttgtgaggtctcctttcaacatcaagagcctgttgtgttgttgccacatcctgagttctgggctgcaagccaccctgctactcaccgatgccgggagagcaaccaaaatatgggaagtgtcgcaagttcctatgaaggaaggccgcctaacacggaggctaaacacacaggctgtagaaccagcccgacctggtcaaatcccagcgtctcactccccaatccggtgacacagggcgagtgctttcatgtttctgagcctcttaccctcatctgtgaactgggggcaaggcctatgatcaggggtcggcaagataacccaggtaaagcaaggagcccgtgggctcacgcgcagcaagaacgccatggatgtttgctcctctgattatccttgatgttattttccatagttttcttaagggtgaattc

SEQ ID NO: 203827 - DNA, 1000 bp, Homo Sapiens
ttaacatttggctgcatttttataaactttaaaaaagaggattttggccatgcaggtccttttgactaatgtaagtcatgccaatcagaataaaaattggcttagcttacagagttattttatgaaagaagccttgtagaaccctgtgataagtcaatttttatgacattccttctagaatttaactacagagtgttctttttttattatgggatacaatttatattaatgtctagtatctctgtctctaaatgataaggtatgtattggaattaagcttttcaggacctatcaaaatttaagtgatttatataaatagtatatttcttgatgaagtgatctattaaaatcttaaattaactcactgtcttcaataaatgcctaatagatgttctaaggaaaggaacttttggactgtaacatgaattttaaatttaatttaataaggtaaatgttcaagtgttaagtgttctttaagcagaagcagtttaaaaattgagttctattttagtagtgctttaaatatgtcattaaaataattctttcttaatagggtacccatattttataaaatttttataaaatagggttagactattttcttgaaataaataggcacttattaatgatcataaagcttacaacttatgtcttttgcaggataagaactgtgaaaatctaatgaagtaaattttagctaaagtaagatgtactgcattattactgcaccagtgtcaatccattttacattggaaaaaaagataattattatctgccaattatatttgcatgctctctttaaggtagaacatttaagactgaatcttgctttttagaatacttcataaaaaaacaagagttcaaaatattgtgttgttaattgaaaagatatgtaatgcagattaggatattttaacaaacagttaaaattttgccttcctgcccaatattttaaaattctcagtgcaaagggcctcaaatcaataatttgcatgaattc

SEQ ID NO: 203828 - DNA, 1000 bp, Homo Sapiens
aaagaaagatgcctgtttctgccaaagacacctacaacatccaaaggacctttattcataacagctcgaaactaggaaacagcccaaatgtccatcaacagggaaaagaataaatgaacgtggtatattctaaccagacacagcattatctgtgcattttatctccatacacagcaataaatgagaattcttggtaaaatccaacaacctaacttcatttccaaactttatgttgaacaaaataaaccagaaacagaaaagtacacgattcagtttcatcgatgtgaagttcaagaactgacaaggctgttagatggggtatcgggagcacagctgctttaggtggggttgtcatagagtgctgacagtgttctgtgtctttcagtgacacacgagttcagatgcattgagctgtgcgtttaagatgagtggacattactgtatttaagttttgcttcagaaaagtaagctttgagaaagaaaaatagagcattacctaaacaaaggtgcagcctgtggataccctcccccttcctcccacaaaggagcttttgttttgttttgttttgttttttgagacagagtctcactctgtcacccaggctggagtgcaatggcatgatcttagctcactgcaaccactgcctcctggttcaagcgattcccctgccacagcctcccaagtagctgggattacaggcgcacgccaccacgcccagctaattttgtatttttagtagagacagggtttcaccatgttggccaggctggtcttgaactcctgacctcaggcagtccacccacctcggcctcccaaagtgctgggattctaggcctgagccaccacccccggcctagctatattaatactgcagcgactcatgttaggccatgcttgtacattgatgctgtagtactaaagtcccagtggcacccaggtagaccagaactctcatgctccctctggggaggaagccactctggaggggaaaactagggc

SEQ ID NO: 203829 - DNA, 1000 bp, Homo Sapiens
gtggatacctagaacattctctctctacaccaccaacaccaaaaatttctcctggctgatttcaactcattagtttagatctcacctcatatcctctgggaggctttccatgaacgtagttcttatactcctgctatgagctctaatggcattcctaagtctctatataaaagcaaatcatatcaaaattcataagctcatatgttggtggtcactatcctattaaaatctggtatatggtatctgaatgtttgtgttactttattacaatttttaaaatatttgcatattttaaacatatatttaaattaaacatttgccaaaccctgaaagcatgtctacagaacacagcttgaaaaccactgtattagagcaacttcaaaataattaaggaccataaaaagggacaaaaggattccaagcaaggcagaaaggaagaaaagagcagaaatcttgagtaagggaatgggtcttgtttgaccaggagagttcaaaatcactgaataagacagaaaatgaccaatatactccttttgctatctttggtctgctaataacaggattgaggcatcccttccacctgccctagggttgcccaaggggccagagaagagtagacagtcaggtcttaagatcataacttctttctcaatttccagagccttcccaaataattaagtcaagtttgcctataaggattatttttcccaccactaaaatggtgatgagcttgtttgttccacaactgaatattaaaagcctaaaatgttttatacacagctgaagtaactcagaaacgaatcaattcataaaaaaatcataatcaaccaatcaaaaatatatcagattgataccatatctttttctttcaatagagaaaagatatttaaaaccatgaatgaattccatactaaaaaactcagggaaagatgggaagaagggagaacgcagacagcaagaaaacagcaaggaaagagaaggctatggtgttaaggcaaag

SEQ ID NO: 203830 - DNA, 1000 bp, Homo Sapiens
tttgagacttcaaattatatgaatgctaaatcagaaattaaaggcatttaaacaccacaaattactcttgatgacatgtatttgctctggagcaggggtctgagtatcattgcggaaagtcagagaaaccactgaggttataagcaagagtgacgaaagaaatgtgacacagaaaatcaatttgttagtgatgtggagaatggaccagaaaggacagaggtgcaggcaagggaattagaaagctcctgctatgtatatgtcactaaacagtgtatttcacacatctaatctcactcattgcaacagatattttcatattcattttacaaatgaaagaactgaggctcaaggaaacaaaatagcttgcccaggatcacattgctattaaatatcagtgccaatttaggggaagagattgtacaaaattgacttacaatatcctagactacaagagaccttagatcaattactatgataatcctgtcttcagaccagtgctttcaacttggctaatcattggaatcacctgaagagctgttcagactacccagttcaccgtcccacaccaaaattattctgatgatcagcacagttaggaaacttctgctgcaatataggtgattgtctagtcagtctactgaaaaagaagctaagtccaagagattattaattcagcattagatttactgaatttgagataatggcagggcattcagtaggcccaaggaataatttagctagagagatgagaccagatctggaaagaaatatcagaactaaaggaataaattttgaaattgtctgcatggagatgatagttggagtcatgcaaggtcttccaggaagaaaagaaatacaggggttaaaggcaaaattttaatgaatatccatggaggtagaatgggaagaggtcaaggaacaagtagacatgactgagtagtatttagacagaagctctaccagaaaaatgcagtgccacagaggccagatgaatgaattc

SEQ ID NO: 203831 - DNA, 1000 bp, Homo Sapiens
tttcttcctctaccctattgtttatgtaaaaatgcagaatcactgagccagactaaattgtgtattcagtggaaggctgaccaaggactcaaaagaatgcaacttcttctctcttatctacctatgacctggaaatctctgcttcaagttgttgcaccttatgggaccgaaccaatttacatcttacacatattgattgatgtctcttgtctctctaaaatgtgtaaaagcaagctgtaccctgaccaccttagcacattgtcaggacctcctgaggttgtgtcacatgcgtgtccttaaccgtgacaaaataaacttgataaattggttgagacctgtctcagatattttgggttcacaggattgatttcttctaagctctgtctctcctttgcttataatgtgtttcctcctttgtttttacttggtcttccctttgtgcctgtgtcctactttttttttttttttgagatgaagtcttgctcttttcccccaggctggagtgcaatggcgcaatctcagctcactgcaaccttcacctcctgggttcaagcgattctcctgcctcaggctcctgagtagctgggattacaaccatgtgccaccatgcccagctaatttttgtgtttttagtagagatggggtttcaccatgttggccaggctggtcttgaactcctgacctcaggtgatctgcccgcctcggcctcccaaagtgctggattacaggcttgagccactgtgcccggccctattctcctcttcttataaggataccagccatattgggttacaacccaccctcatgacctcattcaaacttaattacctccatgaggatcgcatctccaaatacaatcacattccaaggtaagggggttgagatttcaatataaaaattgggggagaacacagttcagcccataacacatgctaagtgtgtgctttgggaaaattcagagaagagtgagctactctagatattgctaatagtagaattc

SEQ ID NO: 203832 - DNA, 1000 bp, Homo Sapiens
tctcccactccacatcaacacagaggtaacatttatttctcagtggtgcattccaagaatagtctgtgtttgcaaagccctcttacgctcatttctgagctcatttatttatttaagagctgcacaatcccagccttgtcctgtagtggaaagagattctaccacgttcagatagcaatgactggtttagaaatgatttgtcttagtccaagccaaagtctcttctgcatccttgattatgtctaaatgatgctcttatccttaaacagaacccactttcttagtccaccaggaagcacttgatttatttaccagctccagggaagggaggaagcagccgtccaaagggtaatcacacagccaggtgagctgccactgagctgtggcccgggagaaaatggttttaagtgctgaacgggtttggtgtcgtgccagcctgcttgctaaggaactcgctcagtcctgcctgggaaattagatgggcaggcaagtaagtattcagaacgcttccaaagggggacacaggcagctgtcattgtcctggccacgggagacagtcacaaggggacagtgctcacagcacatgtgacctggagaagagagacccaggagagtgcagttgttcacagcaatccagccctcaagggtagagagcctgaggctcctcctggatccataaagaactggtttccctaatgagtggcttggatgattcatttaagggacaagtacagccagtgaacaagatggaagcaccagatgtcttaaggcagacagatatcttgattgagtctccataggacagatgaccaccctggcccatcaggtcctgagatgccacaccccagctatgtggattaagggggcactttccctgagagttggccagagctctaaaaagaattccaggtacagatgcaagattacaaattaataggacagctcttaaaacttcattcattcactgaagcctgctatgcaccagacagcatgttaggtt

SEQ ID NO: 203833 - DNA, 1000 bp, Homo Sapiens
gagaaaaagataatttgtgataccagtttacaaggaaaaatgaggggtcttaaattttgacttcttaatttaatttttagattaaaatgaaggcactaagaattatagatttcccttggagaaactaagaatataattttcctataattgttctttataggttttagcaaacatactctcagtagtgctttgccctggcaggccctcagtgaacatttactgaatgaatgaatgaatgaatgaatggaggacgcaccattcccatctacagcaatggcagggcagcactgggctctgctgaatccccacaggaactccaggacttagagttttgcatgtgtcgtgtgtgtgtgtgtgtgtgtgtgtgtctcagtctgtctagtgtcgctatacaggaatacctgaggctgggtaatttatttaaaaaaagaggtttttttggctcaggggtctgcaggctgtccgagaagcatggaaccagattctgcttctggcaagggcctcaggaaacttccgctcatggcagaaggcaaaggggagctggtgtgtacagagatcacatggccagagaggaagccaggggttgggggcggtgccaggctcctgttaacaaccagctctctggggaactgagtgggaactcgctcacccctgcaagggggcattaacctactcatgagggatccttccccgcagctcaaacacctcccacctccacactggtgatcaaatttcaacatgagatttggtggggataaaccaaccacatccaaaccatagcaggaaagctactgagtttcaacgagtgtaagtaggagccacttaataaactatttgttggatacagagatgaattatttagatgattgattttaaaattttcagtagtatccatttatcctttctctgtttgattaaatgaactggtttatggagtcagcctggaaaacaccagcactctgcagcagggtcaggactgtgagacccctgttttgaaaca

SEQ ID NO: 203834 - DNA, 1000 bp, Homo Sapiens
gcacctccccggccgctggggcgcggtacgcccggcgactagcgtaagccgctccgcgaatggcgctccgggggctggggcggggggcgggggacgggggcgggcgcgcgcgctccgctggctcgcgggagggggcgcgcctcatgccgccgcagcagcagatctccccgctttgtgcggccgcgcggcccggagagccccctcctcccggcccggctgaccgccccgctcggcctggccttcccggccacgaaagacgagggttgggggcatagcagggtgagagtagtggtgagggctggtgtggcacgtggggagggggccagagccctaggtgctgcacctggggaaggagagcagacgtcgggaccggggatcccagggttagctagcgttttcccggaagggcaagaaaagatgctccactggcccccacaaagctgaccggactcccttttgggtggggaccgggcgagtaaaagcagccttttgaatgttgacttctcaatccttttcaggaggccctccgcctgccctactgagcgaacctttaagcccccaagccagtgtttttggaaagagagtggtcaatttcaggaggacattaaaagccaacctcccgggcttcagccccagctcctactgccttccagccactctcccctgcctttcctttctgcggctcttaggatgttgttgctgcccttaaaggccgtcgtgtgagtgccctgtcagaagaaagcttggtggtggttaggattttacagaaggtaattaggatttaggctgaatgtacatttgcaataaaataaggttgtgttagtgttgtgctggtgcctgcaactttacctcttgccaaggccagaaaattctgccacgtttccctaaacacctataacttggccctcttgtgtacaggcagtattccatattattacacgtggtgctgatttttaatgaatattataaaagtttggctcgctctactgagagaaggatc

SEQ ID NO: 203835 - DNA, 1000 bp, Homo Sapiens
aaagctaaaatgtaggcaagacagaaaatggctttaccaaggactagaaagaaattagttaaaaattaaaaacttcccttgccaagcattgaaatattgcacaaggcgaatatatttattttattattttattttattattattttttgagaacgagtcttgctttgtcacccaggctggggtgcagtagagcgatctctgctcactgcaacctctgcttcctgggttcaagcgattctcctgtctcagcctcctgagtagctgagactacaggcgcgtgccaccatgcctggctaatttttgtgtctccgtgcccagcctgacaaatatatataaattcaccaagtatggccagaaagcctctcccttcaaacaggctttttgtaagtaggtggagtgggtatccccagaacgtatcctttcacaagtgggctttcagagaactggcctgctgcataaaatcctccacttttggctgtgaaacctatgttggctgccacttacctttttcaggctcctgtcggggaatgtgggggttcttgtgcgcaccacctctccagccaggcttcagctccctacgtccctaatcctcagatctgctgcctcaggtgcccttggtgaagcagtctgcactggtgggttccactgataatgtcaaagctgcttccactccttcagcaactctattacataggcatcagatgatccttcttcccacagaggctggagaggctgtgggacctgtcacacaggccacacaacaaaaaggacagagtgaggattcaaacctcactgtgtctgattccaatcacatctggccatctcatcccctctgcttctgactgtgagtggcagcgttgcctcctcaaaccttcagtcacctgttgcacctcagccatggaattccagacactccatcccctgagaggggctgcattattcccagtgggggctcctggtgggcctgtcttggagagacccttccctaccttcctcactg

SEQ ID NO: 203836 - DNA, 1000 bp, Homo Sapiens
gctggacatctacaaatattgaaggagggtggcattttttttaatgattaaaaaccccgagaagtcttttgttattcaaccaatgtcagtttttgttcaattaagatcactttagtttagcaaactaaagtttgctgttatttcccccagtttggagaaatttaagaagtcagaagcaaacatgacagtgagaaatctgatctgaaattgtctgggcaattccgcaagttcatcaagataaagactgacaaaactaagcaagggtcccttgactcaacccctgctagggacccacttaggcacacaagtgggtaaaatggccagggagtggtgaagagaaattcctgggtctccttgaaatgagaactccacacactgtggtactgaaatccacaggggaggccctgacgagggccctagttagaccgacagaatatacgcatgttagggctggtagggttatggcagtgggaatgtttaaacagattttatttaaagaggttctgcctgggcgtggtggctcatgcctgtaatcccagcactttgggaggctgaggtgggcggatcacgaggtcaggagttcgaaagcagcatcctgaccaacatggtgaaaccccgtctctactaaaactacaaaaattatccgggcgtggtggcacgcacctgtaatcccagctactcaggaggctgaggcaggagaatcacttgaacccgggaggtggaggttgcagtgagctgagatcgtgccactgcactccagcctgggcgacagagcgagactctgtctcaaaacaaataatttctgcctcctttacctggatgtttcataggaatggatattgtatctggttggggaacacttttcctacccagtattgtaaaaccagaacatgttgataaagtccgagtggaggctacagttaagaaagtcaggctggatggaattaagttaaacctgcatgggagaggtggtgtatttgaacacccttcatgtgaagcg

SEQ ID NO: 203837 - DNA, 1000 bp, Homo Sapiens
tgggcttctaaggtcttgggcacctctgcccctgttactctgcagggtacaattcccatggctgctctcaaggcctgttgagtgcctgtgacttttccaggtgcatggcacaagctgttggtggatctaccattctggggtatggaggatggtggccatcttctcacagctccactgtgtagggggctccatccccatgttatccctctgcactgccgtagtagaggttctccacaaaggctgtgctcctgcagcagacttctgccttgacatccaggcatttccatacattctctgaaatctaggcagagactcccaaacctcaactcttgtcttctttgcacctgcaggccaacaccacatagaaactgccaaggtttagggtttgtatccaatgctgcgggagggacctggtgggaggtgatgggatcatggtggcagatttccctcctgttgttctcatgatagtgagttctcatgagatctggttgtttagaagtgtgtagcatttccccctttttgctctcccctgctgccatgtgaagatgtgcttgcttcccctttgcccttctgccatgattgtaagtttcctgaggccccccagccatgcttcctgtatagcctgcggaactgagagtcaattaagcccaagctataccttcacctgtgatagccgtggctggagctggagtggccacaatgcatggttccatgtcctgatgctgcacagagcagtgtgaccctgggcctggcctgtgaaaccattttttatctcctaggcctccaggcctttgatggaaagggctgccgcgaagatctctgaaatgccctggaagcattttccccattgtcttggctattaacattcagctcctcatgcagcatttccgcagccttcttgaattcctccccagaaaattggtttttcttttctaccacatggaatggctaacggggtgaaactgcatctctactaaaaatccaaaaattagccgggcat

SEQ ID NO: 203838 - DNA, 1000 bp, Homo Sapiens
caaatgccatgaaggaaaaaaaagaagacatctccaaaagaagaaaatacaagatcagtcaatatgcacataaaagatgttcaacatcattagccatcaggcaaatgtaaattaaaatcacaaccagatacactagagtggctaaaacttgaaaagtcccataataccaagtactggaaaagacacggagcaactggaacactcatacattgctggtgggagtgtaaaatggcatgatcatgaaaaatttggtagtttcttattaaatcaaacataaacctaccattcaacccagtaattctactctaaggcatttatccaagggaaatgaaaacatgtctttacaaagacttgtatgtgaatgttcatggcagtttcatttatagaacaaaatggaaagcaacccaaatgtttatagtaaatgaatcgataacaaattgaagattggtaatacaatggaatttggctcagcaacaaaatggaacagcagaatgagtatgaccccccgtgtcttttcacctcatccttcagtagtggtggtagccacagcatcactcttcagtggcaacatgaggctgcgccccaagcaagccgctaggttgttggtatgaagaggtggggctcagtgccctgaaggagtgtgtgtaagatgggtatggctacctggaaatgggtggcatccctagaaaaccttccacatacctacatgctgcttgtgtgtgttgttggccacctctccaagagcagagcagtgagagtattcactggtccggtaggaaaagcagtggggactgagacctggtaccatctcctggtcctccctgcagagaaaagatgaaaactagcaagagcttgactaacaaatgcctggattcagataggaagacttcctttgtctattgcttcattcctggaaattgcactggaactctctgattaagaaaaagcaaataattctgaaagaaaaaaaaataacagagaacaaaatatcccagaattc

SEQ ID NO: 203839 - DNA, 1000 bp, Homo Sapiens
ccaaaggtggccaccatcatttccttctctccctatatgtgatttccttctctattggctccattcatcaagaagtagaggcgattcctgctcttcctctttgaacttgggccagtcctgtgatttgccttgaccaattggacatggaggaagtgatactgtgccagtgcttagcctggcctttgagaggcctggcatcttcagctctctctcaggagagaatgcagcaggcatgtaagaaggctgatgaatcagaccaccatattatgaggaagcccaagctagccacatggaaatggcacacaaaggaaagctgaggaacgaaaccaacagaagcatcaggtccccagccatatgacccagttaagccaccttagctatgtggtattccaggtaaggttccctgctatgtggtattccaggtaaggtcccagaatttagtcatggaggtgagccattccctctgtgccttgtacaaatttctgagccaaataattttgagaaaataaaagacctattttatactgtgaagttttggtgcatgctgttatgtagcaatagataacctagagcagtggtctagcacttcattttggaatgtgggagtacttagtttactgctttattcttagccttttgaaacctcagcagaaaatgagacaagtaaaatcccattttaacatcctgttacatatatttcaagatcatctgtgaaaatgtacatgtgatgctttgttaacctttaacagcctgtcttaaaagacactatcgtcgagcagaagcctctaaaaacagaatctttacaatcagcaacaggctggctcctgacacttcgggggatgaggcaagagtacgaatagagacctacataccacatgtttagatacttaaaggctgtaaatcaagctaacaacctattaaacaaaatatgctgtagcttgctgctttgaaaaaaatactgtcatgatgaccttgaagtccaagttcaaatttagaattc

SEQ ID NO: 203840 - DNA, 1000 bp, Homo Sapiens
caagccctatgaggcagatagagctcagagatggagtaaaatccacaatttattatggaaaataaaaacataagatggtaataaagtttcttgatgagaaatttattctaaggatacagaagaaatcaatccaatccaagtgtacctttctccctcttaacaaccagatcaataatttagtaagaaatattaaaaggattgactgaaattaagaaccttaacacaatatatatgaagacagttactccattaattgggtttgcaaaaagattccctattgtgcattaaaatattaataaccattatggaacaacaacagataattaatgtataagagacagtatagtgtggtgagttagaatatagactttggagccagaatgagcccaacgctggctctgccttgaccttgtgtgaccttgagatacctaaactctgtacctcagttttctcacctgtaaaatgggcataacatcagtacttacctaaaataggtatcatgatgcttaaataagacctgtagagtgcttaacatagtacctagcgcatagcaaatgctcaatcaatgtgagctactgttatactccctcattccaaggcaaccatatagaaaataggcctagacgctctatcaaatagccactgagaatcagtgaaatgataatgaaactgtaattttttacaaaagattccagcagtgttgttaatctcaaagttaattctacctctagcacttaattctgggaacccaagaaaatgttggtaaaacaaggaaagaaaggaaagaaataagcaacaccctctctgctttttgattctttaatactctcccattgctcactgcttgtctggattttcggcattaatagacaatcctcttctcagatcagacacaagcatgtctgagacagaaactgggaatcctgcttcttggggaaaaataagcatagcttttcccattttctccacctctactgtactttttgcaggaaaaaagctt

SEQ ID NO: 203841 - DNA, 1000 bp, Homo Sapiens
tttcatttttctttcttctgtcacatataatcatactctttaacactttttttccaaaaaaaaaagaaaaaaaagtaaaattcattctcatttttctctcattctccttcttttgctcttactcacatttcattcatcctcttgttcaaatattcattgaaaagatctctataaggcagcttaatacttatccagtatgaggctcgcaccctgtccctgtctaccatcactcctctcaccaaggaatccctttatctttgttcctggaagttcaagtgtacagggtttcctagtcctgtactatggctcaaccagaacgccaggcaaccaaccctggcacagtctaagacttaacatgcgattaaaaagccacttgctttccagccctgctgtacagaagctgccctatgccaccacctttcttggtgccagcatgattcaacttagtgatgtcagcacggacctttcactacccatcccattcttctctccagtatcagtgccttctggttcgtgaacctctgtctgaattaactacattcctgcttatcgggtgttctccagcaccgtgtcctcccagttactgcctgccaatcttgcctctaacttactcccagcctttatattattcattcatattctgcatacaaactattgctatcattcttgctcataactttgctctaaactttactatctggacaagtccctggtgtcccaattattcacatatttccatcatgtacaaaatcagaatcctccttttcctcatattatgttttctctttcctaaactctcaatcacaaatccctgaggccacaaagccctggccccagcctgactggtctatggcattatagacaggcagtcaagatcccaaatccagggagcagagtggcctcaaccacaacagacagcagtaactgagtcaagtaccatatgaaaaagcaagaagaggccacaaataatcttgcaggttctcagagtcgtgcagaattc

SEQ ID NO: 203842 - DNA, 1000 bp, Homo Sapiens
agcactgagctttgtatttcctttttatgccaaaccaggagaaacaaataggaactctgccaacttttgtttgcaaacccctttcacggtaatctataatctcacaaactcccttagaaaaaaatcaatttaacattttttcatggtgtatgaaagaaatgattttgtttaaaatattttattgcatatcaacatgtttcaaacattgtactataatcatttcagtatacccttcagtatttattaagacaaatttcactttccacattcatttagtgatgggctatatttaatttgttttaaaataattgggtcaagaaaagcaagtgtgttaacaaatgaattgtaaaatggtattgtatttagcttgaagaccgaatgtataagaaagtatatgctgttatggcatcaaaaaagacaaaacacttttacagcatgatgttcagaatatttgaaattatgcttaaatatcaatggattattttgatgatttttatttatttttaattttttatttttttgagacagagtctcgctctgtcgcccaggctggagtgcaatggcacggtctcggctcaccacaacctccgcctcctgggttcaaacgattctcctgcctcagcctcctgagtagctgggattacaggcaccttccactacgcccagctaatttttgtatttttagtagagacggggtttcaccatgttggccaggctggtctcgaactcctgacctcaggtgatccacccgcctcagcctcccaaagtgctgggattacaggcgtgagccaccaccgctcctggcctgttttgataatttttccttcctaaatgatgagactagagagaagttagcctgccacttgcaagcgttctcttcaaagaacacgttgcaggtgtgaattctctttggcttaaaaaccaaactgaatataattttccttatatttactccatttaacattggcatttagattaagagtcattctgaggccttgcc

SEQ ID NO: 203843 - DNA, 1000 bp, Homo Sapiens
caagttacaggcctcaaagtacctgttattgcatttataactattacaaggagcaacaaataaacgaccggctgaagtatatattaatgctatgtggaatctataatcattcaaacacttttcatttataagtgacttcatttaagattttataaatttttttatcaacttttaaattgcctgtaaaatggaaaataaataattgcagaatgtatggagcagagatatacagaactcaaaagtaggctagaatttacactgacacactatctcccgtaacttcttttaaaatggctctttgaaacaaaaaacaaaatgaggaactacttataatgcaatacataacatcataaaacaagttcctctgaagtactagatttaaaccaagaaagtatacttaatactaagaaagcctccaacagcagcattagctgacttctagaaaataacttctactaatgagaataaagcaaacatacacatagaggaagatgttcattgcagagttatttaaaaagtcaaaaacagtgtactagttgcgttgttaaagaaaaaaagaaacgggaaaaaaaatagttatttggaaagccaaagaaaaaagcaaacaacctaaatgacaaataagaacagaatggttacataaactatagtctctcatccatgtactaaccaagcctaatcctgcttgccttccaagttagatgagatcaggggtgttcagagtggtatggccgtagatgatttggtcatgcaaaaacactggatttcagccattgtaacggcataaaaactacatattaacagtaaaagttcaaggatgggaaacgtaaagaggattttgcttttcaagtcaaagtcttttggtaagttttccttgactacatacaggaagtacttaaataattcaagaaaataagcttttttcccctaaaaagtaataattacatcataaataaagcactatttaaacaaagtgcaatacactcacataatggaattc

SEQ ID NO: 203844 - DNA, 1000 bp, Homo Sapiens
cagtctcaggttcctcattttacagatgaaaacatgaaacaggatgctggaatgagtactgattttcaaaaacagaatttctgattccaggaatatttcctgattttaaaatgggaaaagtattttcaccatgtactatatacaagtggggaaacttcccatgaaggctgcctctgcaagttgcagctgccattaattcatctcttaaataggataggaaaccatcttttgtagctatcgcttattttcctattgaatgctgcctttccatttagatggtgattactgtttcagtgctcaatgcaatcagtgaatggagagagagatccatgttatttctgctcctgtgaaactgattacattggtatagtcctggataagcacttataaggtacgtacaaatatcattatgctgccatacaggttatccatatgctggcattatggttttcagatgacttccacctgtagcagtgtgtaactgaaaaccaatcactcctctcctgagaacatcacaattcctgctgctgaaatggaaattgacaggagttagatacagctgtacctgatcgtcaagggataaattattttgtgtaattgttagagccttgctaagacctaatggaatgaacatgttgttttccacacccgtgggtatggatagttcttacaaatattgtgtgcttggatttaaagtagtgtgagactgtcagtctgttgacaatgagaaaaattaatttgaactgctgatgaggaagggaaacatacacaatgaattaaatttaatagactgaaaaaaattggtttcttcttactatttccgtgtgggaatatgtcagacttcatttaactcaaataactacagatatgaaggacagccacactgcagcctctgttggagaattctgctggcaatttggtgcatccactatagacactgttttggtcaaacttaccttttaatgtgaaatggaatgatgtatgtcctgagcagaaaaca

SEQ ID NO: 203845 - DNA, 1000 bp, Homo Sapiens
taaagtctatggatagattatattacctgacaaaggagaattaagactgcagatggaattaatgttgtaaatcagctagctttaaagtagagaggttatcctggattatccaggggactcaacgtaatgagaaccgtccttaaaagtggaagagagaggcgaaaagggagaacagataaatggcagcatgagaaggatttagcctaatgatcctggctttgaagaaagcgggggaatctacaagcaaaaaagggtggatgacctctagaagctggcagagaggcacagaaacagtgtcactagagccatcctaaagaaactgagcctggctgacatcctgatattagcccagtgagacccatgctagatttctaacctacagaactgtaatataatacatttgtatttgtcttgtttcaagcctctgtacttgagataatttatgacaggaaactaataccaaaaatcctctgtactggttaagtccttgcttaactttgactttttatctagtgggctccaaattatcggctcttcagccttaactgtaattctgcctctggtcctttggtcttagtaattgcatttgatgttgctagcatttgaaatgtggctttaccaaatagattatgctttgtctacctccctgcactatcgcccttttagcagatccccagacaagtcacccttcattgtcatgagggagaagggggtttagctgggcaaagcctcaacaccgttcctttcctttccatttccatggtcctcactgtatcccatgttcccagcacttacatcctggacaatttctttttcttttattttttttttagagacaaggtctcattatgttgcccaggctggagtgcattggctatttatagatgcaatcccacaactgatcatcatgggagtttttacctgctccatttctgacctgggctggttcaccccacctaggcaacctggtggttccctgttcccgggaggtgaccatatt

SEQ ID NO: 203846 - DNA, 1000 bp, Homo Sapiens
tgagcctccagatgaagcacagcacaaacaaaatcttgattacagccttgtaagaccctaagcagaggacccagttaagctatgctcagactcctgacctatagaaactatacgattaaaaataatgtgttgttttaagctgccaagtttgtgtaatttgttttacagcaatagaaaaccaacacattatgtttactcccctggtatctcccctctaccattaacatcttatttttacactgaagatattttagttactaccaaatgctttgcatgtttccccaaaacaagcaggtcattattttaatagttaaaatataggctggagagcagagagttgtgaagagtagcagagaggacagagcctcagctagtaataatagctagggccagccatggtggctcacacctgtaatcccagtgctttgggaggccaaagtgggaggatcacttgaggacagaagtttaagaccagcctgggcaacatagcaagatctcatccgtacacaaaattacaaacattagttgggcatggtggtgcatgcctgtagtcccaactactaggcaggctgaggcaggaggattgcttgagcccaggagttcaaggttgcagtgagctgtgtttgtgccactgcactccatcctgggcaacagactgagactctgtctctaaaagataatactagtatcaataatagtaatagctaacatttgttgagcatttgctatatactttgagcatttatactattctagtttttatatacatatttgaattcactaaaataaggctggtacctctagcttcatttgtacagataaagaaattcggataaaaagagtttgagaaacctgtctaagtttactcaactagaaatttgtaaagctaatttgtttgagtttaggtactatgttcccagagcctgtattcttagccaccatgacttattccctctcagtacaaatatatggtcatgcattagccacatctaataaagat

SEQ ID NO: 203847 - DNA, 1000 bp, Homo Sapiens
ttttccattctgtccatctattatcttttaagtggcacatttagaccatttacattcaatgttaatattgacatgtgatgtactgttgcagtcatcatgctgctacctagttgcttggttttcttcaatgtgttacagttttataagtcctgtgaattttttgccttcaagtgtttttatactggtgcatatgacctttcatttagatatttagaactccttttgcatttcttataggtctggtctggtggagacaaattccatcagcatttgcttgtctgggagagacttcatttctctttcacatatgcaatttagttttgatagatacagaattcttggctgacagttattccgtttgaggagactaaagataggactcaatcccttttggcttgtaaggtttctgctgagaagtctgctattagtctgataggttttcctttgtaagttatccaatgcttttgtctcactcttcttagaattctttccttcatgttgactttagatagcctgatgacttggtaatgtctttttttataatgaatctcctaggagttctttgagcttcttgtatttggatgtctaaatttctagcaagaccaggaaagttttcctcaaatatttcctcaaatgggttttccaagctttttgctttttcttctccctcaggaacacctgtgattcttagatttggatgttttatacctaaacccatatttactggagactttgttcatttcttttaattccttttttaaaatttttatctgattgtgttaatttgaaagccttgtcttcaagctctgaaattcttcttctacttggtccagttatttctttatgttggtttctaactttctcttggatatcatttagcaacctaataattaacattttgaattctttatctgatatttcaaagatttcattttgatttggatccatcactggagagttagtgtgatctttttgggggtgttgtagaactctgtttttg

SEQ ID NO: 203848 - DNA, 1000 bp, Homo Sapiens
tgccttggcctcccaaagttctgggattacactgctcttggcctccatttcatttaagtcgtccctgtcttttgaactgtaagcgttttgtgggggatggaaagtagcatctcaatgcatttccctggtaaccaatggtgttgagcatttttcagagtacttattggcctttcctaaatgttgttttgtgaagtgtatgtttgaatttttgtccatcttaaaatttgtttgtcttctttttatgaagttgtaaggatcctttttgttgttgttgttgttgttgagacagggtctcagtcagttgcccaggatggagtgcagtggtgtgatcatggctcactgcaacctcaattttctgggctcaggtgatcctcccacctcagcctcctaagtagctgggaccataggcacatgccaccacgcccagctactttttttttctttttgtacttttttgtagagatggggtttcaccatgttgcccaggctggtagcgaactccaggcctcaagcgacctgcccgcctcagcctcccaaattactgggactacaggcaagagaatcctgagcctggcccaggattcttcatgtatactagtttggatacaagtctcaatagatagactgatagaaacagatggggctatctctgtgtctgtctccatcagtctacatctgtatttctctctccgtatccatccatccatccatctatgcattcatctgttctttggattgccttttgttgtattgttggtgttctttgaaaagcacaaatttttaatattgatgaagcccaattttattattatatttttatggtctatgctgtgttctaagaaatctatcataagatcatgaaaatttgtacttgctttttttctagaaaccttatagtttaggcttagcttttatgcttaagttgatgatccatttcaagtttctgtatgtagtgtaaaataaatctttttgtatatggatgtccagttgtatcagtaac

SEQ ID NO: 203849 - DNA, 1000 bp, Homo Sapiens
aggactttatttccaagaatttcctcattcaacataaaccaacgtaaacataggaggggagacatattagcccatacacacttattgtacatttggcacagaagggattctttgacaagctagccatgtgctatcagagaccaggaacctggaaggaacaggcaatgagctgggtacactgcctcagtggtaggcagtgtggtgcaacagttaaaagggctttgcaggctgactgcctggattccgaatccaactcacccacaccctcactgtaccatctgagacaagttatttcatctccctgtgccttggttttcctcctccataagtgacgattaaaatctttgcttcacttcacttcttcatagggtaaatgtgtaataattaaaggaaatagtgcaaagaaaatgcctggcacaacgtaagagcttagtgactcttaacacgtatggggagggggatagagagatacagaacagggagggcctctagggagcaaatcgttctgtccatgcattcattcactgagagctgattgagggcctcctgcaggaaaagcctaatgctatggccaacagagaatgtcaccagtgggactctaagtagcttgtgcaccaagtcattgtagggatgctagggccccaaagagggactaaacataaacttcttccattttccagttttgcctgggtaggctctcagaacaggcccagggctgcctaacacggacccacaagcctccacatgtaaaatgttgtttttttaaaggaacaaagttagcttgtggagccagggtgccacccagtggccaaagggcacaataccacacaaaggcatcagcccacctctttgcagaggaggacctgtggcctgaggcccccgccaatgctgtaatgtggggcccacggggcatctccttgcacagacctgcacagataacaatcccaaataagggagccggcggtagctgaaattcacatgagaaaatgaaaaatggatc

SEQ ID NO: 203850 - DNA, 1000 bp, Homo Sapiens
tgcctgatcttctggaacatgggagaaggcagtctttcagagtgtctctcaccaacgcgggacagctctatgctgctaacaagatgtaaaaatcccccctggcctagtgtaggacacagatgttacctaagagcactggctggtcattaagtcaagaggtgaagtgactgtggaggagaaagagttagagtaaatggcccaagctaggaattaagtggcagtcacagccagtcttgggaaaaaatatagcacccacaagcattaggatggggacttagtctatcagagggctgatgccaatgcataacacagacaaggaaacagaaggcaatctgtctcatctacagttgcatcagacacagagtcaatatgaaaggccaagggacaacattctttagtgggagcctgcaaacaaccgaagggtacacattgacctgacgccacttccccacctcatcatgctgcatgtagccatgaaactcatagtctccctgaacccaagcaaagaagaaagagcagaggaaaaaagccactgaaagtttaagtgtctgttctaaagagttggatttatccagaaagcaatgaattttaactggaagtcagtaagatacattcaagtggcatataagtattccttccttaagcagaaatgggtgctggcgagcaagcagtattcagttatgcagaaataaagttatatttctacccacctcagtcacagtgtacaaattttaaatccactctatatgtaagggccagtgatttatcagtgctgaattttacagtaaaataaaaatttaaaaagttaccaatggctaagtatagggcagaaatcatgaggaatattaaaaaaaaggttacctcccatccaaggagaaacacggtaaaaggtgattcagctaaaatattataaagccaaatatgaaaaatatatgccctgcttacaataaacctataatatagccccaacatagttatttccaattggtaagtggaattc

SEQ ID NO: 203851 - DNA, 1000 bp, Homo Sapiens
cactcactcgtctgaagttaagatctagcaaccacaagcacctgcgaacaaaaggccaccaggatgcacagctgtcacaaagcccctgattttctttgtaggaatatcctcaaaccacttcagaatctcatccagtaaatgaagatgaagattcaaattagaagcaagaaatactggaatagcagcaagaaatgatgaggcaagtaagaaagtgagaaaagacagaatctgcaatcatttaggatcgctatgtgtggaggggcgtgtgtacatatgtgtgtgtgcattccaaatatgtaatcaaatataattaatggaataaacatgtaatagtatttgatattaattacagagacttcattcatcaagagaaaaattattaaataatgtgtggtttcataaaggtagggaagatcatactctggaaaccattaaatcagaattgcttaatatttttaagtgtctatatgaataaacttccttaatgtacaaaattcagatatgaataattcctaagaaatgtgactaccttaagtttactaatttttaaggttagaggtgtatggctttcatatgaattaaaatgaatattatacaggattacctactgggcctcacaaatttatcagagaacagtatgtcaattggggatagaaaatatttccagattcatttgaacagactatttttacatattgtaattcctttgcaaaaaaaatttgattttatctttattttgccttttaaaaaattcatcattaaattgtaatattctgcagaacactgataatgtcagtgtcattgttccattttaatgtcatgtcatacatactgttagagttctagtttctcttcagaccctcttctagactagacccaacatctggttctggtgcaccatctagtggctgtaggaatcactgatgcctgaatgttacttgcttttactgcattgtagaaattactagagcatttattttttagaaaatagtgagaattc

SEQ ID NO: 203852 - DNA, 1000 bp, Homo Sapiens
ctaacaacaaatatatgaaacaaaatataattgtatttaaaaattaaatacaaaacatttattttataataacgcagtgcactgaataaatagaagctctacttcatggctttacaattagtttgcctgctgtgcatgaaacatttactattccctggctctctggagataaaggtgacatttctttaaggaaccgactgtggccttaccgcctgtgagaaagaggagcctcgagggaggtcagcgacgagctcagactctccttttatcctttaggagatcacacagccatcaccaggctggaaggtcaccacagagcacagttctctgctcgcacttttaatttttttgttcaaagactatggcagcatattgttacactaatgtatgtgatggctaaatcagagctaggcccatcagtgaggtgattacaaaaaggctttataacacgggtcagcttggacatgttttgttactgcttcaaacgccctcaatgagttacctcgataacgagatcaagacttgctacgcatgcagttgtgtgagacatcagtcttgcctcctctcaagacagtaaagaagtggaacttaagcctctttatagaggtgtgtaaaaataacagtggcaatgcatactttttaaaaaatactctttctgtaagttaaagatcaactgacaccttgcagttttgctctcttggtttaacacatgacagcttcgtcagtaaagaaaagtgggagaggaggagatagaattctaagccttataaaaatgtaaattcttaaacagacgatcaacttatacaagcatgaaatacatatgtgaattgtatgaacgctgtctgaaggcacagattccactaacaggcagcatcgccatccgaccctggcacccggtctccagggacgcgccgtgcacttgggaaaggaggaggacgtactacagagaaggacaccctcacctgcccggtgcctgggtctcgggaaggggctagaattc

SEQ ID NO: 203853 - DNA, 1000 bp, Homo Sapiens
acacctctgttctggaaaatgatgaaaaagtcatccttgtacttctaatcataaacttcctctttagaatggaatctcataacattaaataaattttctaactgctcagaaacgatgcatatgtgagttaaatctgtgctaaaagaataatcaagcttgttcaattagaaaatagtcatagaaatgagtccataaataaataaaattttatgaaatatttagcaatgaaagtttatggaataaactttacttagaagtttactgagcctccactttttattataaaaatacttcctgaaatcaccctaaaatatgtttgctagcagaatgagaaattgatttacttactttttaaaattgtgtttctcagattgacagcagtaggtataatgcaaataacaatattccaacatgttattttttaacattcaataaaaagcacttctattcatttttaaaccaacaaaatagagaattgaaatgaacttgaaaaactacacatgaatattagaaatattaaatattataatttaaatatttatttcaacgtgtactttcaagcatcatataatcctttgatgtataagggaacagtgatttgaaaataacttttataaatacacttttgttttagatactaagaagtatcttttgagtaaattttctctcaaaatacatattggcacaatatttcttagattttttaaaaaatatctttaaacatttccactccaaaaatgcaaaatagtgtaagatgaaaaatggatatttaaaatatgctttcattcattttcctttggtaatcaactcaagctttttcaagctatgtcaaaaatgatgagctcaaaggcattttggaggtgactgtgacattgctgatattaattggtactttattttcacttctattatgctctgcaggttttgaacctattttccacccatttttgttcttatagttagaaggtaggcaggaataaacaaagatgataatgaattc

SEQ ID NO: 203854 - DNA, 1000 bp, Homo Sapiens
agaaaggaaagcttcgttaatgttactggtttgcaaactgggaagagacagtctctggtgtgtgctgaatgtgctcctctcttcaaagaagggaagggcaggttgggttttatgcttcacaaggcctgcatcgtacagccgagttgtacatattcagcaggcttggggggaagctatacatgtttatgaggggagcagagtgcatgtgcagtgggtaaacatgtaacatacatctcatattcactttggggtgaggttttagcattaaaatgagggtgattttggttctttatgttagaactatagtacacaaagacagtttgtgagcagcctctgtaccctggctgaaactggtttaaggtctgcagttacttatcaataaagaatgtggatgggcgcgatggctcacgcctgtaatcccaacactttgggaggctgaggcaggcggatcatgaggtcaggagatcgagaccatcctggctaacacggtgaaaccccgtctctactgaaaatacaaaaaattagcctgactaggtggcgggcgcctgtagtcccagctactcggaaggctgaggcaggagaatggcgtgaacccgggagacggagcttgcagtgagctgagatccatgccactgcactccagcctggccgacagagcgagattccatctcaaaaaaaaaaaaaaaaaagaatgtaaggctggccctctgtccagtcagagtcgtagtggtctgggttgtaaatcacagtaaaagggatctgatagctcctgttgttagggagtttagagctgtagggatttagaaatttgccttgccagctggccctgaacccttaccccataggtaactttgtttccttaaccttagggtccatcttagttgatgaaggagttgctcagatcacagtgttaccaccttccatctagtgttccaaagttgactttcctctatcatttcttccttagctaatcaatcagtaactctaccattgtgtagca

SEQ ID NO: 203855 - DNA, 1000 bp, Homo Sapiens
taaaaaatacatatttaaagttacgcatcaataattattaaggcataaggtgtatctgcaacttttactgattcttttatcgtcattgtttcttgcagcccacatcctcctcttctttgtattcattgtttttctggaataattccttcagagtgtctgtgggtggttaaatttctgagtcctcgctttgccctcctactgggatgctagtttgggtgcatataagattcttggctcaatatttctattcttcagacttttgatgatgttatttgtcctcatgtatttggtgctgaaagagaacattaacattccacacctccttcctttttaagtaacctgtcttttttttttttcctactcctggaaaacttttagaatgtttctctcttgatctgtgtgtctgaaattaggcaactgtggtccatgagtgcatgtttctttgcatttctcctgggagccatgaaaatgtgaccaaccctgtctctaacactaaacattttgttttgctgatatttgaatatttcttttcttctttttaaaattttctttttctggaattcctatgaggcagatgcatctaaactctaacactttacatttccatttgtgtttcagtctttttggcactaggagattttctgggctccattgtttagctttcataatccagttttgtgtatctctggagcccactgcttgagttttctctttttaccctaagtcaatagattttgtctctgttagcaaaaaaaaaaaaaaaataggtagagacggaatggaaaaaattaaactctcactccctgtggtgaccaacactttaaaaaaaaagtgccttggaatacaatgtagaagaaaagtatagactgtaatatgaaatttcaatcagaatctaaatcatttttgaggggtaaggaaacttcacaaaatgattttaaatctcttcagaaaaaaaatacatacaagagacagcagttgacaaatgaagagaacagaattc

SEQ ID NO: 203856 - DNA, 1000 bp, Homo Sapiens
agatttattcatcagagttgtattgaatgttaagtgaaagaggagtttagataaaaacacagactaagcaagtaggctactttaggctttaagatagacacattttgcatagagtttcatgaggccatagaccctttaacacctgaagatgctgcagcagtgcccccttaacacctgagaagagtgtaggaatgttcccataactgtttgcttgtcgttgcagtttataatgcagttatttggttgccctgatattcttgaataaagtgggaaaacctgagggcaagagctttgtcttcttcatctggtacatagtagattctcagtaaatattgaacaaaggattcctattccccacattggaattttccacattcttttttcccctccaaaaatacttgagttttagcttttatagtacttttagtataatactaatttcagatatactgtgttttttaattcagttgggagatgatggatgaaaaagaattttttattgccagaaattttgggatttttaataaaatccattagaagtttaaaaagctaacttatagatatgcatttgacatttagtgtggttataatttggagtttgcccgataagcatctgaccatccagattgtgttctaaaataaagtggacattccacatgcttataggagtgcactgtgaaggggctcaaggtggcttcaggttgtgggtgtgcttagctggctctgtggtctctatactggatagggtcaggtggtgacagagagacagaaatctacagctgtctagtcaaaaagcttcaacttccacctcaacaaattctttgttgttgttaatagtttttttctaagaatagcagagggttccccctgaccccaggcattgctaatgaaatgaccaccaaatgataaaatgttcaaacagtgcagtgtttttagaagattaaatcaagcacagtacttgagtagtttgtaagttttatcatcagccctgcaggaattc

SEQ ID NO: 203857 - DNA, 1000 bp, Homo Sapiens
tggtgtacagatcatcacccaggtaggaagcgtagtacccaatgagtattttttctgatcttttctctcccccaagcctccactctcaagtaggccccagtatctgttgttcccctcctagtatccaggtgttcccattgtttagcttccacttatgcatgagtacatacggtatttggttttctgttcctgcattagtttgctaaggataatggcctccagctctatccatgttgctgcaaaggacatgatctcgttctttctcatgtctgtgtagtattccatagtgtatatgcaccacatgttctttatctagtctactaccattgatgggcatttaggttgattccatgtcttgctattgagaatggtgttgtgatgaacatatgtgtacatgtgcccttatggcagaacaatgtatacacgtttgggtctatagccagtaatgggattgctgggtcaaatgttaattctgctttaagttcttcaaggaattgtcacactgctttccacgatgaactaatttacactctcaccaacaatgtataagcatttccttttctccacaacctcgccggcatctgttattttctgactttttaacagtagccattctgactggtgtgaaatggtatctcactgtggttttgacttgcatttctctaatgattagtgatgctgagcatttttttacatgcttgttggccacgtgtatgtcttcttttgaaaagttaatgctggtcagttgtttgcctgaactccaaagggaggagagtgtaatgaggcatgcctgaccctccctttccatcatgatctgaactaatttttcaggttttgttgggtcccttggctgagaggatgttccattcagtcacttggcttagaatttaatctttggtttacaatagaaatatctccatcaatggagagcttcgtccaggccaggcaacccattcattagtcagtcagatgttcaaaaaatcctccttatactgaattc

SEQ ID NO: 203858 - DNA, 1000 bp, Homo Sapiens
cttttaagggtaaaattcaatgagttttaataaagttagacaatcatgcaatcataaccacaattcagttttagaacactttcatcattcttaaaaattcccttttgcctctttgtagccaatcctcactttcatccctacccccaagtgactgctgacatggtttctgagtctgtaattgtgtcttttgtggaaacttcatataaatggaatcatataatatttagtgtttcatgcttggcttctttcacccagcataatgtttttgaggtaaacctacagggatcagtgagtaagcattttattctacagatatgccacattttatttatccattcatcaagtgatggctatttgggttgtttccagtgttgggcttactatgaataatagagccataaacattttcatataagtctttctatttccacgatagttttgaaaagtattaattggcagtcagatttacaagtaacctgtaaataaaataaaaccaaacaataacaataaaagactcaaagagacttattagtacccctgatggtcattctggcaacatgtgtaccaacaaggtgggtatctatgcatgcgcagagggagcctcatgctatcaagtggaagaaagaatgttgttctgcaattccacaagagggttagaggaagaatgacgttcctactagaactggatactgatatctgagctggtggaaagaaagaaaagatgggagtctacagtaagcatccatgtttttggtaaattaccataactggactggtgtgggaggagtgaagtggagggtggagtgagtgattaagcctgggaaacaaatgacaggcagaggaggaaaggcatgaaagaggtaatgttaagatgaaaggcttactcagagtggtcaagtattgggtctttaaagaatgcttatcacctgggcaatatggcacctccaaagggctaatcacagagaccctccaacaggtcactgatgcctgcctggaattc

SEQ ID NO: 203859 - DNA, 1000 bp, Homo Sapiens
cattggggataaaaaaaattatacaaaattaccttaggtaccagaggctctatcagatattagttattatcatagtattgggcatctgtttttgtggctctcaggaagtttgagagagtcctaatttaggagccaaccttgatagttattactcgtaaaagcttgtaacctctagagcaacagtcagcaggtgatggcctgtgggccaaactacctgtttttgtacaatctgaagctaggaacaggttttacattttaaatggttatataggtaactacatagtatctttgatctcttgcctctttatcttccaaacctaaaatgtttaccacctggccctttacagaaaaatatttgccagtccctgctgtagaaggttatatagccagcagctttcaaagtaaccttttacctggaaatgtgaattctctcttagttctggtcatctgttatttgtgggagccaatcctctctctgttggctgatgatgagaattctgttatataccacaacacaaacttggggataaaactttccattaggcatttctgtaaaatttccatctattttagaagcagaactaaggtgaagcccagtgtgaatgaatcctgcttgttggtacaagccaagtgggacatttggcagcaaagcccaggagtccttggtgctcttcttttaactgcctcctcatctcattgggctgcccggtgttaactggttgattatcacctctgtgttttgcctgcaaggaaagaagctactgacacccagagtggctcagcgatactcacacgtgctttcagttactttcgcagcatttggttaaagtgagtttagctgcacatcctcacttggtaacattctgtggctgtgaaaattgtttctctctttatcctcccccagcaacagccatttggtatcatctgagatgtgcaccaggaggcagatctgccctgtcaatcatgagagttcctatcattaatcaagtattttgaattc

SEQ ID NO: 203860 - DNA, 1000 bp, Homo Sapiens
gtcattaaataaatgcaatgacaacagctaactgagctcttaatatggtgactgttttctctcatttggctgaccatgcgagtcttctcaaatgcaccagggggcagcacgtctgcaggatcagccctggtcctgctccgtgtgaatagcaaagcaaggacaatccacgccattacaataacaggtgcaccaagatggagaggaagcctgtcagaattagtgaatgtatgcaaatttcatgtgcctgtgtgcctacgtgtgtggccgggtggatgtatattcacatcttaaaagttgtggcaaaggcattgccactattttgtttaacatgcattgagcacctaccatatgccaaaactggtgccacttgccttagtttttgtctttaatatgaaattatttataattagcattttatatgaacagcagtgccaatgaaatgcattgaggtgtatttgttttgacactgaagtaaaataagcatttccctctaatctgttgactgccatttaaatggcttataaagcacctattctattaagaataacatttaaaattagttacattcaggcaaaactctatctttaatgagctggggatgagacagagacgcaggagggcatattaaaattatttccttgaagttaaaacattccagaatttacctacaaatttaaaaagcattaccttcagctccatttgttaaattgtccacatgcatccagggttctgtgatgctttatttgcaaacaggatgtattcacaaatggaaggtgctaggcaaaaaggaagcccctcaccaggtccaaaataacttctgagagtgctgcctgcgttgtcctgggctgggaagtggctacccaaggactgagggccagggacgatgggagtgaattaccaggggaggttcttgcccaagactgggggagatggttgccagttctttttgatggaccaaggccaatgccacacctgattatttctgacaaatgaagaattc

SEQ ID NO: 203861 - DNA, 1000 bp, Homo Sapiens
gaatgtgcaaactgcaatggggaaaatattaaaactgtgatttttctggaccttaaatatagttaagtatattttaaaatgcttttgaaacatggaaaagttttctgaggctttggaagtatgaattcaaaatggtactgctaatgagagtaaatatttcaaggtaatgtgaaaagtctgagacagaggttattggccagtaatttacctggaggaaggcaaggtaagtctgcaaacatagagcatgtggatctttctgtactatgtcattctgttcatataatctgaacattttttttaatctccatgcattactatcttgaataaacaaaataattaggcaaagaaaacatattttaaaaagttaaaacgtgttggaagagaaaccatcagaatataagctgttatgccttcccagcctctgtattaaacatggaatttttactctttaccctaagtcattgggagaagatgaaagttttttcaaaggggaaactcaggaacatgattgtaaagaaaatgtctagttcctagagagagccagtaaaagaacatcattccacaagttactgcctccaatttaaaaacatcaaaacaggataaagagtgtctcctactgagcggaaagtagagaccagaaggtttgttgaaaccccagagtgaaaaccacttagagaatcggaatcgtcaagtataaggttgtgagatggattcagagaccagactgaaatatgtctctgccaatctgtgcagtgaaagtggatgacaagggagatgggagacaggagtcagaggtggcagaacaggcattggcctccctgagagatgtccagggcgtgagagtgaatttgtgagtaggtgacagaggcatgtcacaaaaagcaggcacagagagcaatacagaatgagaggtcattttactgtagcccaaaagttagtatggtccacggataccagagcctataaaataatatcatggatttatgaaatatgagaattc

SEQ ID NO: 203862 - DNA, 1000 bp, Homo Sapiens
gtcctggcaccccctcagccgctttcttgcctatggtatctcccaggtgccaggtgccccctaccctgcacaccaagagccacgctgggagagagtgctgccagccgagcacccgagcgcctcgacccgtcccacctgattgcaccggctctaaggcaaacctcaaagaatgcgctcactgtgaaggacagtagttagctgtgtccaaatctgtctgttctgctagagggaagctcctgggagagggaccatggagggcaggactgcgcctcactcccacctttgcatcttcagagcctgcaccgtgtgcacatagcccctcatcacagggcttaatcggtttgctgaatgaatacatgatcttcctatttgctgagagccataaatcaccagctatagaagtggtggccccagtagccgttgcattatagcatcccagggccaaagagaacaccagaagacccttaattttacaggcagagttgcctcaggccaatgactggctccaactctcagattttttttttttttttgagacggagtttcgctcttgtttcccaggctggagtgtaatggtgcgatctctgctcactgcaaccttcgccctctgggttcaagtgattctcctgcctcagcctccccagtagctgggatcacaggcatgcgccaccatgcctggctaattttgtatttttagtagagacggggtttcaccatgttggccaggctggtctcaaactcctgacctcaagtgatccacctgccttggcctctcaaagtgctgggattacaggcatgagccaccacacctagactcaaagacttttttaaaatgaggtgtattcctcagctgcccttagctttcctcccattgccacctttacagacactaaagaattttgtccagactcttcctggtgtacataaattccacttccctttgttttcctctcacaggaagtacaaaaacagcagctcattcttgcatagaaaagaattc

SEQ ID NO: 203863 - DNA, 1000 bp, Homo Sapiens
agaagcagcaagaggagaaagaatggttagtagttaggaaaaaacagaataaatggccaaatgttatattggttgtggggctgtgtgtccttcaacatagaaatacttaaaccactgtgaaaatggaggaaaactaaattttaatctcaaccttctactctgtttcatgggcatctatagctataatataaattcgcgacacatttctgtgagctaagtatgacgtgcacacgtagcaaagctccttagaaatcttctcattgaaccagagattcaattacacatgcagttcactcctactccagagctttgctctcagtgaggaaaatctgggatctatattcagggcagttagaatgcatttgaaaccagtagggggaactgagctatagagaggtaaagtgagtttctcagaacttgataaagaatcagaagctgagacagccaattcatttttttgtcaggaagttggcattcattttaaagaatttattgattacatgcataagctgtgcaaagggtatttcatcaatgtatgtataaagcatatatatatacatatatattctacttttcttcttgagcactcaaagaaggtcattggggaaatctgtctgatttctgcagtgcattggctgagaaataatttaggtggacttcttgtctgtactctgagtatgtgtatgcataaacatggatatgcatatgctacttatagcatatatagatttcatacaattatgatagaaaatataacctaaagagagagctcatgattgccgtgatgaataggacaattaaaatggttgccataaaaattatttgaacagaaaagactaaacttgtagagaagcccaaagaactgacttgaagtattcatggatgttaactggtattacatcctgtgtgttaagagagaaagtagatcccttggtgatagatttaaaaagcacccagtatttccaaatgcctccttcaaatgtctcctgaccaggaattc

SEQ ID NO: 203864 - DNA, 1000 bp, Homo Sapiens
acccgagaagctggaaagaaggggatggactcagcatatatgaatattttcacagggcagctgaaaggacttgcagattgactggatgtggggggaaggaaggaattttaggatggcccccaggcttcctgccttgaaagtcactatctgtgtcacagaaatgaaagcaggggtgttcaccaattcaacacgtttattgggcactgagctatatgtaggaaattgtgccaaagatgtgctgacttaagtttccccaaatgcccgacccatggatgctgtaaagaaatgctgatgctgggcgtggtggctcatgcctgtaatcccagcactttgggaggctgaagcgggaacatcgcttgagcccaggagttggagaccagcctgggcaacatggcgaaatttcgtctctacaaacaaacaaactaaaacaaaaaattagccgggtgtggtggcacgaacctgtagtcccagctacttggaggccaaggtgggaggattgcttgaggttgaggctgcagtgacctgtgatcacatcactgtacttcagcttggatgacagagtgagaccctgtcaaaaaaaaagacaaaagaaagaaagaaagagagagagagaaagaaagaaagaaagaaagaaagaaagaaagaaagaaagaaagaaagaaaaaggaaggaaggaagaaagaaagaaagaaagagaaagaaagaaagaaaaagaaagaaaggaaggaaggaaggaaggaaggaaggaagaaagaaagaaagaaagaaagaaagaaagaaagaaagaaagaaagaaagaaagaaagaaagagaaagaaaacactgataaacgagcctgaagactagctccttaccatggccctggccttagcagctctgcgatcctaggcgggtgagccaatgtcccttaatttacccatagaggggcaattgtaacagtcctttgtgttcccactgagtgctaaggggaaagatacaaattacatgtaggaaagaattc

SEQ ID NO: 203865 - DNA, 1000 bp, Homo Sapiens
aattcattgtattaaagaatcacaaatagtgccatgaaactgacaatgaaatagcaacaagagacttgctaatctttaaaaacgaactctccaactcaagtaattctggtctacatctcccaacatatcttccaaaaaataaataaaataaggaacaataagaaggcccaataaaacctcacaaaacaacagcttccatattatcagaagacaaagaacatccaaacttcaaattatctatttttttaatttttatttttgagacagtcttgctctgtcacccaggctggagtgcagtggcatgatctcagctcattgcaaccttcacttcctgggttcaagtgattcttgcacctcagccacctaagtaactgggattacaggcatgtgccactgtgcccggctaagttttgtatttttaggagagacgaggttttgccacgttggccaggctggtcttgaactcctagcctcaagtgatctgtctgccttggcctctcaaagtgctcagattacaggcatgagccactgcaccgagcctcgaattatctgtaagtagaaaaatatgcagcaaatcccagcatctttctcccattctcccactgcaggttttcatgaaaagcaagggtagtttgggaaaaactgtgaaagagagaagatgggaacttgctgtgaatctaagactgatctaaaaccatgccagaaagaaaaagtccaccttaagtgtgagaatattaaaaaagtatactggtagatcagagtagtgagtaaaaagaaaggatgtagaagtacacataggaaaggtaatgcttagggggagaagacaaacaaacccagactgcgaagactatgataaatacctaactcttcaatgcccacacaccaatgaacatcaacaaacatcaagaccatccaggaaaacatgacctcaccaaatgaattaaataaggcaccaatgaccaatcccagagagacagagatgtcacctgacagagaattc

SEQ ID NO: 203866 - DNA, 1000 bp, Homo Sapiens
aatataaaaggatcagtattttattaaaatccagtaactattactaaaaaagcagatgcagaagttgtgaggagaaactaaaaagaaatctgccagtcatttgaaatacataaaattaataatcatcacattaaaaagtatttctttaatagttccaaagttactataaagaagtttttgaaatttttcttggcagtcacttttaaattgttaaaagtgttaaaagctagtaatcgatgattatcaagtataaaaattaaaagtgtgggagtggtgtctcattcccttcttgctggttttatcacactgcttaaataagtagaaaaagaccggctgggtgtgctatgccaatgctatattgcctaaaaggaaatgatataagttttctgactatatcagcatcccagactttgagcatcccagtcccagagattaataaagtctagagcccaattactctcaaaccctgaaaatataggcaaaatgttccaaactcaataatgtgaattaagctgaatataagacaatgggagttggcaagaactgtaggatattggagaattcctcccccttcaatggggcaggtgctactcagctctggccagttgataatatgtgagaatgtggatccaatgtagccagatctgatttttcaaagaaagtcagaaatgaaattttttcatactttaatgatgcttagttggtaatcagttaaaaataaaaaatatttgagccatataaaatgtgcctgaggactaaattcagtctgtaggcttgttagcttatcatctttgatgagattcctggggaactcaaggtaatcagatatgcttagaggaaacagtaaaacactgtgcttccatgtgggcctttcaatcactcaagtcttaatggatcggaaccccaacgtatgcctggagctgactagctgtctagaatcattcagttctacatgaattgggaacagataatctttcatgcccatctttgttaggaattc

SEQ ID NO: 203867 - DNA, 1000 bp, Homo Sapiens
tcagactaatcctcactttggaaaggaagctggatagacctctgagaattaaactgctcaaaagtaaagcatgacccagactttccttgaaaaatcatgatcgttacactcagacctgaaatggccgaattttagaaaagtgtgagaagcagcatttcctgtttgggtgactactgccagagaaaactggggtgaggaaacagagagaagtaaaaaaaaaaaaacaaacaaaccctgcatgagatgaagaacagccacagcagaaaccagcacctgtcaggagcacaggtggccctgtccttaccaagtgacagagcccaagaacaccgaaggagctcatctcaagtcttcctccacatcattattctcttgtctatttgctttttttttttttttttaatacggtctggctctgtcgcccaggctggagtgcagtggtgcaatctcagctcactgcagcctccacctcccaggctcaagtaatcctcttgcctcagcctcctgagtagcagggactacaggtgcacaccaccacacccagataattcttgtatgtatgtatgtgtgtgtatatatatagacagatatatatagatagatagatagataatttttgagatggagtcttgctctgtcacccaggttggagggcagtgatgtgatatcagctgactgcaacctccgcctcctgggttcaagcgattcttgtgcctcagcctcctgagtagctgggactacaggtgtgtgccaccagactcagctaattttttgtatttttagtagagatggggatttgccatgttgcccaagctgttttcgaactcctgacctcaagtgatccacccagaagtgctgggattaccggtgtgagccaccacactcggcctgcttgttagtttctagaaaagagtggtaatggtttcttgagaatactgatgatagttactgagtaatcagggtctaaactaaaatgagctttaactttaatgactattttgcc

SEQ ID NO: 203868 - DNA, 1000 bp, Homo Sapiens
ctgtgtgagggaaccttccaggttgctgcgctggctccgatacagagtatgaaacagcacttggagcatgggaaaacttgacacatgaagtaatcgtaatgtactcttttatgatagtacatttatgtatgtgcatatgtatatatacatccacacatatacattttttgaagaaatatttcagggataaatagcattgcaatgaatcagtggtatggggtatgtaggaagatgtggctagatatataagctggtatggattctaggtgtaaacatctggagggaagggactgaatcttattcttcctaacatcttcagcaccaggcacagtcttggtacatcacagaagctcaggaaatatctagtgactaaatgaatgactgcatggccattgccactgcggctgtgtcaaagccacagaatgaccgcagtggtatataagccaccaataacatagggaagcctgataactgctctcctggaacttatgggggcaagttagaaagaaagcaggaactttggggtaggagaaaagaataccattggaattcactttttgaaacattcttttaattttaggttgtgaaggctcttacgatgtgagcgacaaattaagaatactaaatatcggttggtaaagctttctaattaaatttagggcacagctgatctgatatatatttacattatatatcactgatactgagctgcatggtaatcagaaacacacaaacaattcacataatgactgtaattaatcaggggtttctacaatcgaacataggcgggttggtcatttcctcctttgtgttagttctccattttctttaaccatgtaaatctgtttgtttcccacttataccttgaaattcttactcctaaaaagactagagtcctggatgccattccaacaagttcccctgcctctgcttcctgtggctccctctttctccctatacccctcccacttatctccctttgtgccccatctgagaattc

SEQ ID NO: 203869 - DNA, 1000 bp, Homo Sapiens
gggtttctgtgaaatcacatagttttataactaaaactgctttgagagaaaggctggattcaacctttactcagacagaaaatttcctttccacatccttgataggtagtcattgaacattttaaatattttcagcaagcagctctctgcttcatagaacattctgtttcagtgttggtggtgaacagtttcagttgattgaccttgtgcttgcatgtgctcatgtgtttgtgttcccagatgacatatgaatcttataacagatactagttttaagttagcactttttttttttttttttcgagatggagtctagctcttattgcccaggctggagtgcaatggtgggatatctgctcattgctacctctgcctcccaggttcaagtgattctcctgcctcagcctcctgagtagctgggattacaggtgcccgccaccatgcctggctaatttttgtacttttagtagagatggtgtttcaccatgttagccaggctcatctcgaactactgacctcaggtgatccacctgcctcagcctcccaaagggctgggattacaggtgtgagctactgcacccggcctagcacactttgttaagatgacaagttcttaaagagtattttcaggtatctactttatcagtttgtataaaaactgtaaattcttttccaaacatatatcaaaatattcagaaaaatctagccgctaaataaagaaatagttttggataaagtagctactgatacttaatatgttttaaataaacaatttcttgcttaaaagtttttacttttatgttcatttgtttcttcatattccaaaacatttattgaacgactgagttagattctgtcgatgtaaaaagaaatgcgtaagacctgatcgctactcagaaacggatcatagtttagggaaaaagacatggataaaaatgcaatgtgccaagtttgaaactgagatgttcagaagatagatggaggcataacagctgaattc

SEQ ID NO: 203870 - DNA, 1000 bp, Homo Sapiens
aaccctgtttgttagaaaaaaaaaaaggaaaaagctcaatttcggtcaaccagaaaatcagacatgttagggatgttcctaaatggtctagaagaaaaccaaggatttggtttataagctcattccaattgtatgatgccatatttatagatttgtgcaaacaactgatctcatcttcttggcctaaccccagatattttcatatgtatgaatgtgctcaaaataagccactgctgcaagaattgtcttgtacatagctctgtcttaccaagagtgagtgcagtgagtgacatgggttgtgttcactcatgccaccattgcctgacagaccctgtggaatccaatagggatggcaccacgtccaaaaggctgaagaagagacccagagccatggaacaggacatagggtttattgaggacttaacagacagggcggtccagtagcagcgagctggactggaaaactgctcccatttttaaaaagcatgcaggttatacagcattttcacttagcaacaacttccatttaacccaaaacaaagggcctcgatcccccatatggcctgtgttgcaagggatgggccaggcgctccgatgtccttcacagatgtggactgaatctcagggtttgccactcccagactccttagctcagaaggctgaacacacattcttcttggatcatagagtcattctcagggattgcctgagttattgcagtcaggtgcatctccatacaccgggtgaatgtgctgggataaacatccatggacgctgttagtacaacaagaaggcacatgggtttccaagctcctccccagcccaggccctatcatcgcacctgcggcgatgcacagaccgccccccacccatccacctccccccccccccccccccgccaacaggtgtaacgtggtgccgcgggcagaggattcacctggaagtcaggaagcctgagtcctagtgctagatcaaattccctcattacctgtttgaattc

SEQ ID NO: 203871 - DNA, 1000 bp, Homo Sapiens
agccactgcactccagcctgggcaacagagtgactctgtctcaattaaaaaaaaaaaaaaaaaaaaaaaaagaacactgaatcagggtttgggtcagggtttgtttgaggttgtattagaagcatatctttcggtcaggaagcatgaatattctctctctgatataagcgaaaaggaagagattaaaggcatgacgaagatcaggtctttttaaataggtgtttactttctattgaaaccacggaacaatgaatatttattcatcatcaggtaatttggggtaatggagtatagacaatttctggttttaccttcttgcctctttgggtccgtgctgccttttgttttgcttaaaatgggctaaaagagaaagcaactgaaacactttccagatctgataacttccgagatctcaagtgaaacctctggctcgcgtccaagggtgaggtcacacagtctgatattagttggatttatgttggtgtgtccaccaaaatacagagcagcacactgccataattcttgacagccatttattaggtaggtaggaatggcacttgggtcagttgtatgctgtgtattgccacccagaagcatagccgatccatggccataggcatttcttttctttttcagttgatagttttaagttcatgtggaaaacgtgcctttggttttacctggttttatgcctttggccttatctttgctcactcatactcttgaattcagatctgtctggacacgtctggaggtctggtgttttggtctccaacagtttgttttcatgattgtctgaagtacctctgggaaagtcctcattctataggaagacagttgaattggataagaaatatctaaagcacaaatagacattgcttatgtctgtcaacagatgagaacctgaaaaagccaatttttcaagatggatcccaagtggctaagtgggcttagatttaacatagagtcaagcagccatttgctgacttgaggccccaca

SEQ ID NO: 203872 - DNA, 1000 bp, Homo Sapiens
gtggcacatgcctgtaatcccagctacttgggaggcagaggcaggagaattgcttgaacccgggaggcagaagttgcagtgagctgagactgaaccattgttctccagcctgggcaacaagaatgaaactccgtatgaaagaaaggaaggaaggaaggaaggaaggaaggaaggaaggaagggaggaaggaagaaaggaaggaaggaagagaaagaaggaaatttcttccaccagatactctaaatcatctctctcaagttcaaagttccacaaatctctagggcaggggcaaaacgttgccaggctctttgttaaaacataacaagagtcacctttgctccagttcccaacaagttcctcatctccatctgagaccacctcagcgtggatttcactgtccatataattatctgcattttggtcagtcattcaacaagtctccagggagttccaaactttcctacattttcctgtctaattctgggccctccaaactgttcccacctctgcctattacccagttccaaagtcgctttcacattttcgggtatcttttcagcagtgccccactctattggtaccaatttaccgtactagtccatttcacgctgctgataaagacatatttgagacttggccatttataaaaaaaaagaggtttaatggacttacagttccacgtggctggggaggcctcacaatcatgatggaaggcaaggaggagcaagtcatgtcttacatggctggcagcaggcaaagagagagcttgtgcaggggaaactccagtatttaaaatcatcagatctcatgagacttattcatgatcacgagaatagcaagggaaagacctgccgccatgattcaattacctaccactgggtccctcccacaacacgtaggaattcaagatgagatttgggtggggacacagccaaaccacatcactgggtaatttataaagaaaagaggtttatttggctcatagttctgcagactgta

SEQ ID NO: 203873 - DNA, 1000 bp, Homo Sapiens
gtggcccggcccttagggcgtgcgagttgaccgtgccccttctccaggacgcgcggccggcggctgggttttcgaacgcgcggctgtgaacggctccttggcgaggaggcacagcctccgcaggccggaagccacgcgcccaccaaaggcacgaggagcagggcggagagtactgcgggtcagacgagcgaggccctcggggaggcgcccagaggagcggggcagcgcggccgcagcgcgggtcgggtccgcggacgctgttcaggccccactgtggggctgctgcccctgggctgccctccggctcggtggagcgcgggagtgggggtgggggcgcctctgctgcttccaccccagaaacccgggtcagcgttgggagctgcactgggcggcagcggagaacattagaagggacagtgtttgggttaaaatctaaccctcggtcgggcgtggtggctgaagcctatccaaccactttgggaggccgaagcgggaggatcacgaggtcaagaaatcgagaccagcccggccaacatggtgaaacctcatctctattaaaaatacaaaaattagccaggcgtggtggtgagcgcctgtagtcccagctactcgggaggctgaggcaggagacccgcttgaacccaggaggtggaggttgcagtgagccaagatcgagccactgcactccagcctggcgacagagcgagactctgtcaaaaaaaaaaaaaaaaatctatccctcatgatcttgctttctgtgcgtgtgtctttgcgtcaggggcagggaaagcctgtagagcacacattgcctagtgaggtctttacaacacaggctttaattattttcctcctttcgcagctgagaacagagaatttaagcaacttgcccagagttccagagccagaccttaaaggtagggcttgtgactccgcattaggaacgttctcctcccctggatggacccgatgcccccgcactaataatcttgagccggaattc

SEQ ID NO: 203874 - DNA, 1000 bp, Homo Sapiens
ttagttcccagtcaaacgattaggcaggctgacacctctgccccctaccacctccatcctagaccaagaagccagcacactcctccagtcatctctatggtttattgtcactgaaataagaacactgattggggggagggtgggtgttgcaaattgcaaacctcaggtaacctgacctccaactttagagcccagagtacagagaggtgggccttgaagccaataaatacaaagcttcctctgccttgtaacaaaggcaggttggcatagggccctggagcctgactgcccaggcccactttgggatggggagcagctatcactcctctgctggcttcacttgcgtggcggcctctagctggcaaagtagctcatcccactgcacgaattgcttggagagaagcattgtctggttgtaggtcaaggtgagaataggaatctgagtgaggaagttcatggaaagtggggaacaggcaaacataggtgggtaggataggatgagagagagctagaggtggaacaaaaggacagggcttagggacagcacccattagggtcctagttgagcagaaaggatacagtcttgttgtattcctccaggagagccttggactcctcagtgatttccacacactggtcctgtagggccaaagtgtagcacagaaaggaactgggcaaagcccacatcttccactaaacttcctgcctcatcacggactcccactccccatggagcctaaaaaagatgacgcttaaccccaaagccaaaggagcaaatggctatgggagcactttcaggctccaggatgggtgccctaacagcagtccaaagacggatggaaaagggagtggccatacattaagtaaacattccccctagtgtatgtctcttcttctgtccttatttctgaactctctttgaactttacactagggcctgggaatagtgaaaaaagagcccctctacccacagtcaatgacataccatccccaggaattc

SEQ ID NO: 203875 - DNA, 1000 bp, Homo Sapiens
tggcaggagccggctgcagcaccccattggaatggctgctttggggctgctatcatctcgagctccaactccgaaaatcgaaggaggaaacgtcttgggaaactgcacgatttgttaattcactgctacatgctctgtgccaaccacagggcctggcccagattaggagctcaatgaaatatctgtggactaagtcaatgctggaactattttggaagatcatttctgaaaccaccgctttttcagcaagtagagaaagcaccagtgaatgaagctggaagtggtttctcccagatcccttcgcagtttaaagaaagtagcagttttaaactggcagccccatctcccactgggaggccctcaaagtctgaagatgcaacggctgcccttcaagctccctgttctcacttgaagggagctgaggtttaaacaggagacctgactcttgaagccacttaccatgaaggatcggaccacgacatccggcatctggggcagctgatagtggagcagggcagtggtggcatggtctgtcacctgagagtgaaggacaaagacgagttagcggccactccaagctggcatagagaaaacaagcaggacaaatgcacgccttctgtgtgaaaacagatctgagtatctcgtggaggaaagggcatctaaaataaaatctctgtagaaaaattagttagcagagttggggacccagagggggagaagaggcatgctgtcggcagaaaggatgcaggcctggaggcagggggcgtgtggaagattccagcaacggaaagcctggccaggctggagcactggcagagggagcggccagaggccagtgggggcagatcccagaggggatcccaagcctccctgctcagcaaggcgcggcacacacagcacatacgacaaggagcacttccgcccggtacgcacacttcctcttcctcctgcgatggttttcccaacagggcaattggtctctttccatttccttgaattc

SEQ ID NO: 203876 - DNA, 1000 bp, Homo Sapiens
agtagcttagatataagccaaaactctttaaatcctcttaggacaattaagggccaaatgattctccaatgctgatagtgacccctatagaaaccttcagtgggctaggattgaaagacagttttttgcttttagcatctgacgtccttcaacattgcaaaaaacacagaaaggcacaccaaactgagtttgctcagctaagaaaagctttgttagagagctctggatgcagtacctcaatttcctcatcctcaaaagtacccccttcataggattgttgtgaggagtaaatgagttgctacatataaaatgctagaacagtgcctttcacgaagtaagtactcaataaatgtaagtttttattgctgttgatttgattatcattattactatcaataacatcaataagcaagaactctatcagggcagagatacattcccccaagtacccaacagtcttgccatctttctaccttctaggcctctctaggggtagactgggaagtaggcgcagctgcttatcaacccagttttgagctgtcttttgtctaattgtgtatttcttgtttatttgtttgtttactcacagaacaatgccatcaagacctcaaaatatagtgtctttaatttcctgcccctgaacctatttgaacagttccagagacttgcaaatgcatatttcctcattttgctatttttacaggtattgcttttgggggcctttttcacagagtattttataaacctctctggggtcaggctgtgtaatcagtttttctcctccctaaattgggaaatgtcttctctctttagacaacaggaacgtggatggctggagtctcagaccagtcccttagaatagctgtggtcaggattagctagtgtatagcaagcctctacacaaggaaagggacaaggtcaccacatcccaaggaaggggagctcctcatcatggctgtattgccacagttcagtttgaccatagggggctacagaattc

SEQ ID NO: 203877 - DNA, 1000 bp, Homo Sapiens
tccaaaaggggacatcgtcaagcatgttcattgtggcattgtttttggtggcaggacattggagttccctagggtcctccactaggggaatggaaaagtaaatatggtgtaggcatatactaaaatactatgcaacagtcagaatccatctacttgatatacatgcaccaacatggataggccttaaacaattgtaagaattaaatgaaatcaattagaatcatagctggcacacaagttaactttgaataatacctttgcacatgccagttagataaatttaaaatacatgtctatatgtttttgctagaacatgcacctgtggttttttttttttttttggaggggagtctcactctgttgcctaggctggagtgcagtggcgtgatctcggctcactgcaagctctgcttcccaggttcacactattctcctgcctcagtctcctgagtagctgggaccacaggtgcctgccaccacaggtgcctgccaccacgcctggctaattttgtttttgtattcttagtagagacggggtttcactgtgttagccaggatggtcttgatctcctgaccttgtgatccgcctgccttggcctcccaaagtgctgggattacaggcgtgagccaccacgcctggcctgtgtgttgtaaatttacctaaattccttctatgccttgtttactcagtactatgctatcggtgaacacttagatagtatgccagggactattttcattactcacctcctcatgcccccacaagaaactagattaataagtatatatatatatatatatatatatatacacacacacacacacatatagatatacatatatatatatatatatagtgtgtttgtgtgtgtgtaataaaaattaattaaagcaggagagaagcattcattagtctgcttgggctgccatcacaagataccataggctgggtgtcttaaaccagacatttattttctcatggttctggaggctggaattc

SEQ ID NO: 203878 - DNA, 1000 bp, Homo Sapiens
gccccaggctatcctagccaagctctagctacatttttctctatgtggaatattaaagatattactagtatcccatacaattctcaaggacaagccatagtggaaagaatgaatctttccctaaaacagcagttgcaaaagcagaaagggggaaatagagattatggaacaccgcagatacaactgaatctagcattattaactttaaattttttgagcctgcccaaaggccagatgttatcagcagctgaacagcatctacagaacagctgcaaagacagaagcagaacaactgatttagtggagagatccgataacaaaaagttgggaaataggtaaaataataacttggagtagaggttatgcttgtatttctccagcccaaaatcaacagccgatttggataccatcaagacacctgaaaccttatcatgagccagatgccgaggaagagattccgggaggatcccaaggacccctcagttgcagccatgtcgagactgatgctgaggaggaccccaactgtcatgagcaacacccgtcgaacacagccacccacctggggacagatcaagaagctgtcacagatggtggaagaaaacctgaggaaagcgggacaaccagtcacaacaagtaatttaatggtagctatgatagaggttatcaccactgccgtgagtattccttcaacaagggctgacacagagaacaattatacttactggacatatttatctagtaacccattaaaatggataaaaacacttggaagctctgtgatttcaatgatgattgtgcttttaatctgtgttgtctttgtacagtctgcagatgtggatcctgactcctgcgagaagtagctcaccgcgacaaagctgcccttgcttttatggatttgcaaatcaaagaaggcggacatgttgggagcaggccccccaaaatctggccataaactggccccaaaactggccataaacaatctctgcagcactgggacatt

SEQ ID NO: 203879 - DNA, 1000 bp, Homo Sapiens
aaatctagaagaaatggataaattcctcaacacacacaccctcccaagactaaaccaggaagaagttgagtctctaaataggccaataacaggctctgaaattgaggcaataattaatagcttaccaaccaaaaaaaatccaggatcagatggattcacagccaaattctaccagaggtacaaggaggagctgataccattccttctgaaactattccaatcaatagaaaaagaggaaatcctccggaactcattttatgaggccagcatcatcctgataccaaagcctggcagagacacagcaaaaaaagagaattttagaccaatatccctgatgaacatcaatgcaaaaatcctcaataaaatactggcaaaccgaatccagcagcacatcaaaaagcctatccaccatgatcaagtgggcttcatccctggaatgcaaggctggttcaacatacgcaaatcaataaacataatccagcatataaacagaaccaatgacaaaaaccatatgattatctcaatagatgcagaaaagacctttgacaaaattcaacaacccttcatgctaaaaactctcgataaattaggtattgataggatgtatctcaaaataataagagctatttatgacaaacgcacagccaatatcatactgaatgggcaaaaactggaagcattcactttgaaaactggcacaagacagggatgccctctctcaccactcctattcaacatagtgttggaaattctggccagggcaatcaggcaggagaaggaaacaaagggtattcaattaggaaaagagaaagtcaaattgtccctgtttgcagatgacatgattgtatatctagaaaaccccatcttctcagctgaaaatctccttaagctgataggcaacttcagcaaagcctcaggatacaaaatcaatgtgcaaaaatcacaagcattcttatacaccaataacagacaaacagagagccaaatcatgagtgaattc

SEQ ID NO: 203880 - DNA, 1000 bp, Homo Sapiens
ttttgtattttttgtagacatgtagtattgtcacattgcccaggctggtctcaaactcaagagatctgcccaccttggccttccaaagtgctgggattacaggagcaagccactgcatccagctattcttcttcttttttttttgtttttgagacagggtctccctctgtcacctaggctggggtgcagtggcacgatctcagctcactgcatcctccgcctcctaggttcaagcgattctcctgcctcagcctcccgagtagctgggaccacaggcatgctgattggtttcaggaggggactaatcagaggctgaagtgaaaccaatcagatatttgcataggatgtaactttgtaacttcacttcagcctctgattggttgccttccacaaccaatcagactggttgcaggccactttttcatttacatagggtgtaaaccaagtaaccaataggaacctctatagagtacttaaaccccagaaaattctgcaatcagcgctcttgagctgcttgctcaagcccactcccactccgtggagcatactttggtttcaataaatccgtgcttttgtgcttcattctttcattgctttgtttgctagggtttccgggtaggaagaatggccccaaagataccccaatccctagagtctgtgaataccaagcattacatggcaacaaggagttttcagatgtaatcagcgtacggatttcaaataggaagatcacactaggtcatcctggttagattagtccaacctaataaaactggcttttataagcagagaacttcctttggctagggacaagggagatgaggcaagacggggaggtggtgtcagagattcaaaattttgactaactactgctgcttttgaaaatgaagggctaccaagccaaagaacacgggcagcattcagcagccaagaaggaccctggccatcagctagcaatgaaacgaggaccttgatcccaccacagaaaggaactgaattc

SEQ ID NO: 203881 - DNA, 1000 bp, Homo Sapiens
atcaacctcctattcttattcgttgtcatgttgagatactacttgcttctctcctgtattggagcacctgtttttttaaatactgtatgctttttgttttcttggtttactttctattatgaactgagtgtgtctccccaaagttattttatgttgaagccttctatctgagtgtgctgtatttggacataggacctgtgaggaaagtgataaagattaaatgaggtaataagggtgggaccttaatttaatagggccgttgcccttataaagaaggggagaggctccagtgatctctcttccccatgtgaggacacagtgagaaggtggccatctgtaagccaagaaagagccctcatcaggaactaaattggccagtaccttgatcttggacttcataacctccagaactatgtgaatataaatttgtgttgtttaactcacaccgtctataatattttgttaaggcagcctgagcagactaagacattcccccattttgaaggaggacatcttcttgtcagacacgtgtgaaccagagcaattctatcctaagtaggaactgggtacagtgaggctgaaacttaccaggctgcattcccagatggttaaggcattctaagtcacaggatgagacaggaggtcagcacaaaatacaggtcatgaagaccttcctgataaaataggttgcagtaaaggagctggccaaaacctgccaaaaccaaaatggtgacgagcgtgacctctggtcgtcctcacttctacactcccaccagcgccatgacagtttacaaatgccatgacaacgtaccctatatggtccacaaaggggaggcatgaataatctaccccttgtttagcatattatcaagaaataaccataaaaatgggcaaccagcagcccttggggctgctctgtctatggagtagccattcttttattcctttactttcttaataaacttgctttcattttgcactgcggactcgccctgaattc

SEQ ID NO: 203882 - DNA, 1000 bp, Homo Sapiens
tgattttatttattttaattaattatatataaattgtattctagtactgtgggaaaaaatgttttattttagctgttaaattattgaacctttcagggtcttcattttccttgtctgtaaaatgagatagttgtgtttattcctgctagctacggtttagtgatttgagctctggggtatttttggattttgtgtaagggaattttcttctgtagtttttccacatagatcatgtggtagccactgacatactaggatttaaattttacccctgaaataatctcctttatgagttacaaactattagtgcatattttatcttataatgatgaacagtcttgaaaatgttaggatggaggacataatgcaaagcaatgtcaaaattttccttttataaatcaaacaaagcaataatgctggtaatgttgactgaataaattaaaacttcattttttttttttttgaagacttgggattcagtaacaggtaaacttggcctggataattttttttttagaactattttataaatattctttgtttgctttgaggttgcatttacattgcttttgtttttaaagttgtattcagttaactgattgttttcttaatccaatggtcagtggctactgttaacaaccagtttgtatgtgatctttcctgacttgaatgttcctgctgtgagttgaattagatcatacttgtgaaattctcctatgtcattgatggcaagtcaatgctagaattccaagtattacttttatttcgatgaagagttctcagtcagaagctctgattgctctgtgggtacatggtaaaatagtactttttaaaatgaaatggtgatggtagatggtttttttttaaatatttatacttggcaaaataaaaaagctggcaatccttgcaggtttccaattttttaatttgaaaattgaactgctttatgggaaccaaaagtatggaaatcagtagtctagatcagtgtttctcaaactgt

SEQ ID NO: 203883 - DNA, 1000 bp, Homo Sapiens
ttaatttttttgcaaacagggccttgctatgtcacctggctagactcatcctggcatcaaggaatgttcccacctccgtcccccaaagtactggtattatagctgtgagttgtgacattatacctagctaaaaacattgcttttgaacttgcatggttaaatgtttccacattttctgttaaaatatatttacggttgttcaactttcaactatgcaacttactagctgtgcaaatttgtttgagttacttaatctcattgagactgacctttcatttctataaaatgagataacctttgcccggttgttttaagaaggaatggtaatgtgtgcaaagtgccttgtactatgtccaacataacccaggtgcctaaaagacggtcgttagtattacaatactggattgccaacaatcatttgctaacttagacatcactccattctcagcatagatattatttccaccagaaagtcttctttgactctttgggactaggaggatggtgctgtgtggtggtttatactgagagtgccaacttgattggattggaggatgcaaagtattgctcctgggtgtgtctttgagagtgttgccaaaggaaattaacatttgagtcagtgaactgggaaatcaccctcagtctaggttggcacaatctaatcagctgccagtcagaataacagcaggcagaagaatgtggagagactagactggcttaggctcccagcctatgtctttctcctgtgctgggtgcttcctgccctcgaatatcagactccaagttcttcagctttgagacttggactggcttccttgctcctcagctagcagatggcctattgtgagaccttgtgattgtgtaaggagtaccttaaaaaactcccctttatatatatgtatcctattagttctgtccctctagagaacactactacatgctgtaacttcccatgactcctatacttatccttatcacaaccttgatgttattggaattc

SEQ ID NO: 203884 - DNA, 1000 bp, Homo Sapiens
aatgagggaaaagtgcccccctgtggtttgtacttggacttggtttgttttttttttttttttcaatgtaaatattatgttctttcccaaggaaaagccggcaaagctaggaagaaggctgtactcatctggattctaattttctcctctttgggatccttatcagtagcaaatcaccttttaagtcatcccttcacccgtccaccagcctcaaatccatgccctcacactatcccacgtccattctcacctaggtgccttcagagccaggatccctccaagagctcacccatcctaatgttttcaggagggaaacaaacagaaaatgctttcagtaatggtctgtgctggactcctccctcctttctctagttattcttttcccactcccactcctccaacctccctgccacaccaaaatttctaattcctctgatgcatatcctctcatctgtgtttattctttcaagaagtttattttaggtttgtgtgcatttatttttttctttttttgagatggaattttgctctgttgcccaggctggagtgtggtggtgcccaggttggagtgtggtggcacaatctcagctcactgcaacctctgcctcccaggtttaagcaattctcctgcctcagcctcccgactagctgggattacaggcgtgtgccaccacacccggctaggttttgtgttgttagtagagatggggtttcactatgttggccaggctggtctcgaactctcaacctcaggtaatcctcccacctcggcctcccaaagtgctgggattataggcatgagccaccgcgcctggtcttgtgtgcatttcttactgtattacgtaaatggtcttgagctacaggtagcattctttcttccaactgttactcagcactctgtctttgagaatgagccatgttgctgtgtggacattcagtgcattgcttctaagggctgccctgtgttccacagcagacatacagaacattacactaatcc

SEQ ID NO: 203885 - DNA, 1000 bp, Homo Sapiens
gtcataaagagactcaggctggagtaggattcttcaatatggggtgggccagggagtcataggtcaccagagttcatctcagtttatatataagctttctgatagaggccaggttttcattttaatcttatttttagtacatttaacatctcctaagaggtttattcttctttacttcttaaattataatgtctttactgtccagaaggctttaaggctactaaagttcagggggattattattttttaaaataagaatggttttataggctttcagagataccagggcttttgaagacatcatattgagctcccccattttaccaaagagaaaactgaagctcagagaagggaagtgactttcccaaggtcacacagcactgctgtgtggttgctacttagaccagggttttgcctgttatgcctctcttgctatcatttggcctctgtctagggactcatgctctcaacttctgagttaggtgtgtgctttttctgttttttgtttttagttttgtttgtttgtttgtttgtttttggcccagctgcaagttagtcagctgcggctctgaacatattccagatgattccagcactttctggaccaccaaggaccatggtagcaattcatcacactggcctgtgacttccctttatcgctctgtcagatcgcactgtcttttgtgctgccactgggtgatgagtctggtgtgtggctgaagaagtggtctgacccaagagcatggggaccacagtttaggtcctcctgactctgccatggccccacctcagtacctgggcccaggacttgcgagcgctggtgtttgactgactgtctggttgaagaaggcctcctcctaggctgcctcattcccttctcctttcctcctgggcagccatcatgctgtggccaccacactctcctccccacctgctaagtatggcagccagcctgtacctcctcaccagccctaacaggggtcttggacttcctgaattc

SEQ ID NO: 203886 - DNA, 1000 bp, Homo Sapiens
gtgctgggattacagatgtgagccactgcacctggcctaaatcttttattttagaaggccttctctgccaccatattggcaggatgaggtatgtgttgcttctccaggctggtgaggaattgaaatagcaggttttcccattggccttcactgatgcctggggggtcaggcaagggagtcctcattatttctggagggtagtgggagttcatgctccacctatgcctctggtgataccagccggacagtgtgacgggggagtccttcgttactttgtcagtgggctctactgatatcacagttcggataagtgacttcatttttgccacgatgtagtgagcatctgactccctgtcaggccttctctgaggccaccccagcaggtgggttgcagcgctttcttacagtctgataaaggtagagccctaggctcttcacttggcctttgctataagaggtagacttgggccacgctgttatgtgtggtcttgattgacatagatcatttgttgtctaaacattttctgtcttattaggctttccttttctggccctttgaattagacagagcaggactttcttaggtcctttttttgcctgcacctcctggagtttctgctttgccggcttttccagtacccagtctaggaagaatgagacaaaaagaaaacccagggaatgcaccgctgtgttgagccacaggtcttcagatccctaggtagtgctcttctttttctctacctttcagagtcaccttatgtttgttttatatacaatatccagatttttagttgtgcttggtgggagaaatagggaaaagtatatctacttcatctttcctgaaacagatattgggccaaaagtatttcaatttttagtgagttagagagcttcagggtagtagataaggtaaagttgtaacatatctaagcaacagctattactcaatgataaaaatgaaacttctctgtgtctaatcttgcctaagtggatagaattc

SEQ ID NO: 203887 - DNA, 1000 bp, Homo Sapiens
tatgtgagagatcctataaagagttatcaaactgaacttgggttcgctcacccagcacagtaaagtcaaacatccacaccaagttttttgcagtgggagaaaggagggcatttatttgcagggcacccaacaaggagaatcaggcagctcacacttaagacccaacctccccagtggcttacagttaatggttttttaaggcaaggaaacagcggttatgggcaaaaatcataaattgggccaggtgctgtggctcacacttgtaatcccagcactttggaatgccgaggcaggtagatcacctgaggtcaggagttcaagaccaccctggccaacgtgaaaaaaccccatctctactaaaagtacaaaaattagccaggtgtggtggcaggcgcctgtaatccccagctatttggaaggctgaggcaggagaatcacttgaaccagggaggcagaggttgcagtgagccaagattgtgccactgcactccagcctgggtgacagagtgagactctgtctcaaaaaaaaaaatcataaatcaatacatggaggccatacaggacatctcaaatcggggctcacaggccacaggtgaattcaaagatttttctgatttgcaattggttaaggagggaaaactttgtaaaaaatttaggatcagcagaaaagaatgttagctctggtttatgggcatgctccctccacacccttcaggaagaaatttataacaaagaatggtggccagcattcattcctcagtttcccccttatctgaggtctgcgtgccagaggagccatttgatggaggtctgggtttctgaaaaacaactcagggatatatgttaagatgttatcttcagtttctaaaggaaaccaaacatcctgtgacttcaacttccttggctattgttttaagctaccattcccttcttgcttatcaagttgttcatttacttctcaaggctaactaggtgcctggaatttcccttgaaggaattc

SEQ ID NO: 203888 - DNA, 1000 bp, Homo Sapiens
atgatttccatggggcaaaagaaatactttcattcttgaattcaatggaaatgatgggatcctgttgtggcgggggccaaggggcagcaatgcactcatcaccataacaagatgggctggttaccataataaatagcagaactaaagcactaaccatagtagttttacccacagagattgtcagcattgcctaattattcatggtgtccttagacctgaaatagttggcttattaagggcttacttgattcgtgtaagtaaaaagctgcatgtatttatctggaagactgacttgaatcacgaaaggcagtcatgatccctcaattacaagaatcgagccagatgacaggtccagagtcccttaaatgaagaggagaccaagtccccttgaggagggacaacgcaacatagctaaaaattgatgctgtcattttgtagttttctccgaggggatctgtggccatttaccagggtggttatgcattagggaaggcaaaataaccagactatttagggatcactatagtctggctctgaactgataccagttcctagagattccaatgtcactttgatccaccaggcagagtaggaaattctgaagttcaagtgatcgatggagtttggctgggtttgtctcacagggggcccattgcacacattctgtggttattctccaattctgaaacgcataattaaaattgacatgtgcagaactggcagaatctccacattgcttccatgactctaggagagagggctattatgatgggaaagtgaaagccactggaactattccttttctaaaatagtgaatcaaatgcaatactacatccctagaggggctgcagagattagtgccaccatcatggactttaaggatacggggtggcgactctccccacatccccattaaactcattatttggtttatgtagaagacaaatggatattgaagaatgaccatggcttatcgtaaaactcgtccagtgatgaattc

SEQ ID NO: 203889 - DNA, 1000 bp, Homo Sapiens
gaactcgttctagttcatgatagagtagattgtaaactgtgttaagccacaattcttttcctgctagcttctgattgtcacttctaggatagctcatatattatctataattcttccccttttgaagttaaatgtctttatttgtaaatgacttttttttttttaaagggccatctgccatcctggttgcctttttttttttttttttttttttttttttaatgttccctagtttgttagagactctcttaaagtgtccttcctgcccagagctggggacagtgatccactggaatagtgtactctgcccagtgcagaatatgggatatagttctctatagtcctgtatttatgcacttgatatgtggattctaagtgtttgtttcatcttgtttattttggactattgtacaggctttaaaagatcttactaaattccactgtattagtttgtgtatatctacaaagaacctggacagatagcagaactttattctctcatcagatactgatcatttgtctgatttgggcaagctgtttaatgtcaagcttgagtttccttaactataaattgaagttttaaagtagatgatccctgaggtcttttcctaccctcaaatcctatgactttgagactagatggtaacttaggtttcctctagttttaaaatcctgtgagtctaagattgagagaatgttaggattgaacagagcacatactgtgtgtcagggatgtgcaacggttccagaggtgaataaagggataatagtccctcctctccaggagctggcatcctgtttttggtatcaggctgtagtgccagagggtgacatgtacagctggggcttctaggaagattgggaagaagtggggaattgaccagtacagttgactcatgaataacagaggttagaacttcaaccaaatgccaataaaaaagagcgtttacagaatgtgaaacatttatatggagggcagatgtttcatatatgggaattc

SEQ ID NO: 203890 - DNA, 1000 bp, Homo Sapiens
gtgatccacctgcctcatcctcccaaagttctgggattacaggtgtgagccactatggccagccctcatttggtcttgattacctcctgaagaccctatctccagatacaatcacattgaaagggtttcagcatatgaatttgggagggggtcacattttagtgtatagcaatgtcctaatgccatttttaccccaaactctgagactgattatcccatctctaaatacaaccttgtctcctccagatcatcctctcagttactccaaccctacctgtcttcaccttcaccagggtttggagaagttcaactcttccgtgcaacgctttttcctcaccacccccttcctgctgccttcacttcttctctgacctagactccgcagcccaccaccttcacaaaatctggttaatatcccaaaccccactgtttttttttcttctaatctgctctgccccattcttccaaaaccctatccctagacccatctttttctcttcttcgtgctcctaaacttaggctaccaagctttgctggggaaagcactccaggtgggtgttactacaaatcaccgtctgctgacccactggtactacctgacagcctttgatatttccagagtcaatacctgctttccattctccacagcatctaatataagtcatggcttctcatctgtcctgcttccccgcttcgcgttcaccactgtgagcacaactccagctgcacacgcaatgacagctcctgttgggttctctcctcctcatgcctcctcccgtccctggttgccactcctttcctctgtccctccaccccttggggtggtaacagcttcccactgctccagactctgggtgccatgacacccgtatatcccgcttctcccacacaaagtgggtgccctaagattcaattcaatcctgacactaacaaagttagcacggatcccatagcctaagcggcggctctgtcccacaagactgcctcacctctgatgcca

SEQ ID NO: 203891 - DNA, 1000 bp, Homo Sapiens
cttgggggttgtcccctctgatgatcatgtttactcatgctttttggtgattagagttcttaccacttgcaaataactatactttataagaatacatctaataatgggatactactcagcaatgaagaggaacaaatgtgcatgcaacatcttggatcatgttaagtgaaagaagcaagactcaaaaggctacatactgtatgattctgtttatgagatattctggcttttttttaaaaggcatagggtcttgctgtttttcgttgttgttgtttgtttgttttctttgagacggagtttggctcttgttgcccaggctggagtgcaatggcgtgatctcggttcactgcaacctctgcctcttgtgttcaagtgattcttatgcctcagcctcgcaagtagctgggattacaggcatataccaccatgcccggctaattttgtatttttagtagaggcggggtttctccgtgttttcagactggtctcgaactcctgacctcaggtgatccatccacctctgcctcccaaaatgctgggattacagatgtgagccactgcacccagcgccggggtcttgcaattgcacttgcccaggctggagtgtagtggctattcacaagcacgatcccactactgaccagtacaggagtttttacctgctctgtgtttgacctgggccagttcacctctccttaggcaacctggtggtccctcgctcccaggaggtcaccatattgatgttaaacttagtgcacacacccggtcagcagagcacactataccccagaactcctgggctcaagccatcctcccgagtagctgggactacaggcctgtgccactgtaactggcttatgagatattctggaaaagccaaaatgataaggacagaaaacagatcactggttgacaagagctggggaaaaggattgactccaaaggggcatgaaggaatgtctggggtgatggaactcttctatatcttcattgttgtggt

SEQ ID NO: 203892 - DNA, 1000 bp, Homo Sapiens
tctacttttcccaagcaccttctgctctatgtcacacagaactttctcaagggtgacagtgcttctctcatctgtgctctgtttaaacaaaggcagggagccaaggtcaagtcaaagaaaataagtggcttgtgatactgtgccacatagccacagaattgtttatgacagcagaggcattttctaaactctaatcaaaggaatttaggagattactcagcagatgattagtattatacacgtccaaactgattatcgtttcatgaaatggaagctaagtcagtataaaccaggaaagtcagccaaacactttattggttaaaaacctggattttggttacaaagaccaaaattcaaaactcagtttcataagtctattatttttgagacctcaagcaaatcccttacttccatgagcttcagttttttttttcttctgtaaactgtgtgacatctaattctgacttgttgaaaagattaaaataagatacgagtaagatccctccaaccaatggtggctatgaccaggtttttgggtagtactcaaaacctcgttattttacctaatagagtcctcaagtatatcaacaatatgtcatcaggcatcttggatgtgcttttataacatcatctttttctcagaacttacatctccttaggctcacacttttctttactgattttcctgatttttcagcctctctgaacatataccctgataatcctccagttcatctcccatcttcttattctatgaatgaatccttaggattttatctaacctcagggttttaattattattaatttcctaatgagttccagtcattttaaaagatcttcaatccttccttacccctgagctccagactttgaagtaagaatgacagaaagtcaacatttccggagctgagtttctagtccctgtctgtcctcctctctaccattgttaccactcttgagtttttccatctcagtttcactaatcaacttatgtagatc

SEQ ID NO: 203893 - DNA, 1000 bp, Homo Sapiens
aatacgtcaagcatctctggtacaaattaatgatatcagttggctcttggaaaggggtgagaattggagacagacttttcagaataaattccttggatattttaaatttgatgctatgaatagattgcttacttaaaaaaaagaaagatatacattttttttttttgagatggagtcttgctctgtcgcccaggctggaatacaatggcacgatctcagctcactgcaagctccgcctcccaagttcaagtgattctcctgcctcagcctcttgagtagctgggactacaggcgcccaccaccacccctggctaatttttgtatttttagtagagacggggtttcaccatattggccaggctggccttgaacccctgaccttgtgatccacccgcctcggcctccaaaagtgctgggattacaggcgtgagtgaccacacctggcctgatatacatttttttaaagcaaagagaggagagcaaaagtatagagacatgaaataatccaagctctagaccagaccaacgaatgattctcctgaaagaaaaacatgcagttgcaatcatagccccatcctaggcatatgttgatggcatttacaaataacttcttccacagggtcaaccctttatgagaggttgggcaccttgattgtgcttcattaggcacagtctataatgtaagggtagttcatcttacaggaaggaaaagtggtgaaaaaggggtgagtgggttgacctggacctgttgattgtaaggccacagaattcagtgacagcagagaggggtgggagcaaaggggcagagcaacccctcctccaaccgacctcccctaaagtcacacagaaaaggccccatccttgagtgtgcctggtcagtcatccattgctttgggctttggtatggaaggcagaagggaatttaaaaataagaaaagggccaggcgcagtggctcacacctgtaatcccaacactttgggaggccgaggtgggtggatc

SEQ ID NO: 203894 - DNA, 1000 bp, Homo Sapiens
tttcaaatcattttcacttttcccaatgaaaaacatctagatactaagacgtaggaaatactcatttagcctcaaacaaacctggaggtctcgcatgtggatacaatgtcagaaaccagaaataaactcatcaatctgagttctcaaagacatatgtctgcttctctgttatatatttaaaatatattccaatttcaaagaggggttctttcaagccttttctgaccaccgcacactgatgtggtcctcacagctccgtggttctcaacaccccatgcacacccctagcctacctctgctatatggtaccaagtattcctttattttttatcagttctactggagagttctgagggcattttttcttttcgatctttgttctcccataccaaccacaatgcctgggacatagtaagaactcaatgaatttgatgaattaaataattagttaaagagtaaatgtcaagatgctggtttggaatccacattcccaggcaaagtcaaatggcgaacactgctcctcatggcatggtatggagaatgataagctcaggcggggctgtgccaggttggaactgtgtgcatgtgtgttaactatttccatattcagctgctgttttctccttcagcttgacaccatgctcattactcttttcagcctctttgtgtaaatatacatagttaagaatttatcacacatcacaaaagaatcctgtttcaagaaatgtagtaggaatggattgagtcaattatgccaaacaatataagcagattaacataattctgtcatgttgctacatgggaatgactcaatgtacttgatcatctaggaaaatgaactaaataccttagaaaaatgccattaatagtaatattgttgcagaagacaattagagattttccagggaacttgttttataacctcccaaagttaggcaagaattgatttcatgaggtgcttttacacctggatgctgatcccacattgccagttgcccca

SEQ ID NO: 203895 - DNA, 1000 bp, Homo Sapiens
aatgcttactggcataaaacattcctagaaccaccactcataggtgtcaataaaacgatgagctgctcagctaagcccgagttgctgcttctgagttttgtcaccgaagattgattggccaagttccttttcacttagtggaagagcagttgcagacatgaaaggttttcaagaagcctttctgtcaaaacagagcacctggattcatcatcacaggcatgggtcctcctgctgatggagagaagaagaagtctcaagagatcaaggggaagtgtgagtacctgactcctcaccctcccagaggcccttgccttcttttaatttttgttacagaaaatgaaacatgcacatcagtagagagatgagcacatgaacccctgtgtactaatcacccagcttcaagaagtctcaactcaatggcgccatcttgttttcctctatacccatctgaccagattattgcaaagcaaatcccaggcattatttcatccataaatatttcagattatctaaataaagtggaatcaggtaaagaaatatatgatcaaatacatccattatcacactaaaaattagtgtcaattcaaatatctagattttcccctactgttgtgtagtttttagtagtttatttgaatcaaggtacaaacgagatccacacattgcaacaggttgatttaagtctcttaagaatcttatatgttctctttccactccctcctctgttttccttaaaatttatctggtcacttgttttggagaagccccgtgtttattccaggaactgtctggttgctggaatgtctgtggctgtccaaatgaggtcaaactccagctaaacagggaaaagaagggttctttgccacaacacttctccacgtccctaaacccctactcctgggcagcctagcttggtctggttctgtctggcttttaactggaacatagctctccttggctttgtaacttagagccattccccaggtacagaatagaattc

SEQ ID NO: 203896 - DNA, 1000 bp, Homo Sapiens
cagagcaaacacattaaaacacgtggtatccacagcccaggttgagttgaaattttttgccattaatatttttcaaaggataggatcatcttttgataagacacattatttattttgatgtctgaacacttttttttttttttgagacagggtctcactctgtcacccatactgggtacagtggtgcaatctcggctcactgcaacctccacttcctaggctcaagtgatcctcccatttcagcctcctgagcagctgtgcaccaccatgcctgactaattgtgtgtgtgtgtgtgtgtgtgtgtgtgtgtgtatgtacagacagggtttcaccaagttgcccagactgttctcgaactcctgagctgaagcaatccacccacctcggcctctcaaagtgctgagattacaggtgtgagccaccatgcccggtcgatgtctcaacactttactgccattactttctctgttttggtcaccctgactcctcagaacctagcactgtgcccagcacttagtaggtgctcagtaaacatttgttgaatcagtgcactcatgacttgaatctgactttacagatgataactcgagctgggtttaccagctaacatcatgtaaggggtactgggacattaaactaagtgggtgttacttttgattttgaaattttctttttgtggtttggagagtctcatttttccattaggtttcaaacattctcatagaccgtagactcaagagactcatggagcataatggataaagcggggctgcccatagacatggacccaggaccaccacacctggcctccctgggccaggggttccccttggggccctagatagcatcagaggcctctggctgcaaaggagcagggcccatcctttatcccatcctttatccaggagcaggcctggtgttcctcccgtctcctatccacctggtcggcctgtaccgtgccttggggaatgccctcttttaggtgcccgggtatgatcc

SEQ ID NO: 203897 - DNA, 1000 bp, Homo Sapiens
tatttaagataatttatggtacagcctatttataaatttaattgactatatttgtgccttaattactcaggaaggttttgtttgttcattgagacatccaaagtatgtaaaaggaaacaatatataaaatttattaaccatttcaaatgtttgaaggtattttatttagccgagttttataaatggaaccagacatttttcaaaggcttttcaaagtgatggttaatatctgctagacttacatagttaactgaatgaatgaacagaaaagcctaaagaaggtctcaattttttaaattataacaccataaaactgaatgccagcttctaaaaccaaaaataaatccccaaatagtctttcctgcaagcaaaacgattcttccagacaacaaaaaattcacaccaacaataatcttctagttttaacactgtgtatgattagttcgatcagacttgtgatttttaaaattaattactaacagcttaaacagtgaaaattttatatagatgttactcactttgcttatttatttatttatccataggtgttgatcccaaatattttatatccaaagggaatttctgacaactgcatgcaaattgagtttttgacaaatagaataatttcctcattacttcaatatcagaaacagttaatcttcatttctgattaaactcttacaactgtgtctaaaatttctgtgctaaaggatcagcatagaattgaattttgaggatcacctcaaaattttccagaagtaaataaattaatgaaataccaaacacttgagtgaagtagaactcttattacagagacctctaattaatttttctacaataaaagtatttttggaatgcaaattacttgagaatttcctaatcttctaaattcttccctgtagttcctcaggtttacaaatgtctagaaaatgaattatgcatcaagctctgaattgatgttcactttatagggtatgaggatgaggtacttagggaattc

SEQ ID NO: 203898 - DNA, 1000 bp, Homo Sapiens
ttaaaacactctgtacattttttattattgaaattaacacattgcctactttttaaaaattggaaaaagaaaaaagaagaaaaaaggcctaagtctcaatacctacacactaacattttattcataatccaccagtttttattaggttattttcagcgtttacacattcataagaactttaaattagatttttagaagctggtggtaaattgtaactacaggagagaatcttcccaagaggactgtggcttatggatttattcccatcataggggaaaacattcataataaaataatttgctactgtgatttattcagctgttattgggaagaagtaatgacccctccacattctgtgaagcctcttggaggtttcatgtgctctgactcttcatcaaaattacatatacttttagcaatttttaaagaagtgtacaaagttgagatgtttcctgagctctcatatatctgagaatgtcattttacatctccgtcttcacctctcaaaacttctttcaattctttggctcttaatagtaatcaacacttgcactctggagtcactgtaattcttgctcctttacagctacgcctgttatttccagctgaatatttttagttatttcccagggttccaaaaaacagcaataagtactacacaaagggggtgggccataaccagaaatgtttgggaaatactggctcatgtatgcaatgccaaatctggtttgcgattgtagtgttgctcacatgcagagtgaatcttcagagaatccatgcattttccaaatatatttaataacaggacccttctgagttcctggtacaccaactaacagttcctgagaagtgttctttctgcaaagcccatcttgggatatgccatatattttaattaaactcaaactttaaattaaactcaaatattttatttaaactctcaaaaaagcagaatatatctagatgaggtctctttccactatgttttaatctggaattc

SEQ ID NO: 203899 - DNA, 1000 bp, Homo Sapiens
ggtgtgttgtattgagcagacaagagggacctaagggaggcaatttaggatgctgcttgaggagaaaaataaggttgtttagaccacagaggtaaaactgaagagagagacaactgaacattagatgcaagacatacctctgttacaatgagtaaggccactgaattgtggacaattttggagtggaagacttgcaaaacgtgaagtttatgataactagccatgtcagtgcacagggattggctggaaacaagaagtatgagatagcatatgtacccttagcatttaaagaatcttatatagttttagaatgtttaaaaatggttatgatggagttcccaagaataaagatttttaggcatttcttctatgtgactgtagaatttggtagtctaattgtaggcctgcctttactaaaagtcagagtttttttttttttttaaatcttaaatctgttttgatgtagaagagggatgcatgtaaaaaaaaaaaaaggcctacatgtcactcctgctagaagtggtaatcttcattggccaaaaatatagaaatattgaaatatttttcatcttggaatatttgatacagtaaaagggccaatatggattacctgagggacaattcctgcttttgtgcttcttattttccttgatggaaatgatttaatgaaaagaaatccagactgaaagtcaattcacatgttttagttgggctgagaatatggcatgggagaaatttttcattaatgagctatgtgataagctgccctgagtatgtctcatttcccgatttatagagagtcatgacgttccttcctcctccatgattcaaagataatcatgcatatcatgtataagccatttaagggaaaagcacatttgaaatacagtccctaatattctgatctttaaatgtgaaattgaaccactaagtgatttagagacttgccctaagtatcatacgtgcttagtagaataaactgattttatatattgaattc

SEQ ID NO: 203900 - DNA, 1000 bp, Homo Sapiens
tgttagaagggagtcatgagatccagtcctactcaaggggcattacataagggaatgaataccaggaagtggggatcactcagtaccatcttggtacctactacacatggatatgcccaacactgcctgggccaaaaaaaaaaaaaggctgggcctgaaacccttgctccatgacagggctgcctggggagttttctgatgacatggagagttccagtaaagagagtacatttcaaaaagagaaccataagaagcagatctaacaccaaattgctataatcagtctgacacagataatgagcagaaaaagttagaaagggggctatacttaatgcccatgagcagcgtagctctggcttgtttaaactcagtgatcactcagcaaatgatgctaaattttcagatgcttttgtttagaaaacagccccaccccaaaagacaatgaggtggggtgtccttagagactatccatgtttccatgttttatggatttctcacagagagacagctatcacagaaaatattcaaaggacctgcatcatactgtggtcagctgcctctgcattcactgggaatttgttagtaaatacgtgaaaacgattttgtttttaaaactttatagccttctcaaactatctctacagtagtacttatatttattgtaagaccagtaacagaagatattttgaaaagaacacttctgccttctgaagtctttaaattcatgaccaaaaccaacaatgcacaaaaaaggaaatacatgtggctggtactatgcagggtcagtgggcagcaggtctgccttacctgcaagggccttgggaaggaatggtaaataaagtttcccattgggaaagaacaggcactctcacgcattgctggtaggagggtacatttacaacctccatggaggtcaatttggcaatatacataaaaattacaacatgctttcaccctttgacccaaacattccacttgtaggaatttatcttaagaattc

SEQ ID NO: 203901 - DNA, 1000 bp, Homo Sapiens
tatctataaggggcacacatgagtacggagcagtggttgagaaggacttgaccttggttagaggataagctctcattagccaacaatgagatgtgttgactagaaaaacaaattctgagactgcaccaatatcttgaatgaggaaagggatacttcagcttcattctgtgcagatcagtccacaactggaagactttgtttagttttctgcccccacatttttaaggaatgaaagactgttgaagctcatggaaactgaagagagtgaccaggtctggctggggacttgaaactacactatataaagaatggcacaagaaattgctatgtttgactcaagaaaagaagactcaggggtacacacaagccatgttcaaatatttgaagagcttactattcagcatagctctttggtacagttcgaaccaaggataagatggcttcctggttaggacgtgtacagatggagttggtggtcacaggagtttagaatgttgtggagatgattcaagtatcagttgggtggttggattggtgacttcgagaattccttcaaaccctaaaatatttgattctgtgaaaaagatgacctcaagggagcacttacaagtgttttccaagctgattcattcccagacatgttggtataaaggagaggtagtgattttccagttctagaaatataaatatttaggtttcagtgtatgcccaagctagcacacctcaaggtggagcccgaactcaagttgagattttgagaacatcactagttccagtcacttatttttctatttgaactgagatttaaaagcatgttttgattccccatctgaatatcctgcttcttctacaggctgttgataagctgagggaaacttagaaagctcatgtactttctgttgctctcttctatctgtaacaaatgtttagtagttttccaattactgcagcaatgttaagaggatctgtggtaacgtaattgcaaagtgctcaggaattc

SEQ ID NO: 203902 - DNA, 1000 bp, Homo Sapiens
atgatgcttccacataatcgatttcaacatttttgaaacattgttctaatcctcttagttttttcccatctgttcatttttccaaataaactttagaatcatttggtcacatttcaaaagaaaaataaatccaaagactattgattgagaaaatactaagtttataaactaattggagaagaattgtcattgtcacaaactttagattccttctacagaaatgtttatacatttgttcacatcttcttttgtatctcaaaaagatttttccaattttcctcatgtcgatcctactcattccttgtcatgtttattcctaggtgtcctgggtttgctattgcaattaagaaagtggttttctttcccatttcatcttttaactggttaatgctgttataagcaaagctattgctttttctctatttgatagttaatccacctactttattaaacctcatgaactctaagagatttacaagttactctttttttattattgttatactttaagttctaggatacatgtgcagaatgtgcaggtttgttacgtaggtatagacgtgccatggtggtttgctgcacccatcaatccgtcgtctacattaggtatttctcctaatgctatccctcccctagtcccctacccgccgacaggtcccggtgtgtgatattcccctccctgtgtccatgttactcttttgatattaccagggacacttggatttctactgattttaatgagaataccttctgtattcaccattaaatatgatggtagttgctggttttagctcgatattatttgtcatgctgattaagtggacttgcattcctagctttcaaagaggttttctttcctttttaataaggagtgggtgttgcatgttatctaatacattgtcagtgtgtggctatttataagttctgtgtgattataccatttatctatataaatgtcccctttgttctatttaataatgcttttcccccttctgaattc

SEQ ID NO: 203903 - DNA, 1000 bp, Homo Sapiens
aaattctatggaaattaagtttcatcacactaagacaggaagaagaagaatattaaccttccaggtgacaatcctaaagggaaatatttattatttttcattgtacttggagatttcattaaatgattctttgttaagtcaaaattttgttcatgaatatcagcctttagagacataatcgctcatctagttaacatgtcagaaaagatcaacccattagtggattcattctgtaaatacttaggactgcaaatgggaaggggaaaaattgagtccagaaagttaaggccaaaatgattttgagtttaacgatccagttcatgttctcaatgtgctctatgagaataggctttgtaaccttctttagctgatgcagattaattgaagctcaaaaaacaaaacaaaagaaaaccctgcactacttaacaatgcaaagctgtgcaaggatggaagattcgaaacaaaaatggcattatggaagttacatgatgtcaaagttacatgcaaggaaagaatatccagtacacagatgttttgtcagctcattgtttttaacgttcacaattgtactttcacaacattgatttcatgttattcgatgactccgatcaaaactaccttcccaaacattttcttctccattggccgttctaaatctcttctctgcctgtagtcctttctacttgatttctagtctcttcccctccatagctctccccttatcccctattatctccatactttttatcctgaattataaaacaataataaacatcctttatttatccaggaaaatgtcattaactgtttcccattttaaaggtttagtactgtctcatgtcaaatgacaaagttctatttcagaactttagaatataatatttgtatttattagagaaaccttagggacttacctattgtgctaagcatagaaaagggtatttcattttttatttgcattggagcaattcctttgaattattttatttgcaaagaattc

SEQ ID NO: 203904 - DNA, 1000 bp, Homo Sapiens
aaaccaaaaaaaaaaaaaaaaaccaaaaaaaaaccttgtaaatggaagagcagagcaaatggcaaagtgtgcatatagttctaaccttctcgtaagaaagcaaagtttgaatcctgtaatgtgtctgaaagtgactttttttctggatttctaggtgagattggaaatgggtataatagattccagagtctgcggctccacagggagttttctgtcccctttcaccaagttgctcttacactctaggattgcaatgtgggttcaggtaaaccatccctgacagctgtatgttaagaatcaaattctctgatgttgctttctatactgcagctttacttttacataaagtgtaatactttagaaagcataaatacttttgaggaaattatccttcgttagaggtcaatacatttgctggagtaattttctgtttaccctctgattttttcttcttcctgtgtaacttctttaatatataacttagagaaaaggaccatgtaggaaggcagattattaaagttcttgcccaaccagaatttctctttcttaggttgagtcgttttcttttgattcttgtttataaggctgagatttagagattaaaaaaaaaaaaaaagactttccaagggacatgggacacggcattcagccctcctaaaacattaagttggccaggcgcggtggctcacgcctgtaatcccagcactttgggaggccgaagcgggtggatcacgaggtcaggagtttaagaccagcctggccaacatggtgaaaccccgtctctactaaaaatacaaaaattagctgggcatggtggtgtgtgcctgtaatcccagttacttggcaggctaaggcaggagaatcgcttgaacccaggaggtggaggttgcagtgagctgagatcatgccactgcactccagcctgggctacagagtagactctgtgttaaaaaaaaaaaaacgcaaacaaacaaacaaaaaaacccacattaggtttcag

SEQ ID NO: 203905 - DNA, 1000 bp, Homo Sapiens
gatgaggaacttgagacaaagataaacttgttcacagtaagagaaagggtgaatccaggatctgaacccagggagtctgactgcagaacatgtccccataaccacaagttatatccaggaagctctgatagaaggcagaaagttaaggtccatgaagagagttacctgctggattccagtaagctctttattcaactcttccagctggtcagctatcttctccacagacttctccaaatgtttcaacttctttagttcaacctcttcctgtggactgttctaaaatgtttaagaagaaaataaagccaatagtcaaaaagaacaggctgggcatggtggctcatgcctgtaatcccagcactttgggaggccgagatgggcagatcatttgaggtcaggagttcaagaccagcctggccaacatggtgaaacactgtctctactaaaaaaacaaaaaaattagccaggcatgctggcgtgcacctgtagtcctagctactcgggaggctgaggcaggagtatagcttgaacctgggaggtggaggtttgtagtgagctgagatcgtgcacctgtactccagccagggtgacagagcgagactgtctcaaaaaaaaaaaagaaaaaagaaaaagcaatcaacaagaacagcagcctctgtcaggaaaaatacctgaccacacctgcatgaagccactcacctagaaataacagttttaactctgttgcttcttggaaatcaagtcaaagggttatacatcaagttttccatctacaaagactccagactagagagaaggtgttaggtaaacattctggtgagggccctgacagcttgggtgcagagaatggagacaatccaagtgccagattcagtctcagccctatactgatcaacaaccaagactgaagcctggagggtaatcacatttcagtaaacacttgtgaggagtccagaatggcaagaaaggtggaattctaccattcctttaaatggaattc

SEQ ID NO: 203906 - DNA, 1000 bp, Homo Sapiens
taatatttctaaccatatcagtgtttgtttttattcaattggcaacactttaatgtttcttttctttttatcagggcaaaatttgatccctataaggataaaatatattcttaataagttgaaaggttgtatattttaaaatttttggttgccgggtacagtggctcatgcctgtaatcccaacactttgggaggccaagatgggaggatcacctgaggtcaggagttcgagaccagcctgaccgacatggtgaaaccccctccctactaaagatacaaaattagccaggcatggtggcacatgcctgtaatcccagctactcgagaggctgaggcagaagaattgcttgaccctattttattttgatagtgaatttatccatgtttattttaattatgaaatatgcaaccagcccaaatgcccatcaattaattagtggataaataaattgtggtatatgtataccatggaatactattcagccataaaaaggaatgaaataatggcattcacagcaacctggatggagttgaagacaaggatatctgcaattgctacttcttttcagccttgtaattgagtctctagccagaaaaattaggcaaggaagagaaatgagaaaaagaagtaatctcagctggacgcggtggctcatgcctataatcccagcactttgggaggccgaggcaggcggatcacttgaagtcaggagttcgagaccagcctggctaagatggtgaaaccccgtcactactaaaaacacaaaaattagccaggcatggtgttgcatgcctgtaatcccagctattcaggaggctgagggagaagaatcgcttgaacctgggaggcggagtttgcagtgagccaagatcatgccactgcactctagcctgggtgacagagcgagactctgtctcaaaaaaaaaaaaaaaaaaagaagaaagaaaaactagaaaatgaaaactggcaaaaagaggaaaatgtaaaagaccagaattc

SEQ ID NO: 203907 - DNA, 1000 bp, Homo Sapiens
aacagaagtgagagggaggtcctttgactggggctagaactctgcccagtagttcttttttatcctgccaaaattatcaaaggtcctctgtgtgcctggctctgcgctaggtgctgagaatagaatatgagccaaaatatttggcacttccctaagcccaggcctcttagaccctttgcttctggggtgttggagtgtttcagggcattgctgactgactacactaagatggacgccatttggcactgactttgtttttaacgataatcattttgtatatactctatagggtggccctgtgttaattgaattgccccatgctttgttcccttctagggatagccctgtctgattccaccgtgtggcctctgagccctgaggtagctcctagaagttcaaagaccttgcaggccctgtctgaaacctgtagcctctgtccattccagtgaccctgcagctctgataccactgtttgtacaactcatgctgtgattacggctatcagctgctgtggtctgctgacctctgcttacaggctggcaccatgctcagagctctgtgtgcattatcccactcagtccttatggctattcgaggctcctctcaatatccccattttacaggtgaggaaaatggggctaagggtgctgagcatcttacttcaaattcagtcctcctgagcctgtgctcctgctcactagacaactgcatacagcagggaggtctacttaaagcctccatgcactcactggcaagcctcaagattcctaccaggcacaggatgtggaggcctcttcagtccttggcatagaccctccagtgtgcccagccctctgccgacacatcacagcatctgcctgcatcatgaaggggctgtaaatggagcttggtttgagggcagggctggctccttctgggggcggccatgattctgacctactgggtctggctgatggtgtgggttggggcccacaccatcacgtttctctgtctggaattc

SEQ ID NO: 203908 - DNA, 1000 bp, Homo Sapiens
gatgacactgttcagtcacaggaccaactacccttgaaggttgctgacctgagtccataaatcttcttccttgatgaaacctgatggaattagttcatttttttctgttatttgcaataagaggagtcctaaaagaaacaataagctacaaatctgcatgtataatatgcccaaactcaactagaatactacaaaaacaactatatacacatcaacaaacaatttattgatatcagaaaagcaggatgaggctgggcgtggtggctcagacctgtaatcccagcactttgggaggctgaggcaggtggatcacctgaggtcaggagttcaagaccagcctggccaacatggcgaaaccccatctctaattaaagtacaaaagttagccgggcatggtggtgcacacctgtaatcccagctactcgggaggctgatgcaggagaatcgcttgaacccgggaggtggaggatgcagtgagccaagatcacaccactgcattccagcctgggcaacagagtgagactcagtctcaaaaataaataaataaataaataaataaataaaaataaataaatgaaaagaaaaacaggatgacacataagaaaggataacagcatatgaatgtgcaattttttatctaactgctcaactttccaacttacttttaccagagtgcatatagtccttagcaagaagagatctgagatattttgtttggggctagttattaaaacactaccatacagggaatagaaaacaaattaaggaaatatatttttgtgggtttttttctgttttaaaatattattttaaaccttttttagagatggggtcttgctatgtttcccaggctggtcttgaattcccacctcagcctcccaaatagctgggactacaggcatgtgccactgtacctggctccaaggaaatatatttttgaacaacgagttgtataattaaacagctagaaaagagtaaacaagaattaaaagtggaattc

SEQ ID NO: 203909 - DNA, 1000 bp, Homo Sapiens
cagctttgtgcttgtgatccaagtccctcgtggcatggactcacaaggggacctcctgatctgcaggttgcattgatccatggcaaaagtgtggttttcagggtagggtagcacaatccatcactgccccagatggctgggggagggagttccctttgccccatgcagctcccaggtgggccctctctctaccttgctttttctcactctccgtgggtcgcaccaactacctagccagtcccagtgagagaatcttggtacctcaattgacaatgcagaattcactctccattttcatcctcctaggtaagagctgcagagtgaagctgtttctgttccgccatcttggctgctcctgggttcaaggaatttgcctatcttctgttttatttagctccattgtaatcttcattttttattcttccttcttctggcttgttctttttctacctacttaaggtgtacctacttattagtgctgatatggtttggctctgtgtccccacccaaatatcatcttgaattataactttgcagaggaagggatgagggacatgggccagggacaggctcgatctgggaagctgccttttacttctggggcagcatgtttgtcttgttctagcattaactttactgggcattgtcctcatccttttggattgcaatcagtatttcagacagcactcttgctggctttatcccaggtagctgatggtctctgaggttctgaagctcttttctgaattcccttcctcatagccttctatctgtaccatcttccagtctccacttcatccagtcagaggttcttagagaaactcattttgatttatgatcatatctgccactttttaaatttcatgatcaatttcttactaacaacttcatattttctgtgaattcctcactgtttttcctgacttgacaacaggaaacaatttacatcgaatccctaacaacttctaaaactgaagtttctggtttttaacaaattaaa

SEQ ID NO: 203910 - DNA, 1000 bp, Homo Sapiens
gtaagtcaacctctgtttttcatctttgcaagcattatggtatcattggatcagatgcacactgtgcccaaagagagcttgaatggtcacaaactgttacacacttgctctcaaaaccagtgtgtatagtggcaccttccccgactgctgtgcctggggcatctctaaattaacttccatgtaaaatgcaatgtctattaaagcataagtaatacaatatgctaatttaaagcttacctatacattgttaaaattccatgtacattcagcaatagcttataactcagaccaacaaatgctttatttttcagggaaggagtattttatcactgaggttgtttagaattgctggctcatggtgataataaaaatcataccaactgcgatggttttaccaatcttttaatattctgtggtcagtgcacacacttatagcccacacctagggccggccactcccatcactctgccccagacggatcaatgaaggcaggagatgagatctccagtaggcaggggccagagcatatgcaacttcggaagctacagtaaacacttgggttttcattttccttccattttaagtgcagtggaaagttggtggagggtaggaagcaggggagtaagataatctgaattgtgttttcaaatcaaatcattctggccaggaaggaagcggggagactggaagggagattgacgtgggagtccaggggataccatcctgctggctgggaccaaggcagatgcgtccaatggagcaatgtgggaatgcgagtggaggccggatatgttctgaaggtgacacgggcaggaggggctgtaaatctggagcccaggatagaggtcagggttaggggtttcatctggagccagcggcatatgcagttgtgtttaagggctcaggcagctagggagagcgcggctaagggaggccggcagccctgcgatgttgagaagccagcaaggtgtctggaaggcaagagggagcagggtcgga

SEQ ID NO: 203911 - DNA, 1000 bp, Homo Sapiens
aatcagtgctgagcccacaaccatctgtattagcacatttggtaagaagtgtagggaaacaggaaataccaaaggcaattgtgacgaatctatatgttcttctaagaagctgaccactgttcacgataaatttctcttgatttattttcatccctggacctttgttcagtaagaccccatttaccataatatatatttcttctctgtgagtttcacgtaatttcattcacctagggtgagtccttatgatgtgggcactaacctaattttaaacatgataaacctttatgttaaagttcttaatttagtccccttctgcctctcttactgtactttgcactatgtaacgctggatctaccaaacctttggagtttaatctgcttctccaggatgcaagtcaaatcccctactgtcaataaagcactatgatgaaagaaaataatctgcacccttagcgattactgcatttgcttcatttattcaacaaatatctattaagtgtctactatgtgccgaggatatagaggaacaaaacagacccgtctcattctcgtggtggagttgggatgatggagctaatacaatgacccctaccttcaaaaactcagtgctgctcccctggatagaggtaagtgcctgtgtacttacctaccaactcctgagaccccttcaaaagctcagcatcagggagtttctttgtccacattcttcctgtggctttgaccctgtgtgttctctaaaactagacctgtgccctggtagcaaaggggcatgcaagaggttggcatgtaagacagacaataatgtatcagcaggaacaagacaacctgtgccaaacagagatacactatgataggtggaatcaaaccacgttattcagcaacaaagattggggaggtatgcaaagagaagatctgcaccaggccccagttttgaaagtcctaggacctagagggacagatgtctgggtatcccatgatcctgcagtttttggaattc

SEQ ID NO: 203912 - DNA, 1000 bp, Homo Sapiens
atctcaaaataataagagctgtttatgcaaacccacagccagtatcatactgaatgggcaaaaactggaagcattcactttgaaaaccagcacagagggagagagttgtgctgctgcctccgagagctccaccttcgtggctctggatccggggccccggcctgtggcggcgagcggcggccgctggagacgagcggcggcggcaggcggccagcccgggtctacctcgctccgtgcagggccgggagagggatccgccatattggagctggggccgaaggtgccttggagccgcggcgcgaggcgggtggaggtggcggccctggcctggatcggggaggagtcggctctgccctggcccgcaaggctggggagctaatgagcctctctggctagtctcctccccgtccactccctccactttctgccgctgggagccggctgtggcagtggcagtggcagtggcagtggcagcggcaggatgttctccaagaagccgcacggggacgtgaagaagtccacccagaaggtgctagacaccaagaaggacgcactgactcgcctcaagcacctgcgcatcgtcatcgagttaatggtggaactggctgaagaagatgcattcatccagatgcctgaatcctagttcagagtttatctcgagctgtcttcctgatgcgtatttgttttggaaagtgatgtttatttagtgaaaaaaagaatgcagaatctattgatcttaaacagtttttcgacaacattttttacatatatactatgtgttctttgaaaattttgtgactatcgaagctagtcttaaacagaaaggtcacaagtctcaaagagaggaactggatgctatactttttatttttgagaaaattttacaacttcttccagaaagaattcatcagccatggcagtttcataatattggattgatttaaagaagctacttcacacaggagactccttaaagattaggcgggaaggtgttcgtctt

SEQ ID NO: 203913 - DNA, 1000 bp, Homo Sapiens
gccagaacttccaacactatgttgaataggagtggtgagagagagcatccctgtcttgtgccagttttcaaagagaatgcttccagtttttgcccattcagtatgatattggctgtgggtttgtcataaatagctcttattattttgagatacatcctgtcaatacccaatttattgagagtttttagcatgaagggctgttgaattttgtcaaaggccttttctgcatctattgagataatcatgtggtttttgtctttgattctgtttatatgctggattacttttattgatttgtgtatgttgaaccagccttgcatcccaggaatgaagcccacttgatcattgtgtacaagctttttgatgtgctgctggattcggttttccagtattttattgaggatttttgcatcgatattcatcaaggatattggtctaaaatcatctttttgtgtgtatctgccaggctttggaatcaggatgatgctggcctcataaaatgagttagggaggattccctctttttctattgattggaatagtttcagaaggaatggtaccagctcctccttgtacctctggtagaattcggctgtgaatccatctggtcgtggactttttttggttggtaagctattgattattgccacaatttcagagcctgttatttgtctattcagggattcaacttcttcctggtttagtcttgggagagtgtatgtgtccaggaatttatccatttcttctagatttttctagtttatttgcatggaggtgtttatagtattctctgatggtagtttgtatttctgtgcgatcagtggtgatatcccctttatcattttttattgtatctatttgattcttctctctttcttctttattagtcttgctagtggtctatcaattttgttgatcttttcaaaaaaccagctcctggattcattgatttttttgaagggttttttgtgtctctatctccttcagttctgctcggatc

SEQ ID NO: 203914 - DNA, 1000 bp, Homo Sapiens
tgaatccactcatttattttatatccgacctatcttgctggtgacacgaacagttaagtgtcttgcacaaggtcacagttaatggatgctgggattttcttcctggctggatccagacatcacaaactcacataccacccaccaccacctccagtgggaaccagaaggaagatttaagtaatggaagggaaagaccttaaccctgaatcaggtcctttgggtctggtaccaatttgggacaggagtccaacctgaatttgcctatctgtaaaaagagaagtcaccattccctgcctggcctacctcacaacagtggcatgaagcacaaatgaagaaacagacataaaaactgtctcaaggctgggtgtggtggctcacgcctgtaatcccggcactttgggaggccaaggcgggcggatcacttgaggtcaggaattcgagaccagcctggccaacatggtgaaacccccctctctactaaaaatacaaaaattagccgggcgtggtggtgcctgcctgtaatctcagctccttgggaagctgaggcaggagaatcgcttgaacttgggaggcagaggttgcagtgagccgagatcatgccactgcactccagcctgggagacagagtgagactttgtctcaaaaaacaaacaaaaaactgtctgagaacagaagggcaacgccaccatccccatcaccctggataatcaaaggagctgggaacaaagatgccacacaagagcactgggtgaggagtcaggcttggctggctgcccccagaaggcccttccctgtacccataaaacaaagggaatggattcacttcctggtttccaagcctggttgcacatcaaaatcatgtagtgagctttgcaacaactaagctgcctgtcttcctgagggggcagggatccagcttctgggagctcctggaccagatgttccatcagatccctcctcagttctgtctctaccctgaccccagcaggggaaacagatc

SEQ ID NO: 203915 - DNA, 1000 bp, Homo Sapiens
tatattaagagacaatttggtaacactggtcacaatgatttacgtacactaggagagtaggaaaaatgtacctagtttaatactttagggttaatctatttaacaaactataaagtggctagagtggcatttaatgtaagtcacaatatttattacactaaatgtatatattccctacccacaattatgcctggtcctatcagggaaaattctgttaacatagaacactcatatgcatcagccacctccttgagggggctgctctgtgcacagcaggctgtttaacagcaacctgggctctacccactgggtgccagtagctcctcccagcctctagtaacaaccaaaaatgtctccactcatagccaaatatcccctgccagggtatgccatctctcatatttaactactggtgtatagtcaaatatattaaacatttttaatgctttaacatttctgttagaaaatttacatctatattagacgttgatagttttccttcattttaaattctctgacataataatgttggaagttttgtttgaaagtgatgacacattaaaaatcttcataaagattcgctttattctcagcatttagtgagatgtccctgtgacaagatgttccaaatatgttccaaattgtttctccccacatttcactgacttttccataaactgacttgggatcaaaggtgacaatataggtgtgaattttctgatctagaaaaactagtactttctctcagaaagctcacagattagctacagtgggctgtttgtattgtaatgcaaacacaccacataaacaatggctcaacagagcaggaatttcttactcaagtaaagcacaaatggagggttttagcgtagaggtgggaagacttctgctctcttcagtgaattctttctgtcctaaatcatggtggacttctctcacgcgtggctcccgaggccaccttgggggtcatgatctgcacttcagtccgaggtgccatgag

SEQ ID NO: 203916 - DNA, 1000 bp, Homo Sapiens
gtgttcattgatttgacttctgttcaaatggagctcaaagcttatctcccgtgtccataaacaaggctgttcaaacaggttaggccacctggggtcggaaggtattttaaagtattttaggcatgttcaagacattatacggggcccctgacagccatcagatatgcagaaacttatgtacaaacacatcaagtgagacttcactggataaaaagatttccaaagccatctggagttggaaggtattttaaagtcggccacagcatcattgcaggctggccccctgagcttgtatttctgctttgttccacgcgagcttcctacaaccttatccattcatttcaaaatattgaactttgtattttttctaaaattttaaggctttataacagagtttcaggacgtctagtctgccatattcctagaagcagaactctcactttattttataatacactggagtcttgcaacgtgtctttcgcagtggaggccctcacatgtgtgctggatgaatgtgtgacggctgcttttcacatgttaattccatctctcctgtcagatactcttgcatttctttcatgtctgccctagcgtctagcttagtgctgtgcgcttgttaggggttcattatagcacttgttgaatgaatacacaggtccttgtcttgtctctctagggagggagtttttataattgttcttggaagcctgttttatatattagtcatctttacattaaaaagtgcctgtggggccaagtgtggtggctcacacctgtaatctcagccctttgtggggctgaggtaggaaggacacttgaatccaggcgtttgagaccagcctgtataacaaagcaaaaccaaaataaaataatgataattattacatattatttatcattctataataataattattattagccagacttggtggtgcgcacctgtagtcccagctactcaggaggctgaggcaggaggatcacttgagcccaggaattc

SEQ ID NO: 203917 - DNA, 1000 bp, Homo Sapiens
cgctctctgcaacctccgcctcccaggttcaagcgattctcttgcctcagcctcctgagtagcctgccaccacacccggctaactttgtatttttagtagagatggggtttcaccatgttggccaggctggtcttgaactcctgaccaggtgggtgagtgatccacccacctcagcctcccaaagtgctgggattacaagcatgagccaccatgcctggcctcttccaaacttcttgaaagatcctagaaactatcactccagagcaataggaaaaagagcttacactggtttaagacctggattacccccaaaaggaagggaaggagattctgcaggcagtagtgacaactggtctcaaagtagcctggcgaagtggactgtgtaagactgtgagatctggtctcatgccccccaaaataggcaaggttaagagatcaagtaagacagtaaatgagaaaaaggtaaagttatatacacatgtaaaagcaactgtctatttgttttacaaggatgttcatcggcttggaagctattactacaggaaatccacatggtacaatgagatctaaagtccaaagagctgagtggaggtttgaatctgcttcctggatgatcctgggcaaactattcagcctttctgagcctatttccacctctgaaaatctgggatgatgaaattttttatcactatcctccctgttgaaagactgtgggctgggtgcagtggctcatgcctgtaatcccagcactttaggaggccaaggcgggtggatcacctgaggtcaggagtttgagaccagcctggccaacatggcaaaactccatctctactaaaaatacaaaaaattagtagagcgcagtggcgcgcacaggtaatcccagctactccagaggctgaggcaggagaatcgctggaacccaggaggcgggggttgcagtgagccaagatcgcacgactgcactgtagcctggctgacagagcgagactctgtctcaaa

SEQ ID NO: 203918 - DNA, 1000 bp, Homo Sapiens
attatccttcagttcaaagaattttaaaattttcattttgatttcatttttgacccaatgatcattcagtagcaggttatttaatttctatgtatttgcatggctttgggggttcattttggagttgatttccaatattattccactgtggtcagagagagtacttgatataatatcaattgttttaaatttattgggacttgtcttgtgtcctatcatatggtctgtcttggagaatgttccatgtgctgatgaatagaatgtacattctgcagttgtcaggtacaatgttctaaacatatctgttaagtccatttgttctaaggtacgtttaaatccattgtttctttgttgactatctcgatgatctaagagctgtcagtggagtattcaagtctcccactattgtgttgcagtctgtctcatttcttaggtctagtattgttttataaatttgggagctccagcattaggtgcatacatatttaagattgtgatattttcccgttggacactttttaaatcattatataatgtccctctgtctttttttaactgctgttgttttaaagtttgttttgtcagaaataagagtagttactcctgctcacttttggtgtccctttgcatggagtatcttttatccttgccctttaccttaagtttatgtgagtccttatatgttaggtgagtctcgtgagtctcttgaagacagcagttacttggttggtgaattcttttccattctgccattcttcttagtggagcatttatgccatttacattcaatgttagtattgagatattgagatgtgaagtactattctattcctcatgctgtttgttgcccgaataccttctttttcattgtgttattgttatataggccctgtgagatttatgctttaaggaggttttattttggtgtatttcaaggatttatttcaagatttagagctccttttagcagttcttgtagtgctggcttggttgtgaattc

SEQ ID NO: 203919 - DNA, 1000 bp, Homo Sapiens
agatggggttggaggggcaaagggcttattagaggagtaatgcctgtgaagaaaaggggaacggaacatgtttgggtatagggagccatcagactgcagtgcacacctgacgaagtctctgcccacccagattgcctgatagaggaataccacaagaggtagaaatggctaggctcttgtactaccactttgcacagtcattgactagagatagatctttgatcaatgtagagattttcagccttggcattgttgacatttgggactggatactttgttatagggggttgtcctgtgatttgtaagatgcttagcagcatcctaggcctctatcccctagatgccagtagcccagcctccctgctattagttgtgacagtcaaaactatctttagacactgccatatgttccctagggaagggcctaatggtatataaacaaccctatggtggcatagtccaagttttgggacagggaggagtgttctatactacccttactggaaagacctatgagctattcagaaatctgaactatttaagatggagctttgttctgtggctcctggaattttaagcacacccctgtgaaacatcttgttaggatatactccactctccaaaacaatccataatgtttaaatagggctgttttattgattgattgattgattgattgagatggagtctcactctgttgcccaggctggagtacactgtcacgatctcggctcactgcaacctccccctcctgggttcaagcaattctcctgcctcagcctcccaagtaactgggattacagacacccaccaccgtgcctggctaatttttgtatttttggtagagacggggtttcaccatgttggccaggctggtctcgaactcctgacttctcaggtgatccgcctgcctcggcctcccaaagtgctgggattataggcatgagccaccgcacctggccttatttttctttttgagatggagtctgactttgtcgcc

SEQ ID NO: 203920 - DNA, 1000 bp, Homo Sapiens
gagccagccgctgtactccagcctgagtgacagagcaagaccctgtctaaaaaataaaaaataaaaaataaaataaaaaataaaagcctatagaaaagagaaatcaatggccacaccaagaatttggtctaactgggtataaatggagccatttacctaaacatgagtgaagtgcagggtgagtgtgccgtcggtggaacttattgaattattttattataaggattgtggcagaacagtaaagatgttggccacgctccttcaagtctcaagctcactggataggctaagtaaaaaaaaaaaaaaaaaaatcaagcaagaataagcaaaagtctgtcccacatacagaaggaagccactttctgtccacacctgaggaaaactgagctttcttggcaggcatcgagaactgatggctgtccgagaccagcatccccgtgacttctgacttttcattttaaaacttattttcacatttgctcaagttgtgcctattctagggcactttgaaaagcggctctttctccaaccccatcctcgcctcattccaaggacagacttgaaatggggtgggtcacctggcgtctgcaattttcctataaatgtccccctccctggatagagctagtcaaaagtgggatgtgtttagaagatatagagggatgcggaggtgtgtgtaaagctatcagaatattttactgtatcctctccatgcccaggtgggtggaactggtttcattggtaaacgcttcctaaaccagagaacaatgagaggcaattgatcatcaaaaaaacccaacaacaacaaaaacaaaacacacacacacactgacaagctcctcttcccctcaaactgacaacaacagaaaaaaaaaagaaaagcttttaaaaagaaagagagatctttgtgaatgtacattgtaagttgaggcctggagagagagcaggattggagaggggaggtctctgcctcaagggggcttcacttatttatgtctct

SEQ ID NO: 203921 - DNA, 1000 bp, Homo Sapiens
ctttgaaccaagcttcttgcctctgaagaaaggctgccatccagaaccgccacctgggatgaggctgggcagggtcaggacaagaaacgctgctgcctgtccttggatcctggttactgaacagtcagtgtggaaaatgattaactggttcaagataattaggaaagagaatgattttgagagctggcatggatgagggagagaaacagtggactagggctccagctttaggcaagtgctaaatatcctaccagcaggaaggcggacagagtgggagatcagagagctgtctgggctattcagaccccttggaatggctctgaggaagggaacaggtgcaggcagtggatggggtaagcccacacactcaacactggcaacccaaggccagtgggaattagccagcctaattaacatctccaaatggcccaaggatggcttccagtatttccaatccagcagcagtggctgtgtcctggccctggctctgactctgggtttggcttcctctttctggttgttggtcttgcccatcacccttggttcagaagccgaaagctgggacagctggacaggaagggagggaggaagggaaagtgcatggagcgtgtgcctgtatacgtgctgctcccgtgcaggggctaagtgagcaggtggatcattggtaaaaaaaattttcctggcatttttttctttctctcccatgactataatgtacttgtgtgtggctctatgactaaattaaactaaattataaatttaaaattaatatcttggtgtcaactttcttgttaggccatcataaagaaatgtttccagactctctcactctcatggaacataaacaccaagatttccgctgcatcttagccatgggaagtctgtgtactttaccagactgaattcacatgagtgagtggccacagaggacccgaacattcacagcagcaatattcacagtgaccaaaagtggaaacagcccgaatgtccatcaactggt

SEQ ID NO: 203922 - DNA, 1000 bp, Homo Sapiens
catcctaagcgcccctcaaatctggcactgtatgctaataaggctataataatactatctacattacaaaactatgctatttaaggtttcttttagatctgagttttgtccatctgttcttcccatgagatggaaaatcctgaaggaaaatcttcctctcataaggtcagactcaacaaatccattagtaactgcatatcattatgtcaacagttctacaatttatacagttctggcacattcacatatcatgcaatcctcacaagaactccatgaggtagcttggattctcttcatatcacagaaaccgagtctctgcaagatttattactccgctttacctcacccagcaagcaaagtggccggctcctagcactgcagctgtcaaagaacactgagacactgtgtgctctgtacagagacaagagtggctgttgctacacggagattatgcaaagctgcaagtttctttctattgccatgcccaggaactcagtgctttgacattacactgatttacaataatatgaagtgttaattttaagcacaaggtaccctaaggtaaggtgtcggctgacctaagggaaaaggcaaaaaagccaatacataaatgtccaaaaccagtaagattaagcaagaacagcaataatctgcaaatcaaaatgtatggcaaatggtacaaaaactatgctcccagatgcagcatctaatcagaaaatctacacacggtagtgagtatacctgtattaatcaatacagaaaatcaacatgcccgagtgtgcctgcattgatcgatccaggaatcttggccggggatggaatggtgaaagccaggatagataaaccacggtagtaacgtactactaatgctccatacacttaaggggcctggccctgccaggtttattgaccctgcaattcaccagctacctcctcctgtcgccatggcaacacccacacccaagcagctccagaattcacctttggatatccagaattc

SEQ ID NO: 203923 - DNA, 1000 bp, Homo Sapiens
ttatagttggccaaaatagtggtattttccaatatcagcagcaaaggagcaaggcacagaacacaaaagtgtccagatttttttcattgtgaaatgaccatttgattgactgtagccaggaaataaaaaccacgaggaattccaacatgttaacactgtttatccctgcctaattgtaccattaaggaaaagagatttaaatgcaatgtgcttacattctatctagagggcccattcttcagttctgacttcaacaacaggactaggtttactggcattcatgtccagtgaaaggaaggcggttaggaggagtcgcactaactttctcttctgttaagagctcctgtagcactcagccactcctggtggtgtatccttgtgttgggtaagctacccatatgccaaatgcattctagtagaggtccagacacacacaggattgaggtcagagtcattcacagacattcgaagatatgaataaaaaaacaaatcctctcaaatacacagaagatagggtagggcttccattataatagtaagtcagaacactaaatgttaaaagtggtagctggagcaatatcagagcataggctctgcaggcagctcacctgggctgacatccctcccttccttcataagttgtgttatcacgaacacgctgcctaacctctctgagcatgaggtcctcaccagtaacaggcaaaaattatacttcctctttgggttgtcttgaggagtaaatgagataatttatgtaaagtgattaacacagtaccagcacacagaactcactgaacagtagttacattaattattgtgtttgtcaaaatcattattagacaccaaaaagaagagtgtggggtgtctttggaggggctggagtacgggctacaagaaggatctctccaagctcagaaacctaaatacagcataggcagcagcatttctgacatgaatgtcctggaaagaggatgatttcttcagccttccagatgaattc

SEQ ID NO: 203924 - DNA, 1000 bp, Homo Sapiens
atacaaaaattagccgggtatggtggcaggcatccataatcccagttactcaggagggtgaggcaggagaatcacttgaacctaggaggtggaggttgcagtgagccaagaccacgccgtggcactccagcctgagcagcagagtgaaactctgtctcaaaaaaaaaataaataaataaaaatgaaagttcttaccctctaatcacaaggttggttcccctggcaaccagctctcatctgaaagttatccagtagctcagagccactgggcatctcattagcatacaaaaatacacttattacatttggccatttcaagaattttagacgctgtgtgccaggaaatggggtgagaggcagaccaaatatatatttcttattatgtcacaaatgcagacataaagaatagtataatcaagaagaaattcttgtttcaaatatattctatgtcatattatttgagaatatattctaaattcagaagaaattggaagtagtaaactactttaaaaggaagcccatattaaagtaggtaatataattcagagaaaactgtcatgtaaggagcacacacacaaatataacaaatattactggctatatgccaatgaatgtaataagaaaagatacaaaaaaaaagcttgaaaataccaacagaacaatggtattatagaagtgaatgagcaaatattgctgaataacaggggaatgtgcacagttaatcctattatattatgaaattgactacagaaagtaaatgtagactgtttgtcatcagcataaaataaactagaccacatgctgactctctttgtagggtgagacagatggcatcaatttttccctacttcatgtttgagtcattgtcacagtgtacagatcaaatgtaccagctccacattttcaacatatcatgagaaaatttgacctgtcactttttcgacaaatcttggttaaccgcagataacttaaaatattaagtgacaagtcagaagaattc

SEQ ID NO: 203925 - DNA, 1000 bp, Homo Sapiens
gattgtcagtcaacctgaggatgcgtgtcaggcattcttccaggacctaggattggcaacaggtgaagagtggggaggagaaaagaccaggcctctagacagcccccagtccctacccgtaccctcctgccacaccagggtgccagaggggaaaaaaaattctcctcttgtcacgctcacctttgtgtgatcccctgggttgttactgccgctggagtctcccaactcttgcagttgcggatgtggctctcttactttccaacaagcagatgcctaataccaagcacctaggatacaaagctttacctgaggaaaaatctgaagatttgaaggaactgagggcattttacgtgaaaatcaggacttctggctgcaggccctgtgtaggcaccttctcattaggttagagcccatgctgcagtctaggaatccatccacacacaacccacctctgctgagcgagaagcccacgttggcaatgcctgaagggcactatcagggagactgaatgtgacctacttcatactcagattccatctctgtaggatcttaatgagctttattcaaccaaatcttctcagttcccctaaaaattgaggaaggaaacaagattcaaaatgattcatttagtatatccttttcttatgcagtgttgattaaaatcactgtttttaagcaaggatatttcattataagagccggaatggaaactgtctaaaaaataggtaaattaaactcttagaaaacacaaaaatgttattttggccagtgattcagccacatcacttcaaatcaaatcttttactaagagtaataacatatgaagaaaatggatgttttgagttgcatttcttattttctctttcctccttctggtggaggtgactaatgaacaatgaaatggccaagaggtaggcaggaagccacagaggtgaggaggaggagcgaaagataggaataatccacaaatagttgctaggtctgaaacaatgaggaattc

SEQ ID NO: 203926 - DNA, 1000 bp, Homo Sapiens
aaaaaaaagaggggaaaataggattagtttgtacatcttgtatgcttatactgactcactcccacaaatataagactgtcaacctaaagaaagtgaggcaaaaattaatataagtagagtttatttaggtcgaatttgaggactgcaacctgggagagacagattcaagttgccttgaatatatgctctgattagcagcatatattcaggtgggttttaaaaagtggggcagttcttatattggttcattcaaataacataagctattgattggcaatacactgttccttgtataacaaattccaggaacatgaagataatgggtgaggctcctactctgcaactttaacaacattttaggtaatttatcagctagtctggcaactacagggaaagaaagaataaaatgtctttatcatatatatgtatacatatgatacacatatgtacatatgatatatatacatatatacatgtatatatacatatatcgctgtgtcaagcctcactctgtcatcgctgtgacagagcgtcgcgatgacagagcctcactctgttgcccaggctggagtgcagtggtgcgatcttgactcactgcaagctccgcctccttggttcaagcggattctcctgcctcagccgcccgagtagctgggattacaggaacggctaatttttgtatttttagtagagatggggttttaccatgttggtcaggctggtctcagaactcctggcctcaagtgatccatgtgccttgcctcccagagtgctgggatcataggcgtaagccgccacacccggacagaataaaatgtctttaaacagttgcccctgggtattgaaacagcctttgcaaaattacaactgatgaaattatacctgaggaaattatgacagtgaaataaatcagacctaattgactccatcttgcttctagcctttaagctgtccttgttcgttcctgcgcgtaggccaagctaactttgggaaggaattc

SEQ ID NO: 203927 - DNA, 1000 bp, Homo Sapiens
cctgcatcttacaacagatgtgacagaggaatgcttatggtcaataatgatgtacagtccacagtgataaagaaattggtgggaatgagactttgagaagtataatgaatgtcagattgcaggctgcccatagtacatccagcatcagcacactgtagtttgccttaactaatttgggcctctgcagctttgggacagtattgcaaataggtggtataataagcttaaataacagatttccatcacttaaatatgaaaatctcagatttgtcacagtaataatattgacctcatgtttttgtttttattttttgttcattgacttcatgaatgaatagtttggcaggaaagcaggtaatacacttccaggccttatattacataggtgttgaggctagagaatgtcacagaggcgtgcccttattcataaaacactaggggaaatgccttactgtgttttattaagcgaagacctttcattgtaaaggtgagattattcctttagaaaccatataaattactgaagggaattatgagcaagaatatattttgggttcatagatgccaaatgcccatctcactggatgattattattctaagtattttccattacctagtttcagctcaggaaatcaattagacccttaagggcctaagcaagcaggaaatgagtgatagatttatagattccaccagtgaatttgaaaaaaaaacttttaccttttaaattataactgcaataggctcaatataaatgctttttttttttttttttttttttttttttttttttttttgagacgttgtctcactctgtcacccaggctggagcgcagtgatcttggctcactgtaacctctgcccccaggattcaagtgattctcttgcctcagcctcctgagtagctgggattacaggcacgtaccaccgcatctggctagtttttgtatttttagtagagacagggtttcgccatgttggccaggctggtctcgaact

SEQ ID NO: 203928 - DNA, 1000 bp, Homo Sapiens
cctctcaggtagctgggaccacaggcatgtatcaccacacctggctaatttttttaaatttattttcattttttgtagagacagtgtctcactgtgttgcccaggctggtctcaaaaacactttgggctcagatgatcctcctgtcttggcctcccaaagtgccaggattacaggcatgagccaccgtgtccagatgctttttctagttctttatgtaatttggaattgtattcttcacactgtgaatgttgtattgtggagactttggtttctgttgatgtttttaatttagtagacaataactcagactcaaaactgcaaactctgtcacacctgcagtgggtcgcagttcaaatttcagttcagttcttttctctttaactgaggtctttggattctgccctatgcttgcatggctcagggttcagccagagactgggtagaatttacacacagaacctgagactctccttttctagctcttttttttcttacttccatgatctgtggctgctctgggctatttcttcaggacagaaagcctagggtttgttttttgattggaacttcagctagaccagcctcaggctagagatccaaaaatgaggagttcattccatgtcagccctttcttccaactttcaacttattttcaaaatctgccagcccttgttcacttcagatagtttttgtgttttatccagagtatagttgttgtctgtgggagggtcatactgaaagcagaatttcttactgacatttttatctattatcaaagtgtttgggggacaaaaatgttcacttgagcttgttttgtaagcttgggcaagtctcctttcctctctgggacccacttgctcctctgggaaaggaggtggttggactctgtgatctgtaaggatccttcagtctctgcttctaggcagacagacacgtacacacatactaccaccactatcaccaccaacagtaacagaaacaataagtgccagaagagat

SEQ ID NO: 203929 - DNA, 1000 bp, Homo Sapiens
ttgattgccccaaaccaagggcaaaggaggccgggaagtgcagggaagtacatggaaattcagtgagcaccaagtgtctctaccataaccatgatattgttctcgggatgataaaaaatgaagacagaatgtactttccatttggtactatgttccatacaaataatgcccatgtgttggaattcactgaagataatagcaaaccaatggaaatcacaaaatactctacagatctccagtgcttatatgcaattccaaatttcaaaatgctctggaaaacaaaagtttccagcttttccaataactagttcaatggaaacaacatggcctgaattgaagtaggctatttaccagcatacctggacctcaggttttcatttaagagggagtgaatctgaataaaatagacataaattaggagtaagcatagaaactaaactggaacaacattttggatatattcgatttgtctctaagcttttagtcatttgtcctgcaaatgcattagtcgacatttactatttcctatgtgacaggcactgttttaagtactttgcattaattagctcatttaatgttctcaacaacgctttggtgtaggtgatattattatctctacttagcagacatggaaataaagtcccgataagtctaaaaatggtcacccagttaaaaacaggagaagttagggataaaatccaggcaaatttactccagaagccctttttttaaactactatgctattctgttcccacatcgaatttaaaatcacattaagaaactctcttacctttcatgtgtccatcaacatttgatgagctaaacctgagttgagctatgttaagctttgaatcgtgtgtgcatatatgtttatttgtgagaatttgcagtagactttcaatgaatagctggctttatcttaagtctatgaacaaaaaattttggttggcatcactgtcatggttcttccatttcataaaactttctgagcaagaattc

SEQ ID NO: 203930 - DNA, 1000 bp, Homo Sapiens
ctactgtcatctagtgtgtaaaggccagagatgctgctaaacactctgcagtgtccaggacaacccctgacaacaaagaattatccagccccaaacaccagttgtgctgagaaacgctggtgtctgtgaccctttcaggctcatgggaaaaggcggtcagagagggtgatagctggaggtgggtggacctgagaacaggctccttacatactttgctgcagtctcatttgcttgtggcagttttcaccttgcctctcctacctctctaccatagaactcttactcatcatgttataggttttcatttgtttattcttatgtagccattttcactattccctctcccacccccactcccccaagcagtaaattctgtaatgcaaggcaatcttgtgtccttatttctgtttctgggcacactgtaaaacatctgtattttaatagtatctgtcaggaaattctattttggcaaccaagtacgggctaatctaaagtagcccatacttgagtgctatgttgataaggctctaatgcatagttagccccttgactgtcaggcttggaaaaaagacaggaagtattccttgtctttggaaatgagcctactctggctttgggaaggaaagagtacaaatggttctcaccagatagggttgcagcagctctcccagcattttgggaacaaatcaggtcattatctcaacaatgtcaaaattgtgttcccagatcggttgttgtttgaaacatttggggctgatgcggaggaggagaattaattagcagctccctctgttggtgttctttttcagccttctcacattgcagcacgagagtcccttagacatgctggctgctcatttgataatctgtgttttgctcagtacaaaaggttgctggctaagttttgtgagcccctctaacgtcaggctggcagtatcttgggttcaattaacaagaaagtctacagtaacattttgtcaatggggaaggacttgaattc

SEQ ID NO: 203931 - DNA, 1000 bp, Homo Sapiens
ggctcaagtgatcagcctgcctcagcctcccaaagtgctaggattacaagtgtgagccatcacgcctagccataaatataatttaaatcaagccaacattaagtatgacaggggagctcattatttgtgtattaataactttttttgagacggagtctcactctgtcactctgtcacccaggctggagtgcaatggcgcaatctcagctcactgcaagctctgcctcccaggttcacaccattctcctgccttagcctcctgagcagctgggactacaggtgcccaccaccacatccaactaattttttatatttttagtagagacggggtttcaccgtgttagccaggatggtctccatctccttacctcgtgatccgcccacctcggcctcccaaagtcctgggattacaggcgtgagccgccatgcccggccaataataactattatgtattttaaaaatgtttttcttcttattattattttctaaatcttaccggaaggatgtattttgttgttgttgttgttgttttgagacagagtcttgctctgttgccaggctggagtgcaccggcgtgatctcagctcactgcaacctccgcctcccgggttcaagcaattcccctgcatcagcctcccaagtagctgggactccaggtgcctgccaccatgcccagctaattttttgtatttttagtagagacagggtttcactgtgttatccaggatggtctcgaactcctgacctcaggtgatccgcccgcctcggcctcccaaagtgctgggattataggcgtgagccaccgcacctggccaggatgtttttcaaaatgtgtcagatttgaaagtgataaaatttaactgacataatacaattgttctgagagccttacctattaattaaaggtaaaaataattggaggaaaagaaaactccagatctatattcatcataaatacaaaaacaaaaatctacaacaaaataatagtacaaagaattc

SEQ ID NO: 203932 - DNA, 1000 bp, Homo Sapiens
ccgaggagggcaaatcacctgaggtcagaagttcaagaccagcctgaccaatatggtgaaacccatctctactaaacataaaaatacaaaaattaaccaggctgtggtggtgcgtgcctgtaatcccagctactcaggaggctgaggcagaagaatagcttgaaccaaggaggcgaggttgcagtgagccaagattgcaccactgcactccaacctgggcgacaggagaccctgtctcaaaaaaaaagatgtcacttgggaccagaatgtgaagaaccctcagtgtcatgctaagaaacttgaacctttagctcatctaaaaagaaataagttgttaaagcaaatccacagcataaaccagacgggctgacttatgctaccgataaagcatcattttcaacaagttagttgtatgagagtcatacaactataggatgagtacatatcaaattttattcaactaattaacgaggcatccagtaagagttcaaagctggttttaagaacatctgaggagcccaggaatttgagaccaacataggcaacatggaaagatcctgtccctataaaaaaatttaaaaattagccgagcatggtggcgtacacctgtagttccagctacttgggaggctgaggtgggaggatcatttgagtccaggagtcggaggttgcagtgagctgagattgtgccactgcactccagcctgggcgacagagtgagaccctgtctcaaaaaaaaaaaaaaaaaaaaaaaaagctgggcacggccgctcatgcctgtaatccaaacactttgggaggctgaataggaggattacttgaggccaggaggcttgattacttgagactgcaatgagttatgatcacaccactgcattccagcctgggtgacagtgaagccttgtctcttaaaaaagaaggaaggaaggaggaaaggaaagaaggaaggaaggaaggagaaagaaaagaaacaataaagaaaacctaaaaaaaagaattc

SEQ ID NO: 203933 - DNA, 1000 bp, Homo Sapiens
aactcacttaattctatattcttttcagacgattctcatccatctaaatctctgctttctgtaactgaatcctgaatcttcagtgtgagactacgtagtttaatcccttcttaagtccttatttcaattttgtattctcagatataatctccataaagtgaggaactgtacttcttccgtatccctttgatataaagagaagcattaggatgtggtagatgtttatgaaacatttatgggttgaccaaagggctttctcaagactgtgaagaaaaagtaagaaatctctccacacctcaatgttagtcctcagttttattcagtgtggtgtgcagttaaaaacataaagtttggaatgaggtatatttcagaatttgtatcttgactccactacttgcccaagggaattaaatgtgttaagcctaatttttttatttgtgaaataaggataattgtatcaacctcctgctgttgttgcaagggactaaatgagataataatacaaaattgctgaccaacattcgcacattactaatactatacctgaataatttacatggatatctaatttaatgcctacagtgatcttttgcggaacactgaggcatggggctattatcctcttcattttacaaagaaactaaagtatagagattaagtgatttgctcaagattataaagttcacaagcagtgggataggatttgaacccatcattaagttcaaaatatatgctcccgatcagtaaactataatatgtattagcattgaacataatgtccagctcacattgagtattcactatatgatagcagttttattagcatgaagaatgtgtttgcttaacatttgagtgcttgcaaatgaatgaatgaaggaataaacacattctagtctgtcattcttttattaacacagacattcataaactctgtattgtttagcaagatttttcttttctagtaatatattcttcagtaaatgagacaattagggaattc

SEQ ID NO: 203934 - DNA, 1000 bp, Homo Sapiens
ggcgccatcacaacgagtccaggtttttgcttttggaaggtctctgataatttaggggtgctggaaaccagcactgtgttatccccaatccctcctgtgccaccagttttgtgatttaggttgctttagtgggtgactaacttttgttcagtgaaaccagggtttgtttggggtttttttctttgctacttacatatttaaaggtacaagtttcttatttcaaatctctactgatagtgccctatggggagatgctggaacacattttgcaaatgtgactttttttttttttttaatttttgcttgaagcctgtgtcatgttagttgctgctgccttctttccttttgtgaggttcccaatgtttcgtccagaaaagtactttatttatgcaagtcaggtgactcttaggccacaaaaccatttgatgataaacagattatcattaggtgcatatcttattgatattttgtgaaatgttatgcctatgttgcaaaagttgaatagttttgtctttatatattgctgtcttcagtgtacagcatggttttacttaattgaatgttaatgtttaatattttcttcttatagaagagatcatgcccttttgtatgacatgttttaataaatgttatctgtcaactttgtaaaagttttgtttttcactatgagtagatgaccacatcttgtttgactctgggttttgccacctgagaatacagttatatggtggcgttttggtaagtaaatgccaaataatctgatccaatgggcagtgagtgactgccaggcaggcatttatagtaatattttagacccccactggccccttcgggtacttggggtgtgctagaggctctctgtgccccctgggcccccttcctgctatgcacttctctccaggaagctggccacggtggacctgtcctggcttccggtcaggatccagagacactctgggtggagcctggcagaacagagaacagagaagtcagggaattc

SEQ ID NO: 203935 - DNA, 1000 bp, Homo Sapiens
agcccttccaacccaatgcagagaaggtgccacagccacacagtccaagaaatgcatattggccccatcatcccctcatattgaacaactaatgaaaatacaatacttttgattcatttaagctctctcaaatcacgcctaggctttttaagaaaactaatttttgaatggaagattcaggcttgtgggaagagccaagaagttggcacgatctaatcaggtcagttcttttttgatcaaggacataattttttaaacaatactcaacctaagggtcaagttacaatttttgctttcggagagtttcagtacaactggccaaaatttggctaagaacattttttcttttattacgatcttagaagatctaacacattcactagtatgcccaaaaagtaaaaacatgcagcaaaaagtaaaaagaggagtgagcatgaattatcatgaaaacagatgatactataattatttgtacttttgacctaataaaatatttaaccagattctaactgccttgaattttcaattaataattccacattcccaacctcctactttcaggagaagaacacaacaaagaataaccatcagggatcaccatttagatcttctggtttggtttggtttggtttggtttgaggggaagcagggttagggcgtttcatttagttttgttttagattcagattatgtccattgacaaacagtgaactcaacaaataccctgtacataaaaaagtgttcaattagaaaataaccttagcaaagcagactttttaggtcctctaattccgcaagtttcaaataaataattaagtgtgaccaatactctcaagaagattatgtacttaaataactattataaaggttttcaaagagtttgggtagggaggaatctttctatacgtagtttagcagaatataatgtatcacctattctattcccagagcacacaggataatatacattttttaaaaaaacaaccactgcaaagaattc

SEQ ID NO: 203936 - DNA, 1000 bp, Homo Sapiens
agcagctgagctgggtatgcaacatgtgccaactcatccaatcctgacagtgactctttatctccatacacaggtgaggaaactgagcacggagtggccacaaggctgaagacaaagatctatacccgggtcatctaactccagagggggtgggggaggcacatggtgtttgtaaacctcccttatttctgaacacttatttctattttctagttgttgtaaacagtgcatagtgaacagccttgccctcagttgcagtttgcctggctaattacttccttagggtggattcccaggaaaagaattacagggtcaaagagcgggactgtctttaagactccaaccctgttgcccagctctggccttgctttccagtctcccatcttctttcccacactgtcttaagtcaataggaagcgtacagccttggcctccctccaccctgcccacatctgcctgtctgtacccctgaggacgtgggggtgacctccatccaagcaccctgggtcctgttctgtgtcccagcagggagagtcttcatgtgggggctgcaggtgcccctggcacactgtaggggcttggttgtgattgaaggaatgaatcaatgaatgaatgagattcctggcctgcttggctccactttccattgcaaagcgaccacctgtgaagcagccttctcagtctagagtccagagggcagccctgaagctgagagggtggctcctcactgcaggtgtcagaagcggggaagggatgcagaccccaaccgctcagtctgtacccaaagcctatttgatcctgatgaaagcttctcttgctgaaacaagtgctccagccaggatacctttgcttaagccaggctccctgcctggaagcctcccagcttggattttctagtctgaacaagaaggagaacaaaaatactgtgttggatatccattgctgcataacaaattaccccaaaatggagcagctcaaaacatgcaaggcttgggaattc

SEQ ID NO: 203937 - DNA, 1000 bp, Homo Sapiens
aagagtgaagacaatgagagaaacacttgcttttcctcgaagagagacgacgctggcaccggcgccgatttccttcagtggcctggatgctgcctcacagcttgtcccactgcttggggccatagcagcaagattggctgcagtgtttgtccctccttctgcacccaaagctcctagccagagctgacccctgaaggtgacaaagagctgggctctgagacctcgtccctcagccctttgcccttgtgactgagcacagcaaatacgtatggcctggcaatgccccccagcctcttccatatgcaccccaaccagcacccgagtcctttcccctcccctttaaggcactgggccggcgagtcagttgtgaaaaactggctcaggccccttagaggtggaaaaagaaattaatatcttttcagagcagaccaggtgccaggagcttcatctcattttactttcaaaccagccctatgagaaacgtcgagtgacgtgctagggtcatccacagtaggtggtaaaatctgaactcaaacctccatggcaatggagctagcccctgcccttcttactatactttcagcctctttgtagaagtcacatgagattttctttctgacagctgctgtcaagggccgccctcttccacctctggtccttgcactacccttggattgccacttctatttctaggactcctcagagccacttgggaacacgtggtggggactcttacagacttcctcttcccttctggagcccgccagccccctgcaccttctcggatgcaaccggctgtgctgcccggctggggcacaggcaagacattgcttcactgtgtccacacagaggatgtgacctcacagaggatgcgcaaggaaacttgatctgtcacggcacatggctccaggccacctctacctctctcccttttcacagcctcagtccggctcttctcatgcttctgtgcctctgcacatgtgcccacagcctggaattc

SEQ ID NO: 203938 - DNA, 1000 bp, Homo Sapiens
atatcagggggtgtggacatgtccccaaaaagttctaattgggtcacagcctgtaaagacaaaaaggtaatcatgtgactacaaagaaagctggtgctgctgggccctgctttacacacagtatggtatggggatacacatttctgtttttcatcatctctagataaaccgtaatcctgatgggtcattactatacctcaggatcccaaaggcaacatcttgaatgcagccagaatcaattcttgcttccttgcatctggctatttatctaggcttggtcaagactgcccattaatcacttcccataagcagtaataacattacttcacacttatttaccatcaaatgccagcaatgtctctcttttctaggagataaaggcagggaggcaatcccatcattggtttttctctcatgagtgtatccacacatacaacttgccttccatgtgcaagtatggacatgacttcatggtcacgtcagtaagggctcccaatagcattcaccctgagaggtaggaatcatcatcctcatttttacaaataaataaactaagtctcagggatgtggcatcaaggtcatccaggccacgatttaaattttctgaatacagagaatgcagtcaaacagcactctctgaaagagtccatctttaggataaaaaaatgtggttggaggaaaagaaaacatttcatttaataccaggaaaggcatcaaaaacaacccagtgtatacaccattaatcactcctaggaactccatcactgcagacactgcatcatctctctccccatccatcatatgggagtgtctgagcaaggccagccacagcagctaaagaaaccctttaagatacacttagaaattaatctgcataaactgccagattcacagactctagggagtctatggcgtgacttaattatgacaagtatgtaatcacatgctttgtacaaacctgtccactaaggaaaaaccacttttcccttatcttcagatc

SEQ ID NO: 203939 - DNA, 1000 bp, Homo Sapiens
ggagttcgagaccagcctagccaacatggtgaaaccctgtctctactaaaaatacacaaaattagccaggtatggtggcacatgcttgtaatcccagcaacttgggaggctgagacaggagaatcgcttgaacccaggaggcagaggttgcagtgagccaagatcataccactgtattccaccctgggagacagagtgagactgtctcaaaaaaaaaaaaaaaaaaaaaaagaaatacattttgttttattgcaggcaggatacatttcaagaggcttacttcaccttctctgtctgatctccgccaaatatcttggctttgtatttcccataacccatctgttcttcatgtagctgtgaaagaagtatatctttgaaagcagaattttgagtaaagaaacccgagagttagggagagatgaccaggttccatggctccttgttaatttcaccttcaagccacatactgcctcttcttgggcccttgatctactgctgagcatatctttttctttcttggtgtgaattctgcctctcagtataggtggtatttgttaatttaactctgacataaacatgggaacactgcgcctcagtgtcattgtctgtaaaatggggttataaggtattttctgacctacttaaggttaccgtgaggattaagtgataatgtacaaagaagacttttaaaaattaatattggagtatagtataagcatagtgacatacaatgaattataatcaataataaattgaatttcactttgtgacctcataaaatttgattcctttcagctctatcaaggacagcatcttgcctaatcactttttgttttagaaaagttagatgcttgtccaatgtcacaaagcaagttagggtagaggtagggcaaaagccctgatctcctgactcccacaccagcaggatgcttagttgtgatttctgccttgctttaccacttgggtcatctttcagtgaaggaggtaactatctcttctt

SEQ ID NO: 203940 - DNA, 1000 bp, Homo Sapiens
agaactacatgacacaggagagtaatatggagtccgcaattcttgaagcattgtacacattaccaaggcagaatttgataccagaacatgataaaggtccagctactccagctactctgggaagaaatgaggtcttgggaagttgaagcatcaggctatgcagaaatctacaaataacaaaaaataacctgatgatcctgctttttagtgttcttaacctagaaatgtgtgagagtgcctcatgctttgggtcaggattggtgttaggcttgtaagccaatacatggctataaatggaaattgcatggccacaggggtggaaacccaaacagggaatgagaatgctgagcctctccatcctctgtgactcaaagaaaaagggattcgcctttctagttggagagcaactagttggaaggacaatccctatactatcaccatccccaaaggctttgtgagtgggttacagaaaagcactgcagccaaaactctcaccacagtgaaagccacggtacctagaaagcatcattggactatctggaattctaagtaaaaattccaggaggccaatagccttctgagaaaaatacatgaagtgatgaagacaatgcttcctccccttgggaaaatctcattcctcaaatctggccttccttaaaggaggtcacaaagggagcatgagaagtgaattcacatttgagccctctctccacctaagcttttagtccttagatttagtggaggaataaatctctgcccttgcctttaaattcaaggagcttcccttctcttttgttccctgagcttgtcttctattgcttgtaaaagtgctattactgcctcatcctccctttcaggctgatctattaatatctggactcaaagtagccactgaaaatgtcaattcatccctgtagtggatcaggtacagatatgacagcctgggaccagtcaccaagtttatagaaatggtgagtcacaacagctacatctctagatc

SEQ ID NO: 203941 - DNA, 1000 bp, Homo Sapiens
gcggtaggtagaataaaactatgcacttctcaatataggatcacactcatgcttatatagagagggacaggaggacagagagactcaacctgggctaactgcatggaatgccagagtgagattccgttgcattctttacattgctgttggggaatcctaattatagtttaatttgcatattcaaatttaacttgtattaaattaaattaaaatatgaaagtccatcaacaaacctcaggtctgctaacctctgtgacctccagaagtaagtccaatcaaaaaccaaagcagcttagacattcatgattctgtatctccagatggcagaatcacctcaggatttagcccaggccatagaaatcctttccttcttttgggacataagctccaaggtagatcttctaatttgttacattttcaacaaacatttggcaaatgcatttgagatttcacttaccaggcctgcatttagggggaaagtagagtgaacgagtagacatttctcaacatagaatcacattcatgctcatattaagagagagatgagagaactgggatgctggggttacaaaggcaaataagacacaggccctgcttctccctgggaggaggggcaatttcgaaaagataaagacgatacaacatgagaaactgtcgtaaaggtatacataaagttccctgggaagaagggagacttgaataatactacctgagtgaactgaagagattttcagagaggaggtcacatgtaagatggatgttatgcacaatatggtttagatgaataaagaaatggtgagtccagtcacggtggctcacgcctgtaatcccagcactttgggaggccgaggcgggaggatcacttgagcctatgggtttgagaccagcctgggcaacatagcaaggccctgtctctacaaaaaatacaaaaattagccaggtgtggtggcagcacatgcctgtagttccagctgttcaggaggctgaggtgggagaattc

SEQ ID NO: 203942 - DNA, 1000 bp, Homo Sapiens
ccaatagttctggttctggaggatattaatattaattacatacccactgtgtgctatggactttactgttcctcatttggttctcaaaataaccttgctatgtgagaataactgtatcagacactgttgattgcccactcaacagtgaataccttcttctttttcactaatgcaatcttcattttgatcaggtagctcaggctgcaatgttctcagtctagtcattctcctttgctaataagcagtttaggtgtgagtatatgactcagtattggtcagtggggcctgagtggaggtctgctggggggcttctggggcacatgttatttccaataaatagagagagggagataccccagaagaagcactgtgctttgttttaggttgtgatgtttggaactgggcatgcatcctgtgactgggagggaaaagtcaagagaatggcagaaaaactgcctcagaaactgacgtccctgaactgctcatattatcaatcctaacatcacctatctccagactgcgtctcatgtgaggctaaaaactcagtcatttaagtcaggtattctgtttcttgcattcaaatgcaccctaacttacataatgatgacttacatttcataaataagggaacagaagctctgagaggaaaaatcattagccccatgtcacatatccaggaagtgacagaatgaggacttgagtttaggtctaattcactttctaatccatgcttctcaactacaggagctgacattctaaacagtgtttaaaatcatagtgtggaaccatgttattaacaaataacatagcttttgtcagaatctagactgaagttcaaattaatcaatcggcatccatgatataaatgcaactgcttataaaaatgtaaaattgtatatttacaaatctgtttataaagttttctccaaaaattataattattcattaattcaacaaagtgcattaagtactatgcctaataatttgttcaattgaattc

SEQ ID NO: 203943 - DNA, 1000 bp, Homo Sapiens
gaaacccagggtcacattcattcatcaaatattgtctaggggctggtgggcaggccccctggaatacagccaggaaccacagaccctgacactcctcctgcagtcacaaggtactgttcgcatcactttctctccatcaaatcttttttaaaaaatttatctaaggggttataacattagagaaagattaggagtataatgttagagaaagttatcctcactacagctatccttcttgttaagactccaggccgggtgcagtggctcatgcctgtaatcccagcactttgggaggccaaggcgggtggatcatatgaggtcaggagttcaagaccagcctgaccaacatggtgaaacccccatctctactaaaaatacaaaattagccgggtgtggtggcgcacacctgtaatcccagctactcaggaggctaaggccaagagaatcgcttgaacccggaaggcggaggttgcggtgagccgagatcgcgccgttgcactccagcctgggtgacagagcaaaactacgtctcaaaaacaaactcccatttatcctctacccctttaacaaatgcatgtctctcttttatgcactttcaaatgtgtgtgccgacgctaaaaaaaaaaaaaaaccccaccctgcaggctgagacccctgtggtacgcgcgtccccactgtcttgagcaccggccggcgaaggtgtctgcagcggcgtctctggccgacagggggcagcacggcgccagcgtcctcgcccagcgcactggctgcccgggccggcccaccgcgtggtctgtggaatttggggatgggaggtgcttttctttcttctctttctttctcttttttcttttttcctttcttttctttccttccttcctccctcccttctttccttcctctctccctccctcccttctttccttccttccttcctccctccctccctctttcttttttataacgtttttccttgggtccctgcttccaaactgtgggt

SEQ ID NO: 203944 - DNA, 1000 bp, Homo Sapiens
atcatttgaacccgggaggtggaggttgcagtgagccgaaatcgcaccactgcactccagcccaggagacagagttagactccatctcaaataagtaataataataaaaaaaaggagcgactgatacccacatataccaggtgcattagcacaatcactatttccaaaggctggaaggaaatagccttgccgagggccagaccctgagctgctggaggccttgagaatggcatctcacgtccccacggagagaattgtgatgcccggacatcacgggcgcttccatgtgggtgtttccgtggccagagggattctgaaatgtgtagggacaaggacccattccagggaagccaagtgtcggccgcattcaccacccgtcccctgcagtctcacacctgcccgaggaggcagcccagcagtcgggggccccgagctggggaggaacgcaggcggctgcagccccgagggagccctgcgcttgtttctaagaataggtggcttccgggatctggagttcggtttttctaaatacacctcagcccggagactcggaggcaggcaatggggccaagtaggcagccttgggagtgacatcacggtttcctcttttaaggcgattctgaggcttccttctccccaggcccctcccgcccagctgctgcagctgctcagagccacctcggcctccacctctgcggagctctgacctgccctggcttggctgtgcctgggtttgggacagttcggtgtgtgttaaagaagcagagctttaactgcgttgagggtgtgttttccctcctgcctgctcttcttacctgcagtccaaacacgtgtgcctcggttgtttctaaagcttccccgtggactgcatgactgaaaatggactaaatgatgattatgttaagaagacttgacagtgccacctttagagggaaacgccaaaagtggcccagaaggctgagggacaggggcctatgtaagcttcacgggaacagaattc

SEQ ID NO: 203945 - DNA, 1000 bp, Homo Sapiens
ggaggctgaggcaggaggatcacttgagcccaggagatcaagacgagcctgggcaatgtggcaaaaccccatctctacaataacaacaacaacaaaaaacaaaaaaagaaaaattagccgggcgtggtggcaaacatctgtagtcctagctactcaggaggctgaggtgggaggaccacctgagcctgggaaggtcaagattgacactgcactccagtctcggaaacagagtgagatcctgtgtcaaaaaaaaaaaaaaaaaaaaaaaaggtaaaacaggtaatcttaaaaaaaaaaaattatttcacctaatcctcccaacaatgccatgagataggtatcattataccattttgcagatattgcagcttacagaagtcaagtcactgccaaagataacgagttgtggagctggggttgtaatccaggaatccagaaaatcaagtttagagttggcactcttaaccactataactatgccatactgccctcctgatttctgttctttaaggcctagctacataaactcacatagttctaagagctgacccttgcctatgacagcatctggttttccaaggatgtcaagctagaggctcaagggcatgccaatctcttctaccaatcctcccacctaccgcttcttggcgatttcattctgccgtttcaccttttcttcctcaaactcccggatgttgcgcacaccaatctcccgacaaaactcttcaaacacctcatcctctacctgagaagagaagccagggagggcatcggcccttttagtctgtcctgcttccagtcccagtcctgccctgacacacacgctggcatggcccacaccctaccaacctggttcatcttctccttcaagtctttcatttccctctctcggctctgaatgatcctcttgatatcattaatgcgaggcccaaagttggctagctcactctccagcttggatttttcctacaggcaatgggttgagaggacaaagcagacc

SEQ ID NO: 203946 - DNA, 1000 bp, Homo Sapiens
cttgggaggctgagattgcagtgagccaatatcacaccactgcactccagcctgggctctgtctcaaaaaaataaataagaaataattaaaaaattaaaaaccaaatataatttccccttccccacttcttggccccatcccacctgaaattatcttcattatttttgtaaaaataaagggtgtccaggcctcctgtttttaatccaatttttcagttgtaaaactgttacattatatgtatttatcccattctttcctttggacaaatttctagaattgaaatccctgggttatatgatacacattttcctatgagcaattttaattttcttttttaatttctttttcagatatggttctaatcactacttaagcagaatagaggttaccaggaaagaaggtgaaaatataaccttgcctttcaggcatccaactttttaaaaaaattcacttataatggtattcaattatatactgaaattcaattaaatactaataatctcaaatattttaagtgttactctaggcaataggtataaatcctaataagttaaaactattacagctatacttaaaactaagtaaaaatcaataactgggtaaagaggctcaaccaatcataagttaagtctatggcatactgaccttcacccatgcaacctgtggctaaagaagcagcctagctccacacactgaggtggagaaaagcaaactatcttaattatgtgtagtcatgggtatgcatgttggaagttctttgttcagaatgaactttctttcaccccatctttattctctgctccatgaggaaagaaaaacagcttcctcctcattctgatttcaaataaaccttcacaaccacaactgtcataccgttcatcccttattcctccagaatgaaacaccaccaaatcctgaagcgtccaccatggaaatcagttcttggatacctctgggctgtctacatgttaagatggctgcagagtgaccagagaattc

SEQ ID NO: 203947 - DNA, 1000 bp, Homo Sapiens
aaagaacttgcttaaggtcactgagctagaaatgctgaaggcagtcaaggtctaaagcctgtgctctggcagggaacggtggctcatgcctgtaatcccagcactttaggaggccagaacggatcacctgaggtcaggagttcgagaccagcctggccaacatggcaaaatcccgtgtctactaaaaatacaaaaaaattagccgggcgtggtggcgcacatctatagtctcagctactcgggaggctgaggcacgagaatcacttgaacccaggcggcggaggttgcagtgagctgagatcacactactgcacttcagcctgggtgacagagcaagattccaattaaaacaaacaaacaaacaaacaaaaatttaaaataaataaataaataaagcctacactctaactattctgtccctcattgtaaagcactttcacatatgatacctcagttattcaaagaaaaccttacctcctgaggaggaatatcaaatgaaatagttctcatgtccactttgatgaagctgtcagtgcatggcagaataaaaaacaaacctgcaacaaagatacacacattatacagacaccagcaacctaatcagttcacttctccattcagttttaagaaaatcaacctagtgaactgaaaagtcaccagttcatcttcgtgaatgagccagaagccaggaatgataactttgattcctcttgcttacttcccacatttgactgtctccactaaggtctgtggagttcatttccttaatctactgttgctatcactcttctccccaccgccccactgggaccaatgcaatcgtttcccaggccatctttctattttttgtagtttctctcctataatctatttcctaagctgcaagccgagcaatcccccctaaaatacaaaccctcccccacgcatggtcctgcataacccgcctttgttcccctcttcagccacttcctctctcttcacaccctgcactcttgctgga

SEQ ID NO: 203948 - DNA, 1000 bp, Homo Sapiens
ggcctaagaggggccacccagggctgcagaactgatccatcccatacaaaatcactgaaaagacccccacagaccttgcttaaaaatagtcttcttggccaggtgcagtggctcacgcctgtgattccagcactttgagaggctgaggtgggtggatcacctgagggcgggagttcaagaccagcctggccaacatgggaaaaccccgtctctactaaaaatacaaaaaattagccgggtgtggtggcggatgcctgtaatcccagctactcgggaggctgaggcaggagaatcgcttgaacctaggaggcagagattgctttgagctgagatcacgccgctgcactccagcctgggcactagagcgagactccgtctcaaaagtctcctggcggtgtgtccgcatcagagttcaggtcgttcattgtgaatggatggtgcatcttttacatctaagtggactcctttttaagccgtatttgagacctagttggctttcccttcccaagaatgtcctggcccatggtcctggagacctctgaacctgggtgtccagctactagacacgtaaaaaccatttctaagtaccccttgtgggccaggcttatatctgtaatcccaacacttagggaggctgaggcaggaggattacttgagcccaggagtttgagaccagcttgggcaacagggtgagacccagtgtctacaaagagtaagatgattagtggaacatgctggtgtgcacctgtagtcccagctacttggaggctgaggtaggaagatcacttgagcctgggaggttgaggctgcagtgagtcttgattgtgccactgtactccagcctggacaacacagtgagatcctgtctcaaaaaaaaaaaaaaaaaaaaaaaagaagcccttgtgtccctcccctgcaatcctgtgctgtgcccagaggtggcttccagtccagaatggagaagacgcattccggccgtcatgggctctggggaccccac

SEQ ID NO: 203949 - DNA, 1000 bp, Homo Sapiens
tagatggaagtatatcagcattcactgtaaaattatttcagctttctataatggcttaagaattttcataaaaaatattggggaaaatgtgaactcatacttagcaagtgaaaaactaaaataaaaggaatataaaaatatttatattatacacacagcaaaagttatatagaaagttcattataattaataaaaaaatcaagacacctataaaataaatgtgaaaggatattaacaaaatacaaataaaaaaataaacccatggaaaatattcagttacctctaaccaaagaggtaattctaaaattaaagcaagcctgaaataccatagcacatctactttcttagcagaattaaaacacctgagcacatgcacgtacacacgtgcgcacatgcgcgcacacacacactctctctctttcctggcaaagctgcggtgaaaatggtgcactcatctacagctggcagccttcactgtaaacaagcaccgcctgtttgcaaagcaatttggcagtccctaagtcatagcgcttatcaagccctttgacctagtgtcccactccttagaatataactgtaacagtcaaaagaagccaaaagatgttcattgcagtattatctactaaaaggattaaatcataatgaacaacctaaatggccatcaagagaaggatttagtaaataatgacacacccgtatcatgaaatatggtgtagacattaaaaaatgacaattgaagctcatgtagaaacctgcaaaatgttcataacacacaatcaaatggaaagctatttataattgactgtgcgactacaggaataaatgaaatgtgcattggcactgtaaaaaaaaaaaaatgaacaattaatgaaaatgacatgctgccatataaggggactgtagctgactcctttttctaaaattttctttcatcttgctggtgtatctttcaattaaaattagatcattaaaaagccagtcttaagactgtctactcaca

SEQ ID NO: 203950 - DNA, 1000 bp, Homo Sapiens
tcaccatattggccaggctggtctcaaactcctgaccttgtgatccacccgccttcggcctcccaaagtgctgggattacaggcacgagccactgtgcctggccaagactgatagttaacttctttagtattactatgattttttcagtggtattttttctttgaatttttattacagagaatttcaaatatgttcaaaaacagtagcataaacccccatatccaccgcccagccctcaaaccattaaaccatagccaatccacctgaatatactgctttgtttcatgtgttttgttgaagcaaatcccaggaccctatcatttaaaaaaaatttttagtatgcatttctaaaaaataagaacacttaattagccacaacagcattattatatttttaaaggaaagttatttaaaatcaaacatgcagtcacgttcaaaattccaattatgtcatcaaataaaaataaatgattttattagacttttttccctttcctctcaaacagaatcaaaaaaaagctttacatattgcaactgattagtatgtctgggttgttcagtgttaatgtatcttttaaaaagttgttcatgttctgtttgattctggtattaaaaaaaatactgattattgtatattcattttttgtaacatttcaatctgttcaattcttagttctaacaattacctaagatgcttcgggattttctatcagtataatcagtttgactgcaaatattgatggtgttacctgttcttttcctattcttaaacttttttcttcttgtcttttctgctggcttggcctactgaatagatgtggtaatagtcagcatcctggtttattccaggtagcaggaaagtgttcaaagtttcacctttaagcatgtttgaagtaggtgaattcactgtaggtctgtttctattggttttcaattatagccctttttaagtcatgtaccgagttaactttgtttattgctcgctgttcttgaaaaatt

SEQ ID NO: 203951 - DNA, 1000 bp, Homo Sapiens
atcaagaacacacattgggcaaaggccaatctatccaataaagggtgctgagaaaactggatattcatatgcagaaaaatgaaaccagactccctatctctcaccatgtccaaaaatcaaatagagacggattaaaaaccaatgtaaggcccgaaactgtgaaactactggaagaaaattggggaaccccttcatgacattggtctgggcaaggattttttgaataagaccaaaaaagcacacgcaacaaaagcaaaaacaggcaaataggattccattaaactaacaagcttctgcacaacaaaggaaatgatcagcagagtgaagtgacgacctacagaatgggagaaaacattcatatacttcgcatctgacaaggggttaatatccaggacacacacggaactcaaagaattgtaagtcttaaacgatggctttaaacaaattttgtgaaaatttaaccatcaggtctggtataagccagctccaggacaccactggaagggttcctgttttggaagctggactctgtcctcctcttggagccctcggagagagcaagcgaggctgctctgttctggaggctccgtgcccctgaggcctttgaccccgttacccgcgttcctccccttgaagcccggtcccgctctcccaacaccagtgttctgctgccccctaatggcagcttctgccatctgcggctgtccgggagctagatccaccgcaaagtccaccagctccgctccaggatcagagacccctgagcaggttaaacaatcttccccctccactccagacttttggaacccaaggacggccgggtcagagtacccaggacctcaagccccgctgccccttgtccatcccagaatcgtggtttcccactgccctctgcagtgccgcggcgaagtgatgagcccggcactgtggcgccacctagtgcctctgctgggtcagtggcacctgcacctgcactgccagccccctgctgggagaattc

SEQ ID NO: 203952 - DNA, 1000 bp, Homo Sapiens
gccttgccctcccaaagtgttgggaataccagcatgagtcactgcacccagcccgaaataaagtttaaaaaggaatctaaaagatatagtttaaaaaaatccctaaagaacaaatggaacacagccttattcttagcactcagaactaatggttaactctttgtcatatttctttgagttttgtttcttttcctctatattgagagacaatcactgtacttttttaaaataaaagttgtatatctatatgcaacttttaaacaacatagtattgttttgtgtgattttaaaaaatataggtagtacaattgtgtatcattctgtatcttacattttttactcaatgatatagtttttattgagatttatcaatgttcatgtattctatatggatgtatatagaatatacatataaatgtatatatttaggttattctttttatttgccgtgtggtatttcactgtatgagtataccagattttgtttattctttccctattggtggatgtttaggttgttgccagtttgctatagtttttagtgcatattcacaaagagtagctcacaggctccttacgtaaactcagtgtcatacgtgagacaggacaaatgagaaaattcaaacacagagaagtaatcaattaacttggctaagatttgttacactctcagatagaaccccgtttttctaattcttcctgtaaggatcttgcacctactttgtacagctttctgtttttcagagcttggagtaatatttagaagttgtaactgaacctacttacatgcaatttgggttaagaataccctatgcttttctccttgatatatacatatattttaagctctgttttaaaattcttattctgcactaaaattagttttaagaaataaatatctataagacaggtattttaaaagacaaataaaaatcccggcaaacttttccacatgcgtgtttaaattttgatgttaaatgttaaaggaaactaaaagatc

SEQ ID NO: 203953 - DNA, 1000 bp, Homo Sapiens
tagaaggccaggcggcacagggcactgcagtaccccacttgccctcttacagttaatctggtggatgataaataaggttgcaactttattcaaattgcagcgcaagctctgccttcattactgttacctctttctgctctctagccagttaccacctcttccatttgaaaggactatgaaaacgggtctcctgccttcctacagaagtactagcaagttggccgggcattgtggctcacccctataatcccagcaccttggaaggccgaggcaggaggacaacatgagcccaagagttcgagacaagcctgggcaacacagtgagacactgtctccactaaaaaaaaaaaaaaaatagccaggcacggtggcacatgcctgtagtctcagctactcaagaggttcaggcagcaggattgcttgagcccaggtgttggaggctgcagtgagctataattatgccactgagctccaggctggggaacagaaaagaccttatctcaaaaaagacagaagtacttgcaagtgataaagctgaaagcatcttagctgagacatgcacactaaggattgggttggatttctgaaaagtatgtaacctgatatattcgtcaaaaaattaattcaattccataaatacagcaactgctgtatttatacagcaactgctatatgacgtggtaagtagtcaggttcaattaacactgtggatttttcctgtttttgctgagactaacaataatcttaatatacaattgttttataaacataaattcctctttgaatgaagaagtaaaagaaaaaagtatgtctgggagtaagtgggtacctgcctgtagaaaagataactattttaagttgagtgagaaggggagatactcaacatcagtaaaatattcccctggcttaaggtggccttggttgaggaaatattacagatttccaagtgagtgagtacagaatccaggagaaggaaccaatagcacttagtgactgcgga

SEQ ID NO: 203954 - DNA, 1000 bp, Homo Sapiens
cttttgggcattaaaaccaaagttcatacattattgagacaggccgactctgctaaggcagcctgtttggcctttaagttttattgcttattttttgagtatgtatttatttttttgattattattattttttttttgagctttaagccttcaagtttcctttttattcttgacccctagacatttcctttgcttgtggactcgggtatttgtttttaggtaatattttttttccctatgacacagccctcaggagatcctgagaacatgtgccctcatttttaggtaattttaattaggaagggttttaggttgtctgatctgccttgttgctagaaacagaaattctcctattgattgatttttcaaaccacttcttagtggcctctacaactactccagtcaggtcaagaatggctctcacattgccaagtcagtgggtatttttagtcttcatcttagatgacctttatgcacatttgtctttgtctaggaacttctgttggaaacatcttctattttaatgttattttaaatttttttgcttttgtaacattatgcttagcatgtgtgtccaactctttgacaatttctttttagttttctggtggcttccctttatccaaatttagtattgaaattcctcgagccgctgcttttctcactccataattctggccagaatttggtacttaaaatattttgtctaaaatattacaatagctacttaagtcatctccctgactccactctgttgtctttcagggcgtcgtccacactgtagccaaagtgatcttataaaaacataattctaatcatggcactcttctgcttaaaaatgttttaatggctttccgttaggttaaaatttaaaagtcctttgtagcctgtgagactctacatgagttgactccctagcttcatctttgagcatcttatttctttacttattataccatcagttagagttgattgttatataatccacagaagtgaattc

SEQ ID NO: 203955 - DNA, 1000 bp, Homo Sapiens
gccttgtccattttggtctccaccagacagtgatctctggcactacatggtcttcatctcctaatgacccaccctgccccttcctctaccaccaaggtatggctttataccttgcacccatttcctgttttttgtcaacctaggctaactgtgtcaggccattcttgcactgctatagagaaattcctgagactgggtagtttataaagaaaagaggtctaattggctcatggttctgcaggctgtacaggaagcatagcgccggcatcactcagcttctggggacagctcaggaaggttttactcatcgcagaaagcaaagtgggagcttgtaggtcacatagtgaaagcaggagcaagagagagtgtcaggggaggtgccacacacttttcaatgaccagctcccatgtgaactcactgttgtgaggacaccaccgagggaatggtgctaaaccattcatgagaaatccacccccatgatccagtcacctcccaccaggccccacgtctaatactagggattacatttcaacatgggatctgggtggagacaaatagacaaactatatcagtaaccaaaaaacaaacaaaacaaaacaaccaaaaaacaaaaatcaagtgatggtattgaaagggcactcaatcagaagatctggtcttcaggccggtctctgaacctgaacagatatatggccttgggcacactccataagatcaggggctctggtaccttaaaggataaacgaagagtcttgcccgagtctagcttctccgcagaaacttgagcccatgcctgaccttatctgtataaaaatgcactgtaattattttttaaatttgcattgttaggcccatctgacacacagccagtgttaacctaccttccttctactgtcagtgaattctccacctacaaggactgggcatccttcatctaagatttctggtcatgttgggtcaatatcaaaggtgttttgggcagttcttcttgtaggttaa

SEQ ID NO: 203956 - DNA, 1000 bp, Homo Sapiens
aaattacactgaaaagcctaggtggtccccaacaaattcaatttcctttagactgtagctatattagtttgaagaatcaagtttgtactggatgaactgatcaaataaatctaaaactatcagcatgttaatggaatatccattacctaaggccaggcgtggtggctcacacctgtaatcccagcactttgggaggctgaggtgggcggatcacgaggtcaggagaccagcctggccaacatggtgaaaccccatctctactaaaaatacaaaaattagccaggcgtggtggtgcgtgtctgtaatcccagctactcaggaagctaaggcagtgagaatcacttgaacctgggaggcagaggttgcagtaagctgagatcgcgccattgcactccagcctgggcaatagagagagactccatctcaaaaatgaaaataaaaataaaaataaaataaataatgcatacctaatgtatcataatggttcaaaatacctacaatcatagctggttcccaatgaatttaatttacttgagcttgtggccatatgattttaaggaatcaaactttttgcttaatttattagtcaaatcagccaaaacttataaattcagtgaaaaaaatagttgtttggctaatttgagtggttaatgcagtaaagtgagtcaaattattagctcaaaatacatactgccttaatttgatctaaactataaacatctgctttgcctttttggttagggtgacaccaaaaagcattagtttccaaacttggctgagcattaagaatccccaggaatgcttttaaaacttccaaagcccaagccacacccagaccaagtcaatcagaatccattgggtgaacccaggcatcaatcccctggatgattccaatgttcagaattcaagaaattccttgagatcaggaattcaagaccagcctgggcaacatggcgagatcccatctcaaaaaaaaaaaaaaaaaaaaaagaaaaagaaa

SEQ ID NO: 203957 - DNA, 1000 bp, Homo Sapiens
tggacaacacagggagaccccatctctacaaaaaaaatttttttaattagccggacatggtggcgcaggactgtggtcccagctacttgggaggattgcttgagcccaagaggtcgaggccgctgtgagctgtggttgcagcactgcactccagcctaggtgacagagtaagatcctgtctccccctccaaaaaagaaaagcaaagcaaaccccagcatgagtcggcgggtcctggaaagcagagaccgggccgggcttgtgctgccgggaacagtgctgtcagccgccacgccctgaaggaaccttctggatcatgcccagatgtgcctccgtgattgctgctaggccagagagctccggggcagttctcccgccgcagaggcctcgggtgttcttgcctggctctccttttctgttttcagccttggaataacagtctccctcttctctatctctccgcacctttttccccaccccacccagtctcagcagagcaccagccttacatttggagaaggtgccgaatctccagggggccagagctgccggcgaggaaaggaaccgaaggtttccgccggggagccggggtcgcacccgagccctgcgccgaggagaagccccgcgggtaacaagcaggcggacggagccgcctcggcgcccacggaggaagaggaggaggtcgttaaggataggacccagcagagtaaacctcagcccccgcagccaagcacaggtccagcatcccgggctgccagaggcagcagtacttccattcctttcattgactgcagtgacgtagatagcgaatacgaccttcttagagaacaagcgtcccgatcccggtcccgatcccggtcccggtcccaaacaaatgacaattatgagggtgatctgaccagcggtgtctatctgctgtccagggaggaggggcgaagagaggctgggcgtagggcttccccgcactctgcgaagtcctcccggcctccttccggagaattc

SEQ ID NO: 203958 - DNA, 1000 bp, Homo Sapiens
ataacatcattgttgaataagcatttatttataacttactgtatacatgctgctgtacatattcatatgaaagactattcaagggaaatatttttccaaaataattttgatataacattgtccaagaaatattaagatttcaatgtttctgtcacattacaagaagaatgatattatcattccctcacttttaagagtcttcagtgggcactggatctttacaatctattatgatgccttcaggcttcattatttgtaaaaagatggaaacataacttcaagatataggaaagcaatgttaaggatggttaaatgccttatttcatattgaaagtgtttgctgttgtttttagatctagtaaaaaaaaaaatctcaaggcaatttacaggcaatgaatttgtggtagcacagaaacatgagagagataagaaaaactgtcaaaaataatcatgaaaaaaattccaaccatcaggaatcctcaatatatttgacagacttagtttgggctgactttctaaggcacagaaactcttttcaaatctctatttgagatttttgtcttctctgtgaatctagtaaatctcaatcagggaggccgtttggatctttctagtctacaaatccaacagcattgatgactttcaccatgaatagtgtcaacctcccgtttcatttcaaagtacaccctgccatttggagttcatgcattagtgggaaagtatatcatcaatttgcattagaatcgactcaaagcatggggagagtgaactgatcaaatgggaactgctgtatatggctgtctccaaatgtatgaagagctgtgatgtggaaggagggtaagataaattctctgcagttgtaaggttcagaaataggaccaaagtcagaagtcacagagagacagatttaactcagtgagaggaagtactctctagccctgaaattactcacagaatggatttgctgtgaatggagagaataagtacactagaagaattc

SEQ ID NO: 203959 - DNA, 1000 bp, Homo Sapiens
atgtgtttgagtcagacagatctggtttcaaatgccagttctgccacctcgtatttctataatcttcataaagtcccttaatgggtttggatgttaatattctaaatacctccttcacaaggtcacagtatgcttttgaggagataatatatgtaaagtgcctagaaaataggaggccctccttgaccctatcgtacaagatactgtgaatgattgatagctttctgtgttttcagggaaccagtgtggcagagtgaaaaataataggttggtgcaaacgtaattgctggttttgctgttaaaattaatagcaaggcctttgaagttgtgtaaaatcaggtctcactctcctttgccatttttttggtggtctgactttaggcatattacttaacctctttgggtttctgtttcctcatgaagacaaaaagaaaagctcttctatctgcagacacatgaggaattagtgagttaagatatataaacatctagcacaatgcctggcatagtaaatgctcagttaagagcagcctcagttacagtatgttattactgtgggattaagatttatttattaagatttttttcaaagttctttttatttccctttatgttcaaataatcaaaacctcccggactacaattaacaatgcgaaggctcagattaatttctgagatgagtactgggtatttcatttcattcctgcccctgtttatgaaggagcagaaaagcaaatctcacagttccacatgctgcagagcagaaagatggtcatcagctccatggaggtgatttttcatggctccaacaacctaatcttcatgattgatgattgctgctttaagacgtttaatagttccttccaaaagaatttgtatttcagattattgatttcaagtgaattcctctgcttttcaatgcaacagaatatatgatcagtgaggtacagagcagaatctatttgattaaaatttctttagctgaattttcttgttgcta

SEQ ID NO: 203960 - DNA, 1000 bp, Homo Sapiens
actgtgccatccagctgttaggggaaggctgtaatctttctgtttgtagctaagtagctaagtttccacttttttcctctgaccattctcatccttccccttgccacttctccaaaggtccagtaaatgcccagggccagagacatcggagtcattgtgaggaaggggaaaaggatgcacacccaagttaacttctctgctcacctcaagcttggcctgagagatgcagctggcactgttccctattaaagagaagcaaacccccagtgggcacaggtttctgtcacactcttctgaccaggcatctctaattgcttagtgtgggtgagaatggggaatccccagagcagtatcccaataaggcagtgtcccaaccattctcacatcattgatccaacatttgtaaaatgttattggataattgcaacattactaagctgcaaagactttggagcacatgcttctgcctcaaggttaaacaacaggtttgggaagggttataggtcaataaccaatatggtttggttctgtgtcttcccccaaatctcacctctaattgtaattcccatgtgtcaagggagggacttggtggtaggtgattggatcatggggcagtttaccatgctattctcatgatggaattcatagtttaataagtgtgaggctcttccacttaactcttctcatcacagcccctcccatcataggcctggaggccaaggaggcaaaaatggttacgtgggctgggtccagggccctgctgctctgtgcaacctctgaacttggtgccctgtatcccagcctctccagctcgaagcattgctaacaggggcaaacatacagttcaagttgttacttcagagggtgcaagccccaaaccttgatgggttctacatggtgttgggtctgtggatgtgcagaagacaagagttgaactttgggagtctctgcctagatttcagaggatgtatggaaatgcctggatgtccaggcagaattc

SEQ ID NO: 203961 - DNA, 1000 bp, Homo Sapiens
aattatagagataaaacgagaaggcataaaattaatggaaaagcttcctaagtctccaggattgaaatgaattaaatttagatcattctgcgtctgcaggtttcttctcagggacataaaatcagacgggaactgacaagaaaggaacaaggaaactcatgtttaataaattatctaaactgggttttaagaatgttgaggtatctaagaatattggcaataaaaagtagaggtaggagaaatagtgacaaaactgtataaggcatgacatgctaaagcagaagggtggcctcagaaatactgcatgctatgaatcttcgagcgctctttctgcctcttagtgtctttgcctttgacactctgttactccaaatgtcaaaaaattttttggctgccattaatcctgttcccattggcaaataatgtagaccagtgttaggtcatttacacacattatcttatataatgcctatgatgtaggtaaattccaagagatgactaaatgaggacttggattaaggaatatgctcaagactgtataactggcaagttatgaagccaagattcaaatccagcaatgtttgtctccaaaaacattccagtctacaagcatttaccaactcatggctcacgaaccctgtgggttttgcaaaagtaatcagggatcaggggagtcacatctagaacagtgattaccaaatgagaatataccaagttagtacatataaatgtactaacaactcagtatttctatcagtttctcactcagatcaatactgacagctgtcatggtagatttgattgttatatgattttaaattcatttattctctgtgatatggaatttaatttatacccatactgaactattgtttacaggtagtaagcataagtagttgaagctaaaacaaaataatatataacaattacactaactttgtaaatttgatatctttctttaccagaataagatgtattcatctgaaggaaagtagaattc

SEQ ID NO: 203962 - DNA, 1000 bp, Homo Sapiens
gttttttagatggaaaaaagagacttgagtatgctgatgagaaatagctaatagaggccagacgcagtggctcacgcctgtaatcccagcattttgggaggctgaggcaggtggatcacttgaggtcaggagtttgagatcagcctggcaaacatggcgaaaccctgtctctactaaaaatacaaaaattagcgcatgcctgtagtcccagctactcaggaggctgaggcaggagaatcactcgaacctgggaggtggaggttgtagtgagccgagatcacgccactgaacgccagcctgggtaatagagtgagactccatctcaaaaaaaaaaaaaaaaaaagagaaatagctaatagagagggagatttatcctgagaacactggaaggggctggaatcctgaagtcatgtgatggtttgtccttagataggaggagggacatatccactgtaaaaaggcagaaggaataaaggatagctgttaaagagtcataaattatgtagtgagatagtgtacatagtttctatttaatgatctgcattttcattgcactgaagtatgctcatttcggggtgcggagggggcacaaaaaacatgaagggagagcgcatacaaattggaaatagttgtgaaaacatgtgaagaggaaaattaaattgattccagaaatgtagtagggttgttggtgagggatgaaggtataagtgcttctgatctgcctagttgtggaactttttttccccttaacttgtgctcagccaccctaatgcagatccagagaaggcaagtagtacattcctccagagctgggttatgctaggtaggtttaaccaaaaagacaaaagagcagaggggttgagagtattgacaaaacagtaattgaaatgatggatatagcatggaatcagtattggacggagaaagaagtgaagatgggaggatgtacatagaagtaaaagggccagtggaggccaggcgcggtggctcaggcctgtaa

SEQ ID NO: 203963 - DNA, 1000 bp, Homo Sapiens
ggatcctctctcctcatatccacctgggccgtgttggaagctgagtattatttgtgctgccatacttgagtttttttctcatatgggacttaactattatcaatccagttactatgctcatctgcatatagatggtgtcaacattctggctgggaaatgcagagaaactttgcaaagcatggtctcagtatccaaacacttggcatttctggggaaactaggaaatagattggttaatatgatctttgatatgcttgaacttaatattggaggggaaagtaagggggtgagaggtaaggcaagattggagttcatttagctacttttatttttattttttgagactgagttttgctctgtcgcccaagctggagtgcagtggtatatgatcttggctcactgcaacctccgcctcccgggttcaagtgattctcctgcctcagcctcctgagtagctgggattacaggtttgtgccaccatgcccacctaatttttgtatttttagtagagacggggtttcaccatgttggcaaggctggtctcgaactcctgacctcaggtgatccgcctgcctcagcctcccaaagtgttgggattacaggcgtgagccactgcacccagcctgctacttttatatctatgtttgaaatgtcccacgacagagtgtgaaacaagaataaaaaggcaagcttggtcactttgggagacataggcaatcatgctgagagaagggaacagggaagaaggtcagagaggagggaagaggaagacctaataatggcatccaagtcccggttctaatggtacttggggcatctttggatgcaagtgagccaatagtatgggctgaagttctatcacttacaactaagagtcctgtctccttcatgaatgcaataaacatgtttgggggcaattttatataagcacggtgcaaagaagcccttgtgttcgcagcctgggcattgcggaaagctttttggagtttttactgaattc

SEQ ID NO: 203964 - DNA, 1000 bp, Homo Sapiens
gaagaacaggtaaaacctgtgggtgggtagagacgggggcctatggtgggaggggctctgacacccccaccccagtccagccccttgatctcctcattccccacctaccttcccataatcttctcactcctaggactgctggccactgggggtcaaggacagggcaggacagggactaagagataccccatattccttctaacccatgccctcaatctccttcccaaatcttgccctgaagcgtggctgagttcacagagagtgagctgagctaggctgggctgccatggtcaccctcttcccctctgagacagccacacacgcaatcacaaatgacatgagacaccaaccaaaagatgcataacatcaggtttgacatccataaggactccattagctttgctccgtcggttagaagccacattaagccatccatttccccagtgactcccacagcaaccctgggcagggctggcgcaaggactgtgtcatcccttcttccccagacacttaagagactagggcatagggaaggcaggcatttatctaaggtactccagaaatcaatggcaactagggatgtggcccagcatacttctttattgcctcctggccctgcatagctaggggatcccctaccttgagctgcctccagtaaacaggtaggcatacattgtcacagacctcctcttgtctggagcctggcagtcaacctgcaggagttgttgctgccatccctgccctctccccaccacgcccaaggcccacttggaccaaattagcacctaccggtctccaaacatcatgggctcattgaggcactgggtgcaggcctcgtggaaccactgcctgcaccggtaacattgcagcatccgcaggtaccatctggagagacagaggagccaaggtcagccaggaccacacccccagtcaggtatgagcttcggcaacctttcccaagttaaatttgccctccactggcagaaagggaagagaattc

SEQ ID NO: 203965 - DNA, 1000 bp, Homo Sapiens
aagtgaggggttagagagattcactaaaggaaggggatgcaagtgacaacttacaagatctgaaaaacttcccatggctgtttggacatagagaacttgctgactaagtgaggaggtcacaggggagaaggagatggtaggaaagaaagactggagaatcaagacaggaaattgtgaatcagagatgaggaatgggagagggtgagtatgttccacactttatcaaagactggaggaggcgccagtggggacattgaacaggagtcagagggcaggttgaggtttggggtgtgtttactttcatttctggtttgtttcttaaagtggcacctctgtcagcatctcaactgtcctctctagccatcttcctacctggactaggaatttttaaatttaatttaattaatttatttattttgagatggagtcttgctctgttgcccaggctagagtgcaatggcatgatctcagctcactgcaacctccgcctccctggttcaagcaattctcctgtctcatcctcctgagtagctgggactacaggctcctgccaccacatctggctaatttttgtatttttagtagagatggggtttcactttgttggtcaggctggtctcgaactcctaacctcaggtgatccagccgcctcagcctcccagagtgctgctattataggcgtgagccatggtgcctggccctggaccgggaaatgtttaagtcaaaagtctagttctctccgcaagagattactctttggtttctgtctgctcatggctttccttcttgttttccaccattcttatgaatttgaggatattaaaatatgtatgggaaaatttgggggaaaggaccctttagaaatgcgaagtcaggtcctattccagacccacggaatcagaattcacactttacacgatctcagatgatgtgtgcgcacagtaacatctgaaaagctctggtctgactcaggcatgaaagcactggtgggtgtttgtga

SEQ ID NO: 203966 - DNA, 1000 bp, Homo Sapiens
atatgcctgtaatcccagctacttgggaggctgaggcagaagaattgcttgaaccgggaggcggaggttgcagtgagccgagattgcatcattgcactccagcctgggcgggctacaaaagagaaattctatctcaaaaaaataaaaaaataaaataaagaagaatacaacatagtccctgcactcaaagaacacatcgtctactaggtgacttgggactgtacacaaaggattatgatagattggaatagattgggggcacatgctgttgtgctgggggatgtcacaatttaatatctgtgtgtggcagagggtgaagggggttcaggagggaataaggggcattttaattggatcttcatgaattttaagatggatattgttgaatcaggtacagacaaataactccactgccctttagaaaccaagtcagtaagcgttcacaaagaaaattccatgttcatgtgattttgttgttgttgttttgttgtagtttgttctatatttcagagatgggtttctctgttgtctacgctggactgcagtggcacaatcatagttcactgcagtcccaaaatcctgggctcaagtggtcctcctgcctcagctacccgactagctgggattacaggtgtgcaccacccatgcccagctaattttttgtagagacaggtcttgctatgttgcccaggctggtttcaaactcctggcctcaagtaatcctctgaccttggcctcccaaagtgctgggattacagacatgagccactgtgcccagccttgtgaggtttacctgtaattccctttaaaataaaataattttgatataaaactgtgaaatgaccactccaatagaaagcctttttcttgctttaactaagtctatagtaaccttttcttctcatgaaagtaatgagccatattaagaaacttgaagtctttcacacatccatcagtgtagacttcttaggtaggtcttcaaaggaagacgagagaattc

SEQ ID NO: 203967 - DNA, 1000 bp, Homo Sapiens
taggggtgtgccaaaaagccatttggggatttatgtattcaatctattgttttgtgagcaaaataatctggaatattcaccagatatgataacagtatacataaagtaaaaaactacaaatacataaattattgacaaaaaaattgccatgagatgctttaatggatctatgatgtatccatagcagataaagtaaattaaaagataaaagatttgggtggtgatgataatgaattattttatgttgagttttgcttcacgttacgatataaaaaattccaagaaatccttgctctcatcctaacagccaaaacaacctggataaactaaacaataggttttctgaaccccaaagagaactgaggatgcaaagtaacctaaatgaattcaactcccaaaaatgacaaactatttgtaggagataagattcctacagctgctcttacccctgcactgctaaagtgtcaggaggaggaagaatctttgataattgaggacaaggagaaaccagctgaatctctaaaaaattttaacaactatgtatggactggcattctatagattagtgtcccatgcacagaattagggtgctcccctccagtaatgccttccacagatttcaagaggttctcaggagcagtgtgccaaaggctgggaggcaaggcaggagaagtgagagagatactgcctgagatgtgtgagttctccaccaagttcaaggcagctaacctatgaaggtaggggagtggagtaggaaagtcaagaaaaatcaacatgaggcactgtggacttttggctaccaagagaagaaggcagagaaggacagctgagagaaattgctccagaaatttcaggcagacagagatcttcccaggtacaaaaagcctgcggcaagaccagaaagcaaagagaatgcctacaactcaaaatgctggtaataaggtggtcaagctgtaaagctcagaaagctggaagctcagctataaagaactaagaattc

SEQ ID NO: 203968 - DNA, 1000 bp, Homo Sapiens
tgcacaaactgttttgtactggttcttgatgaggtaagcacaaaatggttgttacgttggtgcaaaaattattgtgaggtttgccattaaaagtcattgcaaaaactgcaattacttttgcacctacctaataatttttttttctttttttgagacaggctgtcacccaggctagagtgcagtggtgccatcttagctcactgcagcttacacctcctgggctcaattgatcctgcctccctagtagctgggactacaggtgtgtaccaccacacccagctaatttttgtatttttagtagagacagggtttcaccatgttggccaggctggtctcgaactcctgacttcaggtgatccacccacctcagcctcccaaagtgctggaattacaggcgtgagccaccgtgcccggctggaaatcacatttcaacgtgagatttggagggaacaaacatccaaaccaggtcttgttgttcctagttcttatcaaatagttcctggatggtcaggatttatcacatcttcagctggtttggagcccaccgacctgagacctccatggtaccacagaagagggaggaaatcaggcctttgcggggttggtccaaagggacattggcagcacacatgtcccttgagtgagatgactggtggagagctgaggcccatgtggcctgatctgacctggcattgccaaggggacaaggaccttgaacataggcaggcggcaggcagtgccttggagctgagtggtcacccattctgaccgagactccatcagggctatatgtgccaaattcattcagcccatggtgagagaaggttaacaagtactacgaaaggcttctggcttggggtttgggttcagatttccagtcctgcagagagaattggcaactaacttgaatttgagggacacagccacttggacacggttggctgatttaaggtgtacttgactgtaaatgtcctctaggtcacaagtgcaaagtgaattc

SEQ ID NO: 203969 - DNA, 1000 bp, Homo Sapiens
ctcccttccagaaccagtcaccagtgacagtcccttcatcaagaccctttctttcctcccttctccagcacccacggtgaggtctgaccaacagccgcaaccatagtggcgctttgctgagtcttccttgagctccctgtgtgcctaacgcagagcttctcccctccccggggctttggaaaatctgctctgaaatgtcttgtgagtgatcagtttacgcttcaacaggaaaatgagttgaatggtggaacttgaggcagggttttggggaatggacagtgggagttctgggagtctagagccagcctctgggcttggggttagcagggccgaggcatgcccagatcgcatgccatcaagccccaggaccagccgcatctgtggggtacctccagggcgtccccctccttggcctgccctgatgggctgataagacctagcctcggaggaggaggcagctgtaattacaggccttagtggtggcgggcaggcaagtcatgaggtgggggtgactcagacgattgctccacggacagggtggaggcgggggccacccatctgcccctcacccagctggcctgagatgggtctgggcacccagggagcggcccggccagggtcccatccttgggcctgtgacccaggcccctgtgccacttggcatccacgaagctggcattgcactggacttgggactggctgggttttcccctttcttcgtcccaggcaatagcttctgggaagtaggagtcagtgctcagaggcaccaatgggaggatcatcaggactggaccgagagagccgcagactcgggggagagtaccgggagtcccagaccacagaaagacagaacctcagccatgtgcagactctgagaaccagcagatgacggtttctagaaccaaatattttcaggttcaaggattcagggactagtagatctgtagaattatcgatttataagatcacggacctggttgcaattggttccagagaattc

SEQ ID NO: 203970 - DNA, 1000 bp, Homo Sapiens
aaggcatgatgtcagactcaagatgggtccaggaagttgatggacataaaaaaggacagaaggtgcatgatagggggagaatctcatgaatttgagggtctcaacattggtaaaggggccaagtgaatagaggggaggcagaattcagagtcccaaactgaggtgtccgcagatctcaggatacgttggtggtatgcctggtattaagaccagaccacagaggcagaatgaagcaatagctccagcagcctttaggagaaagtgggttaagggccaaagtgattggttaaacaaaggaagctggtcagcactgcacactaacatggcacctgcataaaaaccacagacaggtaactttagggacttcacagtggactcaagcagactgatcccagattgtaggtagaagtgtgtttgcaaaggccagaggagctgttaggacataatgcgatggagacaatttgcaacaatcactgaatccacgtttctgctgtttaagggtggctgaaaggatggaggtatagcttgtaatgcaaaatatacgcagaggttcatagtgaagctgaggaggagggccttcaaaagttaagtgggagatgtttaggtcagtagcaaatgggcccagtgggagagagtatgcccagagtttggagagggtcagggtgtcgggtgctgggatgagggcttcatgtttggaagacgcaaggtagagagcaagagaggaggaaaggtagaacaggatggagggcaagacctgtgtaagaagaagtcttaaactgtaaacatgggtgtagtgagggtagtgtggctaagaggaaatggatccagatgggcttgatggggagcagatgggcaggcacgatggcaggggtgcatcggctcactggggctgcatctgaggtaaatggaaataaaggaggtgaggaaatgaggaagagaaggaagtggcgggactggctgtggagttttgtgggagccttcttgatggaacaaaaaaaaa

SEQ ID NO: 203971 - DNA, 1000 bp, Homo Sapiens
tgcgccattccagtccagcctgggcgacaagagtgaatctccatctcaaaacgaaacaaaaacaaaacaaaaagcacaacttctagaaatgaagaacacacttagagaaatgcaaaatgcaaaatgcattggaaggtctcagcaatagaattgaacaaatggaagaaagaaacttcccagctcaaagacaaggctttcaaattagcccaatctgacaaagacaaagaagaaagaattttttaaaatgatcaaagcctccaagaagtttgggattatgttaaatgaccaaacctaagaataattggtgttcctgaggaagaagataaatctaaaagtttggaaaacatatttgagggaataattgaagaaaacttcctcagctctgctagagatctagacatccacatacaagaagttcaaagaacacctgggaaattcatcacaaaaagatcattgcctaggcacatagtcatcaggttatctaaagtcaagaaaaaggaaagactcttaagagctatgcggcaaaagcatcaggtaacctataaaagataacctatcagattaatagcagatttctcagccgaaaccctacaagctaaaagggattggggtcctatctttagcttccttaaacaaagcaattatcagccaagaattttgtatccaacaaaattaagcttcataaatgaaggaaagatacagtcttcttcagacaaacaaatgctgaatttgccactaccaagccagcactaaaagaactgctaaaaggagctctaaatcttaaatcctcaaaatcatcaaaatagaatatccttaaagcataaatctcacaggacctataatttttcattttaacacaatgaaaaaaaaacctaaggtattcaggcaacaaatagtacgatgaatagaatagtacctcacatctcaatactaatgtttaatgtaaatggcctaaatgctccacctaaaagatatgaaatggcagaatggataagaattc

SEQ ID NO: 203972 - DNA, 1000 bp, Homo Sapiens
tgagtgacagaattatttacaaagttgtggacagggctaaggcacccaacaaaggatgctgacactttccaatgggcaacctacagaggggaatcattatcatacctaagtcctaaggatgaagaaggggagtaagtggttacttgaatccagagagagagagctataggtataaaaggggctacgggacagaagccatagctctttcctagatgaagtcagccactgttcatccatagcccagcagggaaggcactgggggaataaatagcctcaccacattctccttctgcacttggatctctggacatccttagggatgagcctcttggggctcaaggcagagtggagagtagatctgaaggcatacagagagaatatccactgcacagactgtacagcatttttactttgtaaacttagaactatataaatatgtaacttatttgaaaagtagaaaatggcggggcccagtggctcaaagtgctagcttgtaatcctagcacattgggaagccgaggcgggctgatcatctgaggtcaggagtacaagacaaacacggtgaaacctcatctctactaaagatacaaaatagccagggcgggtggcaggcgcctgtaattccagttactcgggaggctgaggcagaagaatcgcgtgaacctgggaggcggaggttgcagggagccgagatggcgccattgcactccagcccgagcaacaaaagctaaactccggaaaaaaaaaaaagaaagaaaggaaaagaaaagacaagaaaagagaagagaagaagaaaattttgcacacacaaaagataaattaaaaagtaaaacggaaatgagggaccagagcgtatgctttccaagtctcctccctcttcaaattctacctctgtttcgttggagctgcagtttttcacctaatcacagtccatggctccccctagtgtcaaggcgacgcttcaccaagctctaagaaccatctaattctaggggaattc

SEQ ID NO: 203973 - DNA, 1000 bp, Homo Sapiens
aattacacagccacagaaaaacctgctataagtagcacctttaacaatgtttaattttagagcttacctaattctgccaaaattttttaaaatacagcaaaaaaacttacaaattaaaaatcatagtgatatttatttaaaatttttatttacaggtaagcttttgggttgttagagagattcttcatgctcaaacattaaaaattagagcagaagttttgagccactatattaaaactgctaaggtaagaaaaacttgtgtttttatttttgagttcaaccattcataaatgtttgtaagtgaataaatattcgtgatgctttattcactgtttattgatactggaaaaataagactcattgatataagtcaatttttaaaattggatgcctactttctctgccttttcctttattcttcctgttttcctaccttttcttttatattcttcctcccactctctgagtagctgaattatgtgatctgttttactgaataagtagacaaaggttggattatggtaaagtatgatatttataaaatattggactattctgcaggtgatgaagaaagccataaagaattaagtaggagaatactacttcacttctgaagtgaaccatgtgaagaataagactttatttttaagagaatggtatatgtgatattaccacattgttaactgaacagttattgtgtgacatagataataaatacagcaagagaaatggagaatggatttcaaaggtagttggaaattagaagggtgagacaggatgttctacaaaggataccaagattttattaaaacttgtaacaactctgaatttggttggaggggcagaaagggggagtgagcccttccctctccatcatgaagggtcaaggccggcagcgatgtaacaaaagacaagttaatgagagaaaagcatagcagatttattacatgtgcataggagtcatacaaagtataaactcaaagcagggccaaatggttga

SEQ ID NO: 203974 - DNA, 1000 bp, Homo Sapiens
gccaggaattcgagaccagcctggccaacatggtgaaaccctgtttctactaaaaatacaaaaattagcggggcatgggggcagggggcctgtaatcccagctactcgggaggctgaggcaggagaattgcttgaacccaggaggcagaggttgcagtgagccgagatcacaccattgcactccagcctgggcaacaagggcaaaactacatctcaaaacagatatatatatagatatatagatagatatagatatatagatatatagatagatatatagatatatatagaagctgggtgtggtggcatgtgcctgtagtcccagctacttgagaggctgaagtgggagggtcactggagcccaagaggtcaaggctacaaggctacattgagctgtgatcacaccactgcagtccgacctgggtgacagagtgagactctgtctcaaacaacaacaacaacaacaacaacaagctgggcgcggtggctcattcttgtaatcccagcactttgggaggccgaggcaggtggatcacttgaggccaggagtttgagaccagcgtggccaacatggtgaaaccctgtctctactaaaaatacaaaaattagccgggcatgggggcagggggcctgtaatcccagctactcagtaggctgaggcaggagaatctcttgaaacagggaggcagaggttgcagtgatttgagattgcaccactgcactccagcctgggcgacagagcaagactccgtctcaaaaaaaaaaaaaaaaaaaaagaaacaaaaacaccccaaaacaaactaaccagtagaaagcgagatgtttagagagatggtggaaagctgtataatacatcaaactcaacctgagctccattttctctgcccacccagggcttgcagaggttgcaggcatcgtgatggatgccaggcagtaaatacctatgcatctgctgcctaagttttgtaatggctggcagccagattaactgcaccagatc

SEQ ID NO: 203975 - DNA, 1000 bp, Homo Sapiens
gatcaagaccagcctgggcaacgcagctaaatcccgactctacaaaaaaaaactacaaaaattagccaggcataggggcacacgcctgtagtcctagctacctgagaggctgaggcgggaggatggctggagcccaggaggaggaggttgttgtgagctaagatcacactactgcacttcagtctgggtgatagagccagaccctgtctagaaagaataataaaattaaattaaaaaattagccaagtgtggtggtgcatgcctgtggtctcagctacaagggaggttaaggcaggagtatcacttgagcccagaaggtcaaagctgcagtgagccatgatcatgccactgcactccagcctgggcaagagagcaagaccctgtctcaaaaaaaaaaaaaaaaaaaaaaaaaaaactctcattccaaaagaagtgtgatatattcagtaagtatgtaagtacattacagacagagaataacaatgctgtgtctgacctcagccttaatacaggctcaatttagaaaaggcatgcagacctcaaacacaatgagaagggccctccacgctgatgactgaagttttcaaataatcactgcaccaacctcttcctcaattgttccctttatacaattccaacagggttcatagccatttaaactggaaaggaaaggaaagaactacttggttgtaaaactatcataatgattcccaatgccttattccccaatagtcaaggctgaaaaaacatggttatgtataaacagagacacgaataagtaaagaagaaaagcagaaataataacataaccaatctcttcagagttggaagagtcctcagatcacgtacttcaaatccctcctgcggaagaatttcttctaaaacactcctgaaagataattacccagccactacagttctgagaaatcaaatgtaatagagcagatataatggcaaagcacagagaagagcacagtgtggtactaaagttgcagaattc

SEQ ID NO: 203976 - DNA, 1000 bp, Homo Sapiens
ttgtagagctttgctttgttctggccagtgtagcagtgatctgggccaggcccaagcccaaccctctgtgtcccttgcttactcctttacctctgtcctctctgtgaggagactgtgtctagactagtggccagtcccaggaaaattgccacgtggtacccactgagtccagcctaggccacctgactccagctgactacccgactgatgagaaacaaggaatggttgttgcttctgtgcagcatggcacaagtttacttattatttctgagacagggtctcattctgtcacccaggctatagtgcagtggtgcgatcacagctcactgcagcctctaccccccggctcaagcaatcctcccacttcatcttcccaagtagctgggactacaggcgtgcatcactgcacctggctaattttttaattaatttattttttttgtacagatggggtctcactgtgttgcccaggctggtcttgaactcctcaagccatcctcctgcctctgcctcccacagtgctgggattacaggatgtgccactgtgctgggacagcagaagttggctgttagtcatggtagctccctgagacagtctgttttggattctgttctgtcttggttctttgcatttccatctacattttagaatccatttggagatttgcatttttataaaagcttctatacattgaattgcattgaatctatagatcaatttggggaaaataaacatgtttataatattgagtctttgggttcatgagtatgatatattcttccatttatttaaacgcttttaaatttctgtcagtaacacctagtagttttcagcaccgaggtcttgggcgtgttttctaacacgtcatcaaaagtgttggtttttttgataccattataaatggtacatttggtattttcattcctaattatttgctgatgatatatagaaatccagtgatttaaaaaatatttgaattgagcgttcctcaatgaattc

SEQ ID NO: 203977 - DNA, 1000 bp, Homo Sapiens
atcaaaatactttctctaggattatcaagataggagaaagaaccattagaagaaagagaaaatgtcacaaatattaatatctgaaagaattgaaactcatcagtgatatccacaatatagaaattctaggaattgctagacatagtggtgtgtgcctgtattcccaccttgttgggagactgaggcaggaggattgcttgagtctgggagttaaggctgtgatgcactatgatcatgcttctgaatagccagtgcactccagcctgtgcaacatagcaagactctgtctctaaagggggaaaaaaaagaaaatctagaaatagtaaataagcattttaaatatattagaattagcatttaatcattaggaaaacatataccttctatattattgtaaaagatgtattttgttaatttcttgttctaagtactggttagtattgcttgttgttttttgaggctttcaaatagtgatcaacatgccagtgctaaaataatgtcaatactatcaaattagctcagggactattttgtagttttttgtttgtttgtttgttttgttttgttttgtttcgagacggagttttgctcttattgaccaggctggagggcagtggcgtgatctcggctcacggtaacctctgcctcttgggttcaagcgattctcctgcctcagcctcctgagtagctgggattacaagcgcctgccaccacacttggctaatttttgtatttttagtagagacagggtttcaccatgttggccaggctggtctcgaactcctgacctcaggtgatccacccacctcagcttcccaaagcgctaggattacaggtgtgagccaccgtgcccggcctattttgtatttgttatacttagtgagccctttaatttttcacattttgcaggatgtgaactcattacttggttttattcttttctttttttctctttatattgatttttagaaaattttacaacttcttccagaaagaattc

SEQ ID NO: 203978 - DNA, 1000 bp, Homo Sapiens
gacagagtgtccaatcttttgtcttcctgggccacactggaagaagaattgtcttgggccacacataaaatacaccaacactaaccatagctgatgagttaaaaaaattgcaaaaaaaaatctcataatgttttaagaaagtttaggaatttgtgttgggccacattcaaagctgtcctgggccacatgtggcacacggtctgtgggtcggacaagtttggacaatatcccagagcctagcctggtgtctagtttatagtaggggctcagcatatacatgttgaatatatatgtgagtaaatgagtgaataaacataagaaaatgagtgaattaaaaatgagcaaatcaatggatggtactggtagagcagcaagaatactaatgagaagggtagcccacataggccaccatgagtgaggtcctgcccttcaagcaatcaacatgagatagggccaggagtagcaaatgttttagggtcagtaaggaaaagttcccaagcaatgggggaatccagaagctgtttctgggaataaagaacataagttatccctggaggtgttccaaagttaaatttgacctgtttgttaattttccttgtgttgaccacatcagaatacactgaacgattactgcaatgtcatcccacaacctcaaaagacagtatgtagagaagggccatgacagcatctctttaaatatgtatttagtcattatagagtttgtaagttctggactctgataatcctcaaactcttcacacaattgtttgttgtaactgatgtcatcttttatgcttaattgaactacttgttcttaagatgactcaggacacaaagacattggatacatatgaaatattgccataccataaccatttgattcttgatgacttaccttaaagaatagtgtattacttccactttcccatgacatttaaatcttggcttatgagattcctaggaaaggaagtacaaaaagatccagaacaaatcagaattc

SEQ ID NO: 203979 - DNA, 1000 bp, Homo Sapiens
ggctgtcttccggttgtcccccgtgatcagaaccacgtccacacccatgctctgcagcgtgtgcacagccagggcagcctcctgcttgacagcgtctgcgattgcgatcatcccacagagcacacctggagcgaaccagccagcatcagcagctacacaagttggggcaccccgcaccaagataccacacttgcaatgttctcatcatataatattatgtgcaaaaaacaaaacatcaaattatataacacaatgtggtttttttgctttttaaaaagtacatgcatttacggatgtacacaaaagtctggaagcaatataattgaaatcttcgcagtggctccccaaggaataggattacgagtgatttcattttctcctttatagctgaattttccaaactttctgcaaggagcacgtatgacactttgcgaagtgcctggcttgtaataagaattcaatacacattagctactaaaattcaagagacataacagatatcacttaaagtgataaatgtccaaactagaaaatcaatccttcgtcttttcctgcagaaaacatttcggcagaatttctctttgagtgaatcttagctatagaagcaggagggcttttagggctgaggtgtgaatgagaacagagtaagggatgacatacgagagggcacgactcctttagttgtgccaattctggtttgatagccgaggggcgggtggatttacaaagacttagaaaaagggaaaaaagagagagaatgtgagagaaagacatatttggctggagcattcaaaaggtgtcatgtattttatttcttgcttgcatatactgttacttctattagcagaaactaacattaacaaagtaaagactctaatctctctgggatgtaaagcccaggatagaatctgagcactaaaacacatgcagtctttttttttttttttttttttttttttttgagacagagttacgctcttgttgcccaggctggagggca

SEQ ID NO: 203980 - DNA, 1000 bp, Homo Sapiens
taacttcttctccctttccagcggtttatcatgatcttgaccgagcacctagtacgatgcgaaactgatgggaccagtgtattaacaccatggtataagaactgtatagagaggctgcagcagatcttcctacaggtatgtggggaacttcgattaggtaataacactattctcagccacaaagatttttcattaaaaaaaatccttgtcaaatttgttaggaggttatatagtacctgttagaccctttagttcatgtccatttgctgctaccattgctcatcagaatatttaggcttaaactgattctgtaccacttagattcctaattgccacccccccaacaaccccccgccccaccttttttttgagatggcatctcactctgttgcccaggctggagttcagtgacacgatctcagctcactgcaacctccacctcctaggtttaagcaattcttctgcctcagcctcccatattgctgggattacaggcacccgtcactactcctgcctgatttttgtatttttagtagggacagagtttcaccatgttggccaggctagtctcaaactcctgacctcaggaggcctccgcctcccaaagtgctgctgggattataggcgtgagccacggtgcccagtctcctaattgtcattttctatgctggggatcctagctgtaatataaaatgtagaggacaaaaatatcaagaggacagtaattggatttataagtccctaaaaagccagtgttatccaatgtgcaggtggtaaactgtccacagaatcaaggtaagctccctggggtctctctgcaaaagcaaaatgccggcacctattctcacctagatttaagttaaaggtatataggagagtggagctaattcattgtatcttcggacactactcccctaaatcttcatttgttcattctagaagaatgattaatgtagaagtcactctaagttcaattctttgagcctccaaataggaattc

SEQ ID NO: 203981 - DNA, 1000 bp, Homo Sapiens
agattatattagaaattatacagcctgcgtgtccaacttaattaacagttactggtgataaaatgtatttacatgcatcaacattgattgattcaaatacccgaatcatcaagaatgaaaatataatctaattataggtaaaatttgaaaattttcaaatccttggttttgaaagatttagtttaccattaagcaatcttctacttctcaagcagcataacttgctcaattgtgcttcagaaatactaagctcagaaatgctaaaggtcaatatgaccaaatgaaagaccattttagtattgtttggagtaggtgaagagtatccttaaaatgtttgaaaaatacaatgatcctaggcaagatcagtcttatattaagactataaaccacatacaaaaacttagtgtttcagtgtctgttgccattggtagaagttacttcagttccttaatttccataaactcccattagtgccagtaccaaccgaatagaacccagtggtttgccattgtggatctaaagttttaaaaatgtaatatcttaaaatatgttgcagtttagagttacttattaaatattttttcatagatatatgtattcatatccacctaattacccatatatttataacatgttgaaacatttcattcaaaagggagatttgtgtaaaagagaactactgagttcactaatgagtataataatagttcatcttcttgtgagatggaacatccaacactgaggatagcatggtctggaaaattccagttcagttgcattactgatggaaagaacaaaattaattcatttctccccaaaactggtacttatattttattgcttttatttctccattggaaaaaggaaagaattcaagggcttttacataatggattttaagaattccaattgtatgctctgatgaatgagctataccaattaaactatatattacttatattactacttttaaaatgctaaatattttaaataaattttc

SEQ ID NO: 203982 - DNA, 1000 bp, Homo Sapiens
gtcagcagtcaataaatatttaatggctgaataaataatcaaatgactttaataaacaaatgaagaaaatacagaaagtgatcataatgaagtgtaacagagggctctttgggatggcatgtgagctggggccttagatgctcagggcctcagcagctctcccttctgtaggcacggaagtcagagaggcaccccagcaggaaagagagcatgtacaaagccgtggacgtgctaagtcatgagatccatttagggaatgtcaagctagtgcccaggttttagggaaatatgagcctagagggactggctgaggataagtcatgaaagcatgcaatagagttcagatttcatctcatcagaaaaaagaaaaaagaaactatatagatagtgtaagaactttatttccattggagctcaagaatctccttctaggccaggtacagtggctcccacctgtaatcctagcactctgggagcccgaggcgggcagatcacctgaggtcaggagtttgagatgagcctggccaatatagtgaaaccccgtctctactaaaaatataaaaaaaattagctgggcatggtggtgtgggcctgtaatcccagctactcgggaggctgaggcaggagaattgcttgaaccagggaggcagaggttgcagtgagtcgagatcgcaccgctgcactccagcctgggcaacagagtgagactctgtctcaaaaaagaaaaaagaatatccttctggaagccttttcaagtttgtctaaaacattcttgagttgactttaatatttctttgtcacccttaaacaatgctgtgtttctgctgaacactctaggctttccaaatgtgggtatgccccacttttgtttctgcctctgctgatgctggcccacactgatgcctctctgccaccttttcccccacactgtagcctccaaagtccaaaaagctaaggggggatagaatcagtcatgggagctataagtcttggggaattc

SEQ ID NO: 203983 - DNA, 1000 bp, Homo Sapiens
aagttagccaggcgtggtggctcgcacctgtagtcccagctactcaggaggctgaggctgaaggactgcgtcagcctaggtcaaggctgcagtgagccctgattacaccactgtactactccagcctgggcaacagagcaaggccctgttttttttgtttttttttaaatcataactaagggtggctcaggtaagtaagagtataatagattttaattaaaaaataacaaacctgacaagaccagttcaataaaagtgtacagcttaaaaaaataaagaaaacaacaacaaaaatattaaagtggtacagggaagatattgcagtaggtgactgcaggtggaagaaaggtgtagataggggatactgggcaaccaagaatatcatcaccatcagcatcattatcaccgacccctttcatggagggcttactctgtgtcaggccctgtaccaagcaccctgcatgcatccctgtaaggtaggtatacagtgtataaaaaactccaagccatcttggagttcttgcatttttagaacttaatctcttaattttagaaaagaattcactgaagcccaggggagtttgcctacttcatgatttttctgggacaaattttgtcccctaggatacacgatcacttagaaattgcacctttgcctgcctcaaggcccagtgcatataccagcgggatctctccaggatctctatgatcatggcctgtacaacccctcagacttgcattttaactgggattgtactggtgaaacagactgctcgggcctggacatctatagacagccctaggaccaccatcatcattattccagaatagaggaaaagtctgtatctttccttgaagattatataatccaggaatttgaatacatcagtcactttaggttttttaaaaatataaacttttcccttccttactccttgccagcttttctttaattccctttaatttcactttgtttgaactggacataaacactgaattc

SEQ ID NO: 203984 - DNA, 1000 bp, Homo Sapiens
taaggggagcaggtttcttgtggacatttccagcccttcattgacagacacagctgtgcatctcccatgggtgccctggatatgcgggtccttgtgttcttttgactctgactcatgactctggggctccgtagttgacttttgggaaatgctgctttggagagttttctcctgagcccccacagccaggggcactaattgcttattggtgatttgccctgaggtgccatatcccagcacctggggcggcacagggccttgacatctgcgacagcactgctgctcacaggccctgcttgccatccctccagttctaggccccaagcgcctggtaagtgagcagccaagctggtgtagactaggatggaatctccccacccaataatctgaagcttcagaagtcacagttccacgtgtaggtatgtcgccaacagaaacgggtgtatatctgctgcaagatgcaaactagaatgtccttagcacaccattcctaacaaactagaagcccccaaatgcccagagctcattgaatggagaagtaagtctagtgacacaaaagactactgtaaagtagtgagaacgaacaatttatagctacacacagcaacatggatgactcacaaacaatggtgagcaaaagaggccaggcgtaaacagagttcagcctctaagattctgcatagagaaagggcaaaagcagctaaaactaattattgccggtagaagtcagaagagcggttcccctggggaaggggcttcagggttctgtttcttgagctgggtgctggttacctgggtggtttcagtttgtggaagttgaacaagctgtgcacttaggatttgtacactgttctacaccaggggttagcaacatttttctgcagagggccagatggtaagtattttagactttatagcccagacgtctccgtcgcaagtattcagccctgcccttgtagtgggaacatgccaggaacagagataatatgtaaatgaattc

SEQ ID NO: 203985 - DNA, 1000 bp, Homo Sapiens
tgtctggccaacgtcagcagagattcacagaggcaaaaggaagacacacctttcccacatttccttggtcaggcccccactgaaatgtgactgcaaggctaaaacaggtccaaactctgccagagcccctggcatccataatccccatgatgacagagtcccaaagagctgggtattttttccagtagtgccgtggtctacagcctcaatcattctcatactagctagaatcctgacttaggcaaaatcaagggcccaaagtgaatcattgactttttcattggcatctgataattaaaaagtgatttgtgatagttaatcttgtaatggtttcctttgttttttcaagtccttagaaaatttactgcatcaatcacccttttattcaaacaaataaatacaaaataatcatgaatttaacaattagagactaggagtacccccctttacctgtttatctttttcatgtagtaactaagcaaaactcaagcattccttcaaagacactgttaggagaaactggtgtgtttgtcaatacctataatgaacttggtgagttatgctttatttatttcggtcttgacccaatttaattaatttagagatattttcatagtggatgataaatctgatagccactgatttaacaagaatttttagatttttcatatgcaactactttctatggttagagtatattttatagacaggaatgctaggaagagtccgttaaacacattatgcctgaagaagcctacgtcacactgggtacaagactttactaggttgctgttgctgctgttgattaagatctactgacctaggcactttacagatgtgaacagttcttactataaccctatgaaatctacatacttattccctatttatagatgaggaaactagggcttagagaaattagataattgcctgagttcccatagctagtaagtggtagagtcaggaatttaaccctggacagtctgatcctgtgcactgc

SEQ ID NO: 203986 - DNA, 1000 bp, Homo Sapiens
caatgattgtgcaaccttgtgatatactaaaagccactgaattgtactttttaaatgagtaagtagtattatatgtgaattatatctcaataaagttgttaaaagcaataattacagcccactgtccctaaattattatttatttatttattttagaggcaggatcttgctctgtcacccaggctggagtgcagtggcacagtcacagctcactgcaacctcaaactcctgggctcaagggatcctcccaccttggcctcccaaagtgctggcattacagctgtgagccaccacgcccagccttctttccatttttagaggagggttcaggatgttaatttaatcaagactgagttgttaaatgccatcataaatatttatttgtttttagtttattattaccattattttgtagagatagagtctaactatgttgcccaagcttgtcttgaactcccggcctcaagcaatcctcccacctcagcctcgcaaagtgctaggattacagacatgagccgccatgcccatcctagatttttttagtgatatgaaatcagttaacagagttgattaaacagttgatgtttataaactggtgggtcgcattgctgaggcttttattcgtgtgcttatttgtaattaccttccttgacctgcctctagggtgaacttttaacattagtcaagaagttgccattttcaggctgtctttgtcagtttggactgtactagtaccatagactgggtggcttataaacagaaatttctcatagttctgatggctggcagtctgagatcagggtgccagcatggttgagttctggcaagcaccctcttctaggttgcactgctgacttattgtatcctcatgtggaggaaagagggcaggaaagttctctggaattcctttcataagggcaccaatcccattcatgagggctgtaccctcatgacccaattacctcacaaaggccccttctcctaatatcatcacattagg

SEQ ID NO: 203987 - DNA, 1000 bp, Homo Sapiens
tttattagactcagtattgtacgaggtgaaggttcctcgtggcctagcttgggctgttgagtttcttactgacactttagtctccactttgaaatggatttaccatgatacttctgtgtcatgatatgcttctagttcatggtcctatgattttaaatttaatttttaaaacatgtataaaggtagagagcaagatagaattgggttataggttgaattaatgagcagtggcaaagtgaaaagcttgagatttctttgttttggggaagccgaagtttatggaaaaaaaaaacagtgattttagtatgtagtttctgtaagactttgtaaaaatgctctttactccctggaactctagtaggtagccatgttaagttataaaccaattgttgctgctggtgataacaggcagaggagctgaagctcgcatgagaaatgctttgtgtcccactgttccctggagatggctgcctcggagaggacccagccacaccagcaaagaggagctgaggtcagcgttcagggggtgaacatagtagcttcatttgaaaaatgacttcctttttttccatctgtagcctggcttccctttgtggagtcctcttgcctagcctctgccctatattcctaagagaaaaaatgcttctaagaatgcatctaaagtggtttgcgctgcattatatcaccaagttgtactggtagaggtatgtggtgtgtgaaattgaatggtatttcaaacggtagtgcttattaagttattgatacaggttggttgtcgacttaggcaaggtgtgaagttaatcctattagacagtgattactcttctaccaaagtacatcaaaagagtagtagttatggtactgggacagtaggaattatgacaggatttctattaataatcaactactatgcagtacaccactataaaaatgaattctagaaggaaaatttgaatatccatttcagcactgatttcatacacattacacatatatattt

SEQ ID NO: 203988 - DNA, 1000 bp, Homo Sapiens
attgcagaaatattataatatgtttatttggtaagctactagatctccaatcagatggttccaggttcaattaaatggaagaattaatataataccatttatctattgcaaagtaaatttcattgcaaataatttagcctccttttatagacagtgataggataaaattttttgaaattaaaatataggaataaataacttgtcacaattttttaaacatttggaaaaactgaattgctcagtaaggatccagaagcattaaataagctttttttaaaaaaagcactaagcttttattcactatcttctttccagatgaagaactctttttttttaattgcatttattaaaagtgtatttatgaatccattgctctgttgaaagcactttgctgggttaggaatttgacagtgactaagacatcctccctgcctttaggatgttagaggttactgtgagataggagtggggagggctaccccagcaactacaatgtactgtgatatgtgttttgattagcggtaagcaggttgctcagggagcatccaagaggagcctttaacttaggcctgttggaccaggggagcttttcagaggaggttcacctggttcctaggatccccaaggagaactaaagtatgatgcattagtttccaaccgagagcagtactaccctttccccaagagtctttggaaatacgtgtgggcattttttgttgcgtaatgactggtatcttgtgatgcagaatgtgtggttgtaagaattgtgactcttagtcctggaggtgaccatagcatcttaacaacatttatccatctatctatatgaagcctaatttacatatccataaactataagaacagccagatgggtgaaaacagcagaactaacatgtatctagcgtcaacacattaagtttagttagtttgcatatggccatttataacaagggtgtgaacagcaactctcctaatagatccagtcaaagaaagggaattc

SEQ ID NO: 203989 - DNA, 1000 bp, Homo Sapiens
cagaattggagggaggaaaaatcttcatgaaaaacagtagtatttgagttgggtctttaagaaagagtaagatttcaagtggtacagatgaagagaaaagtattgtatgtaggaggagcaatgtgagccaggacaggggatgggaacattcaaaccttcttcaagttgctgccctgcatggtagaaatgtagactgtgaagtgcaatcaactcaagataaggctagagatggtggtggaaaccgaattgctgaatcttttggaaatatgacacaggccttgcaatctgtcattaagcaattagattaaaatccaataaattacaaaatacaccattgctgagagctggaattttaaaatatctcagaattagttcatgagttttgctttctgacgtcaaatatgagaaatttgtgctccctttctctcccaaatgtttaatccttctgattacatcagggagaaagactccactaggtgctcatctgggttgaacagctgctaatctcttttgaacaaaaagcacgagccacagtgtaccagtttgttcttgcattgctacaaagaaatacctgagactgggtaacttaaaaagaaaagaggtttaattggctcaccgttctgcaggctgtacaggaagcataattccggcatctgctcagtttctggggaggcctcaggaaacctaccacgaaggcggaaggcaaagtgggaggagcaagagagagggaagggaggtgctacatactttaaaacaaccagctctggccaggtgcggtggctcatgcttgtaatcccagcatttgaggaggccgaggcgggtggatcacttgaggtcaggagttcaagccaatattgtgaaaccccatctctactaaaaatacaaaaattagccgggcgtggtggtccacgcctgtagtcccagctacttgggaggctgaggcaggagaatcgcttgaacccaggaggcagaagttgcagtgagccgagatcacgccact

SEQ ID NO: 203990 - DNA, 1000 bp, Homo Sapiens
cctgggctgatccctgactgccatccttaataccattgtagtacccactgtctctcagcttcttgctattatccaaggactccaagcatgctcttgcctcaaggtctgtttttgtgtttgctgttccttttgcctagaaggctcttcccacaaatatatgcagggcttgttccctcacttcatcaggccttggttcaaatggccaggccttccttgaccactacaacccgatgtcacactctttgccattactctgctttatttttcctcagaacattgtaaaaacatgacatgatcatgtatatttacttattaatctgcttgctatctgtctttcccactagaatgtaaaattcatgagaataagaactgctatcttctctactgtatcaccagaactcttagtatcaggtacagaatagatgttccataaatgtttgttggatagagtattaattttacatgcctgttttacatgtctactaattgaatgaccaccaccacagtccatatatctccactgataatgtcccatggaggggcatttcctaccatgttcatgccagtattttgtactctttcaatgttgacactatttttctcatcccccaaaattcttctgttagttctcaataagtgatttaattaaattcctctttagcccattcacattctggcagctccatgaatggctttccccattcaaaaaacctaaatgctctcattacagagtcccatttgtaagaagccctacagagtcccagcaaacctgttcttctctttccaacttggccatgtctcagatgggaccccaagagcttaagcttctttgaactcacccacaaataactggtttgagtagagggagttggggatgtctgtggaaaactgtgaactcatgctggatggaaagccagggtcctaatggtgacaccccttggaagcagactttattctgtgagtagtggggggccactgatggtttctcagcaggagtagg

SEQ ID NO: 203991 - DNA, 1000 bp, Homo Sapiens
acctgggtccaaattccaggttcttcttctgtaaaatggggctgatgtcacttctacagggcagttgtaagcattcctgtgtgagttcattggttcatttgtccattccacaataccagacattactccaggtactggagatgtagtgggaacaagacttttgtggttcttggctcatcttttagtgctcccaccctagaaagtgatggcagtcatacgacagctgacagcattagggcccttactgcgtgtcaggcactgttctaagagcttctcctatgttatcagaattctaagagtatgttataaaccatagtagaaaagcccaccatgctctgggagtcaggaagggacatctgacccagagttgcgggttatgggaaaagaagggatgtccaagcagaaattggaaggagggatagagatttcccagggtaagaggtggtgttagtggcaggggatggctgtgttccagatagagaggacggcatgggtgaaaggcatggaagtcagaggacatggcagtttgaggaacagaaggacattcagggcatggtaatgtatgtaacagtgcccgcctatggtgtttattaaatcataagcctccgctctgggctgaattgtggctcttttaaagttcgtatgttgaaatcctaaccgccagaaccttagtatgtgactgcatttggagacaaggtctttaaagaggtaattaagtttaattgaggtcattaggctgggccctaatccagtgtgacttataagaagaagagattaggtcacacacacagagggaaggccacatgaagatgtagggagaagaaagccatctacaagccaaggaaagaggcctcaggagataccaaccctgctgacaccttgatcttgaacctctggtctccagacagaggaaataatttctattgtttgagccactcattctgtggtacattgtcatggcagccctagcaaacaaacacattctctttccctggaattc

SEQ ID NO: 203992 - DNA, 1000 bp, Homo Sapiens
ttgtgacctatccccaacttgcttctttagccttatctcctgcctccacctgctaggtgctgactctaccctctgctttagatatgatatattttctatttatcaaaatgtcatgaccacatatggccccatgctaaaatgtgtgctgtaccttctgctgggactgtcctcagttcttactccttaattaaggctttgctcaaatattaccacctcttatagaattgatcattctatcctctgatccctggaaccttgagttttttctaatatagagcttattgcagagcatctcaattatttgttgagttcatctttcccttagtaaactgtgactcttcaagggaaaaacctgtaccttcttggccttggtagcccccaatcctaacccagaacgtggcgcagagtaagtgtttaggaaaactttactgaatgaatcagtggataagcagattcaagttaaaactgaaacaacagtaggtagatgacataccttttttcctcccaccaccttcttgctttgccttgccttcaccccagctcagcaatctgctcagaaaagagagcatcagaactgaccaaaaaaggaaggaatatcctaagaaatgatgcagctacatattgcttggcttgtgtttcctagataaggcattgattcctaggcactagaattatatactataattaaagagatttttttttaaatctatcaacaaagacctagagtttgaaaatctttcagttttctaatccaaattagggaaccagttacacagggtagcataggtcaaagggtagggctataagacctggattggctggctgaggataaataaggaagtgtagacttagtccaattgcagcccaaacttgacgtgtaacatttatacttagaaaatgtgtcattctcacgtcctttatacagatttgtccatcagtacattggattttcttaaacaactaccatttgattcccctattataattattgaagtgaatt

SEQ ID NO: 203993 - DNA, 1000 bp, Homo Sapiens
gactccctgcaagccctgtgttctgtacatccacagagtatggcccaaccttcctcccattcctccctgcacacagaggctccaggagagtaatttcatcccatttcagtgtacctaggccttctctttctcactagccctctcattacccacaaccccatttgacaaatggggccctggctgacctggtggggcagccatcgctgcgggtgaccttgtcagcagtgagcccatcggtcatggtgacgctgcgccgcttcatgtggctgcccttggggcctgaggggctgacggggctagcaggcttgctactcccctgtcccaggccatagctggcctcgaggtagcgcagtgggaaggtgcggttcaccgggcagtagatgatggcaccactctgctctgacacagccttgcggctgcccacatgatagcgcacgagggcgggcacgtggtcaaagctctcctgctcaaacaggtactggatgtgtgtgtagctctcgcctgccttcaccaccaccttgttgatcttgaagtgcaaggcctggttgcgccagcggcacgtgagcacatagtcgcccaggctggtgagtgagtcccggatgaggaagtcgccgttgcgttgtaccaaggtctccgagacctgcagaaggcatggttaggctggagtagggtggggccaggagagggtcagacccaggatctgggggacagagcaacccaggattagggggcacagcaagaccagacccagggcatagaggacccaatgaacagagacatctgacatctgagagcggggatgcaatgacccaggttcacagggggcacctcagccagaggccctgagtctgcagcacagaggctcaggaatgggaggacccaacaccttggaatgggaggcacagaggcccagggtctggaggagtgagaatggctgtgacctgagacccaggtctcagacccatcccttctcagggttccggttgggcagagtgaattc

SEQ ID NO: 203994 - DNA, 1000 bp, Homo Sapiens
gtccttgggcctgacttagtctggggataggaaaggcttccctgaggaggtgacatttgagctgaaatctggtacagaaagcccggtgcagaaagtgtttctgacagagagaacagcacgtccaaaggccctgaggtcggaaccaccttggcatatttgaagaactgggggaaggcccaatgacctaaggcagagtgaagtgggagatgtggcaagaagggccagggtgacctcccaggaagaacttggcaataacccaggacttcttttaagagcaagaggagccttgggagttggcaaggggtggcctgacaaggtgtgtgctttggtgacctcgttctggcagctggtagggaggctgacggggccagagcacttgtctggtttttctagaaaaattctagcataggcctccaaggtaacatgatgtccacatgctatatggtacattataccctagcaataccttgtaacaagctcacaatatccctgcagggaagcagccacattaaatggggagataaagatgataaataggccaggcgtggtggctcacgcctgtaatcccagcactttgggaggccgaggcaggcagatcacctgaggtcaggagttcgagaccagcctggccaatgtggtgaaaccccatctctactaaaaatacaaaaaattagccaggtggggtggcgtatgtctgtggtcccagccactcgggaggctgaggcagaagaatcgcttgaatctgggaggcagaggttgcaatgagctgagactatgccactgcactccagcctgggcgacagagcaagactctgtctcaaaaaaaaaaaaaaaaaaaagacttttttacttttcctctttttttcattttgtttttactgtgataaatatacatatcatgaaatttaacatcttaaccaattttaagtgtacaattcagtggtattaactacatttacattattatgcaactatccccaatatccatcgccatgaattc

SEQ ID NO: 203995 - DNA, 1000 bp, Homo Sapiens
tctgggggtgctggtaacaccctgcaatgcttctgggtgctgttgacatggctgtgttcagtttataaatttattaagctatatgtttaggttaattacacttttctgtaccgttatattttagtaaatatatgtatttttaatactactggtcccaaacaatggctggatggtaaactagaacagcactttgaaaataaatttgtcattctgtaccatgagtctcaaaatattcactgccttgacccagtaattccactaacaggaatttattttaaggagataacataaaatagatacaaaaaaagacatgcagagatgtgtactgcagtattatttataataagaaaaaaagtagaaataagcagcaagcccaaataagggaacagcaacacaatccacacaatgcagtattatatactaggcattatgtactaggcattgtgcttatgaagagagttcagtgaacagacaattcacaaaaaccccacaaatgatcaaacatgaatagatgcaataacccactggtaatcaaagaagtgtagctaagagacattttctccaattagaccaagaaagatgaaaaagattgataatacttagtgaaggtatattctgatactctatcagaaatatgactgataaggtctttttgtaggatactttgaaaacaatttttttttttttgagacaggatttcactctgatgcccaggcatcatcagtacggtggtgccatcacagctcactgcagcctcaacctctcaggctcaaacaatcctcccacctcagcctcccaagtagctgggactacaggcacgtgccaccatgcctatttattttttaaatttttggtagagatgaggtctcactatgttgcccaagctggtcttgaactcctgaattcaactgatcttcctgctttggcctcccaaagtcctaggattacaggcatgagccatcatgactggcaatgaatatttaaaatgtgtattctcatt

SEQ ID NO: 203996 - DNA, 1000 bp, Homo Sapiens
gctgctcctcatcagccgctccttccgctctcgcaggtagttgatgatcttgtcagtctcttcagcagtgaggtacctgttgtctgccagcaggttgatgaggctctggatggctggagggtggcccccacgcactccctcctcagggcctcctctctctctttcctgcaggatggcttcatcggccatcttggctgcctgtctggcaatctcctcacgttccttctcccggcactcattcttgtaacgctcataatttctggccaccagcaccatggcatctgcttggggcatgttgcgatgctctgtaggaggaaatgacatgagttattttcttccatgacatatttaagtgcccacctgctgcactctgtcaagtctttcctaacctcataccagcaagaaaatcattttggtgacaaaaagccttgagattgagagtggggtggtgtggggggagagatgaaggccaggaagggaagtgaacgaacacttttggtgaggagatgcacctttatatacagctggttctttgggggaattcctagatcacagacttgtagtaaaaaccaaagaaacatgacatcctcccacagattcaaacagaccacgtggggaacagccatgggaggcaggcccaacagcctctagaccagcagcaggaggccaacaggcccctctggaaagcagggctctccactgtgctcctcaggacagagctggcctaccattttttaattcatcagttcaaaagtcatagattaagatcaaactgtgaccctaaataacctcctctcctcacccatgggcaacatggtttactgggtagtgagaggactccttagaacttttgtcctcacacatcttgaggactattcctcagacaaatgacccactggagatccttatgtaattgtatggttatgagggtaatgggtgaggcaaagagagatcctgcgtatagtgggaaaagggttaagtctgtgctgtaagagtgagg

SEQ ID NO: 203997 - DNA, 1000 bp, Homo Sapiens
tgcctcagcctccccagtagctgggactacaggctcccgccaccacacccggctaatttttttgtatttttagtagagacggggttttaccgtgttagccaggatggtctcaatctcctgacctcgtgatccgcctgtcttggcctcccaaagtgctaggattacaggctcctcccctgtttttgtcttcccgtgtccttgctcagcatcacagtcatctcttcagacacctcctcccatcctggaagagtcagggtagctctcaacttaatttaacttaggaaaggttttctacgctggaagtgatggtgaggatattaacaagaaatgctcatgattacatgagggattgcagattcctttgcccagaaacgtcctcacatgaccataatgggtgcgaatgagatgggataatgatactgaaatcagtaccattaaaccatttcctttcttccttctcccagcaaaagagcaagagaatcataaaaaacaaatgctttattcaaacaaaatagaaaaaaatcatacgtaggaaactttttcccacgaaaaacgaaaacatattaaggtttgatacaaataaggatctcctttgtctgaaaaccctggggtgcagtcctgtgctcatttgtttgtttgataccatggaaacatgcagttgattgcagtagataaaagcatgttagggaagagaccaaagggcaggtctgacattttccacaggattcagataaaaaataattctgattggtatttgctatggaaaacacaaaatccttataaacaagaaacttgttcctccatgggccccaaattttctcaaacataaataattcataggcaggacacgctggcccatgcttgtaattccagcactttgggaggccaaggttggaggattgcttgaagccaggagtctgagaacagcctgggcaataatatagtgaggcactgtctctgaaaacattttaaaaataaaaataataagaaaaaagaattc

SEQ ID NO: 203998 - DNA, 1000 bp, Homo Sapiens
aatgctttctctgcaaatcaggaaaaaggcaaggatatcttccctcactactccccattcaacattgactagaagtcttaatcattaaaataaggttaaaaaaaaataaatggcatataggttgaaaaagaagaaaaacactgatgaaagaaatcaaaggatgtctaaataaatcaagagacataattttcaattggaagactgaatatttttaagatgttctcccacaaatttaatttatatgttcaatgtaatctcaatcaaaatgccagcaaaatgttttgtagatacagacaagccgattttaaagttcacaagaagagacaaaggaattagattagctaaaacaattctgaaaaagaataacaaagctggaggactaacacaacctgatctcaaggctatcaaggtaaagtaatcaagcagtgtagtattgatgttgggacagacagatcaatggcacagaaaagcaaagccagaaatagacccatacaaatacagtcaattatattttacaagtggataaaggaaattcaatggagaaggacagtcttttaaacaaatgttaaaacaactagatatccatatgtagaaaaataaatctcaacatctatctcacaagttgcacaaaccttaaatggatcataaacctatgtgtaaacataaaactataaaacgcttagaataaaatctgaatgaccttgagattggtgatgagtttttagatataatacaaaaaatataatctataaacaaaaaaatgatgaactggacttaatcaaaattaaaaactcttcctctgcaaaacacattaagagaattacaagataattcacaaactggtagaatatgtttgtaaatcatgtatctcataaatgatttatatctaggacataaaaagaattctgaaaactaaacaaaaaaagttcaccaaaaagaaacttatgaaaagccagacaacttcattagtcattagagaaatgcaaattaaaaccacaat

SEQ ID NO: 203999 - DNA, 1000 bp, Homo Sapiens
cagaagtaaaaagaattggggaatacagtgaacacaatgtgtatgccagcagtttagagaatttgatgaaataggcaaattcctagaaagttacaaacttaccaatactgatgtaaggcgaaacagaaaatctgaataaatctatgatgcagattgaattgtgtccccctaaaacatgaatccacccctggtacctgtgaatgtgaccttatttggaaatacagtagtcttcccccttataagggggatgcctgaaactacagatcgtaccaaactctatatatactatgtttttttcctgtacacacatacctatgataaagcttaatttgtaaattagtcacaataagagattaaaactaataataaaattgaacaattataacaatatactataacaaaagttatgtgaatattctctctcttttctcaaaatattttattgtactataccatgggtaactgtggaaagcaaaactgcagataagaggggaccactgtaaggtctttgcaggtgtaatcaatttatgatgaagtcatgttggattagagtggaccctaaatccaatgactggttgccttataaggagaaagagacttggagacacagacacacacacagggaagaggaccatgtaaagatggagacagagattggagttacactgccacaaggcaaggaatgccaaggattgtcagcaaccaccagaaactaggaagaggcaaggaaggactcttctctagacctttcagagggaaaatgaccctattgacaccctaattttgggtgcctggactccagagctgtgagagaataaatctctgctgttttaagccacccagtttgtgataaaatataacacccctagggaactaatacttagaacaagtattgagattaaattagtaatttataaactcccatcaaagaaaagcccatggccaggtatcttcactggtatatatattttttctttctttttttaaatagagatggggt

SEQ ID NO: 204000 - DNA, 1000 bp, Homo Sapiens
ttgtatttttagtggccacagtgttgcaccatgttggccaggctggtctcaaagtcctgcactaaggtgatccacctgcctcggccttccaaagtgctgggattacaggcatgagccacctcgcctggcctattttattttattttttaatagagatcaggtctccctgtgttgtccaggctggtctcgaacttttggactcaggtgatcctcctgccatggcctctgaaagtgctgggattacaggcatgagctatcacacccagcctctttgtttctcttttgtatcttgttcaatctctgaatctccttaaggctggcttcacctctggtggcaaaatgactaaagctacatgtccttatacctcactgtcataatgagagcatgagaggcaatgcttggcattccacgtaggagtccagcaaaatagcctgattgaaccagcttttaggtctgatgcccattgtttgttttttttgaaacagagtctcactccgttgcccaggctggagtgcagtggcacaatcttggctcactgcaacctctgcctcccgggttcatgcaattctcctgcttcagccccccaggtagctgggattacagccatgcgcagccacaccagctaatttttgtattttttgtaaagacggggtttcactatgttggccaggctggtctcggatcaccttaagtgatccgcccacctccacctcccaaagtgctgggattacaggcgtgagccactgcaccagcccacatgcccattcttgatccacttgtaggaagcactataaaagcacatgaacaaagtgcggtgcgtgttccatgaaaataaagatggcgccaggcgcggtggctcacacctgtaatcccagcactttgggaggccgaggcgggcggatcatttgaggtcaggagtttgagatcagcttcacctacgtagtgaaaccccatctctactaaaatacaaaaattagccgggtgtggtggcaggcgcct

SEQ ID NO: 204001 - DNA, 1000 bp, Homo Sapiens
agtatatgatatttcaaaaatgaagaaggggctaataaaataaaagaagaaaaccaaaatagctctctgttctgctgatataagcattatctactctgcaatgttatagcagttaagaaaataaaagatcaatggccttccttatcttctcatatgagcaatgaaaaaagtaacagcttttctcctattattagtcttttcctgccttttaaaaagctcaagtttccatgactgggtttattaaacccacaaaagtatgtaggcatatattttaccatgacaatttgtttttgcttttctactgctgtgctgctttgaaggggaggaacatatttctagacgccttcttcttttcccatagatagccatattgcaaggcttgggctcctaagagacaagtcttctgttcgacagatgtgtccgcaggagcaggcagacagcaataacactacttaccagagattcgctggcacactggaatacataacaaatatactggctaagtccaggctctggagactcccggcagataaagccaaagtgatccacatgctttataccctagatggaggggaagaagtgcaataaaaatgtatgggaatatatattttttactcaacaatatggaaagcaacatcagttctttgctttcacagttctacgaatttctccttcacagcaatgaaggggggacataatgccatagcaaactcatgcagtggcctgttgatacataaaataaaaggtgagaccaactcagactgttttgcttctgataaacattctgcgactcaaggccacaggaggaaaaacattgatggtatgatccactgtgtcttgtaataaaatgctactccatgtctgcaagtaacggagttttcagtttactgtcttcttggcacggcagtctgatattcatcataaaccctgttcttatctgaggctaagaatctgagaaaaactaatactgacaatactcaaattaactggtatggaattc

SEQ ID NO: 204002 - DNA, 1000 bp, Homo Sapiens
gcacagaaaaacaattattgcatagtctcactcttatattcaagctaaaaatgttgatttcatagagatggagagtagagatgtggttactagagtctgtgaaggataagaggaaggagaaataaagagaagatggttcagggatacaaaaatgcgtttagacaggaaaaatcagctctaatattcaatagtacagtagagaaattatagttaacaataatttattatatactttaaaataactaaaaggttggaattgtaatgtttccaacacaaataaaagataaatgtttgggatgatggataaactaaacaccttgatttgatcattgcacattatctgcatttactgaaatatcacacgtatacaataaatatttataaatattaaatatcaataaattttataaaatgaattaaaatttctgaaaggatataggagtatttagtttttgtatttcctcttgagtcagtttttgcaagttgtatttatcaagaaattttcaaatttcttctgagttttaatgttttctttacacagttattcatagtattctatttacacatttttctatctgtaaaatctctgttgataaccatattttgatcccatttatggtaatttttgagctttgttttttctcttgattaatctagcaattaatccactttttaaaagttgtttttaaagaatcatcttttggtgttgctaaatttctctgttttctatacgtatctctaccaactccttctttctacttattttgggattgttaattatattctacatatatttttcgagacagggtctcattctttcatccaggctgaggtgcagtcatggctcactgcagcctcaactttcccaggctcagatgatactcccaccccaccctcccaagtaaatgggactacaggcacgcaccaccatgctgagctaatttttgtattttttgtagaaatggggtttcaccatgttgcccaggctggtgtggaattc

SEQ ID NO: 204003 - DNA, 1000 bp, Homo Sapiens
aagcgcaagggctgggagggggtgtattgtcacaaagtcaattgatcagtcagggtggggcaggaacaaatcacaatggtggaatggcatcagttaaggcaggaactggctattttcacttttgtgaatcttcagttgcttcaggccatctggatgtatatgtgcaggtcacaggggatatgacggcttaacttgggctcagaggcctgacagtgcacacggatgtcctggctgacattctcaagagcatcaacaatgccgaaaagaggcaaacgctaggtgctttttaagctgtgctccaaggtcattgcccgtttctcactgtgatgatgcagcacggattatgcggggtggagttggggggacttcctgggccgggggacttttgcaagagaccccggtgactcaggattttgagttcttaaccagtcgagtgaaggattcaaaattaaccactccaagggaggattgaaaaaagaaccactctcagtggacaaaaagaaagaaaggggagagggtaacacagggatataagccctagtcacccgagccagcaacggcaacccttctgggtccccttccaccacgtggaagctttcctttcactttgttcagtaaactgcgctgctgctcactctcctggtccgtggactctttttaagctgtaacactcaccgtgaaggtccgcagcttcattcatcaaagttagcgagaccacaaacccatcggcaggaaaaactcctaactcagttacattggcaaatttgaaatcattgatgatcacagagctgggaaaattgttgtgaacctcacaggcgggctaaacaagtgtggagtgatcagcctcagatttgatgtgcaactcaaagatctagaaaaatggcagaataatctgcttccatcctgccagtttggtttcattgcactgacaacctcggctggcatcatggaccataaggaagcaagatgaaaacacacagcagggaaaatcctggaattc

SEQ ID NO: 204004 - DNA, 1000 bp, Homo Sapiens
ccagaggagtgtctagccctccgtaggcactcgggaaaagttaagtgacttcatgagggcgtcttctccacagcagtacccacattctgtattgtggtgtcaacactggcttactttgaaatgactggcctctaatgtagagataacccaaccctcaacacagtcactgcccgactcttcaaaagccctataaccattgaggtaggttattaaacttagtatcataggctttttaaaaaaacaacaacaaggatttttgaggtataactggtgtacaataaactgcataccatttaagtgtaaagtttggtaaacattgatgtgtatgcatcattaccacatgaaatataatgaatatgcccattatctcctccaatttccccatgccctttgtaattccttcctcttgccccctacccttttctacacaactattgatttgttctctgtcactatagattcgcttgcattttctagagttgtaagtagatgaaatcatgcattacgtacttttcccctagcttcatttgctcagcatggttattttgagaatcatcgatgtcattgtgtgcatcagaatccatttctttttactgctcagtagcattccacatttatccactcatctgttgataggcatttgggttagttccagtttggagctattactagtcaagctgctataaacattagtgtacaagtctttgcatgggcatctgctttcatttctttgtgtaaatacttgggagtgaaaatggttgagtcatatgatgggtacatgtttagcttttaaagaaactgccaaactgtttttaaaaatggtcataacattttgcactcctgccaatagcgaatgagagttcctattcctccacatccttgccaacacttggtatggttggtctctttaattttagtcattcaagtggctatgtagtattctctcactgtgctttttatttgcatttctctgatgatgaacaactttttaaggtataat

SEQ ID NO: 204005 - DNA, 1000 bp, Homo Sapiens
ttttccaatgggtgttgtctctctgacataatagatttgactgacacttgtgaaaataaacaattttacgttttactttaagatcttgggtcaaaatgtttactagttttacctaaactgaagaatataaataatgccaaaagaactagactgtttctcaatgtgaaattaccggtttaggagcttaagctgtaactagcactcaattgtctaccaaatattcattcattggtttcattcatttgacaaatatttataaggcacttactacatgctgggcaccaaagatacactgctgagcaaaaataaagacttttggccactgccttcatggatcttctgagggtggacccagtagatagaattttaaattctttttttttttttttgagacggagttttgctcttgttgcccaggctggaatgcaatggtgcgatctcagctcacaacctccgcctcccaggttcaagcgattctcctgcctcagcctccctagtagctgagattataggtgcccgccaccacgcccagctaatttttttgtatttttagtagagatggagtttcactatgttgggcaggctggtctcaaactcctgacctcaggcgatccacccacctcagcctcccaaagtgctggggttacaggcatgagccactgcgcctggcttaaattcttgcccctttctgttgtcccctacccttgagtgtgggtggaatctgacttgcttctttctggccaataaaacatggcaaaggtgatgggacagtcatttccttgattactttccattatataagactccatcttagccacctgaagagagcaattctaagccagagagatcttcttgccggccttgaagaagcaaacagctatgttatggaactacacatggcaaggacctgagagcagcctctaggagctgaaaatggtcctggccaaccactagcaagagaaggaggatcttagtcatatcaccgcaaggaaatgaattc

SEQ ID NO: 204006 - DNA, 1000 bp, Homo Sapiens
ttagagacgagggtctcactatgttgcccaggctggtctccaactcctggcctcaagagaccctcctggccaggcacagtggctcacgcctgtaaaccagcactttgggaggccgaggcgggtggatcccctgaggtcaggagttcgagaccagcctagccaacacggtatgaaacactgtctctactaaaaatacaaaaaatgaggtgggggtggtggcaggtgcctgtaatcccagctactcgggaggctgaggcaggagaattacttgaacccagaaggcgaaggttgcagtgaggcgagatggggccattgcactccagcctgggcaacaagagtgaaactccatctcaaaaaaaaaaaaaaaaaaaaaaaaaggagaccctcctgcctcggcttaccaaagtgttgggattacagacataagccaggtcgcctggcccaagctagatattgaggactgccagatggcaacagtagacaagacaccctagaatggcccatctagaaggaagtagataccttctctgtagggattcaacaagggggcaaagtgatgggcatcttgggtgaggaacccagcccgcggaatgggaaagggctgggacactggctttacagctgggttgggaaagggatctgatccttgagtcagcccctgtaaaatggggatacagcagggcacgacgtctgttggtcgcctggcactgggtcggccaccgaggccgcgccttggcctctttgtcccctctggccaccggccccagggagcccgctcgggaagcagcgcggccccaggaggaaggcggcgcggccgaggccagagccggcggctactgcgaccttccggctggcgggcgcgtttcatgttcctgcctcaccctgggctgcacggactcagatcgggaagggggaggatccatggtaaaggccacgccccctctgggacctcgattccccttctgggcggccgagggatgggctgcaaggagtcaaatcc

SEQ ID NO: 204007 - DNA, 1000 bp, Homo Sapiens
agctatacacaataaggttgtttacacagaagcaatttgaaaatcatgaaaagaggaaggaaacacactaaccagaatggataatgacattactgtgaatgtggccccgggaccatttaaagatccagcaataagtggatcattaaatacattctggtacagccacatgacagattactgagccattaaaattatcctcagggtgagtttgtaacaatgtgggaaaatgcttacaactataatattaagaagaagagagagggttagaaactataaaattctcccagctgtttacaaaaaattgagaaaaatattagaagaaaatcaccagaatattaacttggttgatgagatgatgtgatttttgttgtcatctttaccttttctcctttttcagatagttgtaatgaatatatattacttttataattgtatataaacattattttttccagttaagcctaagcttcctgacagaaaaggcagaaaggaaaactatcatgagttacatgattctcaagtgttaaaaaaaaaaaaaatctcaggcaggacatgatgactcacacctgtaatcccagcactttgggaggccaaggttgtggatcacctgaggtcaggagttcgagacaagcctggccaacatggtggaacctcatctctactaacaatacaaaaattagctgggtgtggtggtgtgcacctgtaatcccagctactcgggaagctgaggaaggagaatcgcttgaacccaggagatggaggttgtaatgagccgagatcacaccattgcactccagcctgggtgacagagtaagactctgtctcaaaacaaacaaacaaacaaacaacaacaacaacaaacgatctcagttctttgagataaatttttcctagataactgaattccaaaggaggtttatcacaagggatgttgaatgatataatacaaatcttggtaaagttcttagtgcaaatgtgggacagggactccttatgatta

SEQ ID NO: 204008 - DNA, 1000 bp, Homo Sapiens
tctaccccgttaacagaataagggagaaaaatcacgtgatcattttaatagatgccgaaaagcatttaataaaattcaacatccattcatgattaaaccaaaacaatacaaaacaaaaaacttaactcttaccaaacaaggaatagaagggaattttcttagtataatgaaagtctacataaaactatatcaaatatcattttttttttttgagatggagtttcactcttgttgcccagtctggagtgcaatggtatgatcttggctcaccacaacctctgcctcctgggttcaagtgattctcctgcctcagcctcccgagtagctgggattacaggcatgcaccaccacatctggctgatttttttgtatttttagtagagacgggttttctccatgttggtcaggctagcctcgaactcccgacctcaggtgatccacctgcctcggcctcccaaagtgctgggattacaggcgtgagccaccgtgcctggccttcaactatcattcttaactatatcaaatacccttcttaatggtgaaactttagttttcctttagagatctagacttagaataaatgaaaatacctctctactaccgctattcaacattgtaatgaaagtcctagacagcacaggaaggtacgaaataaaagctttgagattggaaaggaagaaacatctttttttttttttttttttgagacggagtcttgctctgttgcccaggctggagtgcagtggtgcgatctcggcccgccacaaattccgcctcccgggttcaagtgatcgtcctgcttcagcctcccaagtagctgggactacaggcgcgtgccaccatccgtggctaatttttgtatttttagtagagatggggtttcgccatgttgcccagactggtctcaaactcctgagctcaagcgatctattcaccttggcctcccaaagtgctgggattacaggcgtgagccaccgcacccggccggaagaaacattta

SEQ ID NO: 204009 - DNA, 1000 bp, Homo Sapiens
cacccatggataacccgagggccaggatcagcatccccaccaccacaggctccagacccgcagggactcccttgttccgtctgtccaggatggccaagagccccacaatcagcatcccggtgcccagaaccttggagtcaacagaggcagagggttccctgtcagctgccaggtgctccatctgccctctctcatccaaatattccatgtcatctggctttgtgcaacacaggcagttggggatggtggggagtgccaagatagacccaacccacactccacccagagactgaacaataggctggggtgccgaggaacaggaccaaagtagtgtccccaggtctccccctcacacttacctgatccaggaagccattgttcagggacagatagggggcaggataggtggcaaaaatggaggctgtctccttggggccagtcactgtcaggttcccacctgtatagttctgtagggcatctgtggaggaagggaacacccaggatttccctctttgctcattcatccaaaaccattctgaggcacccctgcccacccacaggtgctctcaaggcacagctccctctgttccctctgtcaccatggtagagaacataggtggctcccgaagcacagaaagcagacagcaactgcaccaagatgtaaatggggagcttgacccaggggaggcgtccaacgatgcacatggccagggagaaggctggattcaggtgggccccttcaagtatcaaggaaagaaaaagagcatctattaagtgtcactgccaggcattgtcaccagacaacactactgctccttcctatagctcttaaggcagatagtgtaattctcatcacacagcttaggaaattgaggctccagatgttacagatgttaagtgacttagcaaagtcacactgtgggccaggcacagtggctcacgcctgtaatcccagcactttgggaggccgaggcagtggatcacttgaggtcaggaattc

SEQ ID NO: 204010 - DNA, 1000 bp, Homo Sapiens
ccaaggagtgccaaggggtggctggcaaccaccagaagctagagagaggcaaggagggatccttcccttgagccttcagagagaccttgaccctgtcagcactctgaatttgaatgcccggcctccagaactgtgagacaataaacttctgttgttttaagcttcccagtttgtggttctttgtgatggcagccctaagaaactaaaatataggctttgctcatcaaaatacgattcatgagaaatttaggatgacaaggcaagatgaagtgaagaagatatccttggtaaaggaaatagcatttcttttccttttttttttttttttttttctttgagatagagtctctcactgttgcccaggctggagtgcagtggcacaatctcggctcactgcaacctccacctcccgggttcaagcgattctcctgcctcagcctcccaagtaactgggactacaggcgcccgccaccacacctagctaattttttttttgtatttttagtagaggcggggtttcactatgttggtcaggctggcctccaaactcctgacctcatgatcccgcccttctcagcctcccagagtgctgggtttacaggcgtgagccaccgtgcccgtgtataaatagcatttcaaagtcacctggttccaataaagtatgaaataacttgctcttagggaaatcaccccaattgccctttaccttaatttcatgaaagatggaacaggtaaacatgtcaacaaaggaatcctgtaacaccaaaacaaaggacatttcttcaagttgaataaatatatgattatacatgtttgtcattttctttttctcattcactgaaagctggtgaacatttcaagtaccaaagtttgggaaacattgcaccagtggcttatcaaactaatgtgcacacgagtcccctggtgtattaaaatgtagatcctgacttggagggtgagggagatcggcatctgaccagctcccgggccgtgcaggtgc

SEQ ID NO: 204011 - DNA, 1000 bp, Homo Sapiens
ctcatagggtgtagtataatgtagtgccaccttgaccatgaaatttgtttactgaccttagtattaacctagaacattcttatgcctcttttcatggtgatgtggtgtcagattacaatttgactggctttcaagataattggtcttaattatttctaagtcattggttaatgcagtgtaagaacaagcattgtttaaaaaagaatataaatggcttttgagtttcttttcttagcatgcaagtcagattagagtgaaagcaaaagcacatgacacaaaactgtggttcgctaatagattgtaggcttcctgtagcttaaattatacacaccacagtaaactgttacccagtggcaattttgatttcccttttgtattagttgtaatctgtgatacttttatttaaagtaaagccatgtattaaaagtttattaaaacatatattgtctttttttaatctttttcctcttcaccccatacatatatactcattccttttagaccaagctccagggtaacttgccctgtaacctttcaaataggctcctttctctgaatatatctgtagtatatctgtagtatatctattataataacagagtgtgctacaattgtctctccctctcccctgccccaacccactaaattgctagtattttagggtcagagacaatgtctcgttcatttcttacattttttaccatgatacctgttcacttgtagcatgtaatagtaggggaatgaatagttagtagaataaatgtatttaagaaaaaagtagaaaagaaatatatggtgaattgatttaccaactcagaatttaaatataaatttaaaaaatctaaaatcaaagtaggttatgtgatcagtactgctgtaggttgcagagaataaattgatactctacactttagttatgtttgggagcagtatgtatgattctgtaaactgaaatccctctaatatgtacagaagaaatacatttacagactagttttgt

SEQ ID NO: 204012 - DNA, 1000 bp, Homo Sapiens
ccccaggacttttgtttctttcagctcccccactggggcctttctaaccttctcaggcccatccatccttccatgtctccctctcggtgccctcccctggcctcagaccccagcttgatattccccttcatccctcaacctctatcgctcctcgcccactccctggtccagcttctccttcccaggctggagccccatccttccctgcctagtcccacagttgcctgcccattctttcctccctgccttggtgagcagtggcactggcccctacccacttctctgctttggcttggccttgacggccattgccttgcaactcccagtgtgagatgtttttttttttgttttgttttttttgagatggagtctcactctgtcacccaggctggagtcctgtggcatgatctcggctcactgcaacctccaccttgtgggttcaagtgattcttctgcctcagcctcctgagtagctgggattacaggcacacgccaccttgcccggctaatttttgtcgttttagtagagacggacggggttttaccatgttggccaggctggtctcgaactcctgacctcaagtgatccacccaccttggcttcccaaagtgctggggttacaggcatgagccaccacactcgtcccctagtgtgagtctttctgcctgagcaggagcttctcacttttaagcctgcttgtgtgcgtgcatggttttttccttgtctgtgagttttctttaaacataaatgtatttaagttttaaaataaagtgattcaacttaaaatactagtattaataatacagcagctattttgtgaatgtgatttttaaaaaaactgtgaagattggaaagtttaggccagtccttggagagaggaaagccagagacacaacacagatctaatcatgcgctgccccctacaggtttctttttggtaaagtagaaaccaaaaaccccaaaaccctacctcccagggtgctttgagagtcacactag

SEQ ID NO: 204013 - DNA, 1000 bp, Homo Sapiens
cactctgttgcccaggttggagtgcagtggcgtgatctcggctcactgcaacctctgcctcccaggttcaagcgattctcttggctcagcctcctgagtagctgagattacaggtgcagccaccatgcctggttttgctttttgtttgtttgtttgtttgttttttgagttggagttttgctcttgttgccgaggctggagtgcaatggcgtgatctcggctcactgtaacctctgcctcctgggtttaagtgattctgctgcctcagcctcctgagtagctgggattacagacatgtgccagcatgcctggctaattttgtatttttagtagagatggtgtttctccatgttggtcaggctggtctcgaactccctgcctcaggtgatccactcgcttcggcctcccaaagtgctgagattacaggcatgagccaccgtgcctggcctggttttgtatttttagtagagacagggtttccccatgttggccaggctggtcttgaactcctgacctcaagtgatccgcccacctcggcctcccaaagtgctgggattataggcatgaaccaccatacccaacctcttgcctcaatgttgatgactgttgactgatcacggtggtgattgctgaaggttaggatgactgacaatttcttaaaataagacaatgaactttgctgtacaatggactcttgctttcacaaaagatttctttctagcaagtgatgctatttgatagcatttactcacagcagaacttcttttgaaattggagtcagtcctctcaacccctgccactgctttaacaactaagtttatgtaatagtctaaatcctttgttgtcatttcaacagtgttcacaccatcttcaccaggagtagattccatctcaagaaaccactttctttctcatccataagaagcaactccttatcagttcaagtttgatcatgagattgcagcaattcagccatatcttcaggctccacttctaattc

SEQ ID NO: 204014 - DNA, 1000 bp, Homo Sapiens
aaggaagaaaaggatcacaaaaaatgatggaggatcttatagataaaacagttagtattaaaaaagaaccaaactagtctgatagagctaagaacacactataagaatttcataatgaaattgcaagtatgaacagcagactagaccaagctgcagagataaactcagagcttgaagacaagctctctgaaataagacagaaataaaaatgaaaaaaataaaataaaaaggaacaaacaaaacctccgataaatatgggattacataatgagataaaatctatgacttattggagtatgtacttgaaagaaatgaggagaaagcaagcaacttagaaaacatatttcaggatattgtccataaaaacattcacaaactcgctggggaggccaacattcaaattcaggaaatgcagagaacccctacaagatactacacaagaagaccatcaccaagacatctaatcatgaggcattccaaggacaaaatgaaagaaaaaatattagaggcagttacaaagggcaagtcacctacaaagagaaccccatcaggctaacagcagatctttcagcagaaattctataagccagaaaagatgaggggcctgtactcaacattcttaaagaaaaaatcttaaacaaggaatttcatattcagccaaataaacttagtaggtgaaggagaaataagctccttattagatatccatacaatactagttggaggcttcaacactccattgaaagtattagacagaaccaagcaaaaaaataacaaaggtactcaggacctgaactcaacacttgaccacatggatctaatagacatctgcagaactcttcatccaaaaacaacaaattgtacattattctcatcaccacataccacatacaccaaacttgaccatataatcagacataaaataatcctcataaaattttaaaaaaatgaaatcataccagtcacactctcagaccacagcacaatagaaatagaattc

SEQ ID NO: 204015 - DNA, 1000 bp, Homo Sapiens
tcccagcactttgggaggccgaggcaggcagatcacctgaggtgaggagttcgagaccagcctggctaacgtggtgaaaccccatctctactaaaaatacaaaaaatagctgggcgtggtggcgcacacctgtaatcccagctactcgggagactgaggcaggagaattgcttgaacccaggaggtggaggttgcagtgagctgagatcacgccactgcactccagcctgggcgacagagggagactccatctcaaaaaaaaaaagaagtgggctaaggacttgggctttctaggtgggaggcctggggctgagctgtgtttctgcctctttctacgtggccctcagtttcgtttccctgtctgtaagatgggcctagccctccctcttaggcccggcatggtggccacaccctgcaggtggtctgaaagtgctggcccagctcctttcctccacccatgcccctttccaggccagtgtgtcctggtcagttcccagcttcccagcaccagagcagctgccctgaccagcaggcccacagcgccgcctctgcctgctttggggaaaggtggttgctttgaagcaaaaagcccctgcacaaaaagctggtatgcaggtagctggtgaagaagtcctgccccacaggcatgggcctggcacctgagagccacccccgtctctagctgagccgtggctgtcacatgctctgggcctgccctctccaggaccttctgttacttacagctcactcagtgtggccggggacctttagtttttgttttcttcctggagcactaaatatgttttcccaggcagtgaagcagactgatgcccgttggaactggggttccttttgagtgcgtcaagcccatttcctcaaggttctcgccgcgtttgttaagaattccagtgcactgagatctgctggttccgaggagatgggggcagctgtgatttaaccaccacgtgtgtcctgggtgccaccctcctgggccaggctg

SEQ ID NO: 204016 - DNA, 1000 bp, Homo Sapiens
tacatgcacatgtacacattgcacacacacacacacacacacacacaatacatatataggcatcatatgcgtacaccacgacatgcatggacatacgtatacttacacatgtgcccacatacatgcacgtacatgcatttctgacaccttgactctcaccttctccattcatcagagtggtgaccacgttgtcccaggatctggcacagagactggctcagctatctacggccacagccagatcaccagagctctggggttgtagctaggtgacgccaccgatcctctgctaccaccttgtggccacttcccaaatggcaccagtcagtggctgaagcctttccctggttcttgtcccagctaagctaccgggcccaatccacagggctcctgggaaacgtgtagtcatccctgagccttgtgccccaccctaggacaagtggatggctttgctaggtgctgtgggtaatgagtggggcctggagtaggatgcaggcctgacctctccactgctccgttaatcctctctgtcccactctgctgcacccaatacctccaggacttctcagggctgactcctgtgcctggagcgccccactccccagtgccccactgcccagcgagctccttgagggcagagccctgactgtgctcatctccagtacagacggatgctccatgaatgtgggagggaggaagggagggaggaaaggagagaggaagggaaagaaggagggggtgagagagtgagagaggatttcctcactggacttcctcagtttgagctctgaaagtcccatgtcccaggaaacccctcaggcctgagcaatctctcccgttggtcatcctcctacagctaatgctggtaggaagtggtgggggcagggtggggcactgagagaattcaataaaacaaagtgtggagggggcctgcctggattggtggtgaaggtgcgcctggaaatgagaattaatgaactccattgtttgtgcctaagct

SEQ ID NO: 204017 - DNA, 1000 bp, Homo Sapiens
tctatctatctaatctagctctatcatttctaatctatcatctttctattatctatcatctatctatctatctatctatctatctatctatctatctatcatctaatatgttttctttctccacagacagactgtgacttctttgagagcagaaattccatctgcctggttgatagaactggtacatagtagattctctataactatttcctgacttattgaattcttttttttctctgggggagtcttgctctgttgcccaggctggagtgcaatgacgtaacctaggttcactgcaacctctgcctcccaggttcaatccattctccggcctcaacctcctgagtagctgggattacaggtgcctgccaccatccccagctaatttttgtatttttagtacagacagggtttcaccatgttggccagccttgtctccaactcttgacttcgtgatttgcccgcctcagcctcccaaagtgctgggattacaggcgtgagccaccgcgcctgggcttgaattctttttaatgtctatgcagcatgttaaagtgggtatactataatttattctctacagtccttggttgatagaattgatgccagtctttaacttttacttcaataaatatccttgtatatatgccaaccaggacttttgttggactacaattaacttcaagatgaattggtgaaagagtaaaaaaatgattcatctctgtttttctaaacagtgtgccagttgtcccattctgacttagggaataatctgtctttctcccgctaataaaataagacactaatatgtaaggcactaatctctcacttataccacaagggcctggagctgtgacttaagtacttgggcctttcttctctgtgtggggagcagcccagactccaggccaacccctaggctctctgcatcgggttgctctccactccctacagcaggaccaagaccagcctgagttgaaggaggtactgatgctcagaattc

SEQ ID NO: 204018 - DNA, 1000 bp, Homo Sapiens
ccagcgccccggagagccgccttcgccctcgcccagcgcccgacaccgccggccgcggcggcggccgccaccggctctaggcaagtaccctcctctctctccctccccggcccaggtgctgcctgccgcacgccccgggagagccgccgaggcgcggcagcctgtgcccaggcgtcgccgggatgccttccctcctgtcccgactttggccagggaatgatttggtgggcgcgaattcgcgctggtgccctgggtcgtttgtgcaggcggggtgaggggcagcgcgagtaaacgggttgacatcccctaggtttctctgcagagtgcgctgtgtacttcatcgggcatttactttttcactgcttcctcatcgcccccggggcggcagcgcctcacagggtctctctgggggaatcatcaacaggtgtgcctgaacacgcacctgcggcagccacaggtgtctgggagccaccttttttcttctccctggcctggcaccctttcactcaagggatggaaactgtttcactttctgctgagcttctcttttacccgattaaaagggcctttgaatttctgttggcgcagccaactgcatcgggtgggggcaggagccggtgccttggagtgacgcgggcggagcgcggcgctggttattggaagctggtggggctgcttgagtgcccgctgagcctccgccgcggggcttgaaaactccgcactccagaaagcttgaccgtacagccctgggggtgctcgccctgcccgcgtggtccgcaaaacggggatctcctccgcctaacgcggcagagacttagaaaacatttaaacaacaaaaaaattttcactttctgacccatttgtaagggaggggccgagcttgtcagcatatacagggcgttgtaagtttcccagggctgcattgcaaggttcttctatagggagctctcagtcaaaaccgagttggagatctttatgttggaaaaaggccactgaattc

SEQ ID NO: 204019 - DNA, 1000 bp, Homo Sapiens
ctcaggcggtcctcccaccttggtcttccaaagtgctgagattacaggcatgagccacctagcctttatgaatgtgttttaaatcacagtttaagctcaaacatttaattccctttcatcttaactttctgtctctctctctctctttctctctctctctctgtctctgtctctctctctctctctctctatatatatatataaattttttttaattgagacaaattttcacagtgttgcccaggctggtcttgaactcctgggctcaagtgatcctcccaccttggcctcccaaagtattgggattataggtgtgagcctgtaatattttcttatctctataataaagtctgaagtctttaacgtgacttgcaagaccttcgtgattggaattgcatcaaacctatagataaatttgggaataattgcaaacctaatgattttgactcttccaatccactaatacggtatatctttctgtttatttaggtcatgtttaatttctgttagcattgttttgttgtttttagtatagaagtcttgggcatcttttgtaagaattattccttggcatatattttggcactactataagtagaatttctttaaatataatttttaaatattttactgctagtatgtagaaaataattgagctcttaatattaatcttgtatcctttactttgctaaattcaattatgagttctggcagtgctttgtgaattctcggtgatttctgcataaacagccatgttatttacatatattataggatcagttttacttcttttgttccaatttttctgccttttctcctccctcctcacccccgactatattatttcagtgctaggacctctagtacaatgttgaataagagtgatacaggtgggcatttttgccttattcctaatcttaaaaggaaatagttgtcttttacattaaatatattagctgtagattttgtacagatgctctttatcagtttgagggaattc

SEQ ID NO: 204020 - DNA, 1000 bp, Homo Sapiens
gctcattaccttgaaaatttaattttgattcattattatgctaaaggaatttcttcccataagggaagaagacaggaagagacaaacatgcgaacaatacagagaagcacatctgtttactttctgaggaggagatgacgatctcagacatctttgcagctacatctttgcatttgctctgctcacagctgtctctgccaacttcatcttatcatggtaagacagatgagccctgctcttgggacagggatgatacaagttcaagagcttacttagccagctcattcccaaggacaagatttctgttagactcttccatgttgtataagccaatggtgtggaactctgacttggggtaggcagaataaacaaaagaaaaagttagttttaatgtcttggcaaggcatttggtcttagaccattggcagttgttctttggaatgttgagaaaggctgcaggtctagttatcccctgggcaaaggttctgttcttttgcttagctcctgtcctaactaacaagtgttaaaggctgaaatgatcctaaatgattctctgtattttcagccaggtcccagctggtcattttttgtcagttgtgcctgctgaaaatgaaaaaaaaaaaaaaaaatagtgcagctgacccatattacaaaggctgctgtattcttagagatttgttgatctgattttaaagtcccggaagctagcactgcattttgaaacggcacattgcttgacattagatttaaattcattctggagtgaactcttcacttcctgcccaggttcttaccgacatgtccttgaagcagctatcagagcgagtgccactcacctctttcccccatgatatggtttggctttgtgtccccacccaaatctcatcttgaaaattgtgatcccataatccccacatgttgtgggagggacctagtgggaggtaattgaattatgaaggcagtttcccctcatgctgctcttgtgatagtgagtgaattc

SEQ ID NO: 204021 - DNA, 1000 bp, Homo Sapiens
cctttagagtcgctccctgctaaaagtggatttgtcatgtagctaataaatctcaagctccaggacagatgcttgtacctaattttgtatcttgtgactttatattctcgatctgccccaccccctatccatttggcactcagctgccagattaatcctttttacaataggttttattttttgagcagttttagattcacagcaatattgagcagaaagtacaaagagttcctgtgtgtctcgtgtccccagacacacacacagcctctctgattatcagcatcccacatcagtatatttgtttcagtcaatgaacctacattgatacatcattatctccagaagtccatagttgacattgagtttaatcttttaaaaatactattctttcagctgggcgtggtggctcacgtctctaatcccagaactttgggaggccaaggtgggtggattatctgaggtcaggagttcgagaccagccttatcaacacggtgaaaccccatctctactaaaaatacaaaaattagccaggtgtggtggcgggtgcctgtaatcccagctacttgggaggctgaggaaggagaatggcttgagcctgggaggcggaggttgcagtgagccaagatcgtgccattgcactccagcctgggcaacacagctagactctgtttcaaaaaataaaaataaaaaataaaaaaatactattttttcatatcactggtctgctttaaaactattcataaaaatgctgaccatcaggacatatttcagaattcaaggaaaaaattgaaaaaataaaataaaattctgtccatatctccaaagtctatgtccttacttggatattcaaggctttccacgatcttccccagctttcaacctgatttctcaagagtcatctgcgcatgccctttgcagggggtgctcttcaccgactcctacccgctgtccccatcatcacatctgtggctttgctacacgtaaaatctgattgaattc

SEQ ID NO: 204022 - DNA, 1000 bp, Homo Sapiens
tagctccaggcttaaaggcaattctgaaaaaggatatctatcagaaaaaaggacactatttcataagggttggtgatgctgagttcgaatacaattcaaattttaggtaatgtgccacagctaaattgagtcaaatgtctatgctttttaagataaataatattgaatgccttgtatttcagtcctgtcaagcttctacatggaggaaaaagtaagattgtctttggaatattctttttgtttttgtgttggcagtagtattcatcagtatacagaagagataaccgatttttatcaagtcactccaaaccaacacttttcaaactgtgcatgataaaatctgtgggttttatgaggagtcttcagaagctatgcagaggggagcaagcgagaagcctggctctgcttgtttgttctgtttgcctaaccttttatttgggcgagaaaagtttctgcctctttaaaaaacacacacacacaaaatccatatttaatatctagagcaaaaagagatttttgcctaggaagataaaaagctttatatccatgttcccagcagtaaagggactccaggaaatccacttgtactagccaatttcacacagcactgttacatagatttgattaccacaaaaatgtgattcccaagaaataagatgtttgaattgttaatgtgcattctctccttgtatgcaaagctacaggaaaggccacttataataagagccttctgggtaagcaagtaattggcaaaggaaactagaagactttagccatccttaggctggtgcttttaacttcttcccaggaattctgacggactgactccttaccaagcggtgctgactcttaaacctgttggtcgctgtgtcctccccactgtgcagggctgcagagtctctcatcaaattattactccttagaattctctcttctgtggccgggcgtggtggcgcacgcctgtaatcccagcactttgggaagctgaggtgggtggatc

SEQ ID NO: 204023 - DNA, 1000 bp, Homo Sapiens
aatatactgatagaattacctatggtgtttagggtaataggtatctggtaaattatgttttaagtgaatgttgctataaatctcttaaatacacagcatatacctataagcaaaagatggcaatggaatttttcttaattttttaatttttgtcggtacattataggtgtatatatttatgaggtacacgagattttgtacaggcatgcaatgaataataatcaactgagggtaaatggggtatccatcaactcaagcatttattttttctttatgttatgaacattccaattatacctttttagttatttttaaatgtacaataaattactgttgactataattactgttgtgctaacaaatactagatcttattcattctaactatattttcatacccattaactatccccacttcccgtccaccccactacctttcccagtctctaatagccatcattttactctttacaagttcgattgttttaatttttagctctcacaaataagtgagaacatgtgaagtttgtctttctatgcctggtttatttcacttaacataatgacctccagttccatccatgttgttgtaaatgacaggatctcatttttttcctatggctgaatagtactccattgtgtatatgtaccacattttctttatctgttcatctgctgatggacacttaggttgcttccaaatcttagctattgtgaatagtgctacaatctaatgggaatgcagaaacctattttatatacttaattcctttcttttgggtgtatacctagcagtgggattgccagatcatatggtagatctatttttagttttctgaggaacaaccatgccattctctataatggctgtactaacctacattcccatcaaaaacatacaagggttcctttttatctacatccttgccagcatttgttattgcctgtcttttggatagaagccattttaactagagtgagatacatttctctgatgatc

SEQ ID NO: 204024 - DNA, 1000 bp, Homo Sapiens
tgagccactgcgcctggcctggttttgtttgtttgagacagggtctgtctctgttgcccaggctggaggctggagtgcagtggcacagttatggctcactgcagcctctacctcccaggctcaagcaattctcccacctcggcctcccaagtagctgaggctacaggtgcgtgccaccatataaggcttatttttggttcttgggggtgtctttttttttttttttttttttgatggagtctctctctgtcacccaggctggagtgcagtagcacaatcatggctcactgctgcctccgcctcctgggctcaactgatcctcccacctcatcctcctgaatagctgggaccataggcacgtgccaccatgcccatctaatttttttttttttttttttttgtagagatggaggtctcattacgttgcccaggctggtctcaaactcctggcattctctggccttggcctcccaaacgctgggattacaggtgtgagccaccatgcccagccccacccccctccactccaggccctttctttgctcctgggcatagcctccttcctcaccagcctatcccaggcctgcccgcacccctgctgaccccgatcatctgctccaggcctccccagcccctccccacctcactctcaagatctgtccagcccagaccccagccatgccccagactccagacccccaaacccaacgtggactggacctctctgctgtgggggctggacaccccacccacacatgcagggtgtggaaccccccgcactccacccggctgtctgcctctgagccttctgccttgtggagccgctgcacagcctggaggcctgggcccaaggtgcctctgctctgccccagacccccttcccctccaagggagggagcgtggcctcagtgttcttcccccagccctgggggccactcactctttgacaaagctctggagctgctgccgcacggacctctgggcctggtcaaacaggatc

SEQ ID NO: 204025 - DNA, 1000 bp, Homo Sapiens
aggttaacattttggtttcaggatgctcccatgttgaaaaacaaaatttctcttcacattgttagtattatttgcctgatcccagggtgaaaatcggggcccaaatgaatcaggtttgaaacgaactagttttgaaacttggtttggctgcgtgacattgccaaaatcatccagttaatcttgtagtgactcacgttatgggctgaaattcatgcttggtacttatccacatggacatttcagggacatggtgaaatatggcttgagtgcatttgcctatgatttgttagtagcaaagttatataaggtaactggatgcaaattcatttgccagtaaaagtctgcccttcttgtaaatcagaatactcccccgttccacatttagatgccagttccatggtagagtaaaatactgctataatttagataagtccatcttaatgtgtaggtctaccagctatctgtctggttcggaatcactagtgagatttattaaacatacaggttcccaggccatatttccagatacttggattcagcaggctctggaaacctgcaatttaataagcttctcaggtgattttcatgcacagtgaagcttcagaaccactaatattaacaatgtaaattaaatgaatgctggagtggaaacactgtatttttcttttaggatatcaaggttgtgctcataaaatgtcaacatggttaatttccacatgaagcaggtgtctaactcaatggtcttcaagctctttgattgtgcacccttatcagtaaaactctttttttgagacagagtcttactgtgtcacccaggctggagtgcagtggcaccatcttggctcactctgtctccggggttgaagccattctcatgtctcagcctcccaaatagctgggatgacaagcatgcaccaacatgcccagctaatttttttttttttttgtatttttagtagagacagtgttttgtcatgttggccaggctggtctcgaattc

SEQ ID NO: 204026 - DNA, 1000 bp, Homo Sapiens
tatgcagccataaaaaggatgagttcatgtcctttgtagggacatggatgaagctagaaaccatcattctgagcaaactgtcacaaggacagaaaaccaaacaccgcatgttctcactcataggtgggaattgaacagtgagaacacatggacacagggtggggaacatcacacaccagggcctgttgtgcggtggggggaggggggagggacagcattaggagatatacgtaatgtaaatgatgagttaacgggtgcagcacaccaacatggcacatgtatatatacgtaacaaacctgcacattgtgcacatgtaccctagaacttaaagtataataataatttaaaaaaaaagaaaagaaagtattggctgtcattaaaaaaacatattatttttttcaaaaacgaaaacctttgcgaacacattctaatttataccaaagaactaaagtgccaggaagacatagggacaattcaaatttgagtttgtgatgagtggctatgatcaaattttgcattattccttagatttaatttatcatctctgtaagcaacaatcttcagggcaagggagagcttttagagcctttgttacagtcaaatttatctaaaagacagaacttttcatcaagggaattaaagacagcacggcttcttccatacacttgggttaagttggttttttttttcttttctttcaaatatcaatagcttaagacagaaacagcatatgggaaacccagaaaaccatttacactcagcagatatgtccagctggacttcaccccagcagaggttaaacattaacaggtgcaaggagagacttttgtgaaaatactgtttcatatgacttcatctcataaacagttaatgttcgtggatattttatacccccttaggcaacaatttctttttcctcccctgttcacttcagcagtcctgttttctccaccctggcttccctatttcatcccccatcacatcccaagaaatgaattc

SEQ ID NO: 204027 - DNA, 1000 bp, Homo Sapiens
agattgttgctgactctggaagagagtctcaagctgagatgcaggcttataattcggttcacttatttctggcctgctgaggagctattcttttctaattaattttcatattaaaaaaataaaatgaaagattcaactgtccatgaaattgagtgcaaaaatattagaaaacttttacttaataggaaaaaacaaagtaaatgaaggttaaggaagagtggaaataagatataacttctttgtcctatagtagtaaaattggcttccaaatgtaagcaagcaagtttaccacctaagcaagaatctacggaaaaagtaattgttgttcacatcttaatgatagcatagctaaaacctttggtagtgttatttttaggctctcgaaagtgtttgagttatttttgatgtcagtgttttttcagggtgtgaacatctcttgaattaccccatatttcgatttattggaaggcagtcttctgaaatgcctgctataaagaagtgatttagaataatgttctccaagccaaaatgggggagggggtgtgttgcttgcccatttctttagcacattgtcatgttcagatgctagtttcaatctggtttaaaatttaaggtgttatgtgaacaagtgaaattactctttggcataatgaatcattggtgtgtaatgatggcattatttcactgatgtttcaagttgctaatttttttgttaaaaaaaccaagcccgtttaaaatatagtttaattttgtgtgtgtaaaatacagggaaaggtgaaagatgctatgggctggttaactctgcaaaaggaaaaactacagaagttgctaaaggattcagagaatgatacctactttaaaaagtataatgtaagtatgattttaaacagctgtttgtaatttaccttttaagagttgagcgtaagtatgtttttagaaaactctttcaggcttaagtattttaagtattaaattcactgaaagttttaaggctgaattc

SEQ ID NO: 204028 - DNA, 1000 bp, Homo Sapiens
cacgaggaggcatctctacgaccccaagagcaacatcctgtcccccatggaccactcgaccatcagcctccagatgggtacaagcaagtgtgccagccaggtgggcatggcggctcctgggacccggtggcacatctacgacacgaagctgggaatcacaagtatgacaactcttccacgaccctgaagatgggctacacgctgggcaccaaccagagcagccaggtcttcagcctaggccgacagatatacgaccccaagtactgcctgggggcacagtggcccacggggctccctcaggtgcaggcgactgcccggggccagcggaggcccctgaatatctcccttactaccaagaggagaccagctactgaggctcccagcacgctctctccccacatggtctccctgtctgggtgtttgggtttttctgtgttttcatcttttttttttttaacctgttcagtgctgccagtcaacggagcgtctgtgagtagcagcgtgggatcaggcagcagggttttttttccccgttgctttcgttcctttgcaggactgagccaccgggctgtgggggaagggatcaaggccatatcccgatgcgtgtcgggtgagggtccccgctggcgcgtccaggctgtgggcctagctgtgctggggagacgagacctgggcatggagggaaccggtccccgaaggtttcccgttgcctcgcctcttcccccttttgtcagccgatcagtttgtggtttctgtacccgcaaaagtttcaagaagtattaacaaaagaaaaaaaaaatttttcccccaggaatggggcagggacagtgggtgctgggaaatcagtcccttgggacagggggccaggccaggatgctaaaatatctcaggctcctgagtggctggatttccctagcaccctcagaccaacagacctcagaccctcagacctacgctggggcccggtgaggaaacaggcccatacaaggtagtggaattc

SEQ ID NO: 204029 - DNA, 1000 bp, Homo Sapiens
gtgtccaatcaaaatgtttcttagattattaagttgacgaaatactcagaaatgtgaataaaaaagaatttattctaacttcagagaaaatgcagattaatttatgtgaaaacataaactgaaatccaaatatactccctattttatgctttactgatccttgaaaaaaattttagcagagcgcaaaacagctaagttggctaaagtatgtgacttcagaaagagcaattccaataatattgaatttatagaaaaaaattttgaccaaggggctggaaatatattgtgtgtattgtcatagcaacagtcattttaaggtagaagtgaggtttgaacatctttttaattttaaataaggaagccaagtttaattttaaataacttttctaaggtcaaatgtgtcagagagagttcttgagtccatttccttaccaagctttcactattgctacttgtcttggacggcccatgggataggatttgttcatttctttctttttttccttccttgttccctttcttctttccttccttaattcctagaattgcatatattggaccatctaaggttcattcgatctgacctgctccttggctgacattcaaacttctatgagcagatttttcccccttactacaaattgaaaccaaaattccagaacactttatgtctttcatcaaacatagaaatctctgggccatgatttcttcaaatactccatttaccacaatcttgaagagaatggccttctcaaactccagttgtacatactttatatcaataatattatctgacacatctctcattgtctattcttctccaccacatcttcatgctcttcctccccttcctcctttctctccctgtttcagttggataatttctactctcatttgtttctaggggcaatgtaaaatggtacagccgctttggaagacagtttggcagtttcttacaaagctaaacatagtcttaccacatgacccctcaatcaagctt

SEQ ID NO: 204030 - DNA, 1000 bp, Homo Sapiens
tggaactgaaggggattcctctgcctgccacccctagaaatcctcaatactgacagcttctgggatgtaagggggaaaactgagcccgatctcaatactgccatttcagaacaatctcatcattgaggagataatgtgaatatatttgatgatatgcaaatatcatctgtgtgttatcattttactcaacactcaaaacactactgagtctgccaagcagatttatatagcttggcaaattttcatttcatgaatgacacttcatatgaaattattttcactgactaatagaataacagtgatagaacagatcttgaggtggaaatagaataaagccatgcatttccagcaaaattataaccaactaatctcaaacacctccatatgatgttcctataatttataaataaaaggggccctggtttataagtaacccctaaaaatatgccttccctctcattatagactgggccagggctctttcatgcttgtggtcagtcatctttttctgtatgtacgtaggcttcctagggtacactgtattacgtcactaattgccacctttttcctgctcactatgagcacaagcagcctcttaaattgtcaaggcaaaagttctctctttcgctaagaggttccagggctctgcaagcaattccccaaggtcttctctagagaacattttagaagcagtgatttgcaaactgtgtacacagtggtactgggttccagagtgtgccctgggcacagcccaggtgacaatagcaggctctgggctcctagttccctcagagcagctctgtttttatttgactcatatattagggtcttgcataagattctatttgttgctaagtagaaaacaaaaatgatgtctatgaaaatgtgtgcaaaccattgcaagaaatggttccgtctccctcaggcactcttaacctccctcaccaggctgctctctgcaaatggaggcggatgcatttattttcctttaaagaagctt

SEQ ID NO: 204031 - DNA, 1000 bp, Homo Sapiens
atcatttctttacatcttctgttcaattcgttgggttctttacttcagggacccaaacttctttttttctttctttctttcttttttttttttgagatggagtctcactctgtcacccaggctggagtgcagtggcacgatctcggttcactgcaagctccgcctcctgggttcacgccattctcctgcctcagcctcccaagtagctgggactataggtgcccgccaccacgcctggctaatttttttgtatttttagtagagacggggtttcactgtgttagccaggatggtctcgatctcctgaccttgtgatctgcccgcctcagcctcccaaagttttgggattacaggcgtgagccaccgcgcccggcccccaaatttcttacattgtaccatccttaccagttctctatatgtctttttttttttttttttttggagacggggtcttactctgttgcccagcctggagttcagtggcatgatctcggctcactgcaaactccacctactgggttcaagcgattctcctgccttagcctaccaagtggctggaactgcagtcatgccaccacacctggctaagttttgcatttttaatagaaatgggattttgccatgttggccaggctcgaacctcccgacctcaagtgatctgcccacctcagcctcccaaagtgctgggattacaggcgtgagccactgcacctagcctctctgtgttatcttatctctacttactttaatttctttatttcatctgcattcacgttttctcaagcttttccactatgtcaataactttacttctaagaatgtctcctgtttctggttcagaaggttgttgttgctctcgtagcacgttttggcttccatctgcacccttaggtctgagcaatgtccttttccatcttttcctgtagttttagtaacttgtctttgtgcatctgttttgttgaattaccattctcattcattgttcaataaagaggaattc

SEQ ID NO: 204032 - DNA, 1000 bp, Homo Sapiens
tatggaatgaagctgataaaaagtcttaaaatgcccagggagaaaaaataggaataataacggctaatgtttattaaatgtgtgccatgtactagatattaaagcattaaataatctttcaaagaagacatccttacaatctttagacaaactcattcactaaatagaaaagaagaaatactctccaaataatcctatgagatcaatactcaaatcccacaaaaccaatctcactcataaatatagacacaaagatcctcacaagcaactcaaatttagcaatgtctacaaaaagattatatattctgatcaagttggtttaacccaggaatgcatggttggtctaacactaaataatgtcatagattacttaatttcatatgtgacatataatctgctacattaacatattaaaggataaaaacataataatttcaatacctgatgaaaaattatttgataaaattcaaaatggaaatagaaagattatgtaatctttattttgtttaaattatctacaaaaatcaatcccaaacttcattcttagtagggtaaacttcctttaaaatttggaagaaaataagggtgtctttgtcactagttttagtcagtattgtcttggagtttctagccagcacagttagacaagaataagaaacagaatacataaaaagaaagaaaaaaataaaactattattatttatagatgacatattttcctagttataaacccaaaagaacagaactaaacattttaagaaataataagcaagttcagcaaggtggtcagccagtagataagtattccaaaatcagtttcatttctataaaccatcagcaaacaaatttttttaaagataccctttataatagtagcaaaaactatgaaaaaaaactggaaaactaggaaacttttagcaatggatatgtaaaatctattcaaaagaaaaagtgaaataaatggggcaatacatcattctgatcataaactaaagaattc

SEQ ID NO: 204033 - DNA, 1000 bp, Homo Sapiens
tctcgattagaaatgaaataaccaggaatttaactaagaatttgttaattatttaattacattcttttttagctggatcccttctcattttgtatgtttgactatatcatatatgtacgttgtagaaaattggaatattgactactaaatatttatgataacaatatgtataatttttgacatagtattatttatctctcaaagaggagcgttttctgttcaggtggtgtttcttctatttcactgttaaaacatttttgttcagtacttttttatgttgtctgatttttacagaaggagatatataagtattaatttttaagattcatgtaggattctaacagaaattttatatgtctttcaagaacctcattaaaatttcaaggtccattagagagaaaaagcatacattcagattttatatattaatattttgattgaatattctcttttatgaaataattggtatacaattagtgtaggtaacttcatcacattctataagtattattggctgtatataagtattatatattggggctacttaaagcattactgaaatagtgactgtttctcttattacctattttcacttagtatcctgtctcaaaagtgttcactatttgacttagcatactctgtgagttgatgtggtttcctgctctgttactacctatttgtgtggaacttaagatttatcctttgcagcagtttgcattctaatatttattcaattagttactgataattaactatgtgcaatcactttgcttatacactctatgcaatcaataatgacaaatgctgtttccatattggtaatgacttcatgttcaatgccagacactattttagatatttatttagtgattgacttttggcaaacataatattttggagatatttatgtattttagaacacatcacttctcaaaaatctctaaagcccaccatataacccatactttacccacttgagcctaggcattatgcggaattc

SEQ ID NO: 204034 - DNA, 1000 bp, Homo Sapiens
ttttaaaacagctacataaacaaagtaataagtgctcaatttcagagagaattacattatactccatttgaacaggctacaaagtacttttatttgaaaagctgcttgtgctctgttataaacaattttactctgcaccaatttcagacaagagaagatggctagggagtgtgggaggtggagttaggaaaaattcactcagtgtctttcaatgccttaaacagttgatccaataaagatcctttagagaaaactttaagtctattttttttctccaagtaagcaaatcatacaggagggcttttcttttctagggtactgcaccctgtctctttaaattccaggcctgccccatttcccacgcattcaatgaaagccccacgtttgctggcctccagcccacaatgtcaagtagttctcttgctattgaatttcaagattattcttttggatcatttgccctttagttttaagcacaccaaagcaaaaataatgtctttctacaataacataaagaaaactcagaggtctttacaagtctacaagtagagaacaccttgtcctctggttcctctttcactgcaaaatatgctcccactccatatgctccaaataagggccatttgtacactatcgtcatctaccatagttttgtctgtcctataacaaaattttatgagtatttttatttaatttggtgccaatttggaatctctttgcaatactcaaaccaggtcttcatattgctcaaactctccactcttcaacttggtgtctggggtatttggttataacaagttttaaaacaattacttaattttaaaactattattttatttttgcagttaagacatctatataaattaacttactaataaaagcagcaaataaacattgccatctgtactcattgtgccaaagagtatattttcctcattcttgtatacaccttaatcctgaagaagggattccaggccattatcaatcacatttagaattc

SEQ ID NO: 204035 - DNA, 1000 bp, Homo Sapiens; identical to SEQ ID NO: 115015

SEQ ID NO: 204036 - DNA, 1000 bp, Homo Sapiens
cagggcaccccctgatagcgcccctaacccgccgccagctattggacccgggatggcgcccctaacaccctcccctcgccgctgcagtgtagaaacccaatagcgtcccgaacccgtccccgcctcagacgttgcagcaccagataactcccccaacctgccccctgccgtgggccatgcagccacggattggacccccaaccaactccctcgccgctggcagtgacgccccagaaagcgctgcaacctgatccccgccgtgaatagtgcagccacggatccttaaggcccccaacccgctccccacgatgggcagtgccctcccagatagcggatagcactcccaaccatcccccagccgcggggtatgatgccctggatagcgcacccaacccgcaccccccgccccgtggacagcttagcccccgacagctcccctaacccgtatgccactaccgagaatatggtcccgatagcgcaccaaacctgactcccgccacaggcagtgcagcagctgatagctcccctaactcgctcccactgaccacagtacagccccctaatgatgcacacaacccaccacacctccccacctgccaccggtggggtatcgcccccaaactgccccttgccgctggcagtgtagcccccaatagcgcacccaacgcccccctctatcatgagtagtctggcccgcgatagggcctgaaaccaccccctccaatcacctccctgtacccccctttcccgccccccccccacctgcagtgtaccaccggatactgcccctaacctatcccctgcggggggcattgcagccccagatagcgcccccaacaagtcccccgccgcgggcggtgcagcccccaaaccacccccccaccccactatgggcaatgaagccagaccagtcagcaccccgaccagtccccccaccccggcgccgccggcagtgtaaccacagtagcggccctaacccgccccctgtcgcgggcagtgt

SEQ ID NO: 204037 - DNA, 1000 bp, Homo Sapiens
tattttgcaaaattttgtctcataacaaatagaagaaaattatttctcaaaaatactgttcccagaacattatacttaaaaattcaacatcaaaatgataaataatagtaattgttgcagaactctttttaatacttgtctttgagtagagttggcttaagtgctttaatgaaagcatcctttctcactgttctttgtgatgtgaactttctgagatgctaagtgtatgaatatcatcacataagaagtttagaatatatcctaatttcattccttttgacacagtaaaattaaaatgagaacataaatgctgcaaataaaggaacttaccagcgaaatgcagaaaagattcattttgaccagcttcactctcttgttgccctgctttgaaaaatatgattgcctcttgtagctctctcttgccttcacagctgtttggccagttctcatgggagattattacaaagtaaaatccctgccataatccaggggattcagagaccattatcaaataatataggcttttgttgaacaaacaatttcctaaattaatgaagaacgctgatgcataacatgagagaatgagacttaccacgatctgtgtaaacagatttcaaaggtggcaatgatagtcctaaaacctgcagtgaaaatgcattggaaacaactacaggcaaacctggagaaaatattattcttcaggttaaaagtaacatcttcctcttaaaagtggtaggtcaagggtccatctcatatttcttcccatctcccattcctattttctctttcaacaattaacaaaacgtttgattcgctacatgacaagatatagagataaacacatttttaaatggcaagatatgcaaagtgcataaatctaaaatgtaccactttaaccatttttaagtaaacagttcagtaacattaagtacctctacattgttgggcaactgtcaccaccatgaatctccagaaccatttcatctttcctaactcaaac

SEQ ID NO: 204038 - DNA, 1000 bp, Homo Sapiens
caaataaaaatcacataactgatcatgacaaagaatatatactttgggagaggaaaaaatatgactaaagtgacagaccattatctaggttaaaaactgagaataaattaataggtaaaaaatagacataaatggttggatacagctcccatattatggttacctagtcaagtcgtctgttattaacagcaggataaaaaaatacgtcagtagaagacatggtaatcttacacgtagacacacaaacccacaaaaataatcattatatatatcatttatattatccttgaatatatatgaaaaaatatatttttatatttatatatatacacataaatatatttatatatacaatttatatataatttgtatatactccaggtattatacatttgtcttctcatttaatcctcataacctaaagaggaagacactaaaataatccccattttgcagatggggaaactgtggtgtaaagaggtgaaataatttgcttgcacactttgcccaactgttgaactaaagaaccaggcctggagatttattttccagtaattggaaggaaagggttagaaacactttaccaccatccctatgacttgtaagcttataaacttaattttgagcatgagacagccacgtctccaaaccacactgctactgtctagcagcttctccagtatctctgtgtttggtcaatttggctttctgatcatttctctagttccttgttcatttctctactggaaataaaaccaagtcatgagtagcccatgtggttgaaggcctgacccacctacagctaagtctgtcagcaccctgaactaggcatgtgaattttggatggaccttctcagtctttaacctgaatatttatctgacatgtaccgctgggacctatctgcaaaccacagctccaatcccaggagtctaatctctccatgaacaatctgaattagaatatttcttgaatttcttgaaaagtcagcatttaattatc

SEQ ID NO: 204039 - DNA, 1000 bp, Homo Sapiens; identical to SEQ ID NO: 115017

SEQ ID NO: 204040 - DNA, 1000 bp, Homo Sapiens
tcttagtggacagatatagcacattgtaacagacaattttctgagaaatgtaatttatattcagagatccacaatccatagtgtataatatgcatgcatataaataaaacaaagttgatcaccaaattattaactactgagctctaatattttccttgcagttaactaaataaatgagatcttcatgggtctcttttgggatatctatactgtaacaagaagataggaaatttaagcttaaatcagttgtattaacaccaatagtgagtgaaaactttcaaggatttttttttacatgttgacatgaagaggagaaagtaaaatttaacattagttcattcaggttttatacttgttggtattttacagattgaatgtttatgtgtcccctccctaaaattcatgctttgaaacataactcccaatgtgatggtatttgtaggcagggcctttgaatgagtgtccttataaaagagatcccagagagatacctcaccccttctgccatgtgaggacacagtaagaagatggcactctaggaaccaggaagagggccctcaacagacaatgaatctgtaaccgtgatcttgggctttccagctccagaattgtgaaaaatgtatttctgttgtttgtaagccatccagtctatattattctattatggcagcccgaactgactaaggcaggtagtgtcttagtgtcctagggctcctataacaaagtaccagaaattagctcgtttaaaacaacagaaatctgttctctcacaggtcttgagactggcagcctgaaaccaaggagttggcaaggccatgctgcctctgaaactcctggggaggacacttccttccctcttacaaatctgggtaagctcaagtgtccctcagccaaaagatggcctaccaagagggtcatttgattagaaatgcatgttcacgaggggtcttcagcattgacttatctatctccaaaaggaatagcataaaatcacagaatt

SEQ ID NO: 204041 - DNA, 1000 bp, Homo Sapiens
tctttttcacggcatcccacaaattctcagtgtaattcagtagtcctctcttatccgtggttttgctttctgaggtttcagttttacccacagtcaactgcgatccaaaaatattaaacggaaaattccagaaacaaacaatttagaagtttaaattgcgcaccattctgaataacgtgatggaatcttgtgctatcctgttctgtccagcccaggacatgaaacatccttttgtctagcatatccacattgtggaggctactccgtcctcagtcacttagtttctgtctcatcatcagatcgaaaaacacagtatgtatcaggtttggtactctctgtggttttaggtatatactgggggtcttggaacacatcctcctaggattagtagggactattgtaatattgcattgaggacaactctttgtcaagataattttttttcttttttttttaaattatactttaagttttagggtacatgtgcacaatgtgcaggtttgttgcatatgtatacatgtgccatgttggtgtgctgcacccattaactcgtcatttagcattaagtatatctcctaatgctatccctcccccctccccccaccccacaacaggccctgctgtgtgatgttccccttcctgtgtccatgtgttctcattgttcaattcccacctatgaatgagaacatgcggtgtttggttttttgtccttgtgatagtttactgagaatgatggtttccagcttcatccatgtctctataaagaacatgaactcatccttttttatggctgcatagtattccatggtgtatatgtgccacattttcttaatccactctatcattgttggacatttgggttggttgcaagtctttgctattgtgaatagttccacaataaacatatgtgtgcatgtgtctttatagcagcatggtttataatcctttgggtatatacccagtaatgggatggctgggtcaaatggtatttctagttcta

SEQ ID NO: 204042 - DNA, 1000 bp, Homo Sapiens; identical to SEQ ID NO: 115018

SEQ ID NO: 204043 - DNA, 1000 bp, Homo Sapiens
aaagtactagtccttgtaaaataacagtttttctctaaggcagagaaatcctactatggtacagaaagcttgagtataatagagcaaaatattagttatctcatatattccttaatgatattggtaacctttagggctgctgagtaaacaagtctttcctttcctaactttgtggcttatctgtgctcaaagggcaaaagaaactgcatgttgccacaaagggtaaatagttctttattaaaataatcaaatgctaaatgttctggtgaaagcactttccacaaagcagaatgaatgaaagtattccccaaatagaccaaaccattggcttaccctgaagagtagctacacacacacacacatacacacacacacacacacacacacacacacacacacacgcacacacaccccaaaatcatacaagttagtaagtggcagagattggcattaaatattgtgaaagtaagagaaaatagttcaatgactaaatctagtattggagtgctagaatttgatcatatacacatacatggtgtgagtttaattaaaatctataacaaaaatgtaaataggtattttaaaggatttatagatatacagttgacgtaggtactgttaggtgagaactcagttatttctgtttctgattttatcaattggatttttaaattaaaataatttataaagttaataatgagtcttctactgtttcctatgagtggaatacgtatatttgtaggtgattatttaaggtaaagtaatcctaagtgtttcattgttactctctctcctgctcctgatttcctttttctatcctcctcttctaggtctcccaaaagagcaacaatgtgatttatctaacagacgtttttatgaaattcctttgcattgcacttttcaaaaactcacttctgatttaatggcagctcagctaccaccagagggaagtatctctacactgatgaagtacattatttgacagtcattataaaatatt

SEQ ID NO: 204044 - DNA, 1000 bp, Homo Sapiens
cactttcatatgaaccatgacactgatttaacaacttctcccaaatgacacggatcttttaattattttttttccttgggagttatatttttaaatttattttgtatactataagacatatattcaataaaatcttccctactttaaattgtatattaataattaataagctttggattccaaaaaacaaccttcaaagtataatagattatatatataccacgtgcttcctgatgttaagtgaaggaaatgcttattctgcagctgggctttgtggggctggcttggaccaaagttttcgtgtctccctctttccaggaaccaggatgaaggagcggctactatattgagcaaagtactgtcctagttgagggcagaagctggaaggggagaaggatgaggaaaggatcctaactatacagtgcacttaaagttccaatttgaatgtggtttatgatgtgtctgtttacattcagttgagagaataaaatccaattcatatttatctcttggtctaaaatgcaaatgaataagttaaaaagcaattatatttcagtcacacatattccatttatactgaatgagtcagctgaggtttacatccattctatattcttcagcagttgctttagtcgtttttatggtatgaccctgtatttatgtcccgccagatagcgctttttctagatgtgatgatccttggcacgttgtcagctgaggaatactgtcatgtattcctggttgccaagaggttttttcacaaacagaaagggccacagaatccaaaaaagcaaataagctattgaagtttataacataaagtaagttaaacaaattggatatgaacttctcacagaagaaatctcttgattttttatatagatgtgtacaatagtttctcacccttctgagagagattctaaaacttttcatctctgagataaagaaaaaaaacaaatcatgccagggaatgaaaccatgcttttaaagtcagcatgat

SEQ ID NO: 204045 - DNA, 1000 bp, Homo Sapiens; identical to SEQ ID NO: 115019

SEQ ID NO: 204046 - DNA, 1000 bp, Homo Sapiens; identical to SEQ ID NO: 115020

SEQ ID NO: 204047 - DNA, 1000 bp, Homo Sapiens
ccatcacagaggaaggtatgaggttttcaaatatacggaagtctgtttcctcctggggtgcagtgcaagggagtccactgttccagtaactgctttatcagcaataacaataactaacacttattgagcttttgcatgtgccaggtattgctttgagcacattttaggcattaactaaatcaatcctcagaactccatgaagtacaagttaattcctgctttatagattatgaaatgaaggcacagaaacttgcccaaggtcacacacctagttgctagctgatggcagagtgggactagaaccaatggtgtgacccagagcccatgtcttatagacagtatgatatactatctataatgctgacattttgattttcatttgcctaactcctctctaatacatgggtttggaactggagacagttcaatgccaacagctgtaatgaactgtaacatagccaactaaagggaaaataaaatggaagaaataacccaatgttcaatgattagttatccatccatgacaaagccaagaacaaatttattttctaaagcctatgaagagccaaactagttgtctcaaaatccatttcctaaagctcttagcgtccaaactcatgacacttcactcttgtaacgtttataacttggcattttaaatcaaccaatgattcttatgctacagatgggttagaaaactccatttgagcatatgattaaagctacaaaccctctctctagaaaaacacgcttggtacacctgagaaatgaagaatggaagaacctaaatgaggtactacaatcaagttatgtgttggggagtgctgggtgaagagattagatagggaagcagggaccagatcatgcagagccttgtatgtcaagacaagaaatttgaacttaaaagtgtaatggagagccacaggaaggatggctaattgaaaggaggaaggaaagcagggggagagggtcagatggaaatgtttaagtagggttatac

SEQ ID NO: 204048 - DNA, 1000 bp, Homo Sapiens; identical to SEQ ID NO: 115021

SEQ ID NO: 204049 - DNA, 1000 bp, Homo Sapiens
ggtaaaagagcgagactccgtctcaaaaactaaataaataaaataaataaaaaactttttctgaccaaatggacacctgttggttttgcctactcagcacccatttccttgttgttgttgttgttgttttaatgcaaatattttcctttagaaaccacctctcacccaccctcagactaaccacattggctgggactgatcccacttatccctattttcctatgggccctgacagcagcctggccattcagagcagtccatgcctcaggccagacttgggctcaagaattggcatagctttgtgtatatggagccaagacgtactttgaaaagtacaacgttgtttaataagtatttaagtgcccttttcatctgccaatcaatttaaaataaggtattgaactactagtaaagtctaaattaacgtcataatattaaaaataaaacgaatatgatattcaaaaatatatcaatgtcttgggagggttttaaacaagcgttttagaaatactttagaaacaattatctgggccagacagatatagtgctttatggactgagttgtaggtttatgatccttacattatccaaagcacctgataaatcacagggctgtttcggctctttccaatggtcactgaaaactttgagtagatataattatcaatgttatgcacattttctacatattgaaagcactggaagctcttcctacataaagtatcaaaatatgaaatagtttgaaaaatgtgtcaggcttcattttatttgataaaatgctgtatttaaatataattaaaataaaaagtcaaaaccacattaaaactgtgtcaatatttcagcaaaaggtgattttttttcctcaaaactcagaaatctatcccatctcaactgatgttccacgggctatacagtatatttcctgtatgtaaacaagtaaaaataacaccagcacttctccagggcttctgtgtcaatatgttatcagaaaatatcacct

SEQ ID NO: 204050 - DNA, 1000 bp, Homo Sapiens
ctataaagaactacctatgacaggttaatttatgaagaaaagaggtttaattgactcatagttccacaggctatacaggaagcatggctgggaggcctcaagaaacttacaatcatggcagaaggtgcaggggaagaaagcatgtcttaccatggtggagcaggggaaagagagaaagagggagaagggggaagtgctacatactttcaaacaaccagatctcatgagaagtcactcactatcatgagaacagtaagggggaagtccatccccatgattcaatcacctcccaccaggtctattcttcaacacctagggtttacaatttgacatgagatttaggtggggacacagagccaaaccgtatcagagtcttttccccctaagtatgtaagtaatccactctcaatattgaaaactttttttaaaaaaaagtaaaaacaaaaaactaccaaagctttttttaacttctgacttcttacatcttttgctcctgtttaatgagttccctatcacctaaaaacaacgactaaaatttaagcaaatattctttcaatgtttttttgcccacagcgtttgcagtggtgactgaggcctgttttcctcataaatccccgatccccatgccatgtaaacagatgacaccccaaagtctggagaataggagttaaactctgggcacttacagtcccaagatgtgaggtcttggtctactcagaaagatgagaaatacaagatcagcctgaaccagttcttcccatccccagagatggaattaaaggatgtctggacaaagaatagggagacaaagagcacaggtgtgttgctggggtccctgagtataccccactttggaagccaggactaggcagagggtgagatcatagaatcccatgatcagaggacagagcccagcaaagtgtctgaccccagaatttgcatcagacatgcttataattgaattatacaagaaacagaatgggctccctgcagtgggagc

SEQ ID NO: 204051 - DNA, 1000 bp, Homo Sapiens
ttagccgggtgcggtggcgggcacctgtagtcccagctactcgggaggctgaggcaggagaatggcgtgaacccaggaagcggagcttgcagtgagccgagattgcgccaccgcagtccgcagtccggcctgggcgacagagcgagactccgtctcaaaaaaaaaaaaaaaaaaaaaaattatctttatttgcatatgatataattgcatgcctaaaaatctttaaaattccagtgaaatgcattagaattgataagatggtttcttaagtttctagatgaaagaaaaatatacaaaaatttgtaggttttgtttacatcaataattataagtagtaagttaaaatgtaagaaggaaaagtatcccattcatggtagtgataaaaatctgtaaaatgtttaggaataaatttatcaagaaacatacagggcctctgtgaagaacatagtttaattttattctgaaggacactaacaaatactgaagaaataaacctgcagtgttcctggatggaatgatttaacaataaggaatgaaaattttctaaattaataaatgtttagtgctatttcaatcaaaattctattttttaatttttggaactaagaaacattatcttaaaatgtatttggaataataattgtctgagaggagccaagaaaattttgaaaaatactttgtgtaacaacttgactttccaaatattaaaatatgtcctctaagctacagtgataaaagcagtatattggtcttggaactaatacatgtatttatatgtatatctgagaatatatttatatttatatgtttatataaaatattttaatttttattttcattgtatcagtatttatatataggatagtgtagaaacatcaatttatatatattatagtaaatgacaaatatataatctgaatgtaatgggaaatgatgatttatatataatatagacataatttgccatctgtctggaagaaaacaaatgtagacgtcgact

SEQ ID NO: 204052 - DNA, 1000 bp, Homo Sapiens; identical to SEQ ID NO: 115022

SEQ ID NO: 204053 - DNA, 1000 bp, Homo Sapiens; identical to SEQ ID NO: 115023

SEQ ID NO: 204054 - DNA, 1000 bp, Homo Sapiens
tgggggcagagcttggtctgaacccaagcacaacacccagaggtccagtaatgatcagtccccttctgaagagggaagagttggggcatgtggggagggacggggaggatggcaagatgactcctacagatccatggtggatgcttgtgtggacagaggagcctctgaccaagaacaggaaccccatcatctcccatgggcttttacatttctccccacttctactctctcacacacagcctggtctctgtaaagcagccaccttgatcctgcaatgcacgcacacacacacacacacacacacacacacacacacaatatcattggaagccctgatcaaactctccattgcctccctgtatcatgcaaggtgaaatccgaagtcctcaccatggccatgagccctgtgttctccagcaccagctcctgtagggtagatcccctgcccctgccaccttcctgctcacacacccagcgctggcttcctgcattttgtgcaggcacactcagcacaagcgcacactcttccctcaggcaccccaggggccaccctcccactgccatcactggttatgcagacaccttcttttcggagagcctttccctgacaaacccccacaccaatagcattctccaccctaccagtgtgtatccgctgagctttattttcactatattgatttataaatgtatgtaattatttacgggcttatcttcttagatgaaagctgagattttgtctttctgttcacttctgcactcaccacacctagaataatgcttagcgtatagtaaatgctcaatgaatatctgctgaattatgaaagagactagatcaaaaaaaaaaaaaaagtgttgcatgaggcaaggcacagagacccttagtgacatctcctgcatttcacaccttgggagacatagaattgtgatagaaaaaaaaaaaaaacccagatggaagggaatttaaaaaaaaaacacttcttagatgtcaaatcagctt

SEQ ID NO: 204055 - DNA, 1000 bp, Homo Sapiens; identical to SEQ ID NO: 115024

SEQ ID NO: 204056 - DNA, 1000 bp, Homo Sapiens
aaaggcagctcacacaggatcagagcataggtattcaaggtcatgtttaaaagataaaaatagcttaatgccagtgagatcttatcttcatgaatcaaaagtacggcatacaactaaacatacaaacaaaaacagaagaatgtgccactaacgagcagggttggctggccacaggagtttacaaaatgccatcacggggatcagtgctagtcgggcctgctgtcagtgagggaaaggggacccagatgggaagcaggggtctcctggccagggaggctgtgattagagacagaagcacctcatataagggacagaatgctcaaggttctggtcagaacaatcacatgtgtgtgtgtatgcgtgtgcgtgtgtgtgtgtgtatgtgtgtgtgttgggggtgtataggtaatatctccagtgattctcaaatgtcattccatataagagttattgagaaagccagactttttaaaaaaaaatgcaaatttccaggccttacctccaacggggcaggtgttcttgggggttgaggtgaagctaaggtcggtggtccagaccccacttgctcccctcccagtggtctctgggcttggggaccgtgagactgtcctctttttgcctctggtgggctgagaagtcagatctcagcctggaagagtgagaagcagctctgcattgtgacttctagggggcatcccctgttgtctatgacagccttacctagggggtgggcccaggccacccctccctacacacccagccctaggtgcctctgcctgaaggtcacccgctgtgagatggtctgtgagccccctgtaccctcttcttttgcttccattgttgataaatacataaaaacacagccatgtgtcaacaaaaaaagtgaaacgctataaaatatttgaagaattttattctgagccaaatctgagtgaccatggcccatgacacagccctcaggaggtcctgagaacatatgtccaaggtggttggggtgcag

SEQ ID NO: 204057 - DNA, 1000 bp, Homo Sapiens
ctcccactggccccagaggtaacaactgctgtgtcaccctttgtcgtccacagttgagcttttcttgccttagactctgtataaatggaatcatgtaggatgcactctttctgcatctggctgcttttgctcagcgtaatggttttgaaacccatccaggctgcatgtagcagcagtccatgccttttgattgctgagaagtatttcattgtatgaatacaccatttgttactcactttcctgctgatgggcacctgggcttttttccatttttagctactgtgaataaggctgctctgaacattctttacaagtctttttgtggacatgttttcgtttctcttgggtaagtgctgaggaatggaatgctgggtcatagggtaggtgtatgtttagttttataagcagctgccagacgcttttctagagtggttgtacactcacactcccaccagagcctgtgagagttctcctggccctcagctttgccaacacatggcctgccgtctcctcagcctcggccgtctggtaatcatgaaatggtatctcacggtggtactcatttccgttgccaccaaaagagcatttacatgtgcttactgtccatttgtgtttcagcgtcagtgaaattcatttttcatgaggctttttgtctttttattattgagctctaagagttctttgtcctagagtccagtctttggttggatatgtgttttacagatgtttttcccagactgtgacttgcctgttcattttctttctttttttttttttttgagatagagtcttgctctgtcgccaggctggagtgcagtggtgcgatcttggctcactgcaagcaacacctcctgggttcaagcgattcttctgcctcagccttctgagtagccgggactacaggcacccgccaccgtgcccggctaatttttttgtatttttagtagagatggggtttcaccgtgttagcaggatggtctcgatctcttgacctcgtgat

SEQ ID NO: 204058 - DNA, 1000 bp, Homo Sapiens
ccgagatccccacgtctccagtcggaccctgcttcccggagcgccgcccccgcctgctgcccggtgtcacccgcctcgtgccacccccgtggccccggccgcccctgaggctccccaggtggggggcatgtggccgcctccctgttttcgctgtgggtgatcctgtgacttcatccgccccaaactcgccggctccttggcagcaacttgatttgtcttttgtggggcaggtgctctcttcccccacgtgggtcctgctctctgtggcctccctcgaggtcacctgcaggggcctctgtaggttgcattgagaggggcctgtgggtcctgccccccatccgacactgagcgttgtaggactcacatcggggagcccctgccacgtttaggcctcacagcagccctgggggtggacgggtcccacaggttggccacagccccccagtgcctccctgtgagccatcctgaccgccagaaggcccccggtgacaccagcacagtctccctctgggttcccacacccaggccacagggcactcaggggcaggctcggcagggagtctagtccaggaattggtaccgacttttcctggcttctcgaaggttcagctctggccagggtcaggcccaggaggcagagcaaaacccaaagctccctgagacccccaccttttctgacggggcccccggggacctcggggtatggaacgcttgaccctcgcctctgcctcttttgagctgcagtctggggcaggtgtgcgcctccccgctcaacccaacaagaggctgatctaagccccggccccatgcggggctgcatccctgcagcacggaccagatgcagtcctggctgtgcccggcacctcccatctcgcagctgagggtaaccagggtggtgtggggcttgtcccagggctggcggttgctgaggagaagggacacacgtgctgactgggaaatgcaggcccggctctgacggcgaggtccgggttgcggtttc

SEQ ID NO: 204059 - DNA, 1000 bp, Homo Sapiens; identical to SEQ ID NO: 115025

SEQ ID NO: 204060 - DNA, 1000 bp, Homo Sapiens; identical to SEQ ID NO: 115026

SEQ ID NO: 204061 - DNA, 1000 bp, Homo Sapiens
tagcagggtaactttttgttgattctgttttgttggttctgttgggtaagaggagtgcactgctttagagtttctgtaacattagggtaatcgaaatgcgaatgtgtcttgtctgttcatcaggcatgggccttgtgcattataactgcatttaaccagctgttttcctttcccttctgtcttggcatgctctctttcctttcctggacatcaggagcaaaagcgtatagatggcaccacccgtgaggtgaaaaaggttagaaaagccagaaacaggcgccaggagtggaatatgatggcatatgacaaagagcttagacccgacaacaggttgtctcagagtgtgtaccatggagcgtcttccgagggatccctgtccccagatactaggtgtgtgtgtgtcactgctccctcagccctgatgcttgggcaactgggtactacctggttttattatcatttgaaatgcatcaatagcttcggggtttatatggcccttgatgtcttaagattttccttaaaaattgtttatctgtattttgattttgaaataatacttgaagacagtgttattttacattgggttcctttgattttagaaaatctctctgacttaaaatgtattgttgagttcatctagatgtagtgttttaacactgattctgaatttggggtaactgcttatgacttaagtttttactttaataatcatttaattctttctcttagcatggaatgttgaatttcctttgccacttggtatctaaaaatgattggcaggtggtaaagtaactaaggagtaccttcattgttcctttagtaaccctttgaaaaaatgatgaacaaaagagagatttacttcttatttcagataacttatatattctgatttcaggagaagaattctattggcgtttacttaaaaatttattagcagttaagtaaaaatatttcttgcaggcgtgaatgatgtggtcattaagtcacacttgtcaccaaa

SEQ ID NO: 204062 - DNA, 1000 bp, Homo Sapiens
gaacaaaaataaattatcagaaaaataaaagtaagatgaagtacaaaagttctgtggcaaagatgatgatagtaaagaatatatttttatgactcatggtagctttaacattgttcttaaaattctgagtaatttaagggttcacatttgaagaatctggtgcattactgataacattttattgcaagtaaatgcattttaaaatttgctattggttttgtattagattattctcaacctacttcattatcaagctatactattttatttatgcagtttgatgatcttatggcagaggaggaagctgtatcttcaaaatgtgtcaatttgtctaaagacaatcaagttatccaacaggagttattatctatgaaaaaagtacaacaagaatgtgaaaaacttgaggagaatcaaaagatgttggaagaagaaatattaaatcttaagacacatatggaaaacagtatggtagaacttagtaaactacaagaatataaatcagagctagatgaaagggcaatgcaggcagtagaaaaattaaaagaaatccatttacaggttacttgtttaaatcaggtaagtttacctgtaatgtgctttcatttagttcactgcaaattatattttggagagagatatatatatatatagtgtttcctctgcctctcttgtagcaatctgctttgtagagttgtagaaaaaaatggcatctgttttttcttttaaatatttaaatttccattattgttataagaaaatcaatctttcagagtaatgattctcattatggagtcatttgatgattaagaccagttggcataggaaaaaattgtgatttagaaattatgtgatacttttgaattggtcttaagctacattgttcattgatcactttttcaaattatgaatggattctattactttttatatgaccagattatattaatactaacataattatgatttcaaatttttataaatcagacttaattctgaattc

SEQ ID NO: 204063 - DNA, 1000 bp, Homo Sapiens
catttgaacttactgttatataagctatttagcatttattctaagagcaaaatacagttttggtaatcattgtactaaaagacatacaattgctatagcacagaagaaaaatgcaaaatatagtgaaaacatggctgctcaaatatttgttgatatcatcatggaactattgtcataggtctttcaaaagtgcatgagggcagggcacggtggctcctgcctgtaatcccagcactttgggagcctgaggtcagtggattgcttgagccctggggatcaaggttgcagtgagctgtgttttgcaccactgcactccagcctgggcaacagagtgagaccctgtctcacaaaaaaaaaaaagaaagaaagaaagaaaagaaaagagaaaaagaaaacaaaataaaaagtttatgagtgggttctaactctgggggttcaagatcagtctggacaacatggcaaaatcctgtctttactaaaaacacaaaaattagcctggtgtggtggcacacgcctgtagtcccagctacttgggatactgaggtgggagaatcacttgaggccaggaagtcaaggctgcagtgagctgtgatagtgccatggcactctgggagtgagataagaatgcatgtatatgtatctgtatctgtatctgtatctgtatatgtatatgtatatgtatatgtatatgtatatgtatatgtgtgtatatatatgtgtgcatatacatgaaatgtatgcatcataagcttctgaatatattatgaaactatttggaataaattttaggaaactgcaagctgtatttgtactagtatctcacacacatacacatatatacagatattcatgtgttcagaaagattatatctataatgtatgtttgtgacacagacagcatgtcttactcaatactttattccagctcctagagatattcttgctaaatactagacttttagtaaattaatgaacccttcatgagtgtttctctgaattc

SEQ ID NO: 204064 - DNA, 1000 bp, Homo Sapiens
caatgcatcccttttggcaccttcctcacaaaactaaagctgccttttctgaattgctactccatggaagacactgtgcagcaggaagccaaacatttgttcactagctgggaaacagaaaagaatccaatggattcagggagagttactaaaaacaaatgaggagcctctcacttgaagcaacatagaaaaaggcttgctaagattaaagaaatgtgctggttgaactctcagggtaatatggcttggctgtgtccccacccaaatctcacctcgaattataatccccataatccccatgtgtcatgggcggaaccaggtggagatgactggatcatgggggtggtttcccctatgctgttcttgtgatagtgagtgagttctcatgagatatgatggttttataagcatctggcatttcccctgcttgcactcaactccctcctgccacctagtgaaggtgcctgcttctcctttgccttctgccatgattgtaagttttctgaggcttccccagcaatgtagatctgtgagtcaattaaacctctttcctttaaaattaactagtcttgggtatttcttcatagcactgacagaacagactaatacacagggcagccttcccacctatgtgatagcatagtgactatcattcctctcctgcaggggctccctgtctgcagctacctaaatctgggagagcttaagggagctactagaaataaacatgaagcatcagaggtgctaggctggctaaggctcctctttaaattgttaaccttttaacagcagtcaatagagtgtaaaatcaggattttagcagcttctaccaactcaaatcccaagatacttcaactccacattcctggaggcatgagttgagctctgtaaaagattgccttttccttctctgttatttttggctctatctctatggttctgccaaatggcttccacttcaaacagccttgtttctaactatgagactggctttaaaatc

SEQ ID NO: 204065 - DNA, 1000 bp, Homo Sapiens
ttcacaaattatggtttatttttcttacagaaccagaaattcagaagcaatcccaccatgatgagaacagctgcacaaggaaatcacaaaggatccaggcttcttctaacttctggctcttccacctttttagcatgtgacttttgccctcattggcacaagatgactgcttaacccccagtcactgaatctttcttccagggaaggggaaaggcaaaagactaaaggtaaagatacgtgcctactgaaccttccccttttttcaggaaaagaatagcattcctggacttacatcccactggcaagaattctgttactctgcaagaaagccttggaaatctagttttacagggtttgtttgtttgtttgtttgtttttgagacagggtctcattctgttgcccaggctggaatgcagtggtgtgatcccatctcactgcaacctctacctcccatgctcaagcaatcctcccacctcagcctcccgagtagctgggactacaggcccccaccactatgccggactaatttttgtatttttagtagaaatgaggttttgccatgttgcccaggctgttctcaaactcctgagttcaagtgatcctgcctaggcctctcaaagtgctgggattacaggcgtgagccactgcgtcagcctactctgttccagtattgccccaaacaaaatctgagtttttagtaaggaacatggaggtgaatggcactgggttgtggggacatttagcagtttctgccatgaggtatggagaagaaaaaccaaaaatgctctttctctcttaaactgtaatatctctcctactcttaggacacaattaaagcagtatgtgccatcattgaatcctatgaggggaggtaaaaccacctacaaggtaaacaagcttaaattgctaaaaaggagttctagactgaaaataagcaagaacttcttaacagagaaaaccaacaaacacaaactcaaccagccattagcaattgaattc

SEQ ID NO: 204066 - DNA, 1000 bp, Homo Sapiens
aattagctgtgtgtggtggcaggcacctataatctcagctacgtgggaggctgagacagagaatctattgaaccctggaggtgaaggttgcagtgagccaagactgtgccactgcactccagcctgggtgacacagtgagactctgtctcaaaaataaataaacaaataaaaacctcaaaactggagttattttatgatgacattttcaaggagcagctctgacaaaccaagatcatttgtaatagtgataattaggggaatgacccctgagaaggaatatgggtagttagtaatgaacatacgttccactcaggctttggagaaagtgttataaggaagtcaagattggagaagcatcattaagtaattggagaagcaggcaagaagtaattgcaggctaggctgtcattttagcgaatcgaagccttcctacctaggaaccacttcccaagtagttactcattttctacatttccctaaaatctgacaaccctttccacttcaaggacataaaccttaaaatatcattctcttttggacacatgatctcctgagagttggtctggtaaaaaggagccagctggagggtgattggctcctcaggttgggtgtaagagagggatgagaggagatggttggaattctcaaaatgaacttcatctattttttctaattatgtgtttcgcttacacaggctgaagcgtgtttttagttcttagaaactctattctctaatgagaattagcatcttctcatcggggaaccaaatagtaaaattgcacccaagtgcctgcctggtggggaaggaattttaaggtggagttcagctctctgggcattgtctggataatgcttttctttctcttctctgtggacacgcaggcggccccggtgactgagatggcatcgtctctaaagatctggggcacactcttggccctactttgcatcctatgcacactgcttgtacagagcaaagaagtttcttggagagaattc

SEQ ID NO: 204067 - DNA, 1000 bp, Homo Sapiens
tgttaacattttgggccagataattcttggttgtgggcgctgtctagtacattataagacatttagcagcatccttggacttaacccactagatgtcagtaacaacctcccaccatcacaagttatgataatcaaaaatgtctccagacattgccaaatgtcctgtgtgggaccaaaatagctctccattgagacttcggagtgcaatggcttctgaacaatggcctataaccatttaggtattccataactctcaaaggcctaaaacccaggttctgtgaataaattcactaatgtgtaaaaaagcataacatcttaaaaagtaaaacacaatttttgatggttgtgaagggctatttaaaaatttttaaagatttaatacctctaaatacctagattttttaatacctagaaatatttaatactttttctcatataaaagatgattgaagattgtttttcaatctcaaataaaatatactgttccccagacagtgtaagatattttagaataagaattaattaagaattatgatactcttattttcaggtggtaatttagtatcaacaacaggccttttctttagctataaacagaaaaatgtgggtgtggacataatgaagcaattgtacagtttgaaatagtgaataactcacatccctcatagagaaagggtcatgctaccttcacaacgcaggccaagaaaattcccatgatctaagccacatagaagagtttcagattccacaaaatactttgagccccctcctttattctcccatcccactattctctgtttttgaatgatcaaaaagtgaagtttccttcacttttgggctaatgcccaaatgccctttgggaaagttcaacttctcttttatttgaaaattaaaattcttatctgatgaacttcaaaatctccatccaaagatgaatacagaggttatgagttgctctagctctctaagtgctacataaaacagacgaagaatagaattc

SEQ ID NO: 204068 - DNA, 1000 bp, Homo Sapiens
aatttgaataacagaagatttctcatatgtaaccatggatgctagaagcagcatatttttcaagtgctgaaagaaaagaacctcaattttaaatctatatccagtgaatatatcctttaggaataaagatggaagaaagatagtctctgacaagaaacaataagtgaatttattgctagcagactaaatcttaaagaatggctaaagtaaatttttttaaaacataaataaaaatgacaggagagtagagtctggaaattcagaaagaaaggaaaaacaacataatgggtaaagttaaatataatgtacttgcattctcttatcaggtataaattcatatcatatcactgaagaaaatattataacatctgatatggtgctcaacatatttagaggaaggcaagaaaagataaacaggaatgagcgagggaacaacagaaaaaaaacaaatgaaatgtcagattaagtcttaacatttgaataattaccttaatatagtctaaatataccaattaaaaaacagatatttacaaattggatgcaaaaacatgagtcacgtatatgctatgaacaagaagttcacttcaaaataacatacaagtagtttaaaagtaaaaatgactgaaaaagaaaaccaaactctaattaacacaaaatcaggggtggctagatttttgatggaattaattttagagaacagaaaattactagagataaagagggatattatatctattgataaaagaagggataagaatcctgaaagtgtatgtaccaacactcagaatgttattatacatgaaaactatttgataatgctggaaagataaaaaatagacaaacacagaattagagttaacacttaatttcagaaactgatagagctattaaaaagaaaattaacatgaaaacagatctgaatagcacaatcaaccaacaacttataattggcatatatagaacaccacacatttttttttcaagtgtccaaggagaattc

SEQ ID NO: 204069 - DNA, 1000 bp, Homo Sapiens
cccactgagatgtggattctgtagcccctgtggagccatcacttggctggggaatgaaaccgaaccaagagaggttttgcttctagtctccagagtttgctgcagtaggaggaagagaacgctgcagggggcggggggcggggcacagcgtggaactcagagagaagcctggagcagacagtgtaagtgtgcctggccctgcttcaagcccctggcattcactctacacttgaggggctgctactgccaccatgtgtgactcaagccacagatgccagaaagttcatacctgcaaacagcactcaatcagagagaaggcggtggatacataccccagagcctgcacccctgagtcagaataaccctgaagtgtgttcttcagtgactcccagagtactccagtggcactgagttctgtggttctataactgagttccataccagttccacagtaactggtttgatagcacagccctctttgcttccttctcttcctctctcccttccccactctgttctggtgtttcccaggatcacttcccaaataaagtgcttatacttatgcttgtgactgcttgtctcaggtctgctttttggtggacccaaactaaggtaggtccctaaaatatcctgtaagtcaaggagttggagaatgttgcactttttatctgaaccgaccaaaaagggggcgggcggggggaaaggacactcttttgcttcttttgcatttcgacagccaggtacagaatccacaggaataagatgtgtttgactacttagcagctgcaaacttgggccctgctgcttacatttgagagcttttgtccagaaaatgcatcccagtggcaagagcctggccactggagtgagaaaggttaagcttgttatctggctctgtttcataccaattgggtggctttgggcaaatcttcctgagccatctgaaaaagtagtgtggggattcccaccgcccagggcagttgtgagactaagtgaattc

SEQ ID NO: 204070 - DNA, 1000 bp, Homo Sapiens
ttaataaatacttaatgaacttttctgcataattttcatttgatagggcatattatcaatgaccattaaaatgattcaaatctcagatgtccagtggcattcatcagataagtcataagctgtgactgtgatatattctttcttctctgttggttttcttgggtgatttttttatcccattctgatattacatattcaattcttgtacctgggtcttatttttctcatctttcttggtgtttcacttactgtcttcctttatttggctagcagttcctgtcctcattttatttttcctatgggtatagatgaactttctaggcagtgggaaaccatgaaagggaaggctttaactcttttttgtttttttaacttttattttaggttgaggggtacatgtgaaggtttgttatttaggtaagcttgtgccacaggggtttgctgtacagattattttgtcacccaggtagtaagcttagtacccaatagttattttttctgctcctctcactcctcccactctccgccctcagatagaccccagtgtctgttgttctctttgtgcccatgtgttctcatcgtttagctcccacttataagtaagaacatgtgatatttggttttctgttcgtgcattactttgctaaggataatgtcctccatcccttttcctgcaaaggatatgatctcattcttttttgtggctgcataatattccctagtgtataggtatcatattttcttcattcagtccatcactgatgtacatttaggttgattccacatctttgctattgtaaatagtactgcaatgcatgtctgcatgcatgtgtctttatggtagaatgatttatgtttttgacccagcaatccctttactgcatatacacccagagctttaactctttcatggatgacatatcatagtttttgttagtccaataatctgcacccagaaataagaggcaaaaacccatcaaacaaatgggttttttgttta

SEQ ID NO: 204071 - DNA, 1000 bp, Homo Sapiens
aggcttgtcctcataatattcttctctatgttttaattaccatttctttatgttttaatcagcattaaaaataaaagtctgtctcattcaaaacatgaaacaactttccatttttgtttgccattgatttttttgctgtctgttcgtaatcacaaataatgaatatctgctttgtatcattcactccttagtagaataaagagcaatcaaagtctgagttgaaagaaacctaagtaactgactctttagaaagcaccatcttggaagaatgttaacaagaatttgtctgctattatttgtttgaatcatgcagaagagaaagctgaggggaaaacaatgatagatgtgaaacatatgaatataatatgaaaattggaacctccccctcctgagagaagagaatattaaagtgtataaggcactgataggagatgtcaaacctgattctggaaattctttaacttgggattgtaaatggtaatacaatgatctatttgagttacagcagtacaactgacacaggaaagaaagagttgacataagccacttactcactatgtgcccgcttaacctctttacatttcaggtttttttttttttttaatgagaataagttagtagccaccactttttttttttaatgagaataagttagtagccaccacataggtctatgatgtgcattaaataacatagtacacatgaaatactcagcacagtttctgacacagaataggtgcttaataaatctaagctatgggaatggaagcaataagccagagacacgcgtaaagcttcctcagtgttgcctaaattataggtgtgagtcatgttttgtgaaagtacttcatttttcctttgcactcagcacaaggaaccctggtttatgaattttatggcaaaacacaagagaagagagtcccaacatgctgcaaactttttaaagtgaagtgaatgcttccaaggagtttcacatatacgaggtgagggacctgaattc

SEQ ID NO: 204072 - DNA, 1000 bp, Homo Sapiens
caatgatcagaaactagtatctcaggagatctaaacatggaaggtaagggaacgatggccaggagaggtgggagaagaaaaggtatagcatgccaagcgctgttcagttttgtggaggtaggtccggaactgagtagttctaggtaacagtaaaaaattatgtttatatatgtgtgtaaaaaattatatatcactgtaaaaataagaatagaataagagaccttcaaactactatagaacaaaagaaagaaacaaaaatagcccagccaataaaaagaagggatacaagtagaatatgcacagatgaaaggcaaagataaagtataaacatcagtaatagttcccaatacctctaattacaataaccataaatgcatcaaacctgccaattaaaagtcaaagcccttcacaggttaaaaatatgtatgggttaaacaaagtgatgaaaagaagacaaaggaaatactagatatataaaacatattctatatcagacaaatgctagcaaaagaaaacaggggtttaatatggggaaatatcttgtttacaatagcaagaacgaaaaaacataaaatgaatttaatgagaaatgtacaaaatcaaatagaagaaaactttaatgaaaggtgagtgaataaaagaaaacctgcttatgtggaaagacatgtcatgctttctggattggaagattcaatagaaaacatgccaattcttccccaaattaatctacaatttgactgtgatgacaattaagttccaacagcacttttcccccagaacatgggaaattaattctaaagtatatgtaataaaagatgatccttaagaacacaaagaaatttctgaagaagataaaaaggaactggtgaaaataatgtgggaacaggcgagtcatacaaggaattagaagacagtccaggagaaagagcacacatgtccatgggaaccattgaagaaaggatgagccataaggtgatgctgtgattagctagtacattaa

SEQ ID NO: 204073 - DNA, 1000 bp, Homo Sapiens
tgtctcccatgtactgggcattattctaggtgtacatatgtatgtatgtgtatatccatatctgtttaattcttctaccaacccagtgaggtgggtgtttcagacaaggtaactggagagcaggtttcttcctctcttttttctttttttagcatagattgattacatttttaccttttgattgattgactgcgctgtaatggtaatacctttgccctgagctgccacttagggtttgatctttgccttttctctctgaccgcagagtggaccgatcactttcccttaagcagaacttacaggccaccatcactctgctaaaactagaatgtgcaaagctgcaggagactggagagtgttcggcccagcctctcattttacgaaggaggaaactgaggcccaggagacagggaattgtctagggtctaacagccagtgagaggcagagtaggtcccaagccctcatctgcttttcctgcccttgtcccaccgcaccaagttgcctgtcttccatgtcatatggagagtgataaagggacaggactacacctggaattacccttgggcttcttgctgaactaagtaaatttggcttcactctttgtgactcaaggtataggaaggatgagccagaaggaatgctgtgttttttcacctttttttccctcgagagagccggtggctgcccagagtaactgcagcattgcatcccctactttttcagaatctgacttggccttctccccagctgctcttaagcctcgactgtattcttctttatctggcaacgccaaatgcatatattaagtttttgagtgtgctttatttttttatttttagagagagggtctcactctgtctcccaggctggagtgcagtggcatgatcgtggctcaccaaagccttgaagtcctgggctcaagtgatcctcccacctcagcctctcaagtagctaggaccacaggcgtgcagcatgcccagcttatttttttttagtaga

SEQ ID NO: 204074 - DNA, 1000 bp, Homo Sapiens
tagaaaccgcagggaaagctgtctgctcatttagaatgttggagggctctgtttgaagtttgcatttctctttgaacagatgctccattgcaaaataaaaggtttgaagatttcaacaatgttgccctaaaagctaattttatttcaataaagtaacattcaagttctgttgggctttgttgctgttggtttagcaatgggattttttttcccccatcacagctttggaaacatgatgagcaaggagaagcgagaggctgtcagtaaagaggacctggccagagcgactttgatcaccatcaccaacaacattggctcaatagcaagaatgtgtgcccttaatgaagtaaggggacatggatttctttaattgctctaaggaaaatactgaacttaagtgggccccatcacgtctgttttctcagaacagtgcctaaatgtagtcatttggggtggggtttgttttagcacgaagttaaaactcttcaaatacagattaatcttcttttttttttttttaaactgaagataaacattgctacttgtctagaggtaaaatgacatcttttgaggagaaagtagaggaagagtggaaggtagccagtgttccagatattggggactgttgggggtgatgatggataacgatgctgaatgtagactccacactcactgctgagctctagaggccctagggaggaatccagaggaagtcacggaagctgggagaagactgagcaggccgaggggtgccctccttggctcccccacctcagcagagctgcgtctttgtgctttcagcttctttacagtgctgccttgtagcattcaggtcaagcagcattgtacagggctatgaaagaaccaagaatgggctgcccttgggaaaagaggatctaggatccagttggtgcagcttatggcttgtccctgtgtgtatagttgttaaattattcttttatttttatttttaagaagttattctttagataataatagg

SEQ ID NO: 204075 - DNA, 1000 bp, Homo Sapiens
acaggagaaatgggagataacttgttttccttttctagtatgtatataaattatttcatttaaacttaaaaattttaagtgtaccatggtttaagaaggaaaatctctagaactgttgtcactaaaagtactgtatacttcaaaatatgaaaaacgcagacaaagtgagttaaaatgaatttgctgaaagactaagatgaaggtagtagtcaaagctagaaaataaaaatagagtctgctgaaataaggagaggaaaggattagtaaatataagaacagaaatcagagaaagagaaaccaacaaaccaagcggacaaaccaaaatgaaagacgattctttaaaatgactgattaactcatgggaaaatctgacatgaaaattaattagctgataaactaaaaattgatacatttgacttaaagttaaaaaattgagtactacagaagacatgctagacaaactaaatataggagacatattgagaggtgaagggagcaggacttcctgggttgagtggggacttggagaacttttctgtagctagctagaagtttgtaaaatgcaccaatcagtgctccgtaaaaatgcaccaatcagtgctcagtagctagctagaggtttgtaaactggaccaatcatcaccctgtaaaatggaccaatcagcactctgtaaaatggaccaatcagcaggacatgggcgtggaaaataagggaataaaagctcggccaccccagccagtagttgtaatccagtccccttccaccctctggactgtttgttcttttgctcctcacaataaattttgctgctgctctctctttgggtcagtgccacctttaagagttgtaacactcaccatgaaggtccacggcttcattcttgaagtcagtgagatcacgaacccacccaaaggaaccaactccggatgcaatatcgagaaatagatttgcaacagcaacaataagcaaaagcttggtataaaaagatctgaagaattc

SEQ ID NO: 204076 - DNA, 1000 bp, Homo Sapiens
taggtagaacaagtgtcctccacccagctcagctccggagccttcctcgaaaggcaagaggtcaattcatcttctgcctcagcagaatcgtcccttcctttacaaggggactttgctccatgatctgacagacctgggaagtgtgtggaggttttacacgatgactcagtgcacatcagagtcagagacaggacggccgaacactgattccagagataggcatgtgggccccgcccgggaaggagagctgcctgggagatggggagctgcaagagagcacccagaggggtaaatttgcacaaggccactgcgtacactggtacgtgcttccttgaaaatgtgacattttcaggcagggcgcggtggctcaaggccgggcacggtggctcacgcctataatcccagcactttgggaggccaaggcggatggatcacgaggtcagaagttcaagaccagcctggccaacatggtgaaaccccatctctactaaaaatacaaaaattagcggggcgtggtggtgcatgcctgtaatcccagctacttgggaggctgaagcaggagaatcgcttgaactcaggaggtggaggttgcagggagccgagaccgtgccactgcactccagcctggcaacagagtgagactcagtctcaaaaaaaaaaaaaaaaagaaaatgtgacattagttttcattgctctgaaagaaaagcgagactgtttcaacagttgggtaaattactgtgcttccagtaacaaagacaggttttcagatgcaaagtgacatgtacaactactgtggagaaatgtccatcagacggagtgctaagtggggacagtgtgccaccactgagccaagaatggaggagatgaatgtgtgtgtgatatggaaaataaatggaaggagaattcaaaacctttcaaatttgttttatataaggagtagagaagaataatgaaaacaagcacaaaagttagactttttttttcttttttgagacaggct

SEQ ID NO: 204077 - DNA, 1000 bp, Homo Sapiens
cttagaagtacaacagtcctattggattagggccccactctgtgaccttatttatttccgtaaaggccttatctgcaaatacagttgtattgggacttagaacaatatatggatttgggttaggggggacacaattcagttcattatattctgccatctggcccccctcaaatttatgtcccttcacttcaaaaatacattcaccccatctcaacagttctgaacatctcaattcattccggcatcaactccaagttcagagtctcatctaaatagcatccaactcaggtataggggagacttgaggtatgatccatcctgaggcataattcctcccagctgtgatgggatggtacaggcacaggatagacattaccattccaaaagggagaaaccagaagaaagagcttctaagcaagtccaaaacctagccaggcaaatcccattacatcttaaggctagagaatcatcctctttggctccacgctctgccctccaggccctctagggtagtggctttgtccctgagggctgtggtcagaggcagctgggtttgctgtaactaatagaggtggccctaccctgtgaaatcaaggagtaggcaggccttccctgagcttatatactctgtgtctcggtggcagtggcagcactgggggtctctaaattgcccttgggatcatccttccttttcttgaaggacaaagaatgtttgcatccaggtagctctgctgtcagaagtccaaaagccttactttattttattccatgtccatcccctttagtgcaagatgccagtgtctctgctggtataatcccatctcttgtccttgcttctgctgagatggctgattaagtctaggtaatctctttagagggggagtgtccagccacacccttgacttttctctctgtaacactcttattttttgcaatatggatagcctgagaattttctgactctagttcctgattccctgttgcttaacaatttcttctt

SEQ ID NO: 204078 - DNA, 1000 bp, Homo Sapiens
ttggaaagtgtcctcccagtttctattggcaagtcttcatttgagtaaattccaatcttaatctacttcaaatatatattgaatcattatctgcttcaaaaatataatgaaaactggtcaggcatggtggctcatacttgtaatcccagcactttgggaggccgaggagggcagatcacctgaggtcaagaatttgagaccagcctgattagctgggcatggtggtgcgtgcctgtagtcccagctactcaggaggctgaggcaagagaatcgcctgaaccgaggaggtggaggttgcagtgagcctagatcgcaccactgcactccagcctgggtgacagagcaaggctccttttcaaaacaaacaaaaatatatatatatataaaacgaaaaccttcaaatgcataaaaagcgtatgaagaaaaatacaacacacaccctggtacccacccctcagctggttaacggccttcatttttctcagaagtcagcacctgttagaacctgacaggcagcctggcccgtctctccctgtagtgtgttcatccggtcctggtgtgcgtgtgtgtcaccctgtgttaggccaccagcttcaagtcagctctttgacctgagttaaaattcaacttcttgatttgatgattgattaaagaattctcagaacatccagtatttatgcaatcttaatgtacacgtggcctctaaggaggaaaaacagtaataaccacatactcctgggtgttatattagatgacagatctttcttacacagctgcatgtttgttctcgacagcgaatcccctgaggtggtactgcaggtggtagatcaggtccccttttacaaaggagaagcagccatggtggatgagtccagaacgtgcagcctcagttttattttctttgatttgggtacttgtctcctatagttctttttttttttttttttgagacggagtgtcactcacactgtcatccaggctggagtgcagtggtgtgatc

SEQ ID NO: 204079 - DNA, 1000 bp, Homo Sapiens
tcaaccaaatgcaatgcatggagcttcctttgatcctgatttgaaaaaaaaaactgtataaacatactttggggggaaacaggggtaatgaaacatggattagtattagatgatattgagaaatcagttattattttgttttggttttgtatgttttgaaagaaatctgtgttgaagcatctgtaggtaaaactgtatgttgtctagaatttgcttttaaatattctagcaacaaagatgtgggaagagagagataaaacctgaagggtgggatgttggctattgatgaaattaagacatgggttacatgaggccatttggctcctttttaaattttgtgactgtttgaaaatgtccacaataaagagttacaaataacgcaagggattaccatgtctcagaagtttggaacaggtttttctggcttccccatatgcaggtgcagtgagcctgacttgcgctttcggttctcacacagcgagtagacctgagtagctgtgccctggcggacacagtcagagctctgctcttttgttctcattctgtcttcctctgcctaggcctggttgtatgcagcaaggtcacacagttcccattctagcctgggaaatatcatcaatccctttttttggcctcagttcaaaactgcctccttcagcacaaataacccagaactcttaactttgtaaaataaaactcatcctttgaattaaatttagcttggatctctgtgattctgttctatcggaagaaccctagagggcagactgtcatctgcacccaacccacagctgtgggaagcagattaggtaacagaacgacataaaagcttaatcaaggggaggcatttttcggataatggaaaattatgcatgcttccaagctgaggtcaattatccagggtaataaaaatattaaaaacgtgagaaagtgagattaagtgttggagcaaggtccctaagagagcaaaataaagaccagagataaagtgcaagaattc

SEQ ID NO: 204080 - DNA, 1000 bp, Homo Sapiens
agccacccgatggagggatctgacactgtggagttccattccagcctggacttcacacaagagaaataaacatctacctgagccagtattactagggttttccaatactgaagctgagctgaatcctaaagaatacacactactttccccaacaagatacataactgccttgcttgctgagaaaaaaattataatcgcaggttcactttcctaaatcaatgtaagtaatagcctggcctggctcttttcaggagatcctatcagatcctgaagcaaaagactattccagtcttaataccagtatatctgggttttctgcccagaggaaagtgcaatcatgacttctaaggaagcaaatggtaatgggtgcagagactgtcaagaaattaggtggtgaaatcaggctgaggtcatctcatctaatgtatatttggtgaccgtgtagacccagagatacacacttcaaagcagccatgtggtatccatatctgtgtgcctactttgggttcacacacctgtgttctctcctagttggtgccacctgtcacatccaagcccatcatcacctcctgtgctcatctctgctgtctcttctccatgccttcactctggccatgcccccagcctcccattccctttcctgcatctactgttctctctccttgtaaaagctttccttgcccaatccagaccacatgggtccttttcttgtcccatctcctatagaagctgttaccagtgccctgactaacccaaggccttcctctgcctgctggagcttaataattattgaatgcatgaataactacacatgacaaataaggcctcaggtgtaagagttcaagctaacaggaaatgctctccaaagcaccctccggaaagcagttttaagagaaagagattcaacctaaatggtcaggaggatgctcttcccaggggtttgtttcaattaaaaatacaggcatctgctgggattaaaaagcaacaatctaaagaattc

SEQ ID NO: 204081 - DNA, 1000 bp, Homo Sapiens
gattccacatctgtgaattcaaccaactgtggataaaaaatattccaaaaaactcaaacagtacaacaataacaaataacacaaataaaaatacaatgtaccaactatttatatagcatttacattgtattaggtattataagtaacctagagatgatttaaagtacatgggaggatgtgcatacgttatatgcaaatacgatgccgttttatatcagggagttgagtatctgcagggagttgagtattggtcctggaaccaatccccggtggatacttagggacaactgtatgtcttgtctctcacctagattgtaaaatccttgggggtgggaaccatgtcttatgtgataacaccttacctatcaggaatagctgtctggcagcatcaccgttctgcaacacaccaatatacaggaaataggcaaccaggaaaaaaaaagactttgaataattaaaatataggttgctgcaaaatctgtggatcttattcctaggagaatctcttaggcctcactcaggaacttactcatgtttagatgtgatttcaaaagtgtggtgtttggtttccaaacaaaatgtaaaaggaggaactatttaataaagtgtgtacatttgtaataatgacagtgatagtgatgtgagaaccaacagcttgatagggagggaggagacaaatatacacaaaactcaaagagtcatctggggtcattgagtgtggtggcccacctccctgcccactgcatgttcttagtcgccctaatgtgccaagaaaaggttgaaataatgtttagtggacgtagtttaggaaggcaagaaaatatcaaatgtagtgattattgtaagtcagtaaaataaaaataccatgctagctagaccaaacattgattttaacctagagatcctaacaaaaccagctggacagaattttgaaatctttattcttttttttttctatatttcctgtgaaataatttatgtgaaaaacatttgaaagcac

SEQ ID NO: 204082 - DNA, 1000 bp, Homo Sapiens
agagaaagagatccacagggccgcttcttctttcccttccagaaggccatgcctctgacagtgtcacttccctgtccccaaaattgtaaaccaaaaactgtgaagggcccaaaattttaccccacttgcaatcttgcaagccagcctgccagccagatatagacaaaagacacaagactcatgggtcagagacaaagactttttaccagcagtgcctcagtgtctctcatcattgcccccacccgtttctgtgaggaggtgatggagctaggtgttagttgcatgcaggggttgtcccatgagagagaaaccgtgaatcttaggagacatggagctctttttatgcggctgctggtatatctgcccatgcttcactccagagatagggggtgacttcctaccctgggatgcagaaatgtctcccaggaaaggaatggaagggttttgtctctgttgtcctggaacacagccaggcagatgggcatcttctgcttcactctccttactttctactctactctcttcttcttcttctattctaaacctggctgtgagtgcctttgctcagagggctgaaatgtggaatctgaattccagggagaattgttttcccacagcaagatgaggacagagctgctggtagcgtggcggccctgacaggagctttgggggagagaactggggcccaggggatgggcttagtggggatgggaagagacgccttggagggtgtgagcacagctcctttctggagttgccataaaggggtgtggagatctgaggtggtaaccagaaggtttttgaaaaaaattatttaaaattatttctgagctgggtggggtggctcacacctatagtcccagctactcaggaggccaaggtgggaggatcacttgagcccagaagtttgagaccagcatgggcaacagagtgaggccctgtctctacagaaagttaaaaaattagccaggcatggtggtgcacctgaggcgggaggatc

SEQ ID NO: 204083 - DNA, 1000 bp, Homo Sapiens
ctgactgggaaagcatgtgaagtggacgactgtggtttgttgtgtgccctctctctcacttgaaggccctatggttttcgttgagtaacctgattctcacgaagagcaggtgagtctggcctggcccggcccatcagaggtttggttccagttcaggcatgtgagccaagctagagtgttgttggcttcatcagaaaagaggcctgttccctcgctggggtcactgcaatgctagtgtgctaagcttttgccaccacttgcagagaagctgcctgagaacagacatgacataaaggaatgcagaggtatttgcaaacctacctaaaacagtttgatcaactaaaacccatgagttgtttttgattaataattgttgccactgaaaggtttaaggtggataaggttaactacgctaacgttgctactggattataataagagcaagtctcaaacaaattctatcatataggcagacagttaataaatattttatttcaagcaagagccagttaaacaaatttgttttattagctttatgaatttcaaaatctctattcttttaggtctgcaatagagtctgacttcacttttttgatctttgctgacaaattacacttccatcttcattcttttcctcccgccctacatgtgagcaagctgatgagaaggcctgggtgctccctgctttgttggggagggagattcaaatcacatgagcctctttgtgtgaactctctccctggcagcagtccctaatcacaataaaaacccaggccagtctcctttctttttttgtgatgattgattttatatcaacttgattgggctaaggaagtccaggtggccaataaaacatttgtgagtgtttgtgagggtgttcctgggggagattatcaattgaaacaatagctgaataaataaaatctcatcaatataggtggccattatctaatccattaagagcctaaatagaacaaaaaggcaactgaagggtgaattc

SEQ ID NO: 204084 - DNA, 1000 bp, Homo Sapiens
cattattatttattatagaaaaaaattaaatgggacaggcagaattcagaagagaactgctaaactcagttatagtcaatgcagacaatggaaaagcaggctattacaaaagcaagtgaggaagctttccttatatttgtgtggaaagatcttcagaatacatggttaagtggaaaataggcaaggtgaggatgaagtgtatagtatgctacccgtactggtattaatatcaatcagatatggaaataaccacttcacagcagtgactctcaaagtgtggtctggggtccatgaggtcaaaactattttcatgataatatttaaaatgcaggctgggcacagtggctcatgcctgtaatcccagcactttgggaggccgaggcgggtggatcacctgaggtgaggagtttgagaccagcctgaccaacatggtgaaaccccatctctgctaaaaatacaaaattagccaggcttggtggcgcatgcttgtaattccagctacttgggaggctgagacaggagaatcgcttgaacctgggaggtggaggttgcagtgagccaagattgtgccattgcactccagcctgggcagcgagagtaaaactccgtctcaaaaaaaagaaagtatttgctcagactaggcaaaaagaacaaatctggaggcatcatgttacctgacttcaaactatactataaggctgcactcaccaaaatagcatggtactagtataaaaataggcacacagaccaatggaacagtatagagaacccagaaataaagccaaatacttacagcctactgatcttcgacaaagcaaacacaatataaagtggggaaaggacacgctattcaacaaatggtgctgggataattggcaagccacatgtagaatgaaactggatcttcatttctcaccttttaccaaaatcaactcaagatggatcaaagacttaaatctaagaccagaaaccataaatactttagaagataacattggaa

SEQ ID NO: 204085 - DNA, 1000 bp, Homo Sapiens
gttcttgaacatttccctggtaaattctgtgtataagatctgactttgaaatttcacctctattgtatgtcgatgactttgaaacctccattttaatatcttggtaggtgcacagtgccaacatatgacaggcactttataataatctcttttcttccctcagttttccaccagccactgaaaagcaccgttagccagacagaggacagctccccagggcccacactctcacctgccttgcttccgttcaggagaagggacatctggaaaggctgtgtcaaggccttgccacaggcaggatgggtgtctctggcctatctaataacagatgtgcttgtggtgacagaataaaatagaatagcagtcaggactttgttcaggctctgccactaactcaccatgggacctgaaaaagcgactttccccctctgtgcttctgttgtcatatttacaaaacattctgggagggttggatctgatgagtaatacaattttagctctagaataggatctattgtacttagagttcaaaagaaatgaagataaacttgccccttgcttctggggagtggctgggcttataagaaaggctggacacaaatttggtgcaggagtgaggttttggggacagggctgcagatacaaggacagagaaggggtagggatggaatgaccagagcacagcttccagggctcctggggcttagccctgtccctgtgggggccattgtgtcactcagggcctcagagggtgagaatgggaaggaatattccacacatgggtgggatgtaggagaaggaaggtggcctagacttgggcctgttggggatagtgaccacactccttcttctttgtctgttttctgggtctcagctctgcaaaggaggagcatgtgtggggatcagaaaagcggggagcagggctgggccaggctggggctgggccaggctgaggctggagaaggggctgaacaagggctgtgttccttccctgacaact

SEQ ID NO: 204086 - DNA, 1000 bp, Homo Sapiens
ttttgttgccactatgagctccacctaattctgagactgacatcccccaagcagcaggcagtgaggcaaggctctggggtggctggcctggccttgccactctgaggccagtattaaaacactgagtggttggtttcattccctacattaccaactttttcttttttcttttatttctttttctttttctttcttttctttttttttttttttgagacggagtcttgctctgtcacccaggctggagtgcagtggcgtgatctcggctcactgcaagctccacctcccgaattcacaccattctcctgcctcagcctcccgagtagctgggactacacgtgcccaccaccaagcctggctaatgttttgtatttttagtagagacaaggtttcaccgtgttagccaggatggtctcgatctcctgacctcgtgatccgcccacctcagcctcacaaagtgctgggattacaggcgtgagccaccgcacctggctttcttttatttatttttctaatctaaattttaaattatttaaaacaggatctctctctgtcacccagggtggagtgcagtggcatgatcatagctcactacagtctccatctcttaggcttaagtgatcctctcgcctcagcctcccgagtagctgggactacaggcatgtgctaccgcactcagctgattttatttagttttgtagagatgggtctcactacattgcccaggctggtctcgagctcctggcctcaagcaagtctcctgcctggccctcccaaagtgctggaaatccgggaatgaaccatcatgctcagctttgctgtcttaatgagagccaatttagccactctggctgaaacccttctcttcatatgacagcccagccatcaaacatcagttggatccaatagttgagtatgtgggcttcttcagtttcctaggcatggctgggtgaccagagaaagagaagtgcccactcaactgtccaccaatttggaattc

SEQ ID NO: 204087 - DNA, 1000 bp, Homo Sapiens
gctggtctcaaactcccgacctcaggtgatctgcacacctcgacctcccaaagtgctgggattacaggcgtgagccactgtgcctggcctctaattgctgtacttttatagtgtgttttgacctctggtccctacttcctgaaacacgcccttttcttggcctccatgacctgacacttatttaatttatttatttatttattggtagggacaaggtctcattatgttgcccagactggtctcaaacttctggattgatgcactccccttgccttgaattcccaaagtgctgggattacaggcatgagccaccatgcctggccccacttgtctattttggttttggaggcagggtctccctctgtcacccaggctggagggcagtggtgcgatcacagctcactgtagcctcaacctcccaggctcaagcaatcctcccacctaagcctcccaaagtgctgggagtacaggcatgagccaccttgcccggccatttgtctatttttctttatcctcctgtgggtactctttagtcttctccatagcttctgtctctctggtcatcccctaaacattagtgtcttcaatatcctagcccattctcattctacaccctccctgggtgatcttattcactaacatgctgatggctcttaaatacatacctttattgcaaatggcattcctaaatatctctattcattatcctatggagatgtcaaattcaatctgtgaaaagctgaactcatcttttctcctactcacctcccaccccaacaaacctggtcttatttcctattttagtgtttcctccatcctttttttttttctttttttctttttttttttttttttgagtcatggtcttgctctgctgcccaggctgaagtgcagtggcatgatcatagctcactgtaagtgtcgaactcctggactcaagcaatcctctgcttcagcctccagaatagccaggacgacagttgtgcaccaccacacctgg

SEQ ID NO: 204088 - DNA, 1000 bp, Homo Sapiens
attacccagttccaaaactgcttccacattttcaggtatctttatagcaacaccccactcattggtaacaattttctccattagtccattttcattgctgtaaaggaacatctgagtctggataatttgcaaagaaaagaggtttattttagctcacagttctgtgggctgtataggaagtgtggtgctggcatctgcttctagtgaggacctcagggagcttgcaatcatggtggaaggtgatggggaagttgatctatcacgtggcaagagaggaagcaagagagattggggaggtggttgccagactactttaaaccaccagcttttgcatgaactaccagagcaagaactcactcactaccattgggaggccatcaagccattcatgagggatccacccccatgacccaaatacctcccacttctccctgcttcaatcaaaagcaggactcagaacaaacacctcccagacccacctccaaaactggaggtcacatttcaacatgagatttgaagagggtgcacatcccaaatatatcaggcagaaacaatcaggaacagacaacactaagaagcaatgattttccctagttctttgcccaagaccgagcattgccactagggtgaagaaaataaaaggaagataaagtaggtgggcctcatcccatttaggaacagccttggccttttaattccattcttacatggaatatttataaaatggcaagctataatcgatagctaaatgtgatattgactagtatttgggtgaaccagaaatgctttctgctgaaagtaacaaaaaagccatctaacactgacttaaccaacggtgtattttcctcatgcaagaaggctgcaggtgggcaatggttagtgttggttcaggaggttaaagatggcagagatggaatctccagcattctcttgatctgccagttccattaccttatggttacaaagtggccaccaaagtccaggcatcacatgtgaattc

SEQ ID NO: 204089 - DNA, 1000 bp, Homo Sapiens
ttggtggcgcttggattgaagagtagcaagtgtggaatgtggccactaatgagcgggctggagcttagcacaggtgctcctgatgcgggctcagctaggggccctagagccagaagaggcagctgattcaatcttctatgggaaatgcacttgagggtccttattcacctgttagggataagcagtaacaccaggtgtttggcttgaaaactgagagcatggtggtgccctttgctgagattcctcatctcagtatgagacaagggcatttgggggtgaaactcaagggttctgtgttgaagagttagaaatgagctatctgcaaaaacccaatggaggtgtaaagcttgtttgtactgtatgctagtgtggcttccagtggagagctcagagctacagatacaattttagagtcattaacataagggtggtatttgaattcatgaagattaccacagaatagagaacagagaagatcaaactccggctctgaggagcttcaccatggagaggtcaggtagagaagaagacagggtgctgcagacagggagccgagggctgggagctgaactatggacccggggaaggccggttccacggcagtggggaaaagccacattaaaccttctgatcagtgaatagaggcaagagagtggagatggtgggaatgggcagggttttgagaattctgcttttaaagaagattggagctataaggtagtagctggaagaggaaagtagatgcaggactttctttttgattgagaggtaatacagcatgttgataaacagtgcactgatgagaatgtttactggaagtggtcacttttgtgttagaatatttgcagcacagttaccctcttggcaaaaatcaaccagcacagccaactgcctcttctggcagtagtagatccaaaatattaaaatacaccatctgcacagaaaagatggtagatcaataaaacttgagagattaattcatgatatttaataagaattc

SEQ ID NO: 204090 - DNA, 1000 bp, Homo Sapiens
accaaggaggctgttaggcaggtgtttgaaggaatgtactatatagcatatgattaagatatggaaggtagcagagatagaaggagaccgaaaaggagaaagaaaagaattcaacattctggagatcttgatgaggtaaagggattggtatattgggttaagggcatgagatacctggaaagacgtggtgtttttcagggaatgggaagttggaatataagatttcagatgtggtacagttccagataatgacaaaagtctgagatgtgtcttttgaagtgcatggctgaagcacagtggaggagataatgtttggagtgaaggaactggaaaaactgacagcctagatgctagaggattagatggtttgtccacatgtatggtgaagtcaccagatatattggcaggaactgggatagacagggacccaggtgctgaagtctttaatgaaggaaggatggtgcttacgagatagaagacagtgttgattggagtcgagggtgatctagctggatggtggccttaaagcagcattactttgtagatgtttatgtgactagaacagcgagatgggttgaggttctggtgtatttgtgtgtattattctttcctcacaccatcatatacctgttgtttatctcttctgcttctacttcttaattacttgtaagattttttaaaagtcaatagctttattcatagaaaataactaatgaataattgtgaccttgttgagtttaacggctcatttttcttatttctttgtggagactaatacgattggtttactgggcaggaggaactagacattagaacactgcaaaccaaaaatcgcaagctggcagaaatgttggatcagcggcaggccattgaagatgaacttcgtgagcacattgaaaaactggaacgacgacaggccactgatgatgcctcactattgattgtcaaccgatactggagtcaggtagctaacttgtttatttgttcagatttttatttg

SEQ ID NO: 204091 - DNA, 1000 bp, Homo Sapiens
cctgtagttcaaacaagctgtatataaacagacaatgaaactctttgcagagctggaaattaaaaggaaagagagagaagccaaagagatgcatgaaaggtacatatcagtatattcatttaaaccatatttaaatacctagattaactaacattggtctttggtgattttcctaatgagggaattatatagtataccatttaagagactataaaaatagttacctaaaaacagtcaagcttttgaatcaccagggtaagtagtttttttctttgacttttgagaattattgaataggtctgtccttagggagtgtattttttatttatttttttgagacacagtcttgctctgtagccaggctggaatgcagtggtgcgatcttggctcactgcaacctccacctcccaggttctagcagttcccctgcctcagcctcctgagtagctgggactacaggtgtacaccaccatgcccggctaattttttgtattttagtagagacagggtttcaccatgttggccaggatggtctcgatctcctgacctcgtgatctgcctgccttgccctcccaaagtgttaggattacaggcatgagccactgcatgctgccagggagtttatttataatcaagagccttgtgtgtgttcttcctgatgtcctggagtgaaataagcagttattaaggccattgttactgaagccagaaccttttgtggggctagtggctacagctttggtgagtgtatagtactgtagtgtcatcagtaacaaaatgtttaatgttctaaaatatgatttctcttgaacatcagaaatgttagaatttcgcttttgttgcccaggctggagtgcaatggcatgatcttggctcactgcaacctccacctccccaggttcaggtgattctcctgcctggctaatttttgcatttttagtagagacggggtttcaccatgttggtcaggctggtctcgaactcctgacctcacatgatc

SEQ ID NO: 204092 - DNA, 1000 bp, Homo Sapiens
tgtcctttgagaacagacattgctacttgaaaactcaaatctttgtccttgggaaaaaaaccaaaaaaacaaaaaacaaagaactctcaatggtggagtgaacgtagcccttcatttcagtgttggaagcaaagcccttgccctgtatcttatactttctgatgataatgatcacactgtttactggtcacaaatagtaaattgtaggctttgaatgatgtttttcaaatgtgtattaaaaatgtcctctctaatctttcttagaatcctcttgggcaaaacttctgaggaaggccttaaacaaacaaaaaaaagtcaacattaaaaacagcgacactccctggtcaaacttccttatggctctgtggacatgtatgaagaaattagcacgtgtgctgttcttgcaggataaggcacagctagtgtgtacttacagcacacagcggcattggtgcgggtcacagtaaggtttgtctgaccagtcaggaagtgaatctgggagagtggcaggacccccgcaggcatgtctgctcatgctctcccaagggagggagggagcgtaattccagggagggtttaaacatggagccatggaaacaaagtgtatttcatgttgcctgatgcatcatgaaggggacattggggacccttcccttcctgccttcctcactgttgctgtgacagagccaaagtctgtcttgataaaaatggggggtggcgaagggcgtctggcagtgtgaaggcagaaataagtgggttgggagccagatggcattcagatgcttggaaaggctagtagctgtgacccgggcatcaggaaacatacaaagttcctggtcagggccttgctgtgaaatgcccaggcccctccttcaggggcagtgctgtggagttccctgccattccccaagcatgtgacaggagccaggggatgccccagccctcctcggctggtaagagagcccaaagatagtcacagcaacaaatcatgcaagaattc

SEQ ID NO: 204093 - DNA, 1000 bp, Homo Sapiens
ttcgacgaaggtctgaatatttgtccctcacatgggattccagaacactgctgctggggtctacatgtatgtccatcatataggattccagaaaactgctgctgggttctgagtgttcctccctcacgtacaattccagaacactgcaatgagcgtctgaatgtttgtccataacataggattccagaacactcccgctgttgattcaatgtttttcccttacataggattccagaaaactgctaggattgtctgaatgtgtgtccctcacataggattccagaacactgctacgagggtctgaatatttgtccttaacgtaggattgcagaacacttgtgttggggtctgaatgtttgtccctcacataggattccagaaaactgctacgattgtctgaatgtgtgtccctcacataggattccagaacactgctacgagggtctgcatatttgtccttaaagtaggattgcagaacactgttataattgtcggaaagtttgtccctcacataggattccagaacacttctacgagggtctgaatgtttgtccctcacataggattgcaaaacactgaagctgtgttccgagtgtttgtccctcatatagggacccagaaaaatgctgctgggttctgagtgtttgtccctcacacaggattccagaacactgctactagtgtctgaatgtttgtccctcacataacactccagaacactgctgctggggtctcaatgtttgtcagtcacacaggattccagaacactgctacgatagcctgaatgtttgttcttcagaggggattccagaatactcctgctgtggtctgaatgcttgttcctcacacaggactccagaacactgctacgagggtctgaatgattgtctctcacataggattgcaaaatagtccagctgtcttctgagtgtttgtccatcacataggattccagaacactcctgctgtggtctgaaagtttgtccctcacacagaattc

SEQ ID NO: 204094 - DNA, 1000 bp, Homo Sapiens
gaattctggcctgaagggtgcaaatctttttaaagcttttgatacatacagctggggttcaggaaactccttcccaagttagtcccctgactagaagggtaagagtgcctgccctgcagccccacctgcattgtggatttgtattatcaaaagataagccttgccagagggacatttctagcttgaatgtgtgcctgacaccaactgagctccgacagtgtgccttgaaccctgtgccagatgctgcagagggcggcaaagtaaggtgaaggctctgcctgtctgcctcacctctgggagtgaaagaggccacttcttttttttatttgatgtttctcctataattttttttttttttctgaaacagagtttcgctctgttgcccatgctggagctggagtgcaatggctcaatctcggctcaccgcaacctccgcctcctgggttcaagtgatttctcctgctgcagcatcccaagtagttgggattataggcgtgtgccactacacctggctgattttgcatttttagtagagacggggtttctccatgttggccaggctagtcttgaactcctgacctcaggtgatccacccacctcggcctcccaaagtactgggattacaggtatgagccactgcacccagccaattttttttttaaatgtcaaaattaggttcaaaaattatggtttacattaaatgaatgttcttaactacaacagaagaaaccaggaatgcaatccggttgtgctgttcgggagatcattccaggcttggcatggtctggagggtggcatggtcggagggtgtctgagccaggggccagggccaggtgtcggtcattcctggctgggcttctgtgctggaccctccagctcccctgaaggcaacccctagcccactcaagtcctcataggaggctgcaccctgtagcctgcagcagggccgcagctccatgagcagggctagcaagcactggcatgcttggggtcagaattc

SEQ ID NO: 204095 - DNA, 1000 bp, Homo Sapiens
gggcaaacagaccccatttttacaaaaataaaaactgtttaaagaaaacccccatctctacaaaaaatacaaaagttagccaggcgtggtggtgcacctgtagtcccaactactcgggaggctgaggagggaagatcacttgagcccggcaggcggaggttgcagtgaaccgaggtcacaccactgcactccagcctggccgacagagcgagaccctgtcctccacaaaaaaaaaaaaaaaaaggaaaaaagaaaattacacacgaggctgaagcaggaggatcactggagcccaggagttggagaccagcctgggaaacacaggcagactccatctcaaacacctggcctcaagtgatcatcctacctctgcctccgagtcactagaattgtaagtataaattaccacacctggcttaaaaacttttttttttgtaattacatatgctccccctgtgaagcaaactatagaatgtaaaagccctctctcggcaaaaagaagtggaaaccagccaggcgtggtggctcacacctgtaatcccagcactttgggaggccaaggcaggcggatcgtgaggtcaggagttcgagaccagcctggcaatatggagtaacccgtctctacgaaaaatacaaaaactggccgggagtgggggcgcacgcctgtaatcccagctacttgggaggctgaggcagaagaatcgcttgaacccaggaggtggcggttgcggtgagctgaggtcgcgtcactgcactccaggctggacgatagagcgagactccgtctcaaaaaaaaaaaaaaaagtggaaaccagacctcctaaaatcggagtctgatgtgcgaaggcactgtcacccaccagtaaggggcactccagtctcagctcctaagatggtgtccagtcttctccagctcctgttcatgtttcttttctttaaatgcccaccttttaataattccagaactcaaaagcccatgttagtatcagattgtgaattc

SEQ ID NO: 204096 - DNA, 1000 bp, Homo Sapiens
agaggagggaaacgggagggaggaatttaaaacaaatttttaactgaatgataatgaagatacgacatactgcatatactgcaaactacatccagaaatgttggatatgcagctaaataaatgcttagaaacttagacttagatgtaagagggaaaaaaaggaaagacaaaatgtcaatgagctaagcatccgaatcaaaaagctaaaataaaacagaaaaccaaatcagaaaaggaagaaaataacatatattgcagcaaaaatcaacaaaacaggaaaatgatacaataaagaaattcaaaaaagtcaaaaagttgatctttgagacaaagatgagagtaataaaactgataaacctctaacaatactgattaatatagcaaacataaatttccagcattgggaataaaaaaaaggaacataattagactctacaggcatgcaataaccatatgcaaaaaaatggggaaaaaaatacatgaaatgaacaaattccttggtaacacatttatcaaaatatcaatagtttggccaggtgcagtggctcacacctgtaatcccagcactttgggaggccgaggtgggtggactacttgaggccaggagttcgagaccagcctggccaacatggcaaaaacccatctctaataaaaatacaaaaaattagctgagcatggttgtacgcacccataatctcagctacttgggaggttgaagcacgagaatcacttgaacctgggaggtggaggttgcagtgagccactgtactccagcctgggtgacaaagagcaactctatttaaaaaaataataataatagtaattttatatctatcaatgaaattgcatgcactattaaaaatcccccctccccgcaaaaataaaacaagaacaggtttagagagtttcactggtaaattcttcccattttttttttctgaattaacatcaattttttgtgacaaaaaaaggctgaattgttctctactttttgtttgag

SEQ ID NO: 204097 - DNA, 1000 bp, Homo Sapiens
ctcaatacatactccattaactgaattctaagataaactgtctgttactgacagaaattttcacttaagggagtctccgtggctgaaggcaattttgaaatcctgtaaaagaacccactcctctccccaagtaatgaagtttgtcagtttcaagcctgtaataaggtactgacttaaaattaattttctaataatacagtactgctatgtatctaatgtggggttagtcaatgataggaaaaaaacataagacagagtcacatttaaaaatgtgtgcttaggtgcatggtgacacctgcctgtagtccagctattccaggggctgaggcaggaagatcccttgagctcacgagtttgaggctgcagtaagccactgcactcagcctgggcaacagagtgagaccctgtctctaaaaaaaattcgttttaagtgtgctcaggacataacaggagccgctggtaacatgccatttccactgtgaatatggtaaggacagaatccctgtctctaggccctcttccactagtcaatctcatcatcaccatcaaggccaacattggtattctctcctctgagacaaagtctttgacattttctatactatactatgtcttcctctccccaaatgcatatacaaataaaatttgaatgcttctttctccatttagtgtaattttttttataacatagacccaattttcaaaccccacaatggtggattttatttgatgtattgtaaaaagcgctggattgaagtcaaatggcttgggagacctaaattctactcctgcctgtaccatgaaagagacaaatcccaaggctttgcagggcttcagcttccttgtttgtagaataaagaattataaaatcatctcttttggtcctactgggcaataaaaagctatgattctaagcctgttcccttttctcacctaagaatacaaatttgatacaaagaggccgcagaatgtgtcaaacactccctgttgcctggaattc

SEQ ID NO: 204098 - DNA, 1000 bp, Homo Sapiens
acactgggctatttcccagggccccagaacatactcaaacatttgtttgagtgggaggtggggagagagttcttttgagtcaatgaacatctgttcagaactgctgtgctgggtcccaagaaaacagagcttataatctgtctcttccctgccagaggtaccagcagagatttactatactaggtatatgtgcttgtggtggcattgtactgtgtcagtttagctaagctggattcccagtatccttcctatctgcttccaggtgagggttgtccacaagaaaatttcgtgagagatttggaaagctgaattgaagtagcagccagtacactgtgaaggacagagcagggtctgtacgctgtgaaggacagagcagggtaccaggcatagtggcagtacctgtactttctctctgatctggctcaccttgttggtgaaggtcatcacacagcccccagcacccctagctcctactgaatttcctccttcagctcctctgagtcctgggccatgtgtgcagtcagctctgtagcagagggctccggcttctccagatcacctgagtcactgagcttgggaccagtgaaaggaagttgtgggtttcagtttgtcctcatgagttccagttgtccttgtagatcccagtttgttctcagaggttccagtttgtctttgttctcttccacctcacatccagttttcttcccaactgctggcctcacagacttcgggcccaacaccaggtgcagaggcagcagagttgcatggatttatccaccaacttccaaagatacacagtgtctactccttataataaatctttagttttctgtcactcatagcgtttgcttccctgattgaactttaaatttgttcaagccgtgttaaggatgcagagcatggaagtgattagaagccagaaagcttcacagaggaggtgacatctgagctgcttctgacgagtaggaggttgtgtgtatagagtgggtaggaggaattc

SEQ ID NO: 204099 - DNA, 1000 bp, Homo Sapiens
tataaaatattgatgaaagaaattgaagatgacacaaataaattcttacggattagaagaattagtattgttaaaatgaacatactacccaaagaaatctgcagattcaatgcaatctctatcaaaattgcaatgatattttttcacagaaatagaaaaaaacaatacagaaactcatgaaatcacaaaaaaaagcctgagagccaaagcaatcctgagcaacaagaacaaagaacaaagttttgcatcatactacctgacttcaaaatatattacatggctataataacccaagcaatatggtattggtataaaaatagacaaattggcctgcacggtggctcatgcgtgtaatcccagcactttgggaggccaaggtgggaggatcacttgaggtcaggagttcaagaccaggctggacaacatggcaaaacctcgtctctactaaaaatacaaaaattagccaggcattgtggtgtatacctgtagtcccagctactcaagaggctgaggcaggagaatcacttgaacctgggaggcggaagttgtggtgagctgagatcctgccactgtactccagcctgggtgacagaaggagactctggcaaaaaacaaacaaacaaacaaacaaacaaaaacacacattgaccaatggaacagaatagaagacccagaaataaatctatgtattcatagccaaacagaatgacagagccttattctgtggcccaggctggagtgcagtggcatgatcttggctcactgcaacctctggctcctggggtcaagcgattttcctcctcagcctctcaagtagctgggataacaggtgtgcgccaccacacctggctaatttttgtatttttagtagagacagggtttctccatgctgaccagactgatctcaaatcttgacctcgtgatccacttgccttggcctcccaaagttctgggattacaggcgtgagccaccatggccagccatgattttttttttttt

SEQ ID NO: 204100 - DNA, 1000 bp, Homo Sapiens
attctcatcctcttcccaaatgcggagatgtaaagacccaccagtcatcatgcccatatcaaagttgaatatcttcatatcatatgcagttctccccttcagggcatcactagtcctgtgacctattctcttttctctttgcagagtcatcctgataaataatttgaaggccctttagagtacaatttggaggatgatttataatatatacttggggcaatttttcagaatccttcttcaagagaacatagcctcctacttaggctctagatctgtgaactaacagagacgctgtgacttcctgtggcacttactcaagataacttcctgttcactggatcaaataatgctttgttgggctatccttctatttaattcctaggaaactataatcaattagctatcatcatagatccctgtagataaaaacatctgaattgccactcaaccctccctgctcattacagtaattatggttattttgtctctgtcagtaaagtgctattgctacctgatccctgacattccaagatctcatctctccattaaaatggatgtatttcaaagtcatcaaatcttggtgtcatccatagcctgtagaataaattaaccatagatatttaaagatattggggctctcctcattaatgcatttatcaatggttgagtaaaagaagagtcctctgggttctcttgcaagaatagtcaggaagagagtgagtaggttgaatataataaattcattccaacatgatcatctccttatgcttttgaatcctccttcatcattatttcagggaagtttggggatcttttcctcatttcacataggcaattattaactctgtgtttcagttaaccaaccaatcaaagttttagcatgatcttcagttgcttgaactaatatatttaatccagactctcaaataaatatacctatattgataaatactgataaaacctacattatattctgtgctccttattcttcctcacatag

SEQ ID NO: 204101 - DNA, 1000 bp, Homo Sapiens
ttgctcgtttgccaggctggagtgaagtggcccaatctcggctcactgcaacctccatcctctgggttcaagcgattctcctgcctcagcctcccgagtagctgcgattataggcacctgcaccacgcccagctaattttttgtattcttagtagatatggggtttcaccgcctgcctagggctcccaaagtgctaggattacaaatgtgagccaccatgcctggccagaattaatgcattttatcatttgtgaaattttcttctggaattgcagagctttgggtacatatgggactgactattgaatgacaaaccattgaacgtgttattttaaaaaggatagaagaggccaggcatgatggctcactcctgtaatcccaacactttgggaggccaaggtgggcagatcacttgaggtcaggaattcgagacaagcctggccaacatggtgataccccatctctactgaaaatacaaaaattagctggacatggtggcgggaatctgtaatcccagctactcgggaggctgaagcaggagaatcacttgaacccaggaggcggagattgcagtgagccgagatcgcaccactgcactccagccagggcgatagagtaagactgtctttaaaaaaacaaaaacaaaaacaaacaaacaaacaacaggatagaagagacagaaactcagagaaagcccaaaaatcctcgaatagttcaaaggatcagcatgatgaggtcctcaaagaagttacctccaagtttgaggaatggagatggctcaccctctaggcaggtaaatcagccgccaggtagacaaatcttgagagtagagtggcagaatttcttttttcatttagtaaaataataacctacatgtctttgtatataattttaactaatcacttttttcaacaataaaatgcttacctttctatttaattaccttaacactgtggagtccattccccttgctaatgtttttatagagcacagagaattc

SEQ ID NO: 204102 - DNA, 1000 bp, Homo Sapiens
aagatgccctattttcactgtaatcacagtgcaataaaacctgaacgttaatccagtcccaccaaggccccgatatccacctgacttattgcatccacagtaaacagacacctctacctggtacaggctcctgacaatctagaaaccactggggctttcctttgaagggttcaccctattcacagcagtgatgccaactttctcaaagaagaaccatttttttaagcagagttttaaacttggccagaagggaaacctgcccaggagtctgcttaagaaaacctaagtgttttccattgtgcccaaaaattgaaattttaggtgactcatctcagttttagcctttatttccaggcaatctcttaacatgtcaggtcatgattaattcataaatatttaggcaaaaacagtacctcctaggctgtgtctacttttgagaaatttgattatcaggaaagtgatcacgttaataagcagctgagatcagtttcacggtgctgacatgctgagaaccatcagtaactgccaccttggcacgtggacccttatttccataaccgcctgtgtaatgtgtattttaaaaagggagagaaaaccaaggctgggtgcggtggctcacgcctgtaatctcagcactttgggagaccaaggtgggagaatcacttgaagccaggaattcgacaccagcctaggcaacatactgagactctgactgtacaaaaattaaaagaaaattgttttaatttaaaaaacaaataggagagaaacccagaagtaactgcattgaatgtaatgaatgatgcattcactgccgtcttgctactctgcaaatggcggtgggaggagggcattccctaagcaccttctatgctgtctgctaccctcccacctgaggcctcctaaccccctccctgtgaggcaaccactactatcaccatttatagatgggactaggaaggcacaaaaggatgaaaaagccttgcctgtgtagccagaattc

SEQ ID NO: 204103 - DNA, 1000 bp, Homo Sapiens
attctataagaggttctgctatcacactgtccgtttaaaaatatatagatccagtgaattttattaattccaataatctgtaacttgggtgcagtttttaaagtaccaaatgcatcacacttacttgattgttagttacaataagataataggtaactgtacttccttctttcacttgaatacacatccaatttcctagacaaaattattgctaatagctaattttcaaaataagggctatgaatttgtaaaaactgaaacaagaaatctatgaatattgtacaaatctataactagcttttgagaagcataattcttcatgttgtcaacaatataattttacaggagatcctgaccgggtgtggcggctcatgcctgtaatcctaacaccttgggaggctgaggcagcaggatcgcttgagcccaggagtttgaggctgcagtgagttatgatcatgccaccatactccaacctgggctacagtgcaagaccctgtctcaaaaataaacaaacaaataaataaggagatcctaaaggtttaactccatctatatcatgtcactgatacttggacaaccaaagatcctatttatcaccctcaacattcccgttgccaccagctaaatggtctcagggcttctaaacctcacaagagccaggatttctgaaagcagatctgtcctgtaccccaagtccttgtttcatcactatagaactacgaagaaactctaacaaaatgttagagatagcctctcttcccctgctgatttccactaagcaaacaccaagcaaccttcaaaggaagacttcagcaaacaataccactatttgccttttccctggtcggggggtatgtagcacatagaaaaaaagaatctttcctctagaaaagaaatcaacctttcaacattctatgtcatagaaaaaaaatcaatttttttcagtcacaatcataacaccagaataaaagggatctgaagggaagggattagtgaattc

SEQ ID NO: 204104 - DNA, 1000 bp, Homo Sapiens
gtttctcaccattaagtaagatgttagctgtagggttttttttgtagacttctttatcaagttgagggtgttagattttgtcaactgccttttctccatctactaatatgatcaaataatttttcttctttagcttgttgacgtgatggattacattaattgattttcaaatgttgaaccagttttgcatacctttaattcctttttaaggttgaacaataaatcttctattgtatgtaatattcgttttgtttacccattcatcagttgatgaccatttggtttgtttccacatttgcctgctacaaataatgctgcaatgactattcatgtaccagttttcgtgtgtacatatgttttcaatgcttttgggtatatacctaggatgagaattgctaggtcatagggtgctctaagttcaacttttgaggaactgccaagcttttcaacagcggttacatcattttgtattcccaatagcaatttatgatggttccaaattctccaaatccttgccaacacatgctgttgttttttgttttgtttttttactacagccattttagtaggtgtgaagtggtatctcattatggtttggatttccattttcctaaaagccaatgacactgaatatcttttcatgtgtttattgaccatttgtaaatattatttgaagaaatgtctattcaaatccattatcattttaatcaggttatctgtttttgtttattgttgattttcaagagttctttgtatatctgagatactagattatcaaatatatgatttgcaaatagttcccccaatgctgtgtattatctttttcctttttgttttttttttttttttgggtgggggggacagtctcgctctgtcacccaggctggactgcagtggcatgatcttggctcactgcaacctctgcctcttgagttcaggaaattctcatgtctcagcctcctgagtagctgggaagcttggattacaggcatgcaccacc

SEQ ID NO: 204105 - DNA, 1000 bp, Homo Sapiens
gggaacctgaagcttaaactccttattgttgtagataaggaaaccagtgtctctgaagaagtaagtggtttgaccaaggccagatagatacatgataagtgacagaagggaggttgaacctgggtctctgtctcatgtgccataatagtatagtacttaaacatgtggacttcagagtctgacagatcaaggtttgaatcccagctttgctagtcattagctgtttgaccttgggcaagttccttaacgtctctgagcctgtgtttcctcatctgtacaatggacctgatgatacctgcctcatcagattatcatgagggttatatcatgttattttcaagctttaagaaatactactcccgggcctggcatggttgctcatgcttgtaatcccctttgggaggccaaggcagacagatcaacgaggtcaggagattgaaaccatcctggccaacaaggtgaaaccccgcctctattaaaatacaaaaaaattagctgggcatggtggtgcgcgcctttagtcccagctactcgggaggctgaggcaggggaatcacttgaacccaggaggtggagattgcagtgagccgagatcgtgccactgcactccagcctggcgacagagcaagactctgtctcaaacaaaaaaaaaaaaaaagaaagaaataccactcccaatgtgagaaaaactgtttccatcagaactagttagtacagacatattaaaacacatatgtgactgaaatgaaagttttatgaaatacattacccttattatatatggtacattctgttttctatttcatttttattaataaagctggttgtgaccccctatattgatttcatgacactggcgtaaatgaaagtaaagcttagggctatgaatatactatcatagaattctttttcctcttaggctcttgaggagaaggtgcagggcccaacacgtccctggaggctagggtaggccccctcatctgttgccttctgccttccc

SEQ ID NO: 204106 - DNA, 1000 bp, Homo Sapiens
acttattcactatcacaggaaccacacggggaagacccacccccgtgattcaatttcctcccactgggtccttcccacacatgtgggaattatgggagctacaattcaagatgcaatttgggtggggacacacccaaatcatgtaattcccaaattagtctaaagatgcaacacaattcctgccgaagtccaagctgtatttttatcagaaattgacaagctgatcctaaaatttggaaaatatggaaacttaagggacccagaatagccaaagtaatctaaacacacacacacacacacacagacacacacgaaaaaacaaaaaaacacgccagtcacattggctcagacctgtaatcccagcactttgggaggccaaggcaggaggatgacttgagcccaagagttcgagaccagcctgagaaatatagtgaggcccccatctctacaaaaaagttttttttagctgatggtggtagcatgtgcctctagtcccagctacctagaaggctggggttggaggatagcttaagcccaggaggtggaggttgcagtgagctctgatcacaccactgcactccagcctgggatacagagcaaaactctgtctcaaaaccaaccaaacaaacaaacccacaaaaatccagaattggataaatcatatttccatctttcagaagttactacaaacagccttgtaatcaaatacagtgtagtacttgcaaaatgattgtcatataaatcaacagaatagaattgagaatccagaaataagcccaaaaatatatggtcaattgatctttgacaaaggtgccaaaataattcaatggtaaaaagaataatctcttcaacaaatggtgtcgaaacacctgggttcacatgtaaaggaatgaagtagaaaccctacctcatattgattagtatacaaaaattaatccaaaatggattgaagacctaaatataagaggcaaaacatctttaaaaatagatgaattgttca

SEQ ID NO: 204107 - DNA, 1000 bp, Homo Sapiens
atgcatgtaagaaatctgcatttgtaccccttaaatccatgaaaattttaaaaatggtatctcaagagaaatttctacatgtttaaaataaaatgaaaatgaaaatacaaattatcaaaatttgtgggatgcaacaaaagcagggattagtgggaaagttataatatgaatgtatatattaaagatctaaaaatcaatagtgtcttttatctgaggaaaatagaacaaattacattcaaagaagcagaacaaatgttagagcagaaattaatgcaattgtaaacaggaaaacaatagggaatatcaacaaaatcaaaagctgattatttgaaaacatcaacaaaattgatgaactctagacaggctaatctaaaaatggagattatgtaaattactaatatgagaaataagataattttagtaatttaaattttaaattcagtaatttactgaatttgagggcattaagatgatactaaacatttactgaattcgagggcattaaaatgacactaaaagaacattgtgaacaactctatgcctataaattttgtaaactagataaaattaaccaaccttgaaagacacaatgtcaaagcacaaaaaaaagatacaaataaatatcttttgtgaacatagatgcaaaaatttccccaaaatattagcaaatcaggttcaaccatgtacaaaagtaattatactacacaaacaactgtgattaagttcaggtgtgtctaatgctgatttagtattcaaaaatcaataaatgtaattcatcacatctgcaagctaaagaagaaaaattatatgatcatatcaacagatgctgaaaaagtatttgacaaagctgcgtgtggagaagtcccagctttttgggagattgaggctggaggatcagttgatcctggaagtatgtgagaaaatttctacaccctttctttctttttttttttttttttctgaggcagggtacaggctgaagtgcagtggcatgactata

SEQ ID NO: 204108 - DNA, 1000 bp, Homo Sapiens
ggtgtgtccgtaaacttttgaatgaagagccttgtcactcagacggccctctccctggcagcttttgctgctataaaagttgagattttgtcatgttttggctaattggaaaccgggtcattataccattgaaaatctacatgaaagtgacttgttcaattgttacctgaagcattcacaagccggccagtcattctgccgagacccccgcccgcctccccgagcttctaaaacagagagaatcaaaatatgtatatttctttgtctccctttgctatcttgtcagagctgttttacatgctgccacccaatgttatcttttatttgtgtcaggagaaaggatttgacaagttcagtatacaatgttcatttggcaaggcaaatttttcataccaattttgagttaggaaatgaaactatctttcaacagaatgagcaacatcatttttggacagacttattatgagagagaggattgcagaactttatttccttgcatgatcccgaaaagtctaatacattttttaaaagtaggatcccgtttccacctgcaacccaagttggggggaaatgagaaacaacagtaatgtcttcaaacagggaggcctaatgtcacattccccaccccccctccctgtttcccgccagttattaaaaggctggaataaattgttcctcttctatattataatgactttgcttcagaccctttaaactgtgggtgagtttctgacagtcatccacatttgcaaagcaaaatatttattaaccatcatcgtctaaagcagcaacggaacctgaggcaaccttgtttgtgcagagcgagattcccccgcccctgtacccactttccatcactgtttgcctaagaaagaagactctctcaccctctgtgctaccgaattcatttggggcagtggtttatggtgacatttttctttcttaaagcaaatattgactcaccatggggaaattaaaactccattaggcatcgctacat

SEQ ID NO: 204109 - DNA, 1000 bp, Homo Sapiens
gttgttctaaatgtaacgggaagctgttagaggactttgagcagaggagctacatgatctaccttacgtatgttttcaaaagttcactgtggttgcagtttggagattggattctaagtcagtgatgtcaatgcaaggagtccaggcccaggagtctagaagagatcatgggagcttggacgaggcaggcagcatggagatagaagtcgatagagcacagaaaaattgtgaagcagaacagattgaatttgagaatgaggaaagatgaaacctcctttgaaactctgctgaaaggggtgcaggataattaataataataagcagttttctgtctctaggggtgaagacatcaactttggaacagacctctccttgttttagcagaattatcacaataggtatagtatatgtaacctcattctttcattcaacaaatcttcactgtattcagtacagtaacatgctgtataggcttaggctgtatcatatagcctaggtgtgtgcaggctgtgccatctaggtttgtgtaagcacactctatgatgttcacacaacgatgaaatcgcccaaggatgcatttctcaaaacatatccctgttgttaagcgatgcgtgacggtacttgttgaatgaatgaatctgaacacatctgttgatgttctggtttgggactataatttgttgtctaagtttgagtagaatttgtgactccaaggaggtgggcttaaaaaaattgtttttggagatagttaattgttgtgctgatgagaagcagctttttctttcattttgatatttcatatgaggcgtattcttacgtcattaaaaagtcttcacacacaccctgcttggatatgcctcagatgcacacaccacaacatgctgagccagtcttccctcccctccagctccctcccctcaagccagctgctccccttgcccctgcccagttcgttttgatggttacagaaatgcctctcacccccagcagctttgaattc

SEQ ID NO: 204110 - DNA, 1000 bp, Homo Sapiens
ccacacatcaggtatcattctaagcgcttttatatattaactcatttgatacttacaataggtaggcactaatattgtccccattttataggtagagaatttgaaacaccaagatgttaagttaccttcccaaggtcacaaagctaataagtggtgtagccagagctcaaacttcttggtagtttgggagtcagattctgtgcttttaatcactacattgtatctgaagatgttctggacaagtttttcctcaatctttaatatactttggactctatcttaaagtgtaatcatttgggaggccgaggcaggcggatcacatgaggtcaggagttcaagaccagcctggacaacatggcaaaaccccgtctctactaaaaatatagaaattagccgggcgtggtggcaagcatctgtaatcccagctactcaggaggctgagacatgagaatcatttgaacccaggaggtggaggttgcagtgagccaagatcacaccactgcattccagcctgggtgagagactctgtctcaataaataaataaataaataacaacaacaaaaataaataaagtgtaatcagataatttgtgaattctcacatctgagctaagctttaagaattttatggagcatgaagctgaatggggaacagacatcctccagtcctgagagcctccctctgtgttgaaaaccttagtacggacctgcccaactcatgtgtgttggcatacccactgggaagtccagctacgagcccctctgctcttctgaaggctgtacctccagggtttgtggctccaggcaagaggccccaagccttaggcagcctcatccctttgcccattaataaaaatactttctcttcctgccatgacaaaggttgggaagtgctgccttagagaagtgtgggagggtggaggagaatatgtttgggtggtctttgttccctgccgttccctccatatcagagctgtggcaaaggaacatgaagcagatc

SEQ ID NO: 204111 - DNA, 1000 bp, Homo Sapiens
taaaagggcttgggttctgaaatctgtagaccagctaagtttaccttatatttgtgaaaatgcattggtggttgtgttttaaatcaaagagacaactgttgcacagtgttggtgacaaggcatcttgtctgagctttactacagcaacataacatccagggcttccttcagtttgaacttttactgactctgtgaacttaaaagaagtcatattgtgcccctctcttaagattaatttattcagtgataaggtgagtgatggtaagccaggtacctatccaatcacagtaaatactaagttccagtacaaactgagcaacagatcatatttcagagtgctggagctggagcacaggaatattgctatagagagggaaaattcccaaatgtaaatctttgtgtgatgtgactaaaaatatggggagaatatgtattaaatatatgaataaattaataaaatgaaattgattaaagaagaataaaggcagttattttttccagaaaccctacatctggtgtgattagaccgtagtgagttcttcagagctcaaagcttccacctatgaatattttcttcaataaacattttttcctttgcctcactggttgccaatagaaacatctgcctggaggactcagtttagccaagtctctctcgttttttttttctttacaagtcttgaaagaatattttggccttctttcctctgattagtttccaaaatagcagtgggaatttaaattataatcaacttttatccagttcctgctaaattcatcaagaaaagacttagaatatgaatcaggtacaattgttgggtttccttgaacttcactaaccatccattcattcctcaaggaagacaaaagctcatttctccaaaaaatgagtgttgaattgaattctatttttttgtccagaattttttttcctttatcagtctcacttgtctggactgtgcttaactaaataaaacaatacatctttacaccaaattcc

SEQ ID NO: 204112 - DNA, 1000 bp, Homo Sapiens
ccaagttggtccctaaaatgagttaacctacctaaatgcaaagctcttcaaataaactttatgtgctatgtgctgttgatttgagaaaagtaaaagacatagataaatcccttgcctacagtttttatgatctgcaagagaaggtacagttatattcacaaaatactgtgaagcagacacaaagcatgctgatgactacaaaaaacactccaagtgtttaacaataaagaaattgtattgctattgaaaactgaaactactaaactaaaaacatttgaaattttcagttcaatatcaaattttaaggtcgaactcatagatttttctattgcaaaagcattttaaaattttctattggtgattgtcttaattttgttcaatctattcaaaaaatttgtatttttaaactttttaaattgttgaattaatctatagagtgcatggtacatttgttgacctcttataattttagcagagagatctagagacaaattgcttattaatacctcactactatttcagatgcaaattaatggtgtttaagtaacaattttgttttagaataactcacagcagcatgaaagtatacattgtccatgataatgagatattaacaacaacaaaaaaataccacctaacccatgaaatgactttcttacagagaaataaaataataaatcacaatcttcagctttatctggatttccatcttaccaaaagcaaattgtaaaagaccagtcagtaactaacatcttccagagaaaaataaagatatatgtagatatcttaatattttatatataagataaagattataagtaatataagaaagataaagatatatatctttacatatatatctttacaatgactgctgcattgtaattaacaaatcaaaattagtttacttttaaaagcatgtgaagatattctgaagacaatgtttaaattcaaaagactaagacagtaaaatttttaaaaactctaaaccatgaactgt

SEQ ID NO: 204113 - DNA, 1000 bp, Homo Sapiens
tctacttctgcttttagtccaggatgtgctgacataaactcctataactccatctctgctttacttgggaacaccatgataatcagcaatttctacaatctgttttctaaatggtaagacaagtggtatttcaacactaagtgccagaaaagtaacgatgccaccaggttgtttacttttccctattctgtttctaatgactcaaagcagagtatgactacacagactatcttacaaattccctttttactttacatttgtcactaaaattccacagaacgtttgcattacagtgtttcagtctgaaaagtagtacagcttgctggtgaaataaaacttgctgacacatcaatgagtgaaagcctacaggataggtggtgggagtggggaggctgtcagtgaagttagcaagtctttgaaaggcagtcaaaaaaaaaaataaacagtaagaaatgtttgcaccatcctctggacactaagtatggtcctgatcaattaacaggggatcagtgttctctctggggatggtttccttcacatggacatacaggcagagacacacctcaactgtacaatggacatatggatctcattggaccattatgacatctctatgagctaggaagactcaggatcattcactatatacagatgagagaatgaaaccaaaagaagttatccaagatggaataatccatacaagttatccaggatggaataattcgtaagtggcaacagaatcagtgttgagcataagccacctctttcaaactgtgctaatttcacctcatcacacaccttctgactttgagagcttagctatttggttgacctaaattgtaacttagtagaaaatacatacctgagtctcttctgttcatatccagagaaagaactcttcaaggaatggtttggtgcttttgattacatctcaaatttcaagatcagaaacacaaaagctgaaccaaagtccccaacttaaaattaaaggcttcacagg

SEQ ID NO: 204114 - DNA, 1000 bp, Homo Sapiens
gaatttttatatgggaagcacttaaaacaacacttacctatcacacaggaaaacaccaaataaatgctagctgctattatgctatggtcctttttaggaaaaaaagaaggtggtttaatacaaaggttcctatcagaaaaacactgcagaaaggccgagaatagtagttaatgctagcattgatttttgtgtcctgtattaaatcatcatgagatgtccacttctgctatttttgcaaagttgaccatttggttaactgaacaagtatcgccatctatgatacaatacaatacaatacaatacaatacaatacaatacaatacaatacaatacaatacaatacaatacaatacaatacaatacaatacaatacaatggcagtgttgaatgctggaaaatgtagtctgtgaaacttatcacaaataaagaaaaatacgccatcagattaatagctttccttcatttcagtttgtgaaatgaattaatcactttccttcatttcagtttcagctggcaagcacacagctttgcattatcacagacccatagatggtgacaaattagaaggaacctcagtgatcacgatcattctgtacatctagtccaggacctcaatgtgcagctgggaaacctgagcccaaagacaggcatgacttgcccagatagaccctgtgtgtaagggccagcaccagaaactcaggctccgaagtgtctatctgtttactcatttacctcctttcactagacttgacagccccttagaggccagaatctatcatacttgtcaccttcctgccagctcagcacgcctagacacagaaggcaacagcaaatgaaggctgaaaagaactaaagtgatagtgttctttgcttctactaaggtattattttaactcaagaaagaagagatagttacctccttcactgaaagatgacccaagtggtaaagcaaggcagaaatcacaactaagcatcctgctggtgtgggagtcaggagatc

SEQ ID NO: 204115 - DNA, 1000 bp, Homo Sapiens
ctatgtttttaaatataaatataatattgtttttaatatagataatacattaacttggttcaaaaaatcaaatggggccgggcatgttgactcacgcctgtaatcgcagcactttgggaggccgaggcaggtggatcacctgaggtcaggagttcaagaccagcctgaccaacaaggtgaaaccccatctctactaaatatccaaaaattagccggatgtggtggcaggcgcctgtagtcccaactactcgggaggctgagacaggagaattgcttgaacctgggaggtggaggttgcagtgagctgagattgcgccactgcaatccagcctgggtgacagagcaagactccatctcaaaaaaaaaaaaaagaaaaatcaaatggtacagaaagatgtgtactacaatgaagagtttccctcctcgtctcgttgcccacccacccagttgccatcaggcaaccagtgaaaccagcttttatggtgtgagcttaagttccttcctcacttttgtattgggaaaactttcaaacccatggacaaattggaagagtacagtgaatacattgacgtggtatcaccagtcatttctgttttgcagtatttgctttattggtgctaaatgtctatagtctctatgtgtatgtacacacacacatttatactttatttatatacttttttctcttaaccatttgaaagtactctgcaaacatcacaactttttatccctaaatacttcagcaggtgtctcctaggaacaaggaccttttaatataattatatcaaatttcttccatttggcctaataacgccctttacaaaaacagtttttcactttagaatccagagagcactgatttcatttagttgtcacatctctttagtctgtaacagcactgatcagttgtcttctagagtggccttgtctgactggacttgtctgactggaagtatgtttcctcatgactcggcttcatcaggctaaatggtttgggcaa

SEQ ID NO: 204116 - DNA, 1000 bp, Homo Sapiens
aggtgatccgcccgcctcggcctcccaaagtgctgggattacaggcatgagccaccccgcccggccaaggactgcttcttctggcattccctacaaggcctgttgaggatgctgctaaggtccctcaagtgcctttcacgaagcatttctggcggaaacgctgcccttcccgacaagctgggccgcctccttggttggacagggcccattctctaatattttttcggcttgtgttgcgaccaaggtacatacaggtgtcgggagcacacgtgaacaaacgcaaagtgggtcgaagaccaacgcgagcgcccgctgaaacagcccaaggtagtaacaggggaggacggagaaagcagccgtgagagcagcgaatgaaagcagcgtcattcaaggcacatcactcaagggtaggagcagcctcggccgaacgctcacccgcggcattgagcccagccagcagaagagataggctgacgaccgccttacctccagaagtcggagacggacaaattcacgttactcatctgtgcctcaccgcttccggcgctgcgggatgacgtcagaggccggctgtatcgcgaccagtgacgtcaccagcacctctctaacggattggctgaaagaatcttgcccacttcccagatcaaaaagcgtccgccccaattgggttctctctgggccgtggtccaactgaggatcctggaagttatgcctgtggggaccagctctctcagcatctctctgcctgagggccactcgcctgtcactgcctcacagtctctgaattgggtgacatttcagacccaatccctctgtggacgtttctaggtggctgtgcagcttctcgatactccataaggagacgttcacaacctttaaggccatctctcctgctgcagacaacctgctgtagcactgctacttgctttttaaactacagtccgctttctcctttgtgcagggaggaaagaatggagcggtaagaggcagggaaacctgt

SEQ ID NO: 204117 - DNA, 1000 bp, Homo Sapiens
gtggctgggacaacaagcacatgccatcacgctcagctaatttttgtattctttgtacagccagggttttgtcatgttacccaagctggtcttgaactcctgagctcaagcaatccacctgcctcggcctgccaacatgctggcattataggcatgagccactgcacttgaggctacctataatatcataaacagaaatttcatttgctattatctttcccctagataaaagacctcattcacattttacaataggaaagcatccaagaatctaacatgtaatactcaaacattttatttatttatttggatatttgttttatgttaaccaggagaagttctacatgctaagaaattaatagaggtctacttaagaattctcattatccagttactaagagtccatggcagttaactctatggctattgaaattccaggatggaaatgtttagaaggcaacgtaaacatggattctaactttatctccttcaattattagccaagaatgtggctttggatatgtcagttagccaatttagttccttcatccttacaggcgagagctaccacacctcacctattttacttgggaggtcaaggcgggcggatcacgaggtcaggagatcgagaccatcctggctaacatggtgaaacccgtctctactaaaaatacaaacaattagccaggcgtggtggcacgtgcctgtagtcccagctactcaggaggctgaggcaggagaatcgcttgaacccgcggggcggaggttgcagtgagctgagatcacgccactgtactccagcctgggcaacagagcaagactccgtctcaaaaaaaaaaaaaaaattagtacatcatgaacatctcccacatcagcaaatatgttttacagcatcattttcaatgaatgcatagtattatattcacactgtctaattatcatttcctttttagcagacactgcttgttttttctgttgttttctgtgctgtgatgaattc

SEQ ID NO: 204118 - DNA, 1000 bp, Homo Sapiens
tctcaaaatggtgccttgggcctgggaccagagagggtagggcacgttccaggcaagcagtgtgagcaagaagctgtggggaaatgcaatccgctcacatctcagtcacacagcagcccactgcagggcagtggtattgtcttagatacgtataggaaagcctggtttccctgatcctccttggctgggttcatgtctcagtctcaacggcagcccacagaagggtggtagggactctcccaggggtgtgtgagagcacttggtctcccctctccctttttggagcagggcaacagctgcagccatgtctgtagatccccggtatctagactatcaaaataatgcctggctgaggctgctgtagtctcagatgcctgtaggattccatgtggatttcttttctggagcaatatatctgtgcaattttaggcagctccatatatcaggcctgaggtcctaagctagttggggttttcttgcacagccaagatcataaaagctctttttggagtgtggagccctagggatttctctcttattgtttcccagcatccaggagcctcttggggctctcagtcagtccccaaaccctctccttatttacttctggtgcttcccatcacttctctggtgagtcctagcattctctactagacaatctctttaaaatatatctacttactcttctggttcctctccatgaaggaggcacatactacctgtgtctagtcagccatcttctcattgtagttttaatttgcattgctctaatgactaatgattttgaacatcttttgaacagattgcttatttgccatctgtatatcttatttggtgaagtgcacaaatctttcgtctatttacacctgggttgtttgctttctcattatttaattttgagaattcttttcatattctagatacaagccctttatcagatatgtgatttgcaaatattttctcccacagaaggataacccactgtgtggcttatcttttc

SEQ ID NO: 204119 - DNA, 1000 bp, Homo Sapiens
gctcagagtgcattctgagggtcaaactggcctgtaagtgacaaactgaggtcacttcacatgtacatggagggagacaggctgtctttggagcagtgtccatgcaagcctgcctggagggagctgccaccctcagctgcagccccagacctcgcggttgctctcatccgtcgttcccagtgtgggcagtgacgcagcaccacggtaagttctgtagagtggacgccactcgctggcaaagcccagcagggcaaggaataagtgtcactcagtctttatccagaaaaatccaccaatgtacttttagtgcagtattaacacatggtagaaaatggaattgcctagaggattttaatctctgatggattattcttgtacctgtacctgtctgatggtcgtgtaagtccatgttaacaaacctgggaccacaggaaaggagaactgatgcgaatacaaacaggtggaggatttccaggcgtcagtggggtctgggagacttttccaagaagtgttttcattgcagttaacatttttaaagatgaatatctcactattataaaggtcaatgccacttctgtaatattaatttgcaattgaaaggtattttcttttaagaagtcccctttttcaagtttctcaaactggaattttcttgagcatctaagaatcctttcctttcaaaagatccccaagttaccccggtctaagctaagaagggttcagcgttggccggaagcataactctagctctccaaggccttgggctgcggcagggtttgcatgtccaggcagtaggtggaggcttctcttggtcagtgtgtctgctcagggggaggcctggctggggaagcgggtagcagtttgggaccagagcttaaaagagaaggagagaccggtgcggtggctcaggcctataatcccagcactttgggaggatggggcaggtagatcacaaggtcgggagttcgagaccagactgaccaacatggtgaaaccccat

SEQ ID NO: 204120 - DNA, 1000 bp, Homo Sapiens
tccccagtgcctaaaacaatgcctggcacactgtaggcattcagtgagcgtggagtgagtgaatgaatggtacacttatgccatggcactctttctggagaatttcaggtgccagtctgtcttgttagatcagtgcagattacattgcccatgaggggatgaggatgctgtttccatcagtttgattgccaaagttagtgctgcgtatgttttgtggttctcagtggttgccagggaaccgaggaagtgaaaggaaggggttgaaagcagcctcattgctgttccctgggcggctgtgccttgatgtccagccttgtctgtatggcagtttggcctggttgtgagagtggtgacaaggcctgggatagactgaccatgtcttgagaatatgtatgtgctgaagaatggcttcccagtccccaaacaccggcagcagcaggagccacttcttttacacatcagccaccttttcctctagcaatgaagctgtgatccattctttcagtgagtctcaaggaaatggttcagccagtttggcacattcattttcttgtcaggaaagtcaatgtgaccttgaccatcattggggacctgcggtaaacacgttgtgtgtctggctggattctaatgatcaaacagtgcttttggcacctcactgtgctgtacgtgtcatgtgctcctaatttattgtcctaggttgggggttataggtactaatttgcaagaatcatttctgacttacatggatcatgcccagcacagtgccactaccatggaggccttggataagtatcatgaaagaaaattgttgcagaaaatgaaaggaaagatgaaatatacttgctttgagtcctggacagtgtaattaatttgtagctgaggaagttattgaaaagtaactttttgtaatcccagcactttaggaggctaaggtgggcagatcacttgagcccaggagttcaagaccagcctgggcaacatggcgaaaccccatctctac

SEQ ID NO: 204121 - DNA, 1000 bp, Homo Sapiens
ctcttgcaacactctttttgcttgaagaaatgcaaatctctgtgaacagttaattatattaaatttttaatgtcatttaagaccagattttgaacccaaaaaagatgcttactcaatcattaaattataagccaagcataggagccactttgtataagcaatgggctttcaaataatggtcaagtgctgtaaagtcatttaaaaattaaatgtgtttataggcatatgttataatagtcaaaaatactgcaaactagatgaaactgagtatataaaacagtggaaagggcttaggactcttctcagaataactgatgaggggaaaatggttaaatattcaggaaatatatcaggatcattaacatcatgatcaaggactcaagaaataattaggcttctgacaatcagaatcctggacagattaacaagtccagtaaatagtcctcaaacagtgatttgtctctaccattgaacttttaatggcaccagaagtaaccagctttcctccttcagcatgaaactcttcaaaaagttatttccctctcagcaacagtgattgattagatgtggactgaacctctcatgtatgtatcacagattttctgacttgagagcctgtgttcagtctgtccagacatattttaattttcctcctagctctcttccatgctatttgtcatttttggttcctacattttctaatgtgaggaaaaaatttgaaattctcaaaaatcctgttttacaaaaaaattaaaaagatggcctaacctcaagaccttatgtaacactgaaaaatgtctatattaaaaagccatgctttaagtgaatttgagaaatctgaagtacaggaagaagagaaatacaaagaaataaaataaattgctaccattaggtatcataataacctgtattcaagtgcactaacaagtaaaaaagagtaatagtaaataatgctatgaacctccaaaacatagataaaaatgagttaaaagaagaattc

SEQ ID NO: 204122 - DNA, 1000 bp, Homo Sapiens
agtacatacatttatacatgaatttttctgaagcaaaagtccataacttttatcagattctcaaagggattctatattaagaaattaataaacgtttttggcagtggctcacacctgtaatcccagcactttaggaagttgaggcaaacagagcccttgaggccaggagtttgagaccagcctggccaacatggtgaaaccccgtctctactaaatatacaaaaattagccaggtgtggtacagcatgcctgtaatcccactactcaggaggctgaggcatgagaatcacttaaacccgggggatggacgttgcagtgagctgagattgtgcctgggcaatagaatgagactgcattccagcctgggcaactgaatgagactgtgcctcaaaaaaaaaaaaaaaattaataaatgtttttatttgtacttttaaaatgtgactctttatcttttagaaatatattctaaagtatttatagatagaaaagagttgagatttgtttcaaaataattgaggtatgaggtggggagtactggatggggacataaatgatacaagattggctatgatttgataattgttgaagatgaataattggtatataggaaattcatattattcactctaccttggtgtatgttgaaaatttcccaatgtaagttattttacttctttagagacagggttttgctatattgtctaggctggggtgcagtggctattcagatgtttgattgttgtacagtgtattctcaaactcctgggctcaagtgatcctcctgccttagcctccctagcagctgggactacaggccaatgtaggaatatttttagtgaaacagaaaaggggttcttggctaggtgcagtggctcacacctataatctcagtgctttacaagcccaaggcaggaggattacataagcccaggagttcaaggctgctgtgggctatgatggcaccactgcactctagtctgtgtgacagagcgagactctg

SEQ ID NO: 204123 - DNA, 1000 bp, Homo Sapiens
cttcaaccccacccttcaacttttcccttttatcttgtttttggacctaaatttgttttcgtttttttcttttatacatattatagaataacatcctaatcagtcagtattttgcagtactaaactggcctatggaattttccacaatgtttttcagctcctggcccatatacatttttaaatacagggcctgacaagagtaatgtaaagttgattatttgttaaaagtatacagaccgggggtggtgggtcatgcctgtaatcccagcactttgggaggccgaggtgggcagattgcttgaggtcaggagtttgagaccagcctagccaacacggcaaaaccctatctctccaaaaaatacaaaaaactagccgggcatggtggtgcacatctgtaatcccagctactcgggaggctgaggcacaagaatcacttaagaccaggaggtggaggttgctgtgagctgaggttgtaccactgcactccagcctgggcaacagagcgaggctctgtctcaaaaaaaaaaaagtatatagatgatgtttaaaatttccattcaaatatgagtttctaaagaccagaaaaaaaatgcaatcatctgttgttccagaaatgaactaacacccctttccatatgaactgtgccacagcagttgttttacttcaaatcaaatcagattatataggcttaatagaacataacacataaggatacctgtggaattgtttatttataagtcacatcactagtgtcttactgcatgcattttaatattaaacttatgttcaagtttacatcatgtggtttctttagtagcagtgacatataagaatacaaaatgtgttttaacttacaggtaggttaaataactataaatgtactgacaggaacagagatgttaatacggacatggaaaagcacaattggaaatatgtaacaatctaaaattatttattacagataatcaagtgaaatagaaactatattaaacttaatat

SEQ ID NO: 204124 - DNA, 1000 bp, Homo Sapiens
tgtaaaacacctggaatggtgctcgggtggagtaactcaagaagagccccttgtgtgtttcttgtgctgggcactgcagtgggcactggggatacaaaactgtcccaggaggacatggactggttttagagaaacatacgtaaacaaactatgagggttacagggcaaccatcccagagtgccccagactgggggtggcagggagaacaacagcggagggcttctaacatcagtgagaggcaagcctcgaggagaggaaatggaacagtctaagcatggaaaacaacgtgaacagagtcaagtagccaagaaggggtgaggctggaaagatgagcagggaagaaacgaagagtcctgtacaacacgttaaaaaaaaaaaaaaaaaaaacgaaggccactgaaaggccctgcgatggactgggccaggcacacacgtgcttcagaaaggtgactccaggccaggcatcatggttcatgcctataatcctagcactttgggaggccagggcaggcagatagtttgagctcacaaattcgagaccagactgggcaacatggtgaaaccctatctctacaaaaaaatacaaaaaattagccagggatgatggcatgtgactgtagtcccagctactcgggaggctgaggtgggaggacggcttgaacccaggaggctgcagtgaactgagatcacaccactgcactacagcctgggcaacagagccaaaccttgtgtcaaaaaaaaaaaaaaatcaagaaaggtgactctggctgctgctgcatagagaatggacggagaggccttgcacacaaggagctcccctcatgctggtctaatcacagaggaatgactgcaaaatatgcacacctaaaaaatagtgtaaggtacactatagggctcaaaatcaagataaaagtatccaaagatcaaaaacaggagaaaacccacagctgcaagaaaagggctgttaaaaagacaacaacttaacaaatgagagaattc

SEQ ID NO: 204125 - DNA, 1000 bp, Homo Sapiens
accattggttaaggccttccatatccattcatcttcttcagttcttgcttagtactttaggaaaattccttttacactttctcttgcctcttgtaaaacttgggattcttaagcttcttgttgctcttcctttcttttctatcttctctcacccagaacatttgtaggtgctcaatatatatatttgttttaagaatgaatgaattttctaaggccatgtttcttcaaactggagaatatttggatctgggactacggaagtttgagaaccactgcagtacattaaatgctgtcattttgggggattgcctgtaaccagcataattatgaaccacaagcgtggacactgaaattatgttgatacttgattataatgttattatctaggtgatctggaatattctgtgatttttttttaaagactatcattgaaatgattatatagcttttaaaaattatggaaaaaatacaaattctttgtgaaactttcagtgaaatcttttttgccccccacagccccatctgtgtggggtgagagtcattgttctaggaatttactgtttgttagcacttgattctaagaggaaaaggatgaatggatggaaattgtcctggcaaaagatctaggcaacatgtaaaattgttttccgtgttctgtgccatccagaatgttaccaagaggtggagcatgggtgagatggccagcgctggcatttatggatcactttagattagtggttctcaactgggggtgatttttcacctcaaggggcattaatgtcttgagacatttttgattgtcacagtgtctatgaggtggtgctactggcatctaacaagtacatgccaggtatactgctcattcaattcaacacacagggcagcccccacaaacaaataattatcctcctcaaaatatcaataatgctgcttagttcactgcatttagattactttcaagaaggttcagctatcacttaacctctcaaaccctgaattc

SEQ ID NO: 204126 - DNA, 1000 bp, Homo Sapiens
ccaatcacagatgcagttgaggtcatgactacaacaccatcagctagtatagttttctccaaagtgaagactgaaaactatcagaaagaatatagctagatacagtattgggtcaagttcataaaacatatgacaaatccctccgtctctgcagaaaagtttctttccaaaaatttaacagcattttacattcttaacttttgtctactaaatagacttctcatttgtccactgattctggaaacaattctaacaactttcatttattgactacttctatgcaccaagtgtatgcacatcaaatgctggtattttgcatatatttatccaaaaaatttatgaagtgaataccttgcactggagacacagcagggaacagataaattcctacctcttagaggtgatttcatcctaatgatctcaaatttcacttacgatctcattcaatcttcacaataacctaaaagggagatttcatgagatttcaaaccctgcctaggattaagctagattccaaccacagtcattcaagttccacagcacatagttttgttctattttactgcttctttccaataactcagcatcactggaatttcaggaatttgtaagttgatataaacagatttcatcaagaatagaaggaacacctctcaaaatccaaattaaaaaaacaggatacagtctgtccaagaatatgcaagacagccagggacacagcacagtagtgttagagtttcttatacctaacaataaaaaacacagaatattcaaaatcataattgccctgggcactgtaagcattgcctcaaattccaactgtcctagatctctcattatacagttggggctgtctcttgcactatgctctctgcgttcttatcactttgatatgctaaggagctttgaatttagcagagggtaaactgggcccagtaagtggtttcagatttaaattttaattcgttaaagaagcacatagttcctctgtagtgaattc

SEQ ID NO: 204127 - DNA, 1000 bp, Homo Sapiens
ggggaacatcacacaccgggacctgttgaggggtggagggcaaggagagggagaacattaggacaaatacctaatgcgtgtggggcttaaaacctagatgacgggttgataggttcagcaaaccaccatagcacatgtatacctatggaataaaactgcacattctgttcatgtatcccagaacttaaagtaaaatttaaaaaaatatacaaatatatatatgtaattcagtctgcaagttttaagatgttttgtggttggatgagattgtaagtgtaaagcaaatatgtgaaaaatgtgtcctgtgttttattcctgtttgagcgaagtgatttttttgtctactgaagatcttttatgacaacaggaatcatatttgaatttttttttcttttttgagacagagtctcgctcttttacacaggatggagagcagtggtgtgatcttggctcactgcaacctccgcctcccaggttcaagtgattctcatgcctcagcctcccaagtagctgggataacatgcatacgccaccgtgcctggctaattcatatttgaatattatctgcttttatgttttttattattttatattaagtttgaatagtgtactttattttaattgtctaaagaaagttactgtttagtttaaaatacttccatttttgcttataaaaagtccagaaacaaattgacgtctaaatgagacaaaattcatcatctcattgttgtctggtgatggaaatgcaaatgcaaatggatgtgtaaattttatggtactttacctttaaaaatgttttttgagctttagttccctggcagacagttgagaggtcacctccctgctgtaagaccagtacaacagagcacctatgtgtacacacatgccctccctggcccagaagagacatattccttgagtactcagagtgctagctaaaggattttgagcatactgagactatggcaattaaaaacataaacaaatgaactgaaaacaa

SEQ ID NO: 204128 - DNA, 1000 bp, Homo Sapiens
ggctaattttgtatttttagtagagatggggcttctacatgttggtcaggctggtctcaaactcccaacctcaggtgatccgcccacctcggcctcccaaaatgctgggattacaggcgtgagccaccacacctggccatgctaatttatttatttattttttaatgttttattttgtaagcagagatgaggtttcaccatgttggccaggctggtcttgaactcctgacctcagatgatccactcaccacagcctcacaaagtgctgggattacaggcatgagccaccatgcccggcagacaggaatatgttcagagaaatgtggtgctaggcgattttgtcatcctgtgaatatcatggagtgtactcacacaaacctagatggtatggcttcctactcacctaggaggccatatgataaagcctattgctcctaggctacaaaactgtacagtgtgtgacgtactcaatactgtaggcagttggagcacagtggtaagtgtgtatctatcatatctaaacatagaaaggcacagtaaaaatacggtatcataatcttaggggaccaccgttgtctatgtcgtctgtagttggcggaaacatatggtgcatgaatgtgtttatggatggttaaaaaagggctcatctcaattgagaagacgtgtcaggtgaataaaatatcttgtggggggcaggtagccaatcccttgcttggatctaagagtagagaaaacgtgggttagacacagccatcaggaaagggatcatggaatattcaggaacatccctgctttctggtgacaggatgtccctactagtggatcccaattctggcctgatcactggcatccaggggccgtctcagcagaagcacagaataggggctggttacccactatggggcctctttccccttcagaaaagtcttcagttccataagaactaaagtcagccacagatgtttagacacccatgtgcaggatttctgagcctgaattc

SEQ ID NO: 204129 - DNA, 1000 bp, Homo Sapiens
ccatatctctcagtcagagaatttcagacatacaatagacattagggataattgaggccctggttcccggctcagggcgcaggtctacatcaaaatcacctgaagatttctttctttttttttttttttttttttttgagatggagtttcactcttgttgcccaggctggagtgcaatgaaatggcacgatctcggctcaccacaacctccacctcccgggttcaagcgattctcctgcctcagcctcccgagtagctgggattacaggcatgtgccaccacgcccggctaattatgtatttttagtagagacggggtttctccatgttagtcaggctggtctcgaactcccaacctcaggtgatccgcccgtcttgtcctcccaaaatgctgggattacaggcgtgagccactgtgcccaggctgaagatttctttttaatactgagccagaggcctgtacctaagtatatgttcaattgttctggaatgggcatagttagcattatttttgagatttacctggctgattctaatgtgcagtgagggttgagatctgccaacctattccaaatgacttctcagctgaggaaattgagattcatagaggtgaagcagtttatcataactggtcagtcccttgcagagcccagcttagactcctgggaatgaactcacaacctagtgctgaaatttcattttctaaatgtttgatcctctctggttcccattttcttttttatctgtaaacacacacacacacgcgcgcgattggcttttctttccttaatgctgttctatcctgtgtccctcatgggtttgtttagcccaaagagacactaagcaagattctgaatacctaatcagcctgggccatagccccgtagaaccaagactgctgccaaattcacagcaatggcaagataaactttttgttcatatctctgcatgctatctagtgcattggcaaattgaaaacccattttttcccataagaattc

SEQ ID NO: 204130 - DNA, 1000 bp, Homo Sapiens
gaaatcttagaggtcttcctagaactggagttaatgttaattagaagtcaacatggaagattagcatccaagatggagttgcttcagcctccacagggtggaattaggcatttcttgatagcggcatctatgtcacagaaaggagaacctgagttaacccaccagaaacctccccctccatttcacaatcccaaggacagactatgtcatacagtgactgttcaggtaacagcatttgacagtgaaaactcttgaaaaggctcacttatcaaaaactgtttcttttttcctaacataaatgttttactcccatatttgctacttagcaaatagactgctgaaccttacagttcaggcaaagatatactcatgagtttactcagagacacacaagtgggatggtttaggattgtgttccatgtttggatgaccccaagttgtcttgctttgcctagatatgctgttacaaactaaatgtttgtgtatccccaaattcatatgttgaaatcctaaccctcacggtgatggtattaggaggtagggcctttggaaggtgattaggtcatgaggtggagtctcatgaataggatcagtgcccatttaagaggaaacatgatagcctgctctttctttctctcctctctgccacatgaggatacaaggagaagataattgtggcccccacaaaaaggttgaaaatttggctaaaaaatacatacatacatatatatatatataattctattaaagtttttaatagaaaattttttcttctttaacggatttttacttatagctgcatttataggaataactgatagttgctaagcaagggataggtgttacatggtttgaatctgatctatacacatgtattcttgtaccttgtcagtggaatcttttctctcaaatgaatctgataccttcactgggccctaaaaatgcctctgtttttcaggtctctttcctttcagtggactatttttgctccctggaattc

SEQ ID NO: 204131 - DNA, 1000 bp, Homo Sapiens
ttgatctctttgacatctgaccctccatgtatttctttagttcttcttccttttctttttatatataggtattcctcaaaatacctgaacctgtttcctcttgtttcttccttgttcatatcatccatcatggtgactttagttatctcaacaacactctttctctcatgcactctgtcctgttttctgatcatctgtattatatttcagctgccgagtaggcattgcagactaaatgttcatcaaactctgtgtctagggattgagctaataatcattgtccttttctatttccttatttcctgtttctgttcatcactacatttatcactcaccaaggctcaaagctttctttcccttttttttttctttaaaaatagggtctcgctctgtcgcccaggctggagtgcagtggcgcaatcatggctcattgcagcctcaaccttctgggctcaggtgacccttgcacctcagtctcccaggtagctgggactacaggcacgcaccacaacacccagctaatttttgtattttttagtaaagatggggtctcactatgttgcccaggctggtttcaaactcctgggctcaggtaatcctactccctcggcctcccaagatgttggcattacaggcatgagccaccatgcctgaccaggctcaaagctttgaaattgtgtttgagtccttgctcaagtcttataccctaatcatttatcagattctatccattctatcctcagaatatccttcacctctgctgcttcctgatcatttccactgttctagctctgacccttactgcctctcacatcacttcagtaatccatgttattgctctccttcagtacccatcacctcccaccctcatccatcctgcgtgttcctgccagtgtgacttttcccaacacataccccacacgtttttctctgttgtctaaaatccttctaggtccaaactaccagtagaataaagattatgtttctttttctggaattc

SEQ ID NO: 204132 - DNA, 1000 bp, Homo Sapiens
tattgcatgcatatgtatttaggatagttagatcttcttgttgcattgatccctttaccattatgtaatgcccttctttgtttttgttgatctttgttagtttaaattctgttttatcagagactaggatcacaacctccacttcttttttcctttcatttgcttggtaaatattccttcctctgtccttttattttgagtttatatgtgtctttgcacgtgtgatgggtctcctgaatacagcacactgatgggtcttgaatctttatccaatttgtcagtctgtgtcttttaattggggcatttagcccgtttacatttaaggttaatattatatgtgaattggatcctgtcatcatgatgctagtgcttattttgcacattagttgatgcagtttcttcatagcatcattggtctttatattttggtgtgtttttgcagtggctggtaccagttgttcctttccgtatttagtgcttccttcaggagctcttgtaaagcaggcctagtggtgacaaaattcctcagcattttcttgtctgtaaaggattttatttctcctttgcttatgaagcttaatttggctggatatgaaattctgggtagaaaattctttaagaatgttgaatattggcccccactctcttctagcttgtagggtttcttcaaagagatctgctgttagtctgatgggcttaacctttgtaggtaacctgacctttctctctggctgcccttaacattttttcctttgtttcaaccttggagagtctgacagttacatgtcttggggttgctcttcttgaggagtatcttagtggtgttctctgtatttcctgaatttgaatgttggcccgtcttgctaggttggggaagttctcccggacaatatcctgaagtgtgttttccaacttggttccattctcctagtcactttcaggcaccttaatcaattgtgggttttgtttttcacacaatcccatatttcttggatgcgtt

SEQ ID NO: 204133 - DNA, 1000 bp, Homo Sapiens
atatataggaatgtcacttgaaaggttgcttcctagatgtggttggatatgttgagggtgtgatatacgtaaacaatgaagccaatatccagcaatcttagacagaagctacttagataaggatggtcatactgagagtctggtatagaagatgaacaagcagatatccagcaaccatccagaaatccaactttgatacttaggcaagaggacaggcctgaagggagagactttagttacctgtaagaaactaactcacaaacccatgaaggcaaataggacagtacctcagagaattcctgcagttggaaggctacaagtcagttcttcctttgttggtgctccaggaaatcaaatataagtataaaatataaatataaaatgggtcaaagccattttaagattagaaatacatgggctccataaaaagtgaatacacactcaaagtaaatgtgattcatatttagctcatgtctcatctcaaacatttgattttaatttttattaacatttattaatttgttcatgtcctagtttaatttgctacatgaagtcatttgtattttgatgagatcaaaaagtgtgaaaccctcaccttttgggctttactctgtctgttcccagcatttatctccttcatagtcttagtaaaacagaaatgtatatgctccccagatcagcatacgttcaagacattgaggagtgaagaaaatcagttaattcactttctgccatcactccattttcttctcatatcgaacataagctgtacttcatcactataagcctatatccttgtttaaacaagaaatgtagtactgaatatgaaacatggctgttttttaaatttctctctctagggaattttgtgtgtgtgtggtgcttgtgtgtatattctttgatcctggtacttgaatagtttaccaaagtctattttccccgtgtcaccaagcatgacagacccctgaacccaaagactcatgaatattttaataacaaa

SEQ ID NO: 204134 - DNA, 1000 bp, Homo Sapiens
gtactacatcaagggaacaccttgtggaacaaaaatatctgaacaacagccttcagccctagaccttccctctggtagagcctacccaaatgagaaagaactagaaaaccaaccctggtaatacgacaaaacaaggctcatcaacagcctcgaaaaatcatgctagttcaccagcaatggatccaaaccaagaagaaatccctgaattacctgaaaaagaattcagggggttagttattaacccaattagggaggaaccagagaaacgtgaagcccagtgtaaggaaatccaaaaaaatgatacaagaagcgatgggagaaatattcaatgaaatagacagtttaaaggaaaaaaaataaaatgtcaggaaactttggacacacttttagaaatgcaaaatgctctagaaagtctcagcaatagaattaaacaagtagaagaaagaaattcagagcttgaagaattaacccaatccaacaaagacaaagaaaaaagaataagaaaatatgaataaagcctccaagaagtctgggatgatgttaaacaacaaaacctaaggataatcaggttcatgaggaagaagacaattctaaaatcttggaaaacatattgtggggaataataaaggaaaacttccccagccttgctagagacctagacatgcaaatacaagaagcacaaagaaaacgtgggaaattcgttgcaaaaagatcttcacctaggcacattgtcatcaggttttccaaagttaagatgaaggaaagcatcttaagagctgtgagacagaagcaccaggtaacctataaaggaaaacctatcagattaacagcagatttctcaacagaaatgctaacagctagaagggattgggggcctatcttcagtctcctcaaacaaaacaattatcagccaagaattctgtatccggtgaaactaagcatcatatatgaaggaaagatacagtcattttctttccttcaacaaatgctgagagaattc

SEQ ID NO: 204135 - DNA, 1000 bp, Homo Sapiens
aaattgacaaagcaggtttgtttattgcagggtagacttattaacttagaagagccatgagccctggtctttctgtttacagaaataaaatggaactctaaatgaggtttaatgggcttcccagatcatgttccctggacagattttttttttccttcttcaacagtaaatttgaaaatcaaaaggactaaaaataaaggggagtgcttcctgttataaataggactggtggcattcttcaaagcattttatagcctctaactgtgcattataatttcagagtggctgaaaagcattccaagttttcaagtggtacgtttactcagaagcatttatcaagcatgtactatgtgctgggcattgcgacaggcccaaagatggcccagaggcccatgcatgccccagacttgcatgatgctgtaaataaatacatcagactagcggagaaggacacggcagtgcagagagcagtgggagctggaaaggctgcaagcccaactctgagagtggccggtgggggcacactgggagctgatctctgggctgcagaggtgaactaggagatgtggacgcgtcagatcactcaagtgaacctgggtctgctggatgagctgtggccacagcaatgccatctagtgtcacagcagatttccttgtaccctctgtctgctggctccagcatagctttcttgttaaaaggctaaaggctactaggacacacttgagactttgtagtgtcatcagaagacggaaagacagtgagctgtagtatattaacagaagggcaccatgccagtaaatgcaacagtggcaggcagggagaaggaaaaacccaaagtaatatacaggtcaagtcttccttatccaagatgcttgagaccagaaatgtttcagatttcagatttttttcagttattaggatatttgtattatacttaactggttgtttcccaaatctgaaaacccaaactctgaaatgcttcaaaatcccaaacttttt

SEQ ID NO: 204136 - DNA, 1000 bp, Homo Sapiens
gctcttgttgcccaggctggagtgcaatggcgtgatgtcggctcaacgcaaactccgcctcccgggttcaagtgattgtctcagcctcccgagtagctgggattacaggtatgcaccaccacacccggccaattttgtatttttaatagagacggggtttctccatgttggtcaggctggtctcaaactcccaacctcaggtgatccacccgcctcagcctcccaaactgccaggataacaggtgtgcaccaccatgtccggctccttatttcattttctttttcaagagtagtggttataactgccacattttataaattctaagatattctttttttttttcatgtaacatatctgaaattaggataactcctaaaattgatgacgtcttaatattagctgcagttttcttctttattagcaagtagaatataaaattggtgaatctttggccaggtgtggtggctcacatctgtaatcccagcactttaagaggcccaggtggacagatcacctgaggtcaggagtttgagaccagcctggccaacatggtgaaccccatctctactaaaaatacagaaattatccaggcgtggtagcacatgcctgtagtcccagctagttgtcaggctgagttgggaggatcacttgaacctgggaggcagaggttgcagtgagccgagattgtgccactgcactccagccttggcaacagagtgagactctgtctcaaaaaataaataaataaataaataaataaataaataaaataataaaataaaattggtgcatcgagtcaactgggtcctagatatgacaaattttggcagatgtgtaggtgtggctaactctccacattttctgagacttatctctctctgacataacttgagggctgtatagaacaatctatctacttatctaaagcctagatatgggtaaagctcaggtatgtatgtactttttaaaaatatatgcaccctgctctcttctccgatc

SEQ ID NO: 204137 - DNA, 1000 bp, Homo Sapiens
gatcacaggtgtgctgtttttttgtttgtttgttttgttttgttttttgctttttttttttttttttttttgagacagagtcttgctctgtcacccaggctaaagagcagtggtgcaatctcagctcactgcaacctccgcctccagagtagctgggattacaggtgcctgccactatgcctggctaatttttgtatttttagcagagacagagttttgccatgttggccaggctggtcttgaactcgtgactttaggtgatgcacttgcctcagcctcccaaagtgctgggattacaggcatgagccaccacacccagcctcttgtattttaaatagtgttttgtataagatttcatttgtgttaaaaaaaaaaaattctacagcaaaagaggtttgaaaaaccgggactatgaatgatataatgtatattaagcatttaacactgcccagggacagacacacaaatagtaacttttaatagctatatatatatatttaaaaaaaatttttttttttgagatggagtctcgctctgttgcccacctggagtgcagtggcacgatctccgctcaccacaacctccgcctcctgagttcaaacaattctcctgcctcagcctccccagtagctgggactacaggcgcgcaccaccatgcctggttaattttggtatttttagtagagatggggtttcactgtcttagtcttgaactcctgatgtcgtgatccacccccctcggcctcccaaagtccaaagtgctggaaatacaggcatgagccaccacacccgagctttttctttctttcttttttttttttttttttcttttttttaagacaggtcactgggtcactctgttacccaggctggggtacagtggcatgatctcggctcactgcagtctgccttctgggtttaagcgattcttatgcctcagcgtactgagtagctgggactagaggcatgcaccaccactcccagctaattttttattttt

SEQ ID NO: 204138 - DNA, 1000 bp, Homo Sapiens
aggaataaactgtttcttttaaaaggcccagtgtcaaaagaagtcttaccacaggaaacaaggcaaatttctgaagaaagtcctgggattcatactgatcaaagtcaccaaaatccgctatatagaatgacaaacattcacgttaattatatttaaatttcattgcaaaatatgcacaacaaaattcaatacgcagtatatctagatggtatgctaatatttcagaagtcaaatttgttatagctatataaagtatatttttaaagtatctttttaaaagtgttaattaggcagatatgagtcttggcttggaaaaatgcctatgaattaaataaaaaaacaagttgcaagctctatgtaatatgatctcattttacagttaaaatgcaaacaaaacctaccctgtaatcatatatgcttgcttatgtacaggaaaatgtcaaggagaaaccaaattgtcaacagtactgatgacctctggggaatagacttagaccacttgaatatattacagcaagatatatttgtgttgaaatttttaatattttttaaaaaattgacaattcagcaaaatgcttatgaaaaagtaattcttaaagccaaaagtgatacttaagaaaatctaaagtaccttgaaaaggaatgtggctccatgtgcatcaggcatttgtttaaaaatgatacatgtctccatgccttcttatggctgaaggagttttattaataattattctgattaaatttcactcccaaggctaaatgccagttattgtttgaaataatgccccatcagaaatcttcccagccaggcacagtggctcacacctataatcccagcacttcagtaagccaaggagggaggatagcttgagccaaagagtctgagaccagcctagcaacatagcaagaccctatctctataaaaaattttaaaaatcagccaggcatggtagcgcacacctgtagtcacagctacttgggaggctcaggtgggaggatc

SEQ ID NO: 204139 - DNA, 1000 bp, Homo Sapiens
ttatggcccctgatttcccatatttgtggagtatgagctttattttcatataccaatcaataatgtgttttttggtcgggtgttggtggctcacacctgtaatcctagcactttggaaggccaagctgggcggatcacttgaggtcaggagtttgagaccagcctggtcaacatggtgaaaccctgcctctactaaaaataaaaaattagctgggcatggtgacacacacctgtaatccctgctacctgggaagctgaggcaggagaatcgtttgaacccaggaggtagaggttgcagtgagctgagattgcaccactacactgcagcctgggggacagagtgagactctgtctcaaaaaaacaaagaaacaaaataataataataatatgctttttaatcttacttttgaaaacagagcacatcactagtgatttgttttccctcatatgaaccagtgatagctacatcctagcacatcctagctgccacctgcgaagataagaaatgatatagggttagatttgggacagttattagtgaagaggcaaggatgatcttcccggactcagtgtaatccagatattgtcatgcagaatgagccactggagatactagcccgtggaggagacacagaagaaaggtaatggcaaaaactcttgtctggagtttttactattacaaagcagcattggacatcaacagcagaagggaagaaaagaagataatgagtgttcggcaactctgtgaccaagggccaaagataccagccaatttctagacattctccttggtacaaaggacagtgtgaaggcagagggtttccttcaccactgcattgatcgacgagtgttaaaaagcaacgcagaagaacaaaaccacctaccatattctggagcccttactctgtgccagacactgtgctgaatgccttacattcctgatctcatgtagtacacgtgactctaagatgggcactattacccaacttttctaggaat

SEQ ID NO: 204140 - DNA, 1000 bp, Homo Sapiens
ttgaatattttttgtagtaattgtaaatgtgattactttttaaatttctttttcagctagtttattattactgatttttgtagttgattttgtattatgcaactttactgaatatattgatcagatctagagttaaaaacaaacagtggagtctttaggtttttctatatataagatcatgtcatgtgcaaagagggacaatttggcttcctcttttccagtgtggttgccttggatttctttctcttgcctgattgctctggctaggactcccagtactaagttgaatgagagttgtgaaagtggggcattgtctactaagccagacaatggcagaacaaaaaaataaaactacaggcaaatactcctgataaacacagatgcaaaaatcgtcaacaaaatactagcaaaccaaatcaagtaatatatcaaaaagataatataccatgatcaagggggatttatcccagggatgcaatgatggttccacatatgcaaatcaataaatgcgatacatcacatcaacagaatgaagaacaaaaactgttaagatcatctcaatagacatagaaaaggcgtttgataaaattcaacatcccttcatcataaaaaaaaaaactctcaaaaaattacacattaaaggaacatacctcaacacagtagaggtcgtatgtgacaaacccatagcttacatcctactgaatggggaaaagttgaaagcctttcctctaagaactggaaaaacacaagaacccatatttattgtgttcttgtttgttgttgttgttattttgagacagggtctcactctgtcacccccgctggagtgtggtggtgctatctcagctcacttcaacctctgcctcccaggctcaagcgagtctcccaccccagccccccgagtagctaggatgacaggcatgtgccactacacccagctaatttttgtatttttagtagagatggggtttcccatgttggccaagctggtctcgaattc

SEQ ID NO: 204141 - DNA, 1000 bp, Homo Sapiens
tagtgagaccttgtctctacaaaaaatacaaaaattagctgggcatggtggtacacgcctgtagtctcagctactcaggaggctgagttgggcagattgcatgagcctaggaggttgaggttgcagcgagccatgttcacatcactgcacgccagcctgggtgacagggtcttgctctgtcacccagtctagagggcagtgattaatcaatcaaccaacctacctgttggtaacaaaagccatacagaggtcatatccaaggttacttggggctgagtcttccaagcagctgtcctcactttggctcaagtaaactctaaattgtattttgtgcctcagcctcttccttttagatcaacacagaccacaacaataaagcaaatattgcaataaagcaagtcatatgactttggtttcccagtgtatataaaagctacgtttacactatatcctgttaagtgtgtaatagcattacatctaaaaaacaatgtacaggccggccacggtggctcacgcctataatcccagcactttgggaggctgaggcaggcgaatcatgaggtcaggacttcgagaccagcctggccatcatggtgaaaccccatctctactaaaaatacaaaaaattagctgggcatagtggcaggcacctgtaatcccagctattcgggaggctgaggcaggagaattgcttgaacctgggaggcagaggttgcagtgagccaagatcgcaccagtgtactccagcctgggagacagagtgagactccatctcgggaaaaacaaaaaacaaaccaaaaaaaaaaacaacgtacataccttaattataaattcctttattgttaaagatgttaatgatcctctgagccttctggagtcgtaatttttttgccggtgaaggatcttaccttgatgttgatggctgttcactgatcagggtggtggttgctgaaggttgggatggctatgccaatttctttaaaataagacaacaatgatg

SEQ ID NO: 204142 - DNA, 1000 bp, Homo Sapiens
gatcttgttcttttttatggctgcatagtattccatggtgtttatgtatcacattttctttatccagtctactgctgatgggcatttaggttgattccatatctttgctattgtgaatagtgctgcaatgaacatatgcatgcatgggtctttatgatagaacaaatattcctttgggtatatacccagtaatgggattgctgggtcgaacgttagttctcaattctttgaggaattgccacactgttttctacaatggccgaactaatttacactcccactagcagtgtagaagcgtttccttttctctgcaaccatgccgacatctattattctttgattttttaataatggccattctgactggtgtgagatagtatctcactgtggttttgatttgcatttctctaatggttcatgatgttgagcatttttcatatgcttgttggctgcatgtatgtcttcttttgaaaagtatttgttcatgtcctttgcccactttttaatgaggttgtttggaaaaacagttttcaatgagcacaacctgactggctgcagaaacatcagacacttcttccctctaatttcccattcctctttagtccagctatctgaaaggcagacactctgtatttatcctctgtcctcctccctcctagttctgcttttcatagtaactatctctgtataacagttgatgatatattttatataaaattatcataagtatgtgtctcttatatctttgtaccaagaacttaaaccactcacacagaccttcaactagatgaaaatcagctttgttacctttatatatataattaccacccatcctgacaaaaacaaccttgtctgcaaaactacattccaacagcaagcacatcaaatgctcacatacctgaattcactgcatccgttctactctcccacatgaataacattattctcatctaacatatgaggttagagaggctaaggcaggctaggtaccttgttatag

SEQ ID NO: 204143 - DNA, 1000 bp, Homo Sapiens
tcttcctgatgaattgaccattttattatgtaatgttcttctttatccttggtaattttttttttgctctgaagtgtactttgtctgatactagtatattcaccaaagtacaatttagtatttgcatactatctcatttttcattctttacttgtaacctatctatacaagcatatttgaaatttatttcttgtaaactgtatatactgcgatcatgtttatttgtttaatgaatctgaaaatctatcttttttattaagttaaaacacataatataaatttttgccatatatttatttgcaaatataaaatttgtcatcttaaccattttaagtctataatatactgttaactatatgcacattgttgtacaacaaatctttagaacttattcatcttgcaaaactggaattctatactcatcgaacaacaactccccttttccatttccttccagcctccagtaaagactatttattatactttctgtttccaagagtttgactactttagatgcctcataaaatagaatcatgtaggatttgtcctggcaatctctgtcttttaacttgtgactttaggccatttctatttaacttcattattgatatgtttggatttagctatgccatattattatttgtttgatttcccccctgttttgcttttttatttttccccattttctgccttcttggattattttgattatttttgtattatcttttaatttaccaagcatgtttttgctatgtctcttggaatagatttgtttagtgttactttgaaaattataatgaacatattttacttttcacaggttaattagaatcaatgttttatcacttaagtggaatgtagaaaacccacaaccatatgtgtcactttaccctccccactttatgttatagctgtcttttagtttacatttatatacattgaaacatttatttaatgttattatttttcttttaactatcaaatgtattttaaagaattc

SEQ ID NO: 204144 - DNA, 1000 bp, Homo Sapiens
gaatggattgtactccctgaaaaacaatagctaagccatctcttaacataatagtgtctgctcaaggcacctgaaatgcagtcagaaaaaacagatgcgcttgatacgctatgtcactttatagttgtagtttttctcccaattgctttggtttggttcacgcctagatagatagtctaagaatccaaaaagcatagagcttgaaatggcacctagacttcatgtctttatttatactgtgcttcattccacaaaaaaagtaaccaatttaggattcttaatagttaagctacttacttaagggttttagaaactgagactctgagaagtgatttccccaaagtcactctgttagttagcggcagggctggaactgagactcctacttttctgtatccttattgaagagagttgtcattacatcccaccccaacccaccccaccattcattcattttttttttttcaataactatgttaagcacaaacacttgccaggcactgtgttacccctagatagtgtcatagggagtaggacggacatgagtcctgtccttggaatgcttcccacccagagagaaattcagatttggagcaaatgttcacacagatcagttaggtaaaatatgaaaggagcagacctataacagcaatcattgtctagggtgctatgagcatattaagaaggtcctggaaggcttgttttaggaaatgacgtttatgatgagctgtgaaggagaaataggagtaaatcagccaaagtatttgtcaagcagagcagaagagagtggggtaagagaagaccctgaggcgggtagatctcagctcagctaagaagtggaaagaaagtctgtgcagctggactgaggcataagtgagcaaggggaagaagcactagagggggccagagatgggggctgggacctcagagcttccttatcgactttgctcttgatcctaagtgcattaagaagccataagaaggggttagaaatatgatc

SEQ ID NO: 204145 - DNA, 1000 bp, Homo Sapiens
ccacatcatctgcagtaggacgggggagttggagccctggtcaggccactctgctactgaccacagttttctcatctctaaaaaggcgcagtaacaatataattaccgtatgcagtcccccaggatacagggtcaaaggagagcacaaccatcgcagttggaagcccatggggcaggtgagtcactgttgtcactactggggtcaatttttttttttttctttttgagacggagtctcgctctttccccaggctggagtgcagtggcgcgatctcggctcactgcaagctccgcctaccgggttcacgccattctcctgcctcagcctcccgagtagctgggactacaggcacccgcagccacacccggctaattatttgtatttttagtagggacggggtttcaccgtgttagccagaatggtctcatctcctgacctcatgatccacccgtctcggcctcccaaagtgctgggattacaggcgtgagccaccgcgcctggggtcactattgaagttggctaatgtcactattgaagtcaagtgagagagagggccctcttggagtcagaccacctaggttcaaattctggatcctgcttccggctcctttcctctgtcccccttctcccctcggtgccctccaaccagtgggcctgggaaagcgtgttcatgctggaaatgcctgcccagcccttgcccagtcacacagagcaagtgccccagaaatgtcctgaacctcagtttactgaggggaaactaagaaccttctggctacagctcttgggctgagcagggattaggctcgggtctgcgatcccaggccctgcggcctcccagaggcttggttgagagctctggctctcactcccccacctccacccagcacctgccccggtccaggctcaccccctacccctccacctggtcagtggtggctcggcctcctctcagcccctccacccctcctggctgtacacaccctcaagctaacggaattc

SEQ ID NO: 204146 - DNA, 1000 bp, Homo Sapiens
ttggattagatttcctaatattttgttaagaattgttgcatttgagtcaacttaggtacccaaatggttggctagataaaatgtggtatatttatatcatgtaatactatacagccataaaaaatgaaaccatgtcctttgcagcaacatggatatagctggagacctttatcctaagcatattaatgcaggaacggaaaagcaaataccccatgttctcccttattcatgagaactaaacatgagtacacatgttcacataaatgtctaatgtgaacaatagacaccagggcctactcaagagagggtggtggaaggagggtgaagatcaaaaaactacctattgggtactatgctcactacctgggtgattaaataatttgtacaccaaaccccagtgacacagaatttacccatgtaacaaaactgcacatgtataccttgaaaccaaaataaaagttgaaaaaaaaaaaaaaaccacccatggattgttgcatttatcttcatgaggaagattggaatgtgatttccttttcttataatgtctttatgaggttttagtatcacggtgtttatggccacattaaaatgagtaggacagtaagtaatacctcttcagttttctgtaatgatttttttagaatccatattttattttattttatttttttgagacggagtcttgctttgttgcccaagctggagtgcagtggcgtgatctcggctcactgcaacctctgccgcctcgtttcaagcgattctccctgcctcagtctcccaagtagctgggattgctggtgtgcgccaccacatccagctaattttttttgtatgtttagtagagatggggtttcaccatgttggccaggctggtctggaactcctgacctcagatcatccgcccacctcgacctcccaaagtgctgggattacaggtgtgagccactgcatccggcctagaatccatattttttaatccttgaatgttttggtagaattc

SEQ ID NO: 204147 - DNA, 1000 bp, Homo Sapiens
ttccccagcagtgctctgaagactggaaatagcactagcaaaaacagatgacatggctttaatatggttgggaaaaccaggtttgaagactcgaagtggtgggtgtgaatgtgaatactgccagagaatgaacaaaatgagatgacacatgggatggttgaaggcagaacatttactatacagtagggatccttttgtcttggtcccataagaatctggtagttatttggttaattgagaaagttatttaaagtagggagtcacaaaaatgattcataagtgcatgtaacattttattttaacatacacatatttattaaatattttgaaagagggcctataatttttctttgagaatagtttctttccttttttttttttttttgagacagagtctcgctctgtagcccaggctggagtgcagtggcacgatcttactcactgctacctctgcctcctgggtcgcagttcaagcaattctcctgcctcagcctcccgagtagctgggattacaggctcgtgccaccacgcccagctaatttttgtatttttagtagagacggggtttcatcacgttggccaggctggtcttgaactcttgacctcatgatctgcccgccttggcctcccaaagtgctgggattgcaggcgtgagccaccgcacctggcctcctctttcttgaacaaaccacttgtataatgcattgataacaaactccagttttaatccctttaaaaaggaagctaaagacttgtggatgcagaattctaaatgcaactgtaggttttttttaaaaagtagctcaccttattcaagtctttgagtttagttttcatagaagtaatttattttcactcatatgaaatgttgaaatcacataattgtagtaacaactacataggctgggtagctgactcttgaagcacaagaacagctaccttggttggagctaaagtgctcatggatgttctagagagggcctagtagccttgagaattc

SEQ ID NO: 204148 - DNA, 1000 bp, Homo Sapiens
aaggaagggaagggaagggaaaggaagggcgggaggaggaagggaggaaggaaggaagaaaggaaaagaaaaagcaagcaaacaaagaagtgaagggatagtaatgtggtttggttgtatccctacccaaatcgtatctttgaattgtagctcccataattcccacttgtttcgggagggacctggtgggagataattgaaccatgggggtggtttcccccactgttctcgtgttagtgaataagtctcacaagatctggtggttttataaggggaaaccccttttgcttggctctcattctctcttgtctgcctccatgtaagatgtgcctttgccttctgccatgattgtggggcctccccagccaagtggaactatgagtccattaaacctcttttcctttataaattacccagtctcagttatatctttatcagcagcatgaaaacagactaatacagatgtgttgagaggtcaaaaattctagatactttgggattgaaagacatattgaatctggagcgaaaaggacaccccatttaacaaactgccaaatgcccctctcccaagggcccctcccttcccacctttatctgaacatcgaagtgtgccatcctgttgtcttgcccaacaatgaatggcaaggcaagcagctgggactatctactcgtagcttgtcacaaatgtgctccaactccagaggatggtgcagtaatttcctccctttttctttcgggttgtgctttctgctactcaaaagttctgctctcctgtgatcaagatggtaagtcctgtttcatgctgttgcccctttggaattgtgccttcaaattccatttgcctggaacagtcacattcttcagagtgatgggcctcaaccacaaaacagcaacagcaaaaaacatttttctctaatatttgttactccaaataggttatcttcaatacgttattgtggtaagagattcttctcaggagtgtttgctgctgtcaggggta

SEQ ID NO: 204149 - DNA, 1000 bp, Homo Sapiens
tgggctacactctgcttccaatgtggcgccttgaatgctgcatcctctggagggatgaaatgcagtgtccttgcatagcagaaggtggaaggacaaaaaggaccaaactccttccatcaagtcattttataatggcataaatccatttatgaaggcagagcccttatgccctgaccacctcaccaaagtcctcacctcccaacactgttgaattgaggattaaatttctaccacattgatttttggggatgcattcagacatagcatttacctatattgagatctttatttcttcacatgggttcaagttactatcttgtgatagttaccatatataggattcttggttggtgatgttgttcttttagtactttgaatatattggcccactgccttctagcctccaaagtttgtaataagaaatttggtgaaaatcttattgaggatcccaggtatgtgatgacttacttatcttttgctgctttctttttgaattttttagagacagggtctcactgtgtcaagcaggataaaccgcagtggcacaatcatagctcactgtaatctcaaactcctgggctgaagcaatccacctcagcctcccaagtggctaggactagtggcgcatacctccaagcctggctaatttttaaagtttttggggccaggtgtggtggctcacgcctgtaatcccagcacttttggaggccgaggcaggcagatcacaaggtcaggagtttgagaccagcctgagcaaaacgatgaaaccccatctctactaaaaatacaaaaattagccgggtgtggtggtgcacgcctgtaatcctagctactcggaaggctgagggaggagaattgcgaattgcttgaacctgggaggcagaggttgcagtgagccgagatcacaccactgcactccagcatgggcaacagagtgagattccgtctcaaaaaaaaaaaaaaaaacaaaaaacaactttttgtagagttacactttttt

SEQ ID NO: 204150 - DNA, 1000 bp, Homo Sapiens
acttgttctatcatcaactcaaaagtccaaagtgtaaagtttcatctgaaactcaaggaaagtctcttaagctgtgagcctgtaaaataaaaaacaagtaatttacttccaagatataatggtgatacagacattgggtaaacatttccatttcaagaaggagaaatcagccaaaagaaaagggcaataggccctgcccaagtctgaaactcagcagggcagacattaaatctttttctttttttgttttttcttttattctgaggcagggtcttattctgtgaccaaggctagagtgcagtggtatgatcacggctcactgcagtctcaacctccaagctcgagcaaccctcccacctcaccctcctgagtatctgggatcacaggcatgcatcaccacacctggcaaattaaacaacaacaagaacaacaacaaaaagtcatttgtacaaatggggtctcactatgttgcccaggctggttttgaactcctggtctcaagcagttatccaatcacagtttcccaaagtgttgggattacaggcatgagccattgtgcccagccaagaaattaattcttgaagctccaaaataatctcctttgactccatgtcccatatcctgggcacactggtgtcagcggtgggctcccaaggtgttgggcatccacagccccatggctttgctgggtgcagcccatgtggctgctctcatgggttgtagtctggtgcctgcagcttctaggttgagggtgcatgctgctagtggttctatcattccggggtctggagcatggcagccctcttcacagctccactaggcagggctctggagggcattctctgtgggagctccaactctatatttctccttggcattgccttagtagaggttctctgcatgggctcctgcatcaggcttctacctgggcacccagagttttctatatatcctctgaaatctaggtagaagctgccaagcctccatcactcttgaattc

SEQ ID NO: 204151 - DNA, 1000 bp, Homo Sapiens
acaacttgcataaagacacaactagaaaaccatggggcataactggagaataacaaacagattattacagatatggctaagcttagtgtagatgaaaggaggtagtggaaacaggttggaaagttagttacatgtcagagcagtaggaaaagattgagtgcatacacttaatattacagtctgatgaaaaacattaaggccaaaaaattttcaaccaactttcaggacaaaagctaggtgggactagctactagaggatctacttaccatgttttcttggccaattcctgtttgtaaaatctttgtgcctcagactgtaaacagaactttctaaaactgatctttagaagatgcttctgacgtacagcctgagccactgagctttgtccttatcattcccagtttgtaggctgcatcagcagggaaatgcagtgggattgttttcataggcccttagctcactataaacgtacttctcaagtcttggccctttggaaatggccagttcgtgcactcaactcatctgcgtatttgagtgctacatccagataatgagccactctcttcactttacttcccttcaaaaagactgatcgatggagcagccttcatttctgttacattatccagtcccaggcagtgatgatgtttaaacgtaagacagagacgtttctatgcagcaatggaactttaaaggaagctggagccaatgacctttcactttgaagccaaagaattacaagcataaaattttcagtcttgctaagaattggggctggagaaattagcagaaagtcctctttaagccccacaattcagtatgtggtgcccaaagcctttatgtactcaatctatgtctcatttagcacttccctcttattttgatgaagtttatatgtgccatcagaataaacatggttgtaaccattattggtgattttgtgggtaaaaattggatattccattttatctccctctttgctttaatgtaaatgaattc

SEQ ID NO: 204152 - DNA, 1000 bp, Homo Sapiens
gccctctttaggttttggagacagcatatcccacacctaggaatatgctccatccatgtaccggatgacacagaaagttgtgttttgattggggcccagagcaggaaagggctcagcagaagctccaggctacaacacaagtggccatgcggtgtgggacagatgagctggcagagcccaaagtacccgaggtatctgtggtgggaacagatgcctgtgaagtttatgacaagaccctacaggagaatcacaatgtagacacctggggttctggagcagggccatgccatctgtagccaagaattttatacttcttaagaaacaactcttgatgctacagggttctggtagagacagatcatcagaccatggatcatcaagttgaccatgtgaccaaagctgttcatcatgagctggattctgccatatccaccaagtcataaggtcaggcaaagccagcagcaattcctaagatagaaataatacaactggggttgggcatagcagggccagagggcagaagatagttacgtgagcaggtggcccagacatctatgtcatccactacctttgcaccagtacctgcctgttcctcatttcacacctttggctgcctggggagctctttataatatccagctgatagaagagaaaaaaagccatgccttatccttagataggtcagctcagtgtgtgtgagcaagacaaaaaaagaccgtggctgcactgcagccccacacaggggcatccttgaaagacagcagagtggggagtccttctagtgggcataggttgtgcatcatgcacctagccatccactgtatgtggaaagagaaggagcctgagcttagactatacatggatctcatgggcagtggtgaatggcttggctggttggtaaggggtctgaaaggaataagattggaaaattggaaacaaggagacctgtggtggaggcatgtagttggacctataggagtgggcaccaagtgtgaagatc

SEQ ID NO: 204153 - DNA, 1000 bp, Homo Sapiens
attacagtatttcttttcttttttttttttgaaacagggcctctctttgtcacccaggttggagtgcagtgacgcaatcatagctcactgcagcctccaactcatgggctcaagtgaccctcctgcctcagcctctcatagctgggactacaggcatgtgccaccttgcctgactaattttatttttttacagagatagagtcttactatgttgcccaggctggccttgaactcctggactcaagcaatcctcccaccttggcctcgcaaagtgctgagattccaggcatgagccactgtgcctagccagaatatagaatatggaatttttatagaatattatatcacagctttttttctaacacaacagttgctaaaattatattggaaatagaagtatgagtagaagtcaaaaccataattgaccctaataccacctgtagtaaaactagggaggataagatccccttttcattcctgagttggtttttttccctctttaggctagatgaacagtgtagtgctattcccacccgtaccatgcatttcgagaagcactggagattactggaaagtatgaaagcacagtatgttgctgggaatggttttcgaaaagtgtcctgtgtgttaagctcaaatcttcgtcatgtgagagtatttgaaatggacatagatgatgaatgggagctcgatgagtcttcagatgaagaggaggaggccagtaataagcctgtaaaaataaaggaagaagtgttgtcggagtcagaggcagagaaccaacaagctggtgctgccgctttagctccagagatagtcattaaagtggaaaaacttgaccctgagctagactcctaatctagcttgccattattgtgtgtgtaattatggccaaaaggacataggagatggactaagatgtcttggaccacctttgtgtaacaaagaaataaacagtaaattttattttttcaaaaaaaaaaaaaaaaaaaaaaaaaaaaaa

SEQ ID NO: 204154 - DNA, 1000 bp, Homo Sapiens
gaaaggtcctgttgctcctcaacttcaggggaaacaatagggttcaggtctgaaactcagacttgtttgagaaagataatgtgctttctttccttcttagggtgtgagatgaactagaacatttcaatatcttgagcgtccaacaaaatgctacttgggcaatctgagccaatgattatgccaagttctttgtaggagaggaattggcttgaaaactttatcttctttctcagtgtatctatggtggaagaacactggatcaaggaactctaaataataattcttggagcagctatttcaaatcttattcttacatgctaatagaaaaaagataggattattatttcctccctcactcagaatgcagtgataactaccaaataaaccaatgtgaaagagtcagttgtcttggacaccatctctacttcagataaatctgggtgcatagcttgagccagtaatttgggctaaagtgtgtttcggacttagaaatttgtgcaatagtcaactgtctaaagcagtgttgttcaaatagaactataatgtgagacacacaagtattttaaaattttctagtagctaccttaaaaaagtaaaaagaaatgtgaaattaattttaaggacttaacccaatatgttgcaaaatataatttcaacatgtattcaatataaaaattattagatattttaggctgggcacggtgactcacgccagcactttcggagtaatcccagcactttcggaggccaaggcgggcggatcacaaggtcaggagatcgagaccatcctggctaacacggtgaaaccccgtttctactaaaaatacaaaaattagctgggcatggtggccggtgcctgtagtcccagctatttgggacgctgaggcaggagaatggcgtgaacccggagggcagagcttgcagtgagccgagatcgcgccactgcactccagcctgggcaacagagcgagactccatctcaaaaaaaaaaaaaaaaaaa

SEQ ID NO: 204155 - DNA, 1000 bp, Homo Sapiens; identical to SEQ ID NO: 114745

SEQ ID NO: 204156 - DNA, 1000 bp, Homo Sapiens
aattgctttggtcagtatggccactttcatgatatcgattcttcctaacaatgagcatgggacgtttttccatttgtttgtgtcctaatttccatgagcagtggtttgtagttctccttgaagaggtccttcacttcccttgttagctgtattcgtaggtgttttattctttttgtagcaattgtgaatgggagttcatttatgatttgcctctccgcttgcctgttgttggggcatagaaatgctagcaatctttgcaaattgattttgtatcctgagatttgctgaagttgcatcagcttaagaagcttttgggctgagacaatggggttttctagatataagatcaagtcatctgcaaagaaagaaaatttgacttctctatttgaataccctttattttgttctcttgcctgattgccctggccagaaattccaattatatgctgaataggagtggtgagagagggcatctttgtcttgtgcctgttttcaaggggaattcttccagcttttgcccattcagtatgatattggctgtaggtttctcatattattttcttaacattttgaggcatgctcctttagtacccagtttattgagcatttttaacatgaagtgatgttgaattttctgcattattgagataattgtggtttttgtctttagttctgtctatgtgatgaatcacatttattgattttcatatgttgaaccaaccttacatcctggggatgaaaccaacttgattgtggtggataagctttttgatgtgctgctgaattcagtttgccagtttttactgaggatttttgtgttgatgttcaacagggatactgaactggagttatttgttgttgttacatctctgtcaggttttgatatcaggatgaatctagcatcataaaatgagttagggaggagtccctccttttcgattttttggaatattttcagaaggaatggtaccagctcttctttgtacctctggtagaattc

SEQ ID NO: 204157 - DNA, 1000 bp, Homo Sapiens
ttagttgaatttcaaacctttcatataagccattttgatttagctaaagaatgttatagcctgtagaaggactaattagagccaataatttgactgacctgtgttagctctgaagcacttagtggtaataatactgtttttgcaagatggatattgtactgttgagcttgtctggtttgagaagctcactgttttatggtctgtgtgtggtgatcatttggatgtaatgatcaaatgggggttgcccaaattgatcgttataataggattccactgtaattacatttccataaatgatactcaaattcactagggaaatcaacaaccccttggtgtgcctacttccagctctgattacaagttcaggttctgtagcattttctaaacaaaaggtaattaaaattttacaacccatagttaagccaaaataaaaaggcagctttttattctagattgaaaagtactgctctttgtagacaagagcagaagacatttcaatttagaagaataggcagatgtttggatcttatacaaattaatgcatacatattactgagacataggcagtaagtaggttggagtcggggtcatgggttcaaatcccagctccattaattctatatctacatcatcttggatgtcattgaatcttctgagcctcagtttcctcatctttaacacaggaataatatggtttctgcttcattaggtttttgagataattaaatgacctattgcttgtaaagtgctagcacaaccctggctggacatgttagtaagtgctcaatatgcgttagtttttattgttgtcatttagttagattttgcttgtttgttttttggctttggtttttacggattcagccatcatctttccctggtgccactgtaggaaagattgtattttgtttttctgccttagagtgaactgaatgtttccagtcccatgtataccaatacctagtatccttagtttattaattcttctgttctagaattc

SEQ ID NO: 204158 - DNA, 1000 bp, Homo Sapiens
agccataattaccttaattttgaagtgctattacatttttaataaaagtgtttaatggcatattttatctctttatttactttaatagattcagagacgatggcgaggctatagggttcggaagtacctctttaattattattatttgaaagagtacctgaaagtcgtttcagagaccaatgatgcaattaggtaagtagtgcaatcatccattcactagggaaaactttggaaagattactcaatagatgttgatcaacaccatagttagaaatatttttttgttttagatggagtcttgctctgttgcccagtctggagtgcagtggcgcaatctcggctcactgcaatctcctcctcttgggttcaagcaattctcctgcctcagactcccgagtaggtgggataacaggcgcccgccaccacagccggctaatttttttctattttttagtagagacggggtttcaccatattggccaggctggtctcgaactcctgaccttgtgatctgcccgcctcggcctcccaaagtgcttggatcacaggcgtgagccactgcacccggctaaaaatattttctaaaagtcagtgatgtttaggcagacatttattgataaaaaatatatatatgattctatttaccttaatttattattattatattaaaaaaatcttgtatccttcactgcaagttatttatgtgtgtagtatcttgtatatttatttatgtgtgtagtatcttggtcctatacaaaatagtttcaggaaaattgtttcatgatgagatgaatttatctgtaaaacgatctagagatgcaacattaaatacaaaaagcctcagatgcatttgagaaacatgttccatagcaagaacttgcctctcctagaataaaatatcatgaaacatattaaaaaggtctgttcactgtcagttttgatttgtttaaacacataggaggataggacatagatttaggatatgggatatgtagaattc

SEQ ID NO: 204159 - DNA, 1000 bp, Homo Sapiens
gaggatttggccactgccttcaagtgagctttcagttaaggatgactcagctttgtcacttaagtgactaagttgctaatgataccatttttggagaaaagccacacataaaaaaaaaccttgtctgaaagggattattaccatacatttaagataaatggaagccaatatagcataggttaagtgttccttactggaaatgcttaggatcagaagtgttttgagatttcagattttttcagattttggaatatgtgtacatacataaagagatatcctggggatgaaacccaaatctaaagatgaaattcactgacattttctatacaccttatgcacatagcctgaaggtaatttatacaatattttaaataattttgtgcatgaagtaaagttttgactgttttaatgcaatccatcacatgagaccaggtatggaattttgcacttggagcatcatgtcagtacaaagttttggactttggagcatttaggatttcagattttctaattagagatgctcaacctatatatattttctgataatttttttaaaatcatattgcagcaaatttaagatagaaaaaaagaatctcattaatcttgttatatacatcaacctacccactgaatatccattaacacagttctttctctaattaaatagacataaaagttgcagacaggccaatattctctggaaaaaacaaattacctgaatgttggctgggaacgtttcagcagcttgtctagagcggaggagatgggggacaatctttaacttgactcttgtactgacagggtcccttttcaactctggcttcagaactgcaccctgttgaaaatatgcttgattataactcagcaattcaaaattattttgaactgaaaatgtcatgagaattcatcttaatcagtggtctctcaaactttgtttcaagatccctttacactcttaaaaattactgaactctccaaagagcttctgtttatatctgtg

SEQ ID NO: 204160 - DNA, 1000 bp, Homo Sapiens
atcaagataatgaacatatccctcactcccaaaagcttcctcctgcttctttttcatcccctccccagactcccatctccaagcaacaaggatctgcattctgttgctatcgactagcctacattttctacaattttatgtaaacggaacactaaaggatgaacttttttttttgtttggcttctttcacttggcctaattattttctgatttattcacgttgttgcagatctcaacagttcatgcgtttttaatcactgagtagtgtttcattgtatggatataccacaatttgtccatttacctgttaatgaacagcggggaagtttccagtttttgactattacaaattaagctgctatgaacagtcacatacaaatcttggtatcaagcccatactcttaattattacataatacagcttttctgaacaaagataaacctaggacatatagatgctgtattgtgtggcaaaatcatgctgaaccagaactgagactgctggattccagatgctgtcccctagtctaagaataatgagtaaccattggaaaatacaatggtaaagcctttaatttagatgtcacttggtctctccataatcgaaggagagattgccttaggtaactgatgccttaggtaggtggtgccttagcatcagttaattcagtacatttgcttgatataaaacttgaacaatcaacaagaagcagtttggcataggaggaaaagttctggactggatgtcagaaaacctggatttgagcccacctaacatagaaatccctggtttgtactctgtctcccacatttaacaagagtgtgactgttaaccagtcacttctcgtatctagaactctttcctcatcagtcaaaatcccagccaagtctaaggctgacgcatagctcatactaattggagaaaagcagtagattatacaagtagctgtatattcatgacattcacaccattccactcttctttattgatgtggaattc

SEQ ID NO: 204161 - DNA, 1000 bp, Homo Sapiens
gatgacgcactagctaacatttatggagtgcttactgtgtactttgtgctaagcactttgaggcctgagatctcatttcatcttcacaacaaatgtataaactgcatttcacaaagaaatcagtctccgtgtggtggctcatgcctgtaatcccagcacttttggaggccgaggtgggcggactgcttgattttttaccttcacatcaatcccgtgaggcaataaaggatttttatcccaaatttatagatgaagaaactgaggcatatagattttctgactttctcaagaccatgtagtgagtaataggagtcagaagccaaatacacactcatgttcatcctgcaggtatttactgaatctctgctatgtgtcaagctggcactgggatctgggacgccatagagggcaagacaggcacgggtgcttctctcacggaactcagtataaatggaaatccaaggctcactactgcactgtaattcctaggagaaattaagacctcaagaaccactgaagcaagtattgagcaagtatttcctatttgcctcatgttcagagccaccaggcatagagaagtagtagcagtggatgtaagtcattaaagagcttcagtctagttgggaagaagacccgagatggatggtctacttggaagttaatataagtagccaggcgtagtggctcacgcctgtaatcccagcattttgggaggccaaagcgggaggatcacttgaggccaggagtttgagaccagcctgggcaatatagtgagagccccatctcttaaaaaaacaaaatagaaatcggagtcttagtgaggtggacttgatcaagttcacagaagaccaagggcatggccagcacaggccacctgtggcccagcgtgcaaggcagcatggtctaatggtgaagagtaacagcatctttcttgttatttaggggattaaatgagatcaggaccttgaacccttcagggcagtgcctgactactgtcggt

SEQ ID NO: 204162 - DNA, 1000 bp, Homo Sapiens
agacagacatgtttgcaatgtttaaatttctcattaatcagaagggatagggagtgagggagtaagcattaaaataagctagcaaatggccaggtgtggtggctcacacctgtaatcccaggactttgggagtccaaggtgggcagatcacttgaggccaggagttcaagaccagcatggccaacatggcaaaactccatctctactaaaaatacaaaaattagccaggcgtggtgatgggcacctataatctgagctactcgggaggctgaggcagagaattgcttgaacccgggaggcaaagattgcagtgagctgagactgcaccactgcattccagcctgggtgacagagcaagactccatctcaaaaaaatgctagcaaaataataataataataataataaaacatacctcaccaacattttctacatcttgtaaagcatacattgactgactgaagtcaccagagttttgtttctttctttcttaagcagggtggggaacccgtagagccctcaggggcagctatcatcagcccaggtaaccaagctgaaaaaccagaaggtgcagtgcgtactcaactttttccccttagaaacacgatattagaaaatacaccaataccaacatgtgagcaacagttctctctggaaggtgcagttctgggtgattttttttcattccatagattttttttttcttgagacggagtttcgcactcttgttgcctaggctggagtgcaatggtgcgccaccacgcccggctaatttttgtatttttagtagagacggggtttcaccatgttggccaggctggtcttgaactcctgacctcaggtgatccacctgcttcggcctcctaaagtgctgggatgacaggtgtctcactatgttgcctaagcttttctcgaacccctgagctcaagcctcctcccacctcagccatccaaagtgctgggattacaggcatgagccaccacgcctggtgagtttttat

SEQ ID NO: 204163 - DNA, 1000 bp, Homo Sapiens
ggcaggttacatgatgctgttgtgagcccaagctaatcacaccttccagtcctgaatgctagctgcctagcagatgtcagttccaagcagaaagtgacgagctgcccagtagaaattgctaactctgaattctctctcatcttgaagaacaacaacaaaaaccctgagaaatctgatatggtcttcagttctttaatatctactttgacatatttagaaacaccacgatttgctaggcttttctaccttttgttctctagcacacacctccctcccaattctcccttttcttttcctccttgtattgccaatcctacagatgttcatgagttaccttcagaaagtggctgatacccttttggaataagagccactttgtcttcacattccaagtggcaaggagcccaagcttccctttgcaggcagcacatatctgtctgctttggtacacggtggcagacatttgaaatatggtgaataaaaaaggctgtagaaatcaaactgcacttgtgaaacaaaacgacaataaaacaactccctaatcttttaaatgtcatgcagctcagctatagctttcaacttagtgttcacagccagttctgccttgattgcaattcctcttggcactggccaaataacactttctatttagaaaccacttagttataataaaattacccacatcaccccccataaaatataaaagcaaatgagaagatacgcaggagacaagctgcagtgaaacaaatggctttctgtccctggtgggatgctcatggactatacttttttgtcctcttggcaacattcacctttaggagcttatatatgtatcattactattaactactctgaaattaaaaaatgaattttcatattctacctaatattataaccattcttgtgtttagagtgttgagaaagcagtgtgtcattataactccctgtcatggtagctacatgcacaggtctaaagttagctctgttgtggtttgaattc

SEQ ID NO: 204164 - DNA, 1000 bp, Homo Sapiens
ttttgagggatctctcactgttgcagatccaaatgagagaccttgaaggttaccgagtaagtacttcattcttaaatgtacatgattttacagtagacaaaatttaagagcgtgtcatttcagaatgaggtgagcataagccaaaatcaagtagatttgattgttcattagaaggtgtatgtcgcttgggaccttccttctcagtcatagttgtggcactttgtacttgagtattcaaaaagaataactggtggggtgtggtggcccacgcctgtaatcccagcagtttgggaggttgagatgggaggatcgcttgaggctgggagttagaaaccagcctgggcaacataggccagactccgtctctacaaataagaaaattagcccggtatggtagtttacacctgcagtcccagctatccaggatgttgaggcaggaggatcccttgaacctaagagttgaggctgcagtgagccatgattatgctactgcactccagcctgggcaagagagcaagactttttctcaaaaaacaaaacaaaaaaaactggtttttaaaacattcttaattcattaattatttaaaaattagagacaaggtcttgctatgttaccaaggctagtcttgaactcctaggctccagtgatcttcccacctcaccctcccaaagttctgggattacaggcatgagccactacgcctggccataactgtttaactggaatatctatgtgcagctgctgtactagattatttgtgggtttgatatttacaaatttgataaactaataaggcttttataatggaaacctaaacataaaagtagcttttaaaaattattggttagtaaatattttaaaaacgtgagaagggttgccataaatcagtctttctgtagttgagacctcttcagatttgcatcttcaactctctcctggacatctccatgtgcttagtccacttcgtatcctagaatcagtatgtccaacatggaattc

SEQ ID NO: 204165 - DNA, 1000 bp, Homo Sapiens
tctatttttctattagatcttttggctttttctttatttggaattctttattctggataccaaaactatcccagttatatttgttgaattatttgctctagttgtggctattcttttcactattttgtttgtcttatttacaatgtcttttaatgaacaaatgtcttaattttaattttaatagatttttactattttatttagtttttttgtatttctcattgttcctggactgattagattctgtcttataatgttgcatattctatcctcagtattgcttaacttacctttcagactttcaatctcattgtatttctgtactgtactatgttaatgtcctaaatattatattctggttaactactttttttgcttgttaatactggttaactgtttctcttatttaactctttcactgagtttttagtttaataatgatatatttcttttctaggagttcacctctccttcaggttggactggacattccaaatattttatttttctttgcttgtcttagcaattccgtcttttatttctttaaacatttcttattccttgacgacagaataagacaactcaatattagtggtcctgcttgaggggctggtctgaacaatttgttcattatttgcgctatctctctgcagtgttggctttcttcccggtatgcacagtgatctttgcttgtatgcgtagacttgatgttaatttgtggaataattctggatctaaatgtatgattcttttctcccaagaggattggagttatttctgcctggaaccaggaaactccattaacttcacactatcagtagtctagactcaaggtgggagtctcaagctcactgcagtcttttatttgactggacgttttccccattttttctctgtcctttttgtactcatatttgcctttatctttttatgtggcactttcactgcagaattatttttctttcaaaacttgctatatgatggttgttgttgagaattc

SEQ ID NO: 204166 - DNA, 1000 bp, Homo Sapiens
attgaaagtttgtttccagcaactcacatgctgggacttgttgacaagaggaataaagcctagcacaccaagtgaggacatagaaattttggaaaccatcaaggagtcagtgcctggtcaggtaggaaagaagagaagccagcatgggtaaaaatgaggattgatgattatgaaagcaggatgctcagctgtaggtagctgcaaaattgttaaagcaggaggagggagggcaacacttcaaattactgctggaagcttggctgcttccccagagcatagccatttcattaatcctggcagccctagtgtgtgatccttccactttttaaaaggcacagatcacagcttaagataccatatgtcagcaatctacagatttgttggaattaacagagaagagagtttatgcaaagttcacttgttgaatgtgcttttaaggatgactgtaagcatgatatttgccctatttgtttatgactatggtgaggatttttatgtcttctgctcacgattcctcattatacaagtgactcagaggtggtcattgatgaaaggcacagagtaataatgttaggttttactctattccttgcttcagtcaaattgatcacctagaattgaagttaattgcaaaaacgtttaatgcagagtgctcaaaagctaaaaagatctttcgtgtgtttcttaagcccctttggtgtatttgacaggttacataatacccatttttttctaaaagctggcatctttactccggaaattactgaaaaagacatggcaaacattttcagcgctttcccagtgaatatgaatttatttttaatttttcccacagttatcagacattatcaacatttctgttttttaaaaattaaaaatacactgctttataccttacaagaattcctcagcaacctctcacctacatttgtaccttacaggaaactcatgatatagatattattttctccattttgtggtggagaagacagaatcagag

SEQ ID NO: 204167 - DNA, 1000 bp, Homo Sapiens
gtttattttggaaggtagctgtataaaattgtttacttttttggtgaacagcctggcatcatttgagttggcaaaagcatctcttcctgaaagaagagagcatccaggagtaaagctagaaacttattccaaaggcctcttctcagcacggtggcactcaggaactctggggagagctgctttcacgccatactcaagcgcttgatgaggaggagagaatgaagctaggagttttgaatgtgtttttgagcagaggttaagagtcagtggttttgattttagtcccaatggattcctgttaaattattcttcctatgacagatgactccgaagcaggttctgaaagttcctttaaaaaccttcattactattttaaggacaattatcagtcaacacttggaatttcttagcttttaaacttttcagcctcctttcacttagaaatgttggcacaccagttaacttccgagtagtgcagtatgttatatgtcacactactgactttatttaatttccagctcctataccatttagaaagaaagaaaaacaagaaaaagacaaagatgatctggggcctgacagattctcaacactcacaggtttgtagacccatggacttcctggctccttcattcccagagcacatatttcataacactttttcttgggtgccataagcgttgcctttctagaagagtgtgtctgtgtgtacagtggggagtatgttcttcatagctctgtggtttccagttggtggccacagtaaacctgtgtgctcttcctgcagactgccaccaccatcatcatcctcattatcataactccgtttatgatgaggcccctgatcctgagcctctaggcataccctacaactcaacatctagtgggatgatgacacacagtgccttttaggaaagtgtggtgacagttttggtgctgtgcatgctgtatctttggatcattgattgaatagttttctctaacattgatcgtagaattc

SEQ ID NO: 204168 - DNA, 1000 bp, Homo Sapiens
tgagctcaggtgatctgcccatctcggcctcccaaagtgctgggattacaggcgtgagccaccttcccagccagagatacatttttttttaaaataaaagataaaaggtatattgagctaattatatgccagtggagtggaactttggagggtcttatttttgtgacaaaattatgtttcaggagatgtattaatgaaaggttttacaagcctttttaaattttaaatttaaaaaacggaggtaaacatgcatacagaaatgtacacaaatcctaggtttctagatgaactaaagctttacaatcttttatgtatgtaagtttcttcccatgaggcaaggcaaactgatggaagatgttcgtatctttaagtaaatgagcaaacctaaaaacttaccgtagctgtatataattttgagatttttacatttgagggttttgctcttattgtaagattttactgttagcctttaaaaccacacacacacacacacacacacacacacacacacacacacacacattttcgttcttaggtcacttttctagtgtcagccacagatatacatacagattatgtatgtaaatcaactaccagagattggattatatctcattaaatcacaattatacattaggatcaagttcacaagttctggaggcataccattgttaaccttatattactgtctgtatgatagcacttatatgtcatgttatctcatagttttaataaacttaaatttatttaatgcatattgccttgacttaaaaaggttttaaagttattaataagtcttcaaaatattgcttctattttttcacagtttaaggttttcagtaactccctgttgtctgcagaacaaatccatcctcttaatccagtattgaagagcctttacattctttctacagccttactgcttgactttgtctcttactattcctctgttcctcctagcagtagatactaaattatacttaataagaatgtagaattc

SEQ ID NO: 204169 - DNA, 1000 bp, Homo Sapiens
aaagaacagtgggaccaggggaccagcactcagtatacggaggacctgctccggtgccagcctctgagttccctcagtatttattgatcattatttttactatcttagtgaggggagtgtagcagggcaacaggtaaggagaaggtcagcagggaaacatgtgagcaaaggaatctgtatcatgaataagttcaaggaaaggtactgtgcccggatgtgcacataggctagatttatgtttctctttacccaaacatctcagtgtagcaaagagtatcagagcagtattgctgccagcatatctcgcctccagccacagggcggttttctcctatctcagaatagaatgaatgggagtggtcagctttacacccagacattccattcccagggatgagcaggagacagaagccttcctcttacctcaactgcaaagaagccttcctctttcactactcctcctcagcacagaccctttacgggtgtcaggctgggggatggtaaggtctttcctctcccatgaggccatatctcaggctgtctcagtgggggaaaaccttggacaatacccaggctttcttgggcagaggtccctgcggctttccgcagtgcattgtgtccctggtttatcaagaatggagaatggcgatgacttttaccaagcatactgcctgcaaacatattgttaacaaggcacatcctgcacagccctaaatccattaaactttgattcattacagcacatgtttctgtgagcacagagttggggctaaagttacaggttaacagcatctcaaagcagaaacaatttttcttagtacagattaaaatggagtttcttatgtcttccttttctacatagacacagtaacaatctgatctctctttcttttccccacacgtgggccattgatctccccaaaaactcacatgctcagtgttacagccagtaacttttatcccagcacaaagggcgttggctgctctctcgttattaaac

SEQ ID NO: 204170 - DNA, 1000 bp, Homo Sapiens
gagttaagatactctatctaatgaatatgttgtgagataagctggtttgatttgcaaagcttctgtattctggtacgcactgaataattagttcctttcccttctttcccttcccaaaactaaactgaaagttatcatttcctaaatttgtagtggtttctttcttttttttcttttttctttttttttgagatggagtttcactcttgttgcccaggctggagtgcaatggcatgatctcatttcactgcaactccacctcctaggttcaagctattttcctgcctcaccttcccaagtagctgggattacaagtgtgtgccatcactcccggataattttttgtatttttagtagagacagggtttcaccatgttgaccaggctggtctcaaactcctgacctcaggtgatccacccacctcggcctcccagagtgctgggattacaggcatgagccatcgcacccagccaaatttgtagtgctttctacagctggctaaatcattgttcaaagatttttctcaagcattaaatgcatggtagaaatgacttttataatagtactactagctggttgttgtcatgttggaatgcaaatccgtcgttaagttaaacttgaaggaagatatagaatacgttaattactttagaattccactggaaacattattgtcactcttgtagtttctattattagggatagaacttttagccataatttagaatgtacagttgctacatttttttctatttaaaaaatccttataaatgacaacaataactacttctattccaaaagattatgatttttatcttaagtaactatttctgaagggtaaaacctcttaaaaatttttgagatatgaattactgacagtactagtttattgctccttttgatctcaagattctattttttttttttaactagccttacgtggaggggcatctggttaaaataacttagagggaagtaagaaagtatcactccccaagta

SEQ ID NO: 204171 - DNA, 1000 bp, Homo Sapiens
acatgtcatacacttcccttcttttcttatcacacccaaaacattcttaattatttccacagtctttgtatatgccaaccctttttctgcctctagaattttgtgcttgtttctctttctttctaaaataagctttctgtggctttttgtaaaattagatcattgttctttgaaatctcggctaagaagttttctgaaataccttaattaaagttccttccctggttattagcagtctcctcacttcgtttatttttattgtaatctttaatgattgctttctatttgtttgacttcttgatcaactcaaatttgtatcctcagctcttatcaaaatactaggtaactacacacctattgaaacaactaaacataaaaatagtgacaacaaaagctggcaatgatgaagaaactgtatcattcatacattatttgaattgtaaaatgttataatactctggaaataatttatcagtttctttaaaaactaaacatatatttataataagatccagcaattgcacccctggaaatttatctaagagaaatgtaaacctatatgcgatctttaatatctttcatagcacctttaattctaacagagaaaaactggaaacatccaagatgttggacaggtgactggttgaataaactgtggtatatccatatgattaaatactacccagaaataaaaaagaatatactttcgacacatgcaataacttgcatggatctgaagggcattatgcttagtgaaaaaaagcaaatatcaaaaggacacatggcatattatttcatgtatataactttaataaaataacatacatatagaaaacagattagtgatttccagaggttagtgatggtatgggagtgtgagatgaatatggctataaaatgtgaggaagacacttttagtgatggaagagttctgtaacttaattgtaataatggtcacattaatcaacacgtgataaaattggcatagacctatgaattc

SEQ ID NO: 204172 - DNA, 1000 bp, Homo Sapiens
ataaaagcaggtcagagatccaaataagattggatgaatctaggaagctaaggcatgaagccaactgggttggtgtctgtgtttttgaagaggctggtggaaaggaaatcttagacttaatctcaggtccatgagagacatctgtggcagttttttattcactttaagatgctcacagtgtcatagtccctgggatacaaagatgaataggagctcatggttttgtgggaaaacagataggttaaaaaaaaaaaaacttacactttgatgtaagaagagacataataaagcaaacgtatacaacatttgcttggaataaattgtgatgactttggaaaaattctggttatggaagtttttgtttgttttttaaaagagaacacctcgaatttggcatttcagctcctcagatgtcctcaggacaaataacaccctttgatacatagaaaaaagttggatggttctattattccaaaaggatccacatcacaacttttttccagggctcatagggcctgctactctgctactctgtggaaatcttttcagtatctttatactaaagctttaaatatgaaagtttgtttttgagggtggtttttatgcagagaaaagattattcagagtttactccagatatatgaaaattaatatctaatatattaaaattaaatttataaactatacatttaaattattaattataagtacctgttttttccttaagcttagtttaacttctgtaatcgtttcattaaataagcattctgtccctatctttatctcatttcctcctgtaagtcccataatgtaaatacttgctcacttaatggtgtcctgtaagttccataggctgacttcactgtttgtcattcttttttctttttttttccctttcctactgggtaatttcaaatgatgtatcttcaagttcagagattttttcttctgcttaatctagtctgctgttgaagttttcctatatttgttcattgaattc

SEQ ID NO: 204173 - DNA, 1000 bp, Homo Sapiens
tgattttcaattcacagaaaaaacaaaggataaagaacaggttaagaaacatggagagaaaatgatcaggcaaatctgagagaaaggacattctacaagttaactggtcaagacttttcaaaaagttgggcacaaaggtggggaaaaggtgagcaaattgctctagattatgagacataacaaccaaatgcaatgagtcactctcaactgggtcatgtttcagtataaaaaacctataaatgacattctgggaacaattggagaaatctcaatatgcattgggtataagatgatattttaacaatatcattaattttccttggtgtgatcatgataatgtggttatgaaggagaatatctgtattcttagaggtgcatgctgaagtatttgggggtaaaatgtcatgatatctacatttagttttcaaatggtataacaacaatatatataaataaaggccaggtgcagtggctcatgcctgtaatccctacactttgggaggccaaggggggcggatcatctgaggtcaggagtttgagaccaacgtggccaacatggtgaaacctgtctctactaaaatacaaaaaaattagccaggcatgttggaactggcctgtaatcccagctactacggaggctgaggcaggagagctgcttgaacccagaaggcggaggttgcagtgagccgagactgtaccactgagcgagactccgactcaaaaacacaaacaaataaaacaaacaaataacaacaaaaaaatttatatatataaaacataaaaagataaaatatgaaacaatgttaattattgagtctatatggaaagcatttgaatgtttgttgtgataatctttcaattttgggggtatatttaaattttttataataaaatattgagaaggataaaggaattaaataaatcaaaaaaaggaatcaatcagagtcatctcaacaggcttaaaggaatgttcacggtgtactgctaagtgatagaattc

SEQ ID NO: 204174 - DNA, 1000 bp, Homo Sapiens
agcaattctcctgcctcagcctcccgagtagctggggctacaggtgcccgccaccacccccggctaatttttgtattttagtagagactgggtttcaccatattggccaggctggtctcgaactactgaccttgtgatctgcccgcctcgggttcccaaagtgctgggattacaggtgtgagccaccgtgcctggccctatattttcaaagtctaaggcatgtaggatgtaaatgagttctggcaactaacaagtgcagagctccattttagtctattcccaatttaaaaatgtacattaaataaatacaaagcctcatgccacgaaagagagggtaggtgcctaatttcatcaataaggaacaaacaatttcagcctcaagtatctaacaatcccttcccaagatgactctcaagagcagtttcaactaacatatctgaacttaggaatctcttcagagctatccagatggaaagccatgcatatattccaattatgcttccattttccccgaaggtttttttttttttaagtctcttttgaaaatgcccccaataccagaaaagacaatttgtctcattactttacacgcatgctaagttccaaatgattttttgctgttactgaaacattcaacactaaaaagatactttctaccactgaatatattcaaataatcattgtgtcatttctgagcatatagtcctgcctcagaaccgtgggatactgtatttttcaggaagtaagaaaaatctccaaaacagaaggtgctgctatggtcatcaaaccataagcttacgtgggtggctaccatcaggaaattattttgcatgccaattttaagagggtcaaaactccaatgaatgtatagtctggcgttatttgttaagtcagtctcattattttcattatcccttgtgattggaaaatgaggacaaatggacaatgagctcactgtatgatgaggcaagcaaagttcagggaactaaatgatgaattc

SEQ ID NO: 204175 - DNA, 1000 bp, Homo Sapiens
tctgcccctggcagtgactgctctgctccctgtcctgtctcccctgccagatagcactctgggccacgtgtctgattcctcttgctgggcccagtacactggcactcagtgaatgtttcctcaatcaccaaatgtattcgtttcctggggccactatgacaaagtaccacatgctgagtggcttaaacaacagaaattgattgtctcacagttctggtggctagaagtccaagatctaggtgtcagcaggatgggttccttctgaggctgctccaggcctttctccttggctggggatggccatcttctccatgtgtcgcttcacatggagtttcccctgtgtatgtgtgtgtctatgtccaaactgcccttatttttgaggcagagtctcgttcttgtggcccaggctggagtgcaatggcgtgatttcggctctctgcaacctctgccttctgggttcaagtgattctcctgtctcagcctcccgagtagctgggattacaggtttgtaccatcacacccagctaatttttgtatttttactagagagggggtttcaccatgttggccaggctggtctcaaactcccgacctcaggtgatcctcctgcctcagcctccctaagtgctaggattacaggtgcgagccaccgcgcccagcccctttttctttttcttttcttttctttttttttttttgagacagggtctctctctgtcacccagtctgtagtgcagtggcgtggtcacagctcactgtagctgcgaactcctgggcttgggtgatcttccggcctcagtctcctgagtcactgggattgctggcatgagccactgcatcctgcccaactgctctttttctaagaataccagtcgtctgggattagggcccaccctaatgacctcatcttaactatttgtctgtaatgaccctgtttctgaatacaatcacattctgaggtactaggggttaggacttcaacatacggattttagggggg

SEQ ID NO: 204176 - DNA, 1000 bp, Homo Sapiens
tgaactgttttctgtttgtatagtgttgcatttttccagaatgtcatataaatggaattattcctttacttaccatactgaatttgacattcatgcatattattccttgtgtccataatttatttttattattaaatagtattccattgtatggatattatcacagtttgtttatccgttcaccaaatgaaggacatgtgggtgggttttttttttgagacagagtctcagtctgtcactcaggctggagtgcagtagtgcaaacacggctcactgcagcctcaacctcctgggctcaagtgatcctcctacctctgcctcctgggtagctaggactacaggcatgtgccaccacactcagttttttaattttttgtaacagatagagagatagagatattgcccaggctggttttgaactcctggcctcaagtgaccctcccacctcagtttccccaagtgctgggattacaggtgtgtgccaccacacctggccacatacaggattttaatggatgtcaaaattatttactctcttgagtaaataccttgcagttgcattgctgggttgtatggtaagtatatgttttgatttctaagaaaatgctaaactgttttccttttgttttgttttgaaacagggtcttgctctatcgcccaagctggagagcagaggcatgatcacatctcactgcagccttgtcctcctaggctcaggtgatcctcctccctcaggcttctgagtagctgggactacaggcatgcaccacaatgtctggctaatttttgcatttttggtagagacagagttttgctgtgttgctcaggcaggtattgaactctcaggctcgagcaatctgccctcctcagcctctcaaagtgctgggattacaggcatgagccactgcaccttgcccaactgttttcctttgtagaaacctgccaaattcttttccacggtggctgtgccattttgcattctcactagcaatgagaattc

SEQ ID NO: 204177 - DNA, 1000 bp, Homo Sapiens
aacatgaaggagaaatgctttgacaggcaaacaaaagctggagatttcatcaacaccatacctatcctacaagaagtcataaatggaatacttaaatcagaaaaaggatattaatgagtaataaatcatctgaaggtacaaaagtcactggcaatagtaagtacacagaatgacatacaatattgtaataccgtaacagtggtatacaaactactcttaagtagaaagacttaaagatgagccaatcaaaaaataactataaaaagttttcaagacatagtataataagatataaacaacaaaaagttaaaaacaggctggacaaagttaaataatttttatcagttttgtttttgcttgtttatgcaagcagtgttgttaatccagttaaaataatgggttataagatagttatatcccatatatataatgggttgcaacattcattgtaacctcaaatcaaaaaccatacagtggctacgcaaaaaataaaaagaaaggaataaaattttcgttttattttaggagaaaaggtaagagaaaattaccttcactacaaggaaaacaagaaagaatgaaggaaggaaaagaagaccacaaaataaccaggaaaccaacaacaaaatggtaggagtaagttcttacttattggtaatcacattgaatgtgaatggactaaactctgtaatcaaaatacacagagtaactgaaaggatgtaaaaatcagagccactctctgttgtatataagaaacgcttcatctataaagaaacatatagactgaaaataaacaaatggaaaaagatactccatgccagtacaaaccaaagaagagcaggagtagctatacttatatcagaccaaatagatttcaagcaaaaactgtaagagacaaaggtcattatataatgataaaggtgtcaatttagtaagaggatatcatagttgtaaatatatattcacccaacacgctagtacccagatatataaagcaaatatt

SEQ ID NO: 204178 - DNA, 1000 bp, Homo Sapiens
accatgaccagccctccatttattaatttataaggggactagaaggacaaactatttgattaatttgaaggtgagaggtatcattttctcagatgctccaactaggcttctcacatccctcaaaggttatcagctaaagacaagagtttctgaggctaatgcaaaaacatggtcaaatgtgaaaccgcccttttagaggcagggtttgtgaaaggctgctggcctccaaaggagagtatgcctaaactctctgggctcccaggacctgtggtgacctcaagctaacctgatgcacagacaacagtatcttttagggactgcagccaatgttccccaatttactttttttttataccttaaaatatcaaatgtttcatttttaggtgatatcccaagtgacacagaaacacagctcctccggatggtgaagtctccgctgcaaaactcacgaaacagcacagaggatgactctagggtgctctcccacttgctccaagttaggcaggtgccctgatggaggcaaggctgagccattaacatgcacagctccatatcctggaagcctctgtagccttgaggagataggctctatccaacaggactcagaataaatgactgccacctcaactgagcagtatgaactgcccacctcaactgggcagtctgacctcttccacagtctttaagaaacagaagagccatttgcattatttaatcaccattcaataatctcctccctccccatagctgcttgagttaactgtcccacaagtgtcctgtgttttgtaaagatgagggttattttctgaaatgcagatgggactaggatgaagctgtattatcaattacagagacagccaactctcatttctcttaaagcaaaaattcattccactgtgatttctccaggtatttcctgcaattctaaatccgcccttgatattagagaatattaaaatcacacagttgtggcaaaaatcacattgtggctattaaatcc

SEQ ID NO: 204179 - DNA, 1000 bp, Homo Sapiens
tggacatccttacagagatgttcagcaagaatctcaagctgaggtcctcagaggcagaaatacctcagagcataaagactcacaagttaaaaccacaaagggcatgaaaaaaaatcagaaagaataatgggctaacaatggcatagcaatgttcatgaaacaaaagattgtataaaagatataaagaagacatgattacaagctgggtgtggcagctcacagctgtaatcagtgcactttgggaggccaaggtgggaggatcacttgaacccaggagttcgagaccagcctgggcaacatagtgagacctcatctcaattaaaaaaaaaaaaaaaagacatgattacagagctacaaagagaatcatgtgagtgataccacagacattatcagaggtgcctattagggagggggcagtcatactgtcaaatgcaacaaagagtttggtaaagtatgaactgaaagatactcattgggtttgaaaatatttaggttactgctaaatttttccagaacagatccatcagagtggtgggggcagacaccagactgtatcaagtgggttgaaatgagacaggcacatgaagaagttttacctacagaatataatattgaattgttccctctagaacttgttttataagtatagctgaaataaagttatggggcattatttgaggaacactattttatttgttataggttttatccatttattctaggtcttatcactggatcatagacatcacagagaaccatcagaatgctgcctgttcggatgacactggattggttccctgtaattactgtgctctgcctgggtatagaagtcacaggaaacccataccatttctttctcagctgtttttggcagaactgtctctacttcacttactcaaagatcatccaagaaaatttttagatataaatgatgggaaaaccacacaaaaatccagtgtaagggctatctcatattgtctgggcctttctggaaccattt

SEQ ID NO: 204180 - DNA, 1000 bp, Homo Sapiens
tgtccgttctcagatctcaaactccatgctgggagaaccactactctcttcaaagctgtcagacagggacatttaagtctgcagaggtttctgctgccttttgtttggcaatgccctgcccccagaggtggagtctacagaggcagtgagacctccttgagctgtggtgggctccacccagtttgagtttcccagccgctttgtttacctactcaagccttggcaatggcgggcgcccctcccccagcctggctgccgccttgcagtttgatctcagactgctgtgctagcaatgagcgaggctccgtgggcgtaggaccctccgagccaggtgcgggatataatctcctggtgtgctgtttgctgaccgttggaagagcgcagtattagtttgggaatgacccaattttccaggtgccacctggaaaagggtgccaccctttctttgactaggaaaaggaattccctgaccctttgcacttcccaggtgaggtgatgcctcaccctgcttcagcttaggctcggtgccccgcacccactgtcctgcaaccactgtctgacactccgcagtgtgatgaacccagtacctcggttggaaatgcagaaatcatccgtcttctgcgtcactcacactgggatctgtagactggagctgttcctgttcagccatcttggctccagcacctcatttagttcttaaaaagattttcttattgtatcctagagtatggatgatgaattagatgaaaatattttgcctgacacttagaactgttagaagaaaaagactcagcagtaaatgtaatgatgaatattattaaattattttaaattaaagttaactttgaataaattaagcagaatttggtttatggatgtgtatcacgttaggactgtagaaacatgcattaaattgtgctatttaaagtagtatttattttttgatttcctttaattttttgttagttctgacatttactaagagaggcatgttgaattc

SEQ ID NO: 204181 - DNA, 1000 bp, Homo Sapiens
attacagcaaccaagcaaaagcccaatcaagaaaaagttatattcaaaacagtaaaaaaagttcatggcattttaatttgcccttgccctactccctccctggaactgtacagtatgatttgggggaagcagcaacccagtccccagttaccctatggggcaactgagcagagagagcagggtaggccaaatttgcaacattctaatctgtccagggattgcctgattaatctctgtgtcacctaactgagagctcagatggccaaatgaagcacacctcagactggacaaagctgtgaaatgtaacttatgaaagcttcagggggattacagacctgcagatgcctggggcaagaggttagtgattgagaaatacagtagaactgctaagaccctgggaagaggcaggggtgacactcacagaaatgacgtcatgaaaagcagctgtgtataaggtggactggagaaaggcatgcacacagggaagacatatgcccagaaaagacctgagaagactttaagtgttcatgatgaactgatacttgaagatcttcccctatacagagccagtctataaagacagaggtggctgttttttcaactgccagttttcaacgaaaggtcacaagaaacgagaaaacatggcccactcacaggcacaaaataaccctctaaaagttgttcctgaagataaaaggcatcaggcttactagcaaatactttaaaactactgtcttaaatatgcttaaagagcaaaagaaaaacacaaagaaccccccgcccaaaccaggaaaatgatatatgagcaaaatgaaaatatcaacaaacagaatttatataaaaataaccaaacaaattctggagctgaaaaatctcacatctgaattgaaaaattcatcagaattcatcaacagattcaaacaggcagaagaaggaatcagtgaacctgaagacaggccctactgaatctgaggagcaaaaagaaaaaagaataaagaaa

SEQ ID NO: 204182 - DNA, 1000 bp, Homo Sapiens
ggagaaataacttttcagtagcattttaaggacctgtctgaaaacttggggacaacttaaagttagcatcagcccatctctccaaatctggctgccacactagtgttaaaaataattagtgtgagagtagtcctggagcacattggaactgcgcagtaaggagggcctttctgagtttattggaagagagagtgatctccctatgaaagagtggtatacttagtgtggaagatattacaactcatcattcccttgcttgagtacagcagccttcagaagcagacttatttatttattttcccatttcctttccccacccgctctgctaaagcacattatgaaattatgaaaaagccattttctatccaaaggcagctggttgccacgggttacgagagccttttctgtccccagtgtgattttgctgaccgaaaccatcctaggagggaaggattgaagaaggacgggaaagtgaggctgcggatcaaatcccagcaccctccccctttgtctcctccagacatacggctctggagatgctgtgttgggatgccacttccaaagcccaggtgtctcacacaggcctagcagggaatacgaacgcatctgaggcaaggtagttgggggaagacagggtaaggaagtgatcagttaggtgcctggagagatatttcagatgatgagatgactaaaaaggttacaatatgttggaagatggaaagcagcttattatagattctctgtctttctctccccctctcttcctcctcctgcacccctccccctgtactattttggaataatagcaaattagagttggaagtcagtacagttttacatttcatattgaattatatccatatcctcctacctcaataatagctcattcaagctgtgtttgaattcttagaccaacatggaactcacaccttcctaagcatcctgttgggagattgtttgcattaatattgataataaaatcaaatagttattggatctg

SEQ ID NO: 204183 - DNA, 1000 bp, Homo Sapiens
tagagttcaacgacaaggcttgaaaggatcaaactacctttcaagtaaataaacaaaatattgaaacaaaattgaataatctacgcagaaatacaacagcatctcaagcacaacaagacatccataaaggtaaacatacaatcaaaatttactacacatttaaaacggcaagaaaatgtaacctatagcaaggagaacattcagtcaatagattaagaaaagagagaaaatgaaattagcagacaagatttttaattagctattttaatatacctaaatatgtaaagaaacacagaaacaaaatagagaataaacactgacaatcagaagagaattgaaaaatgtaaaaaattgaatgttgagaactgaaaaagacatcttaggaagtaaaaacatcactggctgcatttagcagtaaattaagtgctgaggaagaaaatgttagtgaaattgaaggtagacaatagaagatatccaaattgaatcacaaggaggaaaaacacctggaagtaaaaagtacataaatggcctatgaaaaaacataaagtgacctatgggaaaacatcaagttagaaaaaatatgtgtaactggtatacaagaaggggtgaggtggttagaaaaatattttttttaatgatgaaaatttttcaaatttggagaacaatataagcccacagattcaagaagctcattaagtcacaacaaggatcaagatacagaaaaccataccaaggcacatcataatcaaatccctgaaaataaagacaaaactaaaaagaaaattttagaagcaatcagaaaaaggaaaaatgaaaaccaaatacagggaaggaatgacaagaatgttctctgacttctcatcaaacacaacgtaacacaggacacagtgaaacaaaattttaatgtactgaaagaaaaataagtaaaaataggtcgttacatttaaaaatacctgaaaaaattgacaaattagacaaatcatacaatcgtgatgaattc

SEQ ID NO: 204184 - DNA, 1000 bp, Homo Sapiens
tggaagttgatatggtttttccccaagggaatgaaagttaccatcctggctcacatttctggttcagataggttaaactaggaacatgcaatgcagcagaactcttctcctctggttattgctgtggggctcccaggctcttttctacaggctcagcgtcaggacttgggtgaagtggagccaaaaaacctcagctatcttcggtactgtttgttttcacccatcactgtcattcctggaagagtcaagtggcttggagtaaaactgggcacagaaaaagggtggggctctacccaattaatgaagaaagtagtctgtatactttgtagggtgctagaagaaaaaaacttggagcccttctgattttcctagtgatttcctgccactaagtatactttcctcccacttggtctaattcagagggtcactctctggatacctagaaataattccataacatctgaggtgtaaacctatactaccatactgaaaatacacctttagggaaggaactttggagttaggagggaggataagtcaaatgtgtgttcgtttttctcagaggcataaaattaggcctcctaaaacccaaagtgggccctggaattcaaagaatataagtcatcccagaaagaatatggagccaggaattccctccaaagcaatagagtccaattgaactttctgtgatgatagaaatgttttcctatctctgttgtccaatacagtagcaactagccacatgtgattactgagtacttggaatataactagtgtgactgaggagctaaattttttagtttaattttcattaatttagatgtaaaagaccatatgtgactagtggctgctaccctggacagcacagctccacagtgtagaaggggtttttggtgcccaagaggacttaagacccagcccttggagttaggagactaacatatacagtagacctagtcagtccacattccagaccagtggtctcctaacattctggatc

SEQ ID NO: 204185 - DNA, 1000 bp, Homo Sapiens
aagtgttggatgaatgaatgaatttaccccacagtatttaacaaacccctgcctggagcaggccctgttctggttgctgggaatttggagataagtgaggcttagcccatgctctcaagacctcacgtgacagtgccagagatgcttcaactgatcattagcaaagtgttctgagatctctgaaaaagctaagcatggctcggaggcactgacagtggagtgtctgcatttatgagagcattttgggtggcaattggcagaaatgtcaaagccgttgaaacaaacaaaagaaagagacttaattggctcatgaaactgaaatgctacctgcaggcatggctgtatccaggcactcaaacaacatcaacatagtctctctctctcaccccgtccccactcacccatgtctcttggctctgttttcctctgtgtcaccttcctcctggccagcttccttgtcgtggtggtccccagcccttctaggtgttcatcatcctgaggactggcagtggcagcagaaagagggctcctctttcccagtagctctcccagaattcaaggattgactcaaactagcccagttaggtcgtgggcacatccctccacaaatagcactgtgggacgcgaaagtgatcagctccatccaaaggatgtggagggagggtgaagcgggagaggctctccaagggaaagtgaggatgctgctagggaagaggaggtggatgctgggcaggtacagacaacagatgtccactagatccacctagaagaccgttcattcaaacttgattatgtgcactgggtggaaatttattggatgggacaggggaaatagaatgggaggaagggaatctctggcagagagaacagcatgagcaaaggcccagagggagagaagtggatcacaaggaattggaccaggagatgggtaggtggttgaggttggaggattgagcagaggccagatgattgaaatccttgaatgtcaagtgattcaaag

SEQ ID NO: 204186 - DNA, 1000 bp, Homo Sapiens
gctactgaaaggtcaaattctactgacagtttatgtatacggggagggagaattgacattagagtttaccaatataaagatcaatagtgttcacggaaagaaaaattttgatgaagtaataggagcaacagtgggcttaacagggagtgaaaatagaagaattagacacaattagtattgacaactctttcaaggagttttgcttcaaaggagagcagaagaataaagcagtagaaagaaagcaatgttttgaagactgacaatatagcaataaatttgtacagatggaaataattcaatgaggggaaaggagtagtgatataggcaggaaaagaattgaaggaatgttcctgagtagagaagaagagatggaacctaagaaggccttaggaatacatagttcatctgtggaagagaagttgaatgaggagggaagaaaattgtaaaaggtgttaagagaaggggaaattaatgaactaaggaaatatgatttctagtcagcattaaaagctcacatgaggtttgcagtcatgaaattaaagtcagaccaccaagatgatatttctttttccatacatggtctgttgctttgggtccaggtatagaatattgagaaaatcagacatatcaggattaattttccaagtgagtaccacaaactaagaaaacaacaaggaagctagacatattgaaagggatttaaagtgattattaactatgaaatttaagccagattaggagataaataaaaacttcaaagaagcaaaagattactaaaaccagtaaaataagtaaattggagatcctaatagtgctaaaagatttttagagtcaaaaacctatgggagtgagatgcatagataggaagtagttatcatggaatgtgatgcataaaactgaaattatagagaaattgcagtgaagcaaggtccaaggcatgaccatgagggtgagtgactgagatagaggaaagaaggagaatttaagaaattgagaattc

SEQ ID NO: 204187 - DNA, 1000 bp, Homo Sapiens
aattgttctcttgaatatagatatgaaaatcctcaacaaaatggtggcaaattatggagaaggcagcacagtagaatgtcaaccagaattgtcaatagacagcaacgctagcgggtgaaggtctgacggagaagagcatacttaaatacaaggtaattctcattacttccagagggaaaaaagagcacactggagaaacctggcagataccacatctatctattaggtcatcaaagttaacatcaccaatattaggacaagctgaagtcttgtgcctcctgccatgacacactgggaatacatcactcctgtgatactcctgccagaaagacagaatctgaatccaatcacaaggaaacatcaggcaaagccaaacagggagacactctgcaaaaaaaatgtggccagtactcttccaatacttaagtgtcacaaaattcaaagacagactcaggaactgttccagattaatggaaaccaaagagataggacagctcattgcagcaagtaaccctggactgggtcttaggcaaatggcgatgtttgcatatgaactgtggctatgacgttagcactgtatcggtgttaaatttcctattttgatcattgtactatggttatataagagagtttccttccttttaggatatatacattgaagtatttagatgaatgctgctgtttgtccttaataaataaaacattaaattaaaaaatgaagtatttagatataaagagggacaatgcctccgactaagtctcaaatgtctcagaaaataataaatacagtaaatatgcatctgtctgtatgtgtggagagagaaggagaaatggaggagaagagaaaaaaaatgataaaataaatgaagctagatacaaattactaaagaagccagaaagaggtataggggaattcatactactattcttgcaactttcttgcaagtttgaaattgaaacaagatgaaaagttgccaaaaacaaaattgtgaaagaattc

SEQ ID NO: 204188 - DNA, 1000 bp, Homo Sapiens
gactatagctttggcccacatttgctagctatgtggcctctaagaagtcacttcaccttcctgtgcctccactccctaaccagagccaaggaagtgacacgctcccaggggtccttgacaagagctccaaaaaggccacataagcctaaggcatccctctgtctgccctggcttagggagaaagataaaaaaaacggacttgctcccttgtcccacagccaaagctgccactcaacaagggccctgagagggcgtcaagcgcatcagagagtcagattcagtgcccacaggggaccagaggggacaagtaaagtgtgtcactgctggcactcgggtcaggaggggagtaagcaaacatgcacgcacacacacgcgcgagcacacacacacgcgtgcgcctcctcccacgcagcattgttcccctgtgtcactgtcagcagttctgctgcgcttgacaaccagggcttcctaatagggccaggctggacctggcaaacacctggtcacttcccctcctgtggtccgcagggaccatcaccactgaacacaccactgcttgggggtggggaatgtccaggaaagctgaccttgtcctcaacaaagccctgggagccagccagctacgtgggtgtgcctggagaccttgcataccccacagaatacggaaaggattttcataacctcatagactctcgggagagaagatggtctcctgcatcctcccgcctcctctgcctattcctggccatttggtgtgcagagtcaggagagcagatgcctctcccatttatacagccatgctcaggctgtagctctgccctggatccaaacaggacagccatcatcctgccaaaaaacaccgtcagatttctcaccaccccaacccacctgactctccgtaaggctgcatggcctggtaattaaaaacttcaacaggccaggcatggtggcccacgcctgtaaatcccagcactttgggaggctgagggaacatagtgag

SEQ ID NO: 204189 - DNA, 1000 bp, Homo Sapiens
agtctggtcaaatctggggcaccaggccgaagccctttcccctcaggcttccatttccatgagagaggaatttaaacccacagtctactcctggaataggaaatgttacagacatccatgcccttcctgcttattgacccaaattcagccttagcgaggtcacttgggccggaaagcgttcagcacccagatggcctggaacagtatctttgtttccagctttccagcctcagaatgcctgtctccccacatgttctccctcagtagataaatctgggcacctgtttgtgttaggcagggatacagcagtgaacacaaggaacttggcccatgacctcaggaaaccaagttaaggggttctgtgcattttagcactttactaaattacctttaaaaatggttatcccatcttagacgtccccccgctaattaggggagccctgtttttccgagtcctcaagagtactaagcactgctcctttaaaaatgttttaacagctagataggtgaaaatgccttagttttcactttaatttgcattattattgtaagttagactttttcagatgatttttattgatttatgtgtattattatttatgaataccctttgctgtctgatttgtaagcactaatatatttagggccttgcatttttgttgcagatgcttttccattcttaaattagacttttacttttccttactttgtgttttttttttttttttttgacccaagcttttatatagtcaaatttgttaatagttcccttaaggcttttatctttgctcttattttgtaattttgtgctagtaatgccttgctttaattttaataatttgtaatgcaagacttcccatggtattcttaattttcaaaaatttcttagtgatgtttttacattttttccctctaattgaactttagaattataaggtcactatctctaaaaaaatttctattgtgatttttgttgaaattatattaaattaatgaattc

SEQ ID NO: 204190 - DNA, 1000 bp, Homo Sapiens
tccagacacaccctgggccagaaaggaacccactcccttgaagggagggacccaatcctggcaggaaccatcacctgctggctaaagagtgtttgggtcctgagtagccagcagtgatacctaggcagtatgccgtggaccttgggtgagactctgagaggtgctggcttcaggtgagatccagcacattcccagctctggtagctacagtgagagactccatctacttgagaaaagcagagggaaaagtaaaggggactttgtcttgtaccttaggcaccagctagccacagtagggttgagcaccaggcaggctcttggggtccctaattccagaccttggctcttggacagcatttctggacctgccctggaccagaggagagcccactgccctgaagtatgagtcccaggcctggcagcgttcaccacaagctgacttcagagaccttgggccttaagtgaacatcagcagtaacctggcaatactcctcatgggcttgtggtggtggtggccatgggatgaagctcctctgcctgtggcaagttgaaggaagaatgagaagggctgtgtctcatggtttgaggcccagcttagccacagtagaatagaacaggtaaacttctaaggttttcgactctagtctctagctgccagtcagcatctctggacccacccaaggcctgggggaattcaccaccctgaaaggaaggacacaaccctggctggcttcatcacctgctgattgcacagccctaggatcatgagtaaacataagcagtagccaggtagtggttacagtgggactcgggcaagacccagtgctgtgctggcttctggtctgacccagagcagtcccagtggtggtggccacaagggtgcttacatcactccatacccagctccaggtagctcagcacagagatagagagactccatttctttgggagaaagtaagagaagctaacaggagtctctacctggtaatccagagaattc

SEQ ID NO: 204191 - DNA, 1000 bp, Homo Sapiens
gatttcttgggtgaggattttcaaataaaggaaaccatactggattatttcacataagacactgttttctaacaatgcaaccaccatgttacattttactatagggtgctattatttctatttcctagttttaataagatataccatacacatcagaaatcataaaactcttaaagtagtattactctatatatactataataatgaaaattattaagatcctaaaacttgcattttgccttccattagaaaaaaatgttaattacaaaagtatgtcacgttgaatgtgtggattgttaattacaaaagtatcatacgtcagaaaaaaagtctagaaaaaagagaaaagaaataagaactcccataatcccaacctcacattttccccctggtcttttacatagttgtagcatgttctacttatcctttctcattctttctcttcagttgaaagtcagctccaccagagctaagaccttgtctgttttgttctccctccactgaattcctggcacatacaatagtatctcatatataggaggtgctcactaaataagtgaatgaatgacttccctgttgtttcataattttcataagcaatcatacagtagcccaccaagtgctgtatcataatttccttaagtgtttttaatgttaaaagttcagctatgagtcaatttttactactgagatcacttgcaccctggtaagtcagctcacctcactaggaccaacattctacccttaaaagtgcagggctaaagcccaagctagttaacagatgcttttgtttgactttgctctgagttatctttctaatttggaaacttcatgatggtgggtgtgacagatatttggaagaatgagtccaaaaccaaaatatcatttcctctccactttggaaacataattccatgtgcaagaaaaataagtgttcctactacaccaaattcctttatcttagctgacatttctaaagtcagttcttcaaggagaattc

SEQ ID NO: 204192 - DNA, 1000 bp, Homo Sapiens
ccagtcaggttcttcttcctcccatggtccagtgtacacaagggcttcccgccaagtgcccacctctggttctcctcctgtcctcacggttttcctctttggctatggtctctgctcagcactggtcttctctttcccacactctactgcagtgtatacacacgcagccttggtccctgtcctctcagtaattatttcagaagacctcccgcgtttattcacgggtagcaggcacctcatcacgtcctcgagctcctcttggcatccttaattagcccccacattgcagccagagtgaattccatgcacacagccatcagcaagcaccaggcctctgcctaccgcgcttaaatatttattgttataataataaaaaaggaggaggaagctttcgtaaataaggatgatgaattaaaattcactgtgatgtaaattgttctgggttaaaggaaaaatcgacaggattttctctaaaatgattgaaaaatctctggatgctgcaggtcaggccagtagacagcagggggcatgagagacatttctcccgttctcagtcctgtccccgagcttgtgaaggcagcgcacacttgcttccaatgcgatccttgcagcttttccacccatgacatctgtatttgttttttcaaattttatgtatttttctatcacgaactttgattttttccccctgcactgtgtaagaatttatgcattagctgaaaataaaacatctgggccaaaagaatagtagttttctgttcctcataacttgctcccaaaacagtggctgagcaccagatggcagcatccttctgtttcagaatattagggtagcattaaacattttttaaacacatatacctcacaactaaaaacattgtttctgtttttttctttaataatattggaaatttcaaaagaagtcttttgttgatttgtttgttgcattctgcaaatagtcactgatcttataacagtgaattttatcctgcaggaattc

SEQ ID NO: 204193 - DNA, 1000 bp, Homo Sapiens
tcccatcagaataatttggtaccttcttgaaaaatctactatgtggttctatttctggactatcttctatttcactgatctctgttagcccatttgtttatataccaaaccatactgccttgattattgcagcattttaatgtcttaaagtcaggaagttgataattctttaacccacatctaacaccatatacaaaattaattcaaaatgaatcacaggcctaaaaaataaaagctaaaactgaaaagattctagaaggaaatgtaggaaaatatctttgtaattttggtgggcaaagattccttaaatacacaaaaactattaatcacaagagaagcaaataataaataggacttataaaaattaaaatcttgtacttttcaaaagtaatattaggaaaacaaaacaaaacattaagaaaatgaaaagacaaatcagtctgaaagaaaatcttccggccaggcacaatggctcatgcctataatcccagtactttgggaagctgaggtgggagtactgcttgaacccaggagttcgagaccagcctgggcaacatattgagacccacctgtatttcctttttcttttttttgagacagagcgttgctcttgctgcccaggctggagcgcaatggcgcaatctccgctcactgcaacctccacctcccaggttcaagcgattctcctgcctcagcctccagagtagctgggattacaggtgccagccaccatgcccggcttattttttttgtatttagtagagacggggtttcgccacgttggtcaggctggtctccaactcctgaccttaggtgatccatccgccttggcctcccaaagtgctgggattacaggcgtgagccaccacgtccagcctattttttcttttaaaaaaaaaacagaagaaaaaaaatttttttccaaatatatttattttataaaatacatgtatccagaataataccaaggactcctacaactcagtaacaaaaagaattc

SEQ ID NO: 204194 - DNA, 1000 bp, Homo Sapiens
gtctggcccgatttgggcagctcaaccaggaccccctagaagcagatctttgaacaagttcctaagagtctcccagcctcagtttcctcatttgccaggtggccaggtgccctctgagggcctttttggccctgggcctgtgatgccagggtacaggggggctgggaagggcagtcttcattgggagccctgggctgggtaaagatggagcccggggcacagtcagctggacttcgttcctggctcccatgttggtttcagagcaccccccactcctgggcggctatcacccgctctcctctggatggaagtcaaagctccggcaccagaagccagagaataacaggagctaattatttcatcagatcaagtcatcagtgggtcgatttctgatgaattcccctggctcagacttctcgtggcctcatgccagtttctctccggatgctgaagaaatcaattaaagatgacacaagggattctgccttgttttttttcctttttcttggtaaaatattcaaagtggctgaaccgagagagcacccagtgaactcacgcagcaccagccgcctgccactccatccctgctgtggacaacacctctccttcccaccagttcctttccaggtctctctggctcctcctctccatcctgagtcttctccaggaccttggcaaaggctcgccagcccaggagacatctctggaaacagctaacgtcctgagcatttagaaacatcatttttagttctcaatttctctgccgatctgccaagaggaacgggtctgagtgactgatgccctcaccttcccaatgccacaaaccacagcggtgaacaaacacctgggacctcatccagacctgtttagaaagacccagatgggctgttttcctctgaggatctccaaatccaacaagaggaggagagagaagtttgggaacaatcaggcagctgaggtggtgggagaggaagaaggggccagaggcagaaggaggcac

SEQ ID NO: 204195 - DNA, 1000 bp, Homo Sapiens
agtttactttccaaaatattgggagaagaatatctaggtgttattaaaggtgtgtgcttaacattttaagaaatgtccaaattgttttccaaagtgtttgttacactttcatttctagtaacagtgtatgggagttcgaattctccaaatcttcaccaacaatggtgtgaccagatgttgtattttagacattcaaataagtaggccataatagttcattgtggatttaattttcatcactccagtggctaaaaatgttggaccaaaaaaaaatgataaagtaaccctctaggtgaagaaaaagaaaattaaagtgggtatgaacataattttttttcatgatttagtgattgagtagtgagttcttggtattttatgtgtctaaaatgtttacatttaaaagtaagatgtttaaacagtattgggttatcttctagtccacatgtcacataatatgtacctttatttaccttttaaactgaagttttaaaacctgggttttaaaaagagaacaactacccatcagcaattacagaagacaaaggaacttgtgtgtctgaagactgagtgttatttagcagctctttggtcagcttggattggtcacatatgtggaaactgggaaataataggggctacttacactggagaagaacactacaaatggtgtaaagagtggttttggaatgtatccagacttccttctaaaataaaaatttaaacagctgtgtttgagagatgggtatgcacaattcttgtaagaaagactgtgtagatgtttgaggtccccttagtccctgatgctaccattgttccatttgcatttcagggtagagaaacattcatgaattttgggaaaaacacattagttacagtatgcttgttgactgaacattttgagaattctgacagtgattttcctaatgcaaagatgataaaatgtacaacttagagaaataaaaagaattagtctcagaaaaccctgcactaggttattttt

SEQ ID NO: 204196 - DNA, 1000 bp, Homo Sapiens
acaccaaaactctctccattccctctatttacgtaaatgaggttgctcagtccttacatttacaaaataaaatatagaaatagaattgatcctgaatcctgcttaattctaacaataaattattatttatttttgaatacagggaaatataaaaacccagtcttgttcatctccaataaaaatttttattaaaaatttacttttggccaggcatggtggctcatgcctataattccagcactttgggaggctgaggcaggtggatcacctgaagtcaggagttcaagactagcccggccagcatggtaaaacactgtctctactaaaaaataccaaaaaattagccaggcatggtggccggtgcctgtaactccagctactcaggaggctgaggtaggagaatcgattgaaccagggaggcagaggttgcagtgagccgagatcataccactgcactgcagccagactctgtacctgaaaaaaaaaaaaaaaagaaagaaaagaaaatttacttttttgtttaatagttttacataaaactgtaatatattttggttgttttaactattgtgaactaaccattgtaatgatcagttaatctagaagaaactgaaaaattagagcctatggccttagtatattaaacaaattatagaattttaatttatgtatacatagtcacacataaatatttttgtttcagatagtattacaaggggaatcaataagagattctcaaatgtaaaaatctttataataaatgttaatatttacaaggtgctagaattcagactcaaacatttaaaattatacttaatttctgcaaggggttagaagtttttcaaaattatttaaagtggtatatgaacaaagaaatttgaaaatcatttttctagaagtctactcctttctgtccttgatccccatcagaatgccctttcttgtgtggtagggagtcgggctaagtagtcttacattttcccagagcaggcaggaattc

SEQ ID NO: 204197 - DNA, 1000 bp, Homo Sapiens
ggaggctgaggttgcagtgagccaagatagagccactgcattccagcctgggtgacagagtgagatcctgtcttaaaaaaaaggaaaaaagaaaaagaaaaaaacagaatcatacaatgagagagattgtatagcccttttaattgtccataatggatacatttctttttctgtgtaatagtttatcagcatgaaaattttctttttctgtgtaatagtttatcagcatgaaaaaaaagagtcactgaacactgataattttctttctctctctctcttttttcctttttttggagatgaagtctcgctctgttgcccaggctggagtgcaatggcaacatctctgttcactgcaaccttcacatcctgggttcaggcgattttcctgcctcagcctcccaagtagctgggattccaggtgcaccccgtcatgcctggataaatttttgtattttcagtagagacggggtttcatcatgttggccaggctggtctcaaactcctgacctcaaataatctgcccgccttagcctcccaaattactggtgatgattttcatttaatggtgttctacaaagtgagtttaggcagtgaaagggcacaagtcacctatagtttaccagaaagtagtatcagtcaccagcgttgaagcatactcctaaccctggaaaatttcttcagcagccagaattaatctcagattttgagactggagcaaagactaatttggtatgtgttcattcagattagtaaatctccatggtgttcgaactgtataatatcaaatctaaaataagtcaagagagttggacaatatctcatctctgagaaaaaaatgcattattttcaagagatttaagactgaatttaaaatccaactgcctattccagtgtatgtttctctagaataaggccaagccctacaaattctggatagtgtcctccaagttgtgtttaagtgataattgataaatctatggtttagatacatatggaattc

SEQ ID NO: 204198 - DNA, 1000 bp, Homo Sapiens
attccagagaaattcagtcaaatgatgcctgctcccgaatgatgctgaataacagctgtactgggcttatggcttgctttctttggttgtggaaaaatatatttcatcctcttctttgctgttgttgatatggttcatattactcaaagatgtctaattctcatgtcttaaattgagactgttggcactttctgctgactcattgtgtcttaatcttccaaggtggtccatttttacttaaagaaaaaggttattttcctccaaagtggcaggttctacaaaatgaccatctggtcccagcttccccatcacttcctttattcaaatgacactagtcacagatcttgaacttgagagatgactttccatgcctgtaaccttgaatcagtggtttctgtcctttactgataacagcaagtaaaaaaatgaaagtctcttaggtgcccccctgaggccagagttcagccctacactcctgcctcattcctttttcagagaattttctcagttgagctctgaaaatcctgcaagttggacagagttccctttccatgaagagtctcagaccaagttgttaatctcctttatttatgttcatctttggtacagtttcaaagaataataactggcaaattccaaaacagtgaatttcttaaatttccctgcagttattccgaagttggtctggcagctaggtataggtaaatcacactgtgacttctctatcaataaacagaaaatgcacagaaataaatgccagaaagactgctaggaagaacactggcaaactatttcaatacgcattagccttgttgagtgaattttttattttaatgggaaagtccattcctaatttatgccagagaaattgctgaatgtatctactttttccaattccatgatcactgcccatgtattgcttcatcataaatcagctgctattatggcattcttcattaattaatccattgaacaaatatttattgaacacctgccatgt

SEQ ID NO: 204199 - DNA, 1000 bp, Homo Sapiens
attaggtaagagaaaaaaaataggcagaaataagttaagctgtacttgcttgcagaaaacaaccttaaatataaaaaatcataaacaaatgaaacttataaaactcctaagccttctcttgatcctagtgtctggaaacctttatgaactcaaaaatataggaaaccaaaaccacttttaaatagacaagtagataaatgaatgacttttagattctttctccaaagttctaatctagtacatacccataatattctcttcaatgaactttagaaatgaacctttccattttagtatcagtattctactactgaccactgttttatttcaatttatctcattccaaaacagttctaagactcatctcagaattcagactctcaaaactctaaatttcatgacaaaaaactataattacaatgaagatcataggctgctaaagcttcttaaagcttaaatcataatgcctgctaccatcagagaggagaagaataatcttaaaatggattacatcataatatgacatggtataaattctgtatcttttcatcttacactttaaaacatgtttctcaattaaatgaataggatatatatactctagctaaattaaacaaggcaaacaggatctttctccataaaaatgttattctgttttctgtaaaaaggaacagatatacattaaactatataaacattaaaatattttcaaaatgagcaatcttattgaaatcacttaactgctacacccaccagattccctacctatactgttaatgctaatacccacctggtggggttgtagtgaagattaaagggccaaatacagaactagtaaacaaaggtaatcagtatttattagctgttttaattaaatttgaaatcccatgtagaacatgttctgtaatacataaataaataaccgtgttcaaaaagttatttaactatgagatggacatttaggctaacttaccacagctgacccattcagaaagaattc

SEQ ID NO: 204200 - DNA, 1000 bp, Homo Sapiens
aatatctgtcacctttgtactttggctgtgcacagaattcttgggtcacaagaattgtctcttcaaaatcctgcagaccttgttccactatcctgtggcattcaaggtttcagggacaactaatgtaaaattaatttttctttctctgacaatagcttgtttttcaactgcttctctgcttttaggatttttttttttttaatttttgaaatgttaaaattccatgaagctgtgttgagtgcttctctctttgttaattttgcatggtacttagtaaagtccttttgatccatagacttaggcctttcttcagctgggtacggttttgttactactttggttattgtttatgaatatttttcagtggcctcctctacagggatatgatttgttcattcagcatatgtttactaagcacttaccatgtttcatgtactgttctatttgttgggacgactcagggctctgtatgtcagctctctactttgtttttactaattagctttcttatggtttttacccctttatttcctctggaataacttcaacttttttgttcacattactacttagacttaagactggatggagtctgttctttctacttttcatgtagatttgagttttggtagtgcagttttagttttcttatctttccttattgcattcaattcccttattatttctgcttgcttcttagccagatacttttcaatttatgtcttatttcacatacttcaaatttctttgaattgtgagaacacaaagcagatgttttctaaaaattttgttttctgaagaatattctatcccagcagcatcttctatatcttaaatgcttgttattccacctcagtacacaaccttttcatatatcccatgttattttatgttttctgtgtccttattctcgaatgatgagatacaaaactgttgaggaacagattggacagatgctccttggttgcattcactttccacttagtttctactagaattc

SEQ ID NO: 204201 - DNA, 1000 bp, Homo Sapiens
tttttgtaattttagtagagacagggtttaaccatgttggccaggctggtcacaaactcctgacctcaggtgaaccacctgccttggcctcccaaagtgctggaattacaggcgtgagccaccatgccccgccgactctgacttttaagttgacagtcaatgggaaacaggttacctgataggaaagaactctgcagctcaaagcagttcatatgctccattttaatgttaccaatctccattctcctgccaactcgcccacttgagggagggagttgaagaagatgagggtggtaaagtctacacggcgttaatgaatgaatgaatggaacaatattacttaaaaatgcaatgagttctctagtcagacttgaggtagatgcaaaagaaaaaaatggttgtagaagacagtcaaaatctttgggatgagtattggggtatagggtcctctattttcgtactgttcaaaatagctaaaacaatcaagcaatgctctcagaccaagcaaggtaactttaccagcatctccaaaaccacctcttgctccattccacttaccacctcccgcaatgggtaacaactctcctgccttctgacagcctagattcgctttgcatcgttttatagtttgtacaaatagaaccatgtagtgtgtacccttttgtgtctggcttttcagatgtttgtgaaattatccatattactgattagagctatagatcattcattcttacagctgcatggttttccattgtgtgaacataccagaatttataatcctttgtagtcatgataaatatttgagtagattgcagtttccaactcttaagaatcatgcaactggcccggcacggtggctcacgcctgaaatcccagcactttgggaggccgaggcaggcagatcatgaggtcaagagatcgagaccatcctggccaacatggaaaccccgactgtactaaaagtacaaaaattagctggacctggtggcgcgcctgtagt

SEQ ID NO: 204202 - DNA, 1000 bp, Homo Sapiens
ctctcagaacccgggagtggcagtggggatggcgtgcaagagagcagctgccacggagcctcctggcggccagggtagggcctgtcggcccagttgcccactgcctgctcctggctccacaaagggcttgctgggcagcttcaggtcagaggcgcagcccccacctccagccccctgaacatgtgggggttgtgttttcttgacctgggcccccccgtgcctccctcccacctctgtgcaggagagccaggcagcccgtgcagccgacatcaggccgggcgcggagctggctcccatctcctgcgagggacctgctcttgtttttttttgttttttgagatggagttttgctcgtcgcccaggctggagtgcagtggcgcgatctcggctcactgtaacctctgcatctcgggttcaagcgattctcctgcctcagcttcctgagtagctgggattacaggtgctcgccaccacgcccagctaatttttgtatttttagtagagacaaggtttcactatgttggccaggctggtctcgaattcctgacctcaagtgatccacaggcctcatcctctcaaagtgctgggattacaggtgtgagccaccgcctggcccccttgttatctgtattttacagatggggaggcttggttgcaggtgaagtgtggccatgtcctgccagccccccggagctggtgaatccctgccttatctgcaagtggcttctccccacacagaaaggcgaaaggcgacctccgcctgagtgttccagcaaaggccgactggctcagctccaatatgctgagctcggcagagcctggacagggctccccaggccccgcaggaggctggcgcaggccgcaggctggcctccctatctccaccaggaatgcactgagcccctgcacccctgcccacccaggtggaggaatgtggcaggggctgctgggaactcggagcctggaggagggcttttgaggcctctgcctcctggaattc

SEQ ID NO: 204203 - DNA, 1000 bp, Homo Sapiens
atctacctggaagcaccagaatggcttagtacagctagggagctcagccagatctcggtgtctgctgtttgagattgtgtggaaggactattgctaagaagcaggagacagactgaacccagtgttggccacaagtgaggactgagacccaggtcacctcttggctgaacatgttagcttgttggtaaatggctctgcagtggttctgcattttattggggaatttgttttggttcattttggcattcccgcaaccatcttgttggttttttggtaaaatgtggcaccccctccagacctcctagctgtggaactgagatattttagcagggtcctgtcatcctttgatttttcctcgcttcctgcctcttggcccttcctttttgtctgacttcactcgggcccagtctggctctatactgttaactggttagttaggccaggagatagtcgctgcctctcccatgagcttctgcatacctgtgaattttggttatctgtggccccctaatgctgattgcatgcccttgccttaggccctaagcccactgtgtgggcgtcccatctcgtacagtggccgtctccagcctccactgggcccaaataggtaaaaagaaagcctggggaaggaagagccaggaaacctcgggagagtggaatttcaggaatggcaggtcagaactggttccagcatgggtccctttgccttgtgcttagctgagggatttttgttattaattttttttttcctgttcaacactcctaacctcttttgaatttcagttctctttttttatcctgaaggattattttattgtacttttgagggtttttttttttttttttttttgccttgcacaaagtactgactcatgttgctaatggctgtggctgtatgctagttatatgtctcattatcctaccccttaagattgatcatttctgtgttggtttctatttcaaaccagaataggccaggtgggtcaattcatgtatttct

SEQ ID NO: 204204 - DNA, 1000 bp, Homo Sapiens
tccattgctaccaccctagtgaaagccaccttctagattattgcaatagcctcctaaactaatctcttgctcctgagaacccctcttagctattcttaacacagcagcgagattgttaatgagatggttatgaaagtatattcatgtcattcttccgtttaaatccctccaatggctttcagtcttcatctaaagccagtggttataatgacttgcaaggtctaacacagtgtgtccttgcaactctgttaacacccaacttccatttattctactctcctcctttctctcttcacaccagatacacttatctcccccactgaacatgctaaacatgctctttccttgggacctgcacaggctgttctctctgtccagaacactcttcttccgtttggctttgctttcatatctcactcaggcctttattcaaacgtcattccaataaagcctttcctggaaatttttaaaaactgtaatcccttgacactccattcatggctttcctatgtattttgtttgaacaacatcatctaattttttatattttacacatttagtatatttctgtctgttctacttgcactccacttctactagaaactttttaaagacagagatttctttttttgtctatagcttttcccagcatctagagtaatgtatgaaacatgtgaaatgctgaataaatatctttgaatgatacaacaatatatgagagttttaagggaaaacatttcactggtgacttttcaagtattagccagctgggaaatgttttggcatgatggaatccacacttttctaaagtgcatcataagtcatactttaatcatctttcctcacccaaaatagaggtaatctggtctttcttacctgactttattatcttggataccaagatttctcctaggacattggttcctgagtcatggcaattttaatgcatcaaaggggcactattcaatctgggtaataatatattctcattagcgaattc

SEQ ID NO: 204205 - DNA, 1000 bp, Homo Sapiens
ggccgaagaccagaggcgggcaagtggcatttcagtttcctgaaagaggaaaaaggtagattctgaaaaccatgcaatttcaatctcgggcaagtcacaagaatagatcatttaaagacctgggtgagtagtagaagcttcgataggctcactgagagcaagccattgcagatgaaccacgtttctttttccaaattgttagagtagtagctcagagaaatgtgactgacgtagaaaatgttgacatcagagaaacatttgacaaaagcacaataaaatattggcaacatggggatatttggggttagaggccactgagtcgatgaatgactgaatcaaaatgagtgggttcggttcattagtgatgtgtcataggcctcagagctggacgttgtctcattcaactttttttaatgatgtaaatgagaatataaattacaatttactacaattgctgaagctgggcggaatatcagaatccaaaattacctcaagttgaatcaaaggaccaacgaacaccatagaaatggaaaaaagttccttaacagttagctttttattgctattcttagtgccaatttttttttctaatcatagccagagccaaggctagaaatttaaaactattttgtaaatttagtaaatcatttccaaattattctggtagggaatgcattgctcactgcacaactgtacatagtaggaaattacatccattttcaaaggcaaatgtattcctaaatctttcaaatttagtgcccttcaactttcagtaactcaagaaaactaaaagaactttatattatttttcttaatcctctcagcagagatcttttaaataaaactttcgtgctaaaccatcatttcttaaatggatatttcattgaatactatcccattaaaggttaatagtatagcatgaagaaagtgttccacagtcaaatagattgagaaaccctgggtcaaacttggctgtcagacttcatttctgcaggaattc

SEQ ID NO: 204206 - DNA, 1000 bp, Homo Sapiens
tggctcacacctgtaatcccagcactttgggaggccaaggcaggtggatcacctgaggccaggagttcgagaccagcctggccaacatggtgaaacccccgtctctgctaaaaatacaaaaattagctgggcatggtgacaggtgtctgtagtcctaggtactcgggaggccaaggcaggagaatcgcttgaacccaggaggcagaggggtttttttgttttttttttgagacagtcttgccttgtcgcccaggctggagtgcagtggcgcagtcttggctcactgcaagctctgcctcccgggttcacgccattctcctgcctcagcctcctgagtagctgggactacaggcacccgaggaggcagaggttttaatgagccaagattgtgccactgcactccagcctgggtgacagagcgagactctgtctctaaataaataaataaatacaagcagtgggcctctctggaagcctgttggctaagagggtgttagcatgatcagatgagattggtaagatcattagctcgttggctgttctttgatggagcatttggggaaagaatgaaggaagcggggagaccaatgaggggcctgcatgtcagttaaagccgtagcaataacttttgttggatctggggtgctaatggggaacatggttctaatagaagggctcctaaatagtcttttcctcagaatttccttaatactctatggatatctgaaaacatataccatcatatatagtcctaactactcttttctagaagaccatcttatttattagctcagagagatgaatcagctttgatgttcagaattcatagattagatattcatgggcatgcttagcatgcacaacttaatatatgccttgtagtgtgcaagcgtgtagcaaagcatggtttctgcatttgagatttttaaaaactgacttaacggtatatggaatcttaaattttcctagaatctgccagctcatgaaaaaaaaagaattc

SEQ ID NO: 204207 - DNA, 1000 bp, Homo Sapiens
ctgggccagaaggcaaaccactgcctggaaagaaagaatccagccctggtagcattaatcacctgctaatgaaagaactcttgggccctgaataaacagcagtgatacacaggtactgtcaagggctttgggtgagaactggtgacattctggcttcaggtaccagctcacccacaggaaggtagagcaccaagtggacccttaggaaccctggtttcacagcttggctcttgggcagcatttctgagccagccctgagccagaggggagcacactgtccaaaaaagtgagtctcaggccaggcagcattcatcacaagttgacacaagagcacttcagccttaagggagcagtggcattggtttgacagtaccacccatgggcccttggtagtggtggccacagggtgagactcttctgtctactgaaatgggagggaagagtgggaaaaactgcatcttgtggtttggttgccagctaagccacaggaaaatagaaaatcaggtaaaattctaaggttttgaatctaatccttggctcccatatggcaccatgggacccatgtggagctttgtggaactcggagaactgcagggaaaaacacaagcctggctacctttgccacctgctgattgtaaggaccagggcattgaatgaaaataagctgtagccagaaagtggttacagcagtccttcagcaagacccagtgctgttcaggtttcagttctagactagtgcagtcacagtgctggtggccacagggaagcttgtgtcactccacctccagctttaggtgggttgggagagagacagacagacagacagagagagagagagagagatcctttttgtttagaagaaagtaagagaaaaaaacagtctctgcctggtaatgcagagaattctcccagatctccaagattatgaagatggtacttctgaaagtctgaaataaccaaagggttactgtgctttgggtgcccactaaagtagatacag

SEQ ID NO: 204208 - DNA, 1000 bp, Homo Sapiens
accagcctgaccaacatggtgaaaccccgtctccactaaaaatacaaaaaattagctgagcgtggtggcgggcaactgtaattccagctattcgggaggctgaggcaggagaatcccttgaactgggagacagaggttgcagggagtggagatagcaccactgcactccagcctggtcagtagagtgagactccgtctcaaaaaaacacacaaaaaaagaacagcacccaggggatggcgctaaagcattcatgagaaatccgcccccatgatccagtcacctcccaccaggccccacctccaacaatgggggctacatttcaacctgacatttgggtagggacatacatttaaaccatatcagtgagttagagcaattcaacttggtctaccttgcagaaacaatgttcagtgtgaacccatgcaaagaatagcaataaagcaagccaaagaattctacagaatctcaaaatgtcgtcatcaaaacctttaccttcctttggaaattgacatgcaccaaagtataaacaaatcaacaggctcatttaatctccctgccaccttttctgaagtgagtctgctggcataccaagataaatgtatggtgtcacctgccaaaacaaacaaatgcttaaaaagccttcacccagaaagaatagtttcaccttaggaactattcttaatagttaacaagataaaatttcaagtgacaattcaaaactttctgtttgtgtcttgatacaatatcaaaagagtataatgcgatatctaggaagatgtgaaacaaatgcaaaaaagtatttctcagtcatccaagaattgagaattttcccaatgttaaagtggtctcttatcaatggattgcccatgtcatagaaaaaaggctggataaccactttacaatatacaaacaaataaattccaaatgcattaaaaatcataataggaaaagtcaaactgaaacttttagaagagaatacagaatagctttaatgaattc

SEQ ID NO: 204209 - DNA, 1000 bp, Homo Sapiens
agcaaggtgtttaaattcccagagcatcttagcagaaaaacatgatataccttcctaagtctcagatggtgaaattgactttcctaaatctcagatggtgatgtatacattacatttgttattaaactaaataatgctagaccaaaatctactttgcaaactgaattttgagagttgaacatctactatatgttgtttaaattaactcaatactgtacttgcttatttaaatagcattgactttggagtctgacaaagccgggtccaaactccattgctgtcacttattgaatgtcatctgggcatttaacttaatctttttgtcttactgtacagtttatgactgttgtgaaaatcaagttaatagttaaataatttccctagcatgtcatttatgttcccttgttcagtaaatattagtcaatctctctccacaataaacttactgagtttgtttacacacacgcacaagctgcatacatagtctaggtgaagattttagcattatgagcttaaataaactagaatgagtcataactatctatccaaaaataaagaaatttccaaaaacacttttaaaaagataatagttaaggccaggtacagtggctcaagcttagaatcccatcactttgggaggccaagatgggtgaatcccttgagtccaggagtttgagaccagcccgggcaacatggcaaaaccccatctctacaaataatttaaaaagtatgcagtgagccgagatcatgccactgcactccagtctgggtgacagagcgagactctgccaaaaaaaaaaaaccaaaaaacattagcctggtgtggtggcaggtggctgaagtcccagctacttgggaggctgaggtgagaggatcacctgagcctgggaggtcaaggctgcagtgagctgtgattatgccactgtgctccagcctgggtgacagaaggtgcttaagtgcccacaaggtgctaaaccctgggatctgatggcaaactagt

SEQ ID NO: 204210 - DNA, 1000 bp, Homo Sapiens
tattggtatgacaaatcagactgatacaacctcatttaatattattttatttatagtttagtcatatccttcaaaagtgactgtgcttttagtaggaatttcagtactgcctacagatttctgtcagtatacattgtaacagccatgcatatttataaggatgtaatttcatctctggatttcagtgacactgataaaccattcaagcttcactcttggtttttaatgtcaccagaataagctgatggaattacagctttacatgtgccatcaaaagtcttatttcttatacaataataaggctggaatctttaaagggcatcattcctactatctcaccatggaaaggtggatgcctagtttatttttttaaatcccataacttgcctttagtaatccattctaatgcccagtctacagtcatctctttagttatttcacacacacacacacacacacacacacacacacacacccccccaaaccctccctcctctccttccatctcactgcctttcccccactctctcaccactgctatattgtaaatttatttcaggaaagaatgtacttgcattcaaatacttttgatgctttttgaatccaaacacttcacaaaaaagtaaagtatataactgattaaaataataatgggtaatatacccatttttcccaacacactggtacatacacatttcttttgctctctagtctatccagaaaacatgtatcaatgttattaacattactgcccactaataagataccaatcaaagcagaggagccctaacctctctaaatgacccatcttttttgatcaagccattaaaagctctggttttaaagggttaccagtcaaaagaaaaactgtaaagaaatactagtaaatgccaatccaggaaattaaattaaccaaggaagtgactgaaaatgtttcttgactaaaatccaccccagaagcaagatgagctgacctggtctgaaagcaactaccaaaaca

SEQ ID NO: 204211 - DNA, 1000 bp, Homo Sapiens
gtgtccttaaattagatttaacttgactttacagtgggctgactggctggtaaggggggcctctgcagagtagccacagggcaaacggcattccagtgggggactgccccaggggcttctggacaggtggaggccgtctacctgctcagtcccatggaaagaggaaaagaacctttcactgtgtggtgatcacatcagggctgtccacatttgtgttttcattcttttcttttctctctcaccttttctgctccttatttctgaagggctgcaatctgaatgttattttttaaactaaaggaaattaaaagttactttatttgctaccgcaaagccaggttagtaaattcctaggcacagggttaagaggacaaatgaagcactggaggctcttaccacccttgctggagtcaattcctacagctcttgtctacaccttaactggttagagctaaagcagcagcaatgtgctgctcaactgctaccagggccatcacactcgacatgcacatggagatcatggtgagggtcaagtgtgatgacaaacatcaaatattgatgtcaaatacaaacgtcaagtatgataaaagaggcaaccttgcttcacctgtgtggtcttagacaaatcttaactacttttgaaaacctggaatgcttcttattttcctccaaataggctcttttatttaataacactggtgctattaaaggctccaaaaagtacaacgtgggagcccatgtggggttcactttgaaatatggcacagtttgccttccttccatactaagactctcattgaatggctatccatctcaatatgtaattctgaaattagaaaataatacaccctaccttctttcttcaatttattgacatgtaactcacagcctttgctgaaagggacttttactgctggcagaaacagtgaccatcgttacctcctctaataagccctgcagacactcgtccccttccctcactttccctggaggtgaattc

SEQ ID NO: 204212 - DNA, 1000 bp, Homo Sapiens
actgctgtcactgccaccgctgatggggctatcgaggcagttgtttttcttttttttttaagcccacatccggtgacctatcaaattgaggcaagtttaaagccagagcagcctggtgtcacgctggtgtccatcccagtcttcctggcaccttcctggcacaaagcctcagagctgatcccgacccagtccttccgagcacaggtggggacaccaaggccagtgacgcccaagcccatggactcaactggaagagggccaggatgaaacgctagtctccagactccccagccagcatcacacagaacactgactatgactaacccacggccaggggcctaacttggcccttaggtatgccagggtttctattggtcggctcaatgcttcttgaaaaaaccagaattcaaatgccatcgatacactggctacagtcctcaccactccctaatgtctcacactcagccagctttactcattttgtcatctatctgatcttggatcagtaaaactgaggtctccacataagggggtgaggagaaagggaaccagcctcctcccctggagagtgggactccagatctggtctccttgtcccagaggccacggatcctggcagactgtgtgccctgctgcccactgctgtgaatgatgctcattacaaatttcagtaaatattaactgagcagctgctgtatgccaggccccagggactcatcagcccagctagcacaaagtcctttattttttatttcattttgagacaggttgtcaatctgtcactcaggctggagcacgtggcacaatcatagatcactgcagcttcgaactcccagactcaaatgatcctcctgcctcagcctcccaagtagccgggactacaggtgtacaccaccatgcccagctagaagccttttatttcaacggcttcatgtgctgctcctttacggagccctcccagcagttagcagtaagcactgaccctctcgtggtggaattc

SEQ ID NO: 204213 - DNA, 1000 bp, Homo Sapiens
aagccccacagacccccatccagcctggctcttggggacagagatggttaagcagtccagcttttgcctccaaaatgtgcagcatggggcagggcagtgtgagggctatgatgcggaatgatggctgtttgctttgggatcctggcagatgctggatctctttacagatgggagcgaaagaggcccacacttaatgtacaggcattctgatgatgtcagtcagataaattcctaagataagctgtgatcatgtagctaagagctggcaaataatgagcatgcagccatgctgttctcacctttgtgacaggatcttctgggagttttttctgaagtccattcagggaatatattctcttctgtgctgtgtgacttgtgggatgtggatgttctgattttgcttgttttgacctctgtttaaaagggacttttttcagggcaggcttctttggagggcttgaggggtagggggcaatcaacatctctggtcatggaaagtttgcctgtttgagattatactcaatgtcttatggtctctttgtctctgcccctgccctaggtgcagctgaatgccggccagctgcagtatatccgcttagcccagcctgtatcaggcactcaagttgtgcagggacagatccagacacttgccaccaatgctcaacaggtatgtgccccagagacacaaggcctgtgttggagaccaggagcagatggcttctgacaggaaaggagcgctcagcacacagctgtcttgccacctcatccttcaaccagaagcaccacccccacaccctccatatccttctgcacccaagaggcatgggtggtaattggaacattagattcaaagtgttttctcttaccatcttgttctcaaggggcaaagaaatgcaagtcaggggaagcctcgaaggtgcctgaaagaaaccttacaggtgtgcacacccatcagacctgggaaatgttcgacagatcgcctgatcgtcaggctgtttcc

SEQ ID NO: 204214 - DNA, 1000 bp, Homo Sapiens
cttgtgggcctggctttgacagtgtttgtttgcatggattagggagtggcttttgttggaactgatgttcttgttaagcctggcaagtctgtctcttgggagcaacactactcctttgccttttgtatacaaagaatggactccacacagctggtgctgccaatctcttgtcttacgacccgtgtatgacagctgactctccttggtctcttagccatacttttcgaggcagctcttctgcaaggtcagtgagcacagggacataagccatgctatttggtgtccttcccataatccattgggaacttgctcatgtatttgctccagaacctataggttattatctccttttcttccctctcctgggctacttaagcaccccctaagtggtttatttgcatccacttttactcttcttctagaaagctctccatataagaggccaatgtttactggttatcaatttatggcccctcagtttcaaatccactctgcattgccttctttggctgggccctttaaatatgtttcctttgccacctggcatgttgctaagctttgtcagcagagggcactggagagacactggaggaggaaggagttttctctcctagttgggctgtatggctctctggctctctgcagcctcctgcagtgtgcatagatttcccagggcccacctcctgtgggcagcttcacaggtgccaggctcctaagcccagctcctgtagtgcatcatggccagcagcacccagtggccagaagcttcctgtggcatgctcttgggcagtttcattatggagtgtctctggagagttacctccttttgaatggctttccctggtaccctagagggtgcatttttcagtaagttccaccactgagacttctgtgttgtccagtaagccacggccatggcgtctccaacaagctccagatctcagtaggaggctcctcctcggttagtggcagttccttgtatcggctatgcttggaattc

SEQ ID NO: 204215 - DNA, 1000 bp, Homo Sapiens
ttttctttctttgtcatccgttcagtgttaagatcacagcttactgcatccttgacctcccagactcaagtgatcctctcacctcagcctcctgcgtagctggggctacaggcacatgccaccacacctggctaatttttttttttagagacaggatctcaccatgttgcccaggatggttttgaactcctgggctcaagtgaccctcctaccgctgcctcctaaagtgctgggattacaggcatgagccaccattcccagcccacagactgtttttcattctgcctgcctggaccgcctgtcaataaatttacagaaaaaatatctaccctttaaaagctatttcatgcaagttttctccatctccaaacaatgtgatttcacactctactatctatggtaattattttttgctcttgttttacccacccccacctttttttttttttttttttttttgagacagagtctctctgtgtcacccagctcactacaacctctgactccgaggttcaagcgattctcctgcctcagcctcccgagtagctgggattacaggcgcacaccaccatgcctagctaatttttatatttttagtagagacggggtttcaccatgttggccaggctgctctcaaactcctggcctcaagtgatctgcccaccttggcctcccaaagtgctggggttacaggtgttagccaccacacccggcctaaccactcccaccttctacttcccccaagcataagctatttgagggtatcagccatatttcatcttgcatgtcctgcagggtttagtgtgcagaaagtgctgagaaaattttcactgaactgaaaggacccaactgattggctgtgctgtaagcaaaaatactttcatttcatgtttctgaaacttaacaaatcaaacatattagtggaagagtaaattaattttattgactgatgaaaaactaaagtgataagaagtatggatagtagacaaccactgaattc

SEQ ID NO: 204216 - DNA, 1000 bp, Homo Sapiens
agatcttttctctacaaaagtaaaaaaattgaaaacaaaaaaggttgaggttgcagtgagccaacatcgcgccactgcactccagcctgggcatcaagagcaaaactctgtctcaaaaataaataaatagatagataaaataaaataaatggcagggcgtggtggctcacgtgtgtaatcctagcactttgggagtccgaggcaggcagatcaagaggtcaggagttcaagaccagcctgaccaatatggtgaaaccctgtctcttctaaaaatacaaaaattagctgggcatggtggcatgtgcctatagtcccagctactcgggatgctgaggcaggagaatcacttgaacctgggaggtggaggctgcagtgagccaagatcacaccactgcactccagcctgggcaacagagcaagactgtatctctaaataaataaataaataaataaataaatacataaatatacttatttaagtaaaaaaaaaaaagtaaggtgaattccatgaaaatattgtgttaagtacaatacaggttaggaagaacataaattgggaagttgaaagataatggctacagttgaggaactgctatccagtagagtaaaaaatgtgtaattctgaacactgtgggttaaataaaaacaaaatgaaaagaattaaagtaaaattttgtttccaaactgacagacatctggtaagaataaactagaaaaaaatagaaaatgcataaatactactatgaatgaagataggggagcaactaaaaaaagaatataagaaatacaatgccaaaacattaaacttatagcaaatgaacaattatgtagaaaaatataaattaacaaaacttaggaagaaatacataaacttagaattaccattaaggaaatctattcagtaattaaaaatcttcacaagccaggcaaagtggctcatgcctgtaatcccaggactttgggaggctgaggcaggaggattgcttgtgtcctggaattc

SEQ ID NO: 204217 - DNA, 1000 bp, Homo Sapiens
atagcattttcagacctgtgattttattatgggtacaaatattgcatttaaaaaatatttacatatgatttccacacagtcctgatgtgtgctagatatcttctttaaaaatgaacactccatacttaaaacattgatgaagaagaattacagtgaaaaaataattaagaaacaactggccgggcacggtggctcacgcctgtaatcccagcactttcggaggctgaggtgggcggatcacgaggtcaggagatcgagaccatcctggctaacacagtgaaaccccgtctctactaaaaatacaaaaaattagccgggcgttgtagcagatgcctgtagtctcagctacttgggaggctgaggcaggagaatggtgtgaacctgggaggcggagtttgcagtgagccaagatcacgccactgcactccagcctgggcgacagagtgagactccatctcaaaaaaaaaaaaaaaagaaaagaaacaacaaactagtgcacaaagaatggacagagttctaattttgactactttaaagttctctaacatgcaactgggtttctgctgtggaaatgaggtaaacacaaagcaattttcttttcacctgaaagcaacagcagcgtcacgtcacccctaagtggacaaaccaaataccatgaaagcattatcatgatttctggtgttggattattttggctctttcagatgctcagtctctagatcatacctgtgttttgtgtgtgtgtgtgtgtgtgtgtgtgtgtgtgtgtgtgtgtgttttaagagatcaaggcagtcacagctgtctctaatgtgaagggtgacttgtacctcactttgttcctggcccagtactatgtcttctatcacctgtgatttatgtttgctttatctgttctttaacttgcaaggtggagtccttaagcaatttttttaaaaaattaaacaaagctttgctaaggcacaattcttttcagtaaggagaaaatataaaggaattc

SEQ ID NO: 204218 - DNA, 1000 bp, Homo Sapiens
ctgcgactcgactccggcgcggcaggcgctggctgggccccggccggcagcagcggtggcggcgacggaggcggctcccgaagggggaggaggcggagccgggaagcggcggcggcggcggagggggcggggacgtggagggggcggggacgccgagccgcggccgccaatgggcgcggggctcctcagccgcggctccgggggcgggagggcggcgccgaggggtatcctcagtctccgccgctccctgagaaggggaggcagagcgcgggccacccgccgggagagccctgctgcaggggctgccccgccccaggcccgcccctgaggcgcggccgcgggcctctggggccaggcctcgcgcgacccaggctggggctgcgcttgggctccgctgcgcaggggttcgcgcccgcgagggggccggaactcggcccagatagctactgctcgcagcccgcctgccagactccctcctccgcttccccgcactggagacgcagcctcctctcccctcctctgcctctcttggctgtttcctcaaagtttttccctttcagacacttaggaaagaaactctcccttctgttcttaggctgcgtttcagtgataaattagtccccgcggacccagagagaacagcagaggcagaaacgaaagagatggaaacgagctgcagtccctgagtccccgagaccatcttgaatgctgagcaggaaccagccaggctcagccctggcccctcgcccctttctctgactttctcactttacatgcccttgttgttagaagacttagatagaaacatccagcccagctgggcctagtctcaaaagatggggagggtgtgaggtaaggaaaggcttttgacctgtcccaacggctttcctgtgaggggaagaattctgcgagttggtgaccccctttgggccctcctccacttggatgtgatgttggtcactgaaaccgtttcctcctcatgtttgtctggctctcattt

SEQ ID NO: 204219 - DNA, 1000 bp, Homo Sapiens
cagttccaataccaattcagtattacttaattaattcactcattcattaattcatcatttgctcaaatacttgctgaacacaaactatttgttaagcaccatctagaagcatcacgcttgactataatttgacaaacttagaagtaaaaaagtgacaatttccagttacaacaaccttccattatgatttgttttgaagatgaattctctgaggaatgccatacttaaggttacattaatcacaatagtgtgaataatgttttgctcagtaattgaatgaagagtttttatttgaagcctttgcagcttccctagaattatcttatttgaatttccaagttcttgccatttttccttttctactttgatttcttcacaaggtgatgtgccactgtgagtattcacttgttccttcaattaaaagtgcaaggttatcccagagttaaatagtattatatatctgtggaatatagagatctaaaagccctttatgttattgttctcataaattgtactaatattttgacgagaggctaattgggccaagttaaaatatcaattatttattattaattttattttatgaaaaaagtcgggagtgagtttccactcaactgaggcaacataggacccgaagacagaagcctgacagatgcagaataatgtgacgatcccaggctcagaagggagggaggaagaaaggagcttggaaaacagtgacgaaagttagagagaaagtagcttctgggtcctccttagcaaatccaaaaagggcagataatttctgcatgtgaactagaaagtataagaaagcttgtgagtattagaattggattcttttgtaatactgcaatatgacaagtggtttaaataattttaccttccaaatgtaatgtcatatagataggagaaaggctctaaagaaatattccacaatgttatctttgtaactaacccagaaagatgagatcactagatagtctcccttactcttgaattc

SEQ ID NO: 204220 - DNA, 1000 bp, Homo Sapiens
aattctaaaaatgcctccccctcaaccaagattagaaactctaattcctataacttgtgaatacaatgaaaaatacctcccatgattatcttacgttatatggtacagctgacgttaaaattgagtaggcctgctctagcccatgagtccttaaaagcggagtgcttctctggctggtggcagcagtcagagtcaatacataaggccgtattgttgctttgaaaatggaggggctacaagagaagtcaagcaggcagcctctaggagtggggaacagatcccatcagacagccaacaagataacacagaggccttagttctgctattctgccagtaactcaatgagcttggaatggatccttccccaggatctctaaacaaaagccccatgtgacagacacattactttcagtcttgtgagacatggaacagagaactcaatcaagcacccccagacttatgacctccaaaaattgtgagataataagtgggtgttgttttgagctactacatccttgtaatttgatacacagcaagaagaaactaatccagacagagtccaaaggaattgttaccaacattttacacctccatgggttttcagaattccccagggaaaaggaaatacactcggaaccacttcccctttctttgcttttactttcattgacattccctaattaagagtaacacacataacaacctaaatccttaatttcctgctaaatgttaaggctttggtgaaatacaaggataattcttcctcaaaaagttcgaatagttaagttacaagcaaattgaaaactaaaaatatcaaaggacaagacgaaatctcaaagtcaatgagtaaagtatcacatgaaaatttaggagaatgctatcatcaatccctagaattgaaaatctatttcacaagaggttaggatatataagataaccagagctatttcagtattttagctacatacatgcagtgactacaatgtttacaagagaattc

SEQ ID NO: 204221 - DNA, 1000 bp, Homo Sapiens
cactactgaaggcagaggatattttgaaatctctcgtagctttaagagctttaattaaaaatttttcaaagtaatgtacttaacctgatccaatgatgttcaaggagggggcagtgaggtgggtgttaaaatattatgtgccaatttcttctacttacttttttttgtatgatactggactattcttgtttatgaattataaattgtaatatttgcccttatgtggaagaggtttcttaggaattgttctgtaaatacatgtgtcagttaaagtatcaggcatgttcatcctgcatttctgttccacagaactaccatggcagccagttgtttggctaggtgccggagatatacaattgccctatccttaaaaactgagtgagagggaaatgtaaacagatggttagaatatttaataagagacatatgtccaagatacagaagaggtaagtgttgggatatcaggaaccgttttctaggatgtgcacaatggctcatgcctgcaatcccaacactttggaaggctgaggtaggaggattgcttgaggtcaggagtttgagactggcctgggcagcatagtgagacccccgccatctccattaaaaaatgaaaaaaattggccgggcacagtggcccatacctgtaatcccagcactttgggaggttgaggtgggcagatcatgaggtcaggagtttgagaccagcctggccaatatggtgaaaccctgtctctactaaaaatacaaaaattagctgagtgtggtggcgcacacctgtaatcccagctactcagtaggctgcggcaggagaataacttgaacccaggaggcagaggttgcagtgagccaagatcacgccattgcactgtgacagaacaagactccatctcaaaaaaagaaaaagaaaaagaaaaaaaattagcagggcttgatggcacatgtgtttagtcccagctactcaagaggctgagggaggagaatcacttaagctcaggaattc

SEQ ID NO: 204222 - DNA, 1000 bp, Homo Sapiens
accctaggaaaaatttgcaggaacacgaaacaagggctggggggaaaatcatctatgtgaatgagctttactttaaagagatcaatgtattttattttatcaactttttctcttagttactgtgatttttgttgttgttgtcctcgttattgttaaattctgtaatggtttcctgtgaagcctccactgaaagggactcaaatatgcaacacctaaactattttccaagggcacatgccccttgaatggtgcttctagactggtcagggttatttattaaattttatatatgaaagtattggggaattatgtaaattctttatatgaaactatctagttcataaatcatagatttcatattactcagtgcaactgaactaaaagttcagaaaagtcattcacattgttccaaatttgtaatggttgtcacatgtcacatgcgtctttttcagtaagtgccagagtgttcccactgtttctgcccagtgcttgacttctcggcccggaagagaacctgctttctctggtttccttcctgagtctggcacagacggggctattgtagttcttgatcaagtcctggagtcagccttgcctggctctccttgtagcagattcagtccacagacctcttgctgcccctcagtgacaagtatgctgtgaattcaacctttggacttgctgcccaagcctttggttgctgccctgactattgtaagaggtaaacttacctggtttgtttgagaatgaccattttcctaatgtgaaaaccatctctctcaccacttttattagtagggctaacatttttttccgttataaatggttgagcaatttgaatgacttaacacagtgtcattatcttgcaatataaactggtaacctcacaactccacacttcatcaccatatgaagtaaatgaagctagctaagcggatgctgtatcaactagtaacttgccattaaggattattttatagcatgaatttaagactattta

SEQ ID NO: 204223 - DNA, 1000 bp, Homo Sapiens
gcaccccttcagcctctgctttggtggtgtttgcacctcagtcctggtggtgatcgcctgtttcttgcttacatttcagctccatgggcaacagcccacacttctcttgctcctctgccttggtgctgcggggcctaagacagcatgcaatctgttggaggtggagctctaaaatggcactttgctgtagctgcttaggtgtcagggtgtgtgtgggacccagcatgaactctctctctggaacaatggtgtcacacaatcccccagtggctccctatgttagtttcagggccagtgagggttggggggctttcccgtggctaggattgtgggagtccatggtgggaatgtggacggctactggtctctcactcaccctttcctcacattaaggagtctttcctggctccaagccaatcacagctgagcaggctgtctcacttccctcttcttccttgctttaggtatttcctgttacttttctgttgaattccagtattctttcttggatgatctattcgaagtgtgattatctactcactattttggttcttagtgaagaaggctagtgcaaaatgcctctagtaagccattttgaagccctttccctattaattaaaaataatataagaccaaaactcctgattttgactcttgtgaaaaaagaggtggacaaaatattctaagtattgatctgtctctctatacactgctgcaaccatcatattggccacacaggaagaattctccctttaaaactggacaaatgaccatgtttctgattttccattgcttacttagcacaagcctgtaaaagtcaatgtaattttattaaatcttgaagataggaaaaggaagttaacagccgactctaggcaatttggggtacagaatagagcttatttgttggagcaaactgtccactatacaggctgttttcttggttgttagcattcttcatgtgacagacatcctttcagaagcccctaagtaagaattc

SEQ ID NO: 204224 - DNA, 1000 bp, Homo Sapiens
aataaataaaccataaatatggttgtgacttaactcacattgatatccttcatctattatgggtttttggaaagtgaatattctgtaccctgaacatattcattggggtgtggaaaggcagtgccagtgataagatagaacacaagatttatcataggttaatatcaaataggtcaagtgatagataatttatgaaatcattctgacagaaatgacaagtgatactttttaaaacaagtggatacattctacaaataaataaagttttgacattatgggttgctagttttcaatgaatacataaatttgggaggtctgtctaatatacagctttaatcatggaatactaaatattttcccactgagaaaaaaagttccctggataaatagtgattaaaaaggcaacacattttgtattgtgagagtcactggtgaatttgaagtgaaatcacccatcagagccaatgtatatacatttgaattttgtgtttgtcagttgaaatttcagttctgtttttggccacgtccaattgaaactcctcctgtggaataaaaactacacagttttaattccatttaaagaagaacttattaagtatgcttgtattcatttattcaaggagattttattgagtatctttattttggcagagtctagaactaattgctgcggaggaaggtctaaaagaaattatatttgtgttctgaaccattaagaagcttacaaaaatgttaaagagctatctcaagcaagaaaaatgatagaatattccagaaaagtgtattttagagaagtgatcaaaccacatgtatgaaatagtcagggatacctatgaaaatgacaccatttatacctaaagccttcagatagagtaaaaaatagactccttatataaaaattacatggacacatttacacacaaatatttgcatccaattttaggacatttgtgaactgcctttcttcctacagtgaatgctcctttagtactgggaattc

SEQ ID NO: 204225 - DNA, 1000 bp, Homo Sapiens
acaaaacaaggttctttaacatccccaaaatatcacactagttcaccagctagtagaaaataaaggaaataaaggacacacttagagaaatgcaaaatgtactaaaaagtctcagcaatagaatcaaacaagcagaaaaaagaacttcaggctgggcatagcggctcaggcctgtaatcccaacactttgggatgccaaggcaggtggatcacttgagatcaggagttcagaccagcctggccaacatggcgaaacctcatctctattaaaaatacaaaatttagccaggcatgatggcacatgcctgtaattccagctaatcaggaggctgaagtgggagaatcgcttgaacccagtggggcagatgctgcagtgagccgagattgcgccatggcactccagtctgatgacaaagcaagactctttctcaaaaaacaacaacaaaaaaaaaaacttcagagctcaaagacaaggttttcaaattaacccaatgtaacaaagacaaagaaaaaaaaatgttttaatgaacaaagcctctgagaagtttgggattatgttaaatgaccaaacctaagaataattggtgttcctgaggaagaagagaaatctaaaagtttggaaaacatatttgagagactcattgaggaaaccttccctggccttgctggagatctagacatccacatgctcaaataatacctgggaaatttatcacgaaaagatcgtcacctaggcacatagttatcaggttatctaaagtcaagacaatgaaagaatcttaagagctgtgaggcaaaagcaccaggtaacctatgaaagaaaacctatcagattaaaagcagacttctcagcagaaactctataagctagatgggattggggctctatcttcagcctccttaatcaaaacaattatcagccaagaattttgtatctagtgaaactaagcttcataaatgagggaaagatttttcagacaaacaaatactgagagaattc

SEQ ID NO: 204226 - DNA, 1000 bp, Homo Sapiens
aacactcataatggtcatatgccagttagggcattttgccctatctgagatccaaaggaagctgtggagggatataaaggaaccctagatgtcaggggttccagattcctctcttgtcttgagggcttagataggtgagggtctttctagggtattaaaccagatggtctttcagttctgacttttatccaaaggaaacatattaacttatttatttcctttaaaaaggtattctccaagtgaggattcctgaactttgtgaaaaggtaaccaagtgcttaaacatatgtttgtgaatttagctattcttattttactgttttttgaaattatacaaataatacttgcacatgtaaaagcactcaaatatccaaacatttaaagcaaaaaatgaaaatctctttctcctaatcccacccctcagaattaactactgttaagtttttcgtacagatttccaaacttttttctaaatacatacaccatatatttacatctatatactcacataaatatatgcacatgcccatgcatacatagatacatatatacaaatatagctcatcatatagtggtctaaaacgtacttttttcctcaacaatatatcatggacatcataccaggttaacatgatgtttcatcaaggctgtatagtattccattttatggatccattatcattgtttttactattctattgaaagctttagactgttgttgtcactgttgttttgtttgtttgacattggaaaccacctggcagtgaacatccttgtaactatcttgtttaaatgttcacacaagaatttccgcacagtaacttcattaccatggattttttttagtcaaagaggcacatgttttaatttttcatacttatggacaagttcaaaaagagatgttttgaagcttctgttcctacggaaactttctgtgaagtttcaaatgactgtgaggtccacagctctgggttatctcactcctaaactcatggaattc

SEQ ID NO: 204227 - DNA, 1000 bp, Homo Sapiens
cacttatccatatgtttgttcttatgttcatctcacacatttaatttactctagctttaaagcagtcttaaaatcaggtaatataatattccaaatttacaatattaaaaaatgcttttgatacaggagctagaaagaaattatttaggcagatagtaaggagaacagagtcctcggcagaatttcccttttaacaaaaagcagcccccaaatcatttattttctaacaaagagcagcctgaaatatcgagctgcaaacaccgataagcaagctggaagcttgcacaggtgaatgccagcagttgtttcaacagaaaagggttacctgagggccaggcatgttcaacatggaggctccatcttcccttttcttcgtcagcacatgtacagtaaagaaacaggcaacatggcgcaggtcaggaagcgaacacgtctgcgtgataaaagattagggtgggggcagccccgttcccgtgcactatgcaaatgtacacctagtcctaacaagttttttgcgccttatgcaaatgacacacttggtctgaccaatcttttgtgccctatgtaaatcagacaccacttcctcaagcccatatataaaaccctttgcattccaccagggaaccagcaacccgtttctccagcacccctctctgcagcagagaaagattttctctttctttttcttttctatttatttatttatttattttttttagacattcttgctcttgtcacccaggctgggtttcagtggcaagatcttggctcaccgcaacctccacctcccaggttcaagcaattctcctgcctcagcctcccgagtagctgagtttacaggtgcgtgccaccacaccctgctgatttttgtattggccaggctggtctcaaactcctgatctcaagtgatccccctgcctcagtctcccaaagtgctgggattacaggcatgtcatgcccggcatgagattttctctttcttttgccctttaaacttcct

SEQ ID NO: 204228 - DNA, 1000 bp, Homo Sapiens
tttatctggcttaggtatcaaaggcgatgctggcctcgtagaatgtgctaggaggtattccttccagctgtatttctttgaagagtttaaaatgtataggccaggcgtagtggttcatgcctgtaataccagcactttgggaggccgaggtgggtggatcacaagctcaggagttcaagaccagcctggccaacatagtaaaaccctgtctctaccaaaaatacaaaaattagctgggtgtggtggcaggcacctgtaatcccagctacttgggaggctgaggcaggagaatcacttgaacccgggacgcggaggttgcagtgagccaagatcacgctattgcactccagcctgggcgacagagtgagactctgtctaaaaaaagaagtattggtattaattattctttgaaaatttggtagaattcagctctgaagtcatctggtcctgggcttttctttgttgggaagtttttaattactacttcaatctatttgttattggtctgttcaggctattcctgattcaatcttgccagattatctttttaaaggaatttatccctgccctctaggttaccaaatttgtttgcatataattgttcataataattccttatgatccatcttatttctgagacatctgttataatgtctacactttcatttctgattttatatatttgagtctttttttcagtctagataaaggtttgtcaattttgtttttttttttcaaaaaaccaactcttcattttattaattttttctatggtttttctattctctatttagttttgctctaatctttattatttccttcctttgggtttagtttgttcttctttttctagttccttaaggcataatgctaggcaatttatttggggtctttcttctgttttaatgggagcaattattgttagaagctttcctcttagaactatccttagtttatccttttgggttcctctgcatgctggcctcaagagtatgaattc

SEQ ID NO: 204229 - DNA, 1000 bp, Homo Sapiens
ttcctgctgtactgtgcatctgcttgttggttggttgtatttttatttctttcttttctgggaggccctgagcagtcttcaaaccctagtagcctgtgatcgtccagagttcagactcattctctccaggccaactccacaattaccttatatttaattaatattttttctcctctttacgtacttgctgcataattgctcagaggaaagaaaacacatagcggcaatttatatatatatataaaataataattaaaaaaacccccgaaataaactcccatctcatttgggctgatcctatgagttgggtaattagggccctattaaaaggtagaccctttctccttcccccacttttttgtttattaaattttttatattaaactcccacagtctctcagtcatgcccttattgcttttggccaagcatttgcagcagcctgattaaacgggggcaccagctgagtcgcgtggtcttgtgtgaactgcttcttcctcctgggagtggtgttgggagggtgtcaggcagaggagcccgctgaggactcgtgtggcagggcgggggcacaagatgggcagcccccttgcacagaaagccccacagctcagtgtggtggtgttgcggtttgtgaaaacacacagcagtcagcccttccacagggagggagctttctcaggccatgtgtatttgctgtctcctgcatgctcagcttagctcagctcaggcctgaggatggggaacagacaattgaggaataaaactaaaccttgttcttgagtaattcacgtgttttactttgggaagaaaaggcatttatacatatgaaataagagcaaactgcacacgactgtatgtaattttagcaaatagcacaacattgtgtatcatttggtgcagagctgcctggttgggcgtagaagagagccccaagttattcagagcaggaagagctctgcggagggcgagggccacttagggatggcttttgggaaacttgaa

SEQ ID NO: 204230 - DNA, 1000 bp, Homo Sapiens
aaaatatctcagtaaagctacaaataagcatgagcacaattaatccactctacataaagcaaaaatcctcaccaacgtcagcaagcagcagtgtcctcttaaatttaaaacttcaggctgggcgcagtggctcacgcctgtaatcccagcactttgggaggctgaggcggacagatcacgaggtcaggagattgagaccaacctggctaacacggtgaaacgccgtctctactaaaaatacaaaaaattagccgagcgtggtggcgtacacctgtagtctcagctacttgggaggctgaggcaggagaatgacaagaacccgggaggtggagcttacagtgaaccgagatcacaccactgcactccagcctgggcgatagagcaagactctgtctcaaaaaacaaacaaacaaaaattctataaagcctaaaaggaaataccaatccgcaaccctttatcctttcaatgagggccagcagctctcatatttttatctctctttgctttacagtacacagaaataccctctgagtatgttgttttctctctgctcaggattagcagaaaattgtatagccaaaactattactctctatctcttcatcttttctttcagtagatgagaaatcttcattgctatttaattatgctcacctgcagagccatgacacattggatttcagatatgcaaagaaatagacttttgtagatattttaaagttcctagcacactttcatgttatattactatgcatagctttatttttggcaaaaaaaaaaaaaaagagcaagcaagatagaagtcatcttttgtacctctcctcttcttccatgtcctctgcgttttccactttctgcccaagttctccatgctttctgatgatgtatgatgtatgtgatctagaagcttagactctagaactacactgccttgaggtcacactgtagctctgccactaataaattgggttgagcaaggtacttaagctttctgaattc

SEQ ID NO: 204231 - DNA, 1000 bp, Homo Sapiens
tttgttcctgaaaagcaaaggatatttgtctaggtggtagtggtgatcatgagggttaggggatgaagtaaagcagaggtactatgcttcatggcttcagaggggctgagagtagttcctgtggctcctgatgactcctgccatccctcctgaatcccaactcttccatgtttctctgtgttccatgctctaacccagtttctttccaataacttccattcagggcttgagctagttaagtttgatgagtttctcttacttaccataaaaaaaaaaaattgactatgacagaccttaatgaaagcctgcctatatttagagatcaggaagaacaagaagagatagaaaaaaggtaccctaggagcaaaggaaaatatggacagtacaatgccagggaagtcaaggaaacaaagagctgtactaaacagagagcagtcaacagtatggagaaactgaggctatgaactgagaacaggctgagggacgaggcaaaaggcagagctgggactactgcctctgtgcaaaatttaggcaggtgccaaaacactcaatcgatataaatattttaatacaaactttaaaaatcaaaatacaaaattaatgcaagaaaaagttttaaacagatgactatcactagaattttccttttgcctcaaggctccaataatggcctggtatggcaatcatactaatcttgtcactaatcatctaaagacaacttcaagaacatggagggaaggaggtagatttcaaaatgtcaagaaaaaggtaggaacaactgctagagactattctttccaatatgtttgatgagagaacctccattttgcaagtgaggaaactgaatcacagggaaatgattacccaaggtcatacgaattgagaacacatgaagaaagtgagaatcaaacctggtttcttgcccttttcgactccacagtgggcttagcttagtggaggagatctgtggtatgttcgcacacgtcagtggaaggaattc

SEQ ID NO: 204232 - DNA, 1000 bp, Homo Sapiens
ttctgcaggtcattcccctggcttccaaagcagcagcattccactgcctctgggtgaggtcaggccccagcaacgagtccccagatccttgttccaatgagaaacaaagccaccatcctgatcactgcacagagatgttaattgtgagccaccaactttggaataaacactgtcacttctatggtatttgagtaggtaaataaagaccattcttattacttgagccatgctctgaagtgaggcatgctgggaatgcaataactcaggcagacctgtttagaaagtgacttgacagggtgggtaaggttgaatatgattgacccagaatggatggcctagaatcacacaaacagtaagtcctttattcttttcaagaagtttgaaagttttagactaaattccaatactaggtccatggggctctaagcccagatattgtgatgggcttatagtaggaattcaagtgggtgagttccagcaagacacacgggctgcaattggacaccttggaaggagattggtggtagactcaaatatagaacatccatctccatgcatctagataggggcaaagcaaagggaagattccagccccaagggaaagaaaccagtgcaaccaggtaccctggtaagctccttccaatagactgtggtgtgggtaaaagatctgtaacacaggcccttaggactcagctctgagacactggaccacaggtttatttggcagtaaagcaagttagggagcaaggaaaacctacttgtccagcctgggtaatgcagtgagaccctgtctctacaaaaacaataacaatttttaaaaaaattagctgggcatggtggtacatgcctgttgtcccagatacttggaagactgaggtgggaggatcacttgagcctgggaggtggaggctgcagcgaggtgtgatcacaccactgcactatatagcctgtgtgacagaatgagaccctgtatcaaaaagggtgagaagaaaagaaaaga

SEQ ID NO: 204233 - DNA, 1000 bp, Homo Sapiens
cattactatgtatcaaaattaaaaaattaaaaaaatttttgaagtagatttgttgggtgatacagcacacacacacacacacacacacacacacacacacagatatgtcacattttaagaaaccatccaactgtcttccagagtggccggaccattttgcattctcatcagcaattggtgagagtttgtattgctctgcatgtattccaacacctggcattatcagtaattttttttttattttggccatcttaataggtgtgtaagtcaaactttgatgatattttgaccaagcatgaaagagtccaattcattttctgttggtggtatttatgaacacttctgagggtgcttcagagctcagtagagcttcgggatgttatcagggataatctaaaaaaggattccattatcaattaagagtttaggactcaagaagtttttgtttttaattaagtaagtttccatgctacaagactacccagtatctttaatatgcctatgtgcataatgactgtccacaggaagagacagtaggcagttttcccctgaaatttgaagatggaactctttggcctatggagcatcccaaaggttgaatattgggcaaaactcatttaggaaatgctgctgtcattcacagagagaagaaaaataatctgtggatactcagtaaccatgcattaactgaaaacagttttcttctctacaaagtgaactttttcacttaagaagttctccttcttaatttattgatcctcttaagaataaggtttccgtgactcttctgagatatcccatcacagaactgtgattaacttaaaaagacccaagacattgagatttcttgacttcctgcacaggaggctggttcttcattgaaatgatattttctttcttccatggctgtccctctgagcagagccatattttggcattgtgagctgttctcaatcaccaaagaccataaactaagccaggaagactttgacccattgtt

SEQ ID NO: 204234 - DNA, 1000 bp, Homo Sapiens
atcagagttatctcagttattgaaaatatgtatttcaacaaacagtggcttgaccaactcgtcctggcttgcctgggactgtcccaattttaaaacttaaaattctgcctcctggagtcctcctcagtctcaggaaaaccagaatagctggtcacccttaagaagggatgcttggtgagccattgagttgtgcccccttgggagctcattagctggaagaggaaatgaaccctttgtgaaataactgaaaatagcagtggggactgtgcctctcagagtcaaaatcaaacatcacttctcaagaccttatctcgtgaaacctaagatgagcacagctgtgctttcagacaaagcctgtccaacttcccagtttactacagagagttgctgtgagggcctggatccctgaatggctgcgtgaagccgcacccctgccaccacatactgggcggtgattgtgtttggcctctgagatttgggggttttctgtcacagcatttggactcccctgactggcacgctattggacccttaactttttggccagcattgtctagcatgaggctggtctccttatcctcccctaggaatgtggatatggtgttcagggcctagatggtctctactggctacttgaaggtatgtacaaaaggcaccatggagtggtcaggttctcagaggagaggacagaactagcgtgaggggtcaaattgtgtcccccaaattcctatgttggagccctaacccccagtaccctagaatgtgactgtattgagggatagagttttacagaggtaattaagttaaaatgagtgcatatgtgtgggcccaaattcaatatgactgggggtccacacaataagaggaaatctgcacacagacacacacacagaggggcaactatgaaagacacagtgagaagacagccatctacaagccaacgagagaagcctcagaagaaggcaattctgccgactgcaaaaagcaaggaaatgaattc

SEQ ID NO: 204235 - DNA, 1000 bp, Homo Sapiens
gtgtgtgtattcttaccacctacttgtgtgcttatttattgaaataaaattgcagacataaatttttccctgttggttttttgtttgtttgtttgtttgctttctgagacagagtcttgctctgttgtccaggctggagtgcaatggcacgatctcggctcactgcaacctccgcctcccgggctcaagcaattctcctgcctcatcctcccaagtagttgggattacaggtgcccatcaccctgcctggctattcttttgtgtttttagtagagatgggatttcaccatgttggccaggctggttttgaactcctgacctcaaagatccgcctgcctcagcctcccaaagtgctgggattacaggtgtgagccactgcgcctggcccctattgtttaaatatagtaattttatgagaacttacctattttatttttgtatctattaaaaacatcatttttggctgggcatggtggttcacacctgtaatcatagcactttgggaggtagagatgggtggatcacttgaggccaggagttcgagactagtctgagcaacatgatgaaaccctgtttatacaaaaaaatacgaaaattagctgggcatggtggcgtgcatctgtagtcccagctacttgggaggctgaggtggagaatcacctaagcctggggaggtggaggttgcagtgagctacaattgcaccactgcactccagcctgcgcaacagagtgagacccactctccaaaaaaaaaaaaaaatttttttcaaagtaaaaaaagtaatctaatagaggaaaatgctccagtcagagtggcttggaatctgttttagttcataaaactaggggctgaggtgagaaaaagaggctgaaacaagctgctgccctctgctgcctgggacagcagcttttgtaactctcatacccaggaaccaggccaacatagacatggccacaaaaccaggatctgtgccaaacatacagggccatgactgaattc

SEQ ID NO: 204236 - DNA, 1000 bp, Homo Sapiens
tgcatgtgctgggaccctggtcttcccactgtccctcacccttcagcttcccctaaggactgcctctgactctcggcttagaaaaagtcccctgccctccagtcccaccctggacctccctcttgcaaaggtcctggcagttgcagtcacatgagctgttgcaaagatcctggcagttgcagtcacatgagctgttgcaaaggtcctggcagttgcggtcatgtgagctgtctgcttgtctcccacatgcactaggggcagggctccagcagccttccccctcatgccccagcctgcgtccccagcaccacaccctgtggctaagacacagtgggagcgcaaagaagtcacgttggcgtggtgcacatgacaaaggccgggtgatagtctcgctccaagcagcctcaggtatgctcctgtgatggttaagtgtcagcttgattggactgaaggatgcaaagtattgtttctgagtgtaccttggtgtgtctgggtgttgccagaagacattatcatttgagtcagtggactgggagaggaagacccacccccaggaagatgcacctacagtgtaggtgggcaccatccaatcagctgccagtgcagctagaaaaagcaggcagaagaaggtgggataagctggctggctgagtcttccagccttcatccttctcctgtgctggattcttcctgcccttaaacaccagactccaggttcttcagcctttggactcttggacttacaccagtggtttgccagggaatctcaggccttcggccacagactgaaggctgcactgtcggcttccctacttttgaggttttggggcttggactgagccactactggcttccttgtcctcaacttgcagacggcctattgtgggacttttaccttatgatcatgtgagtcagttctccttaataaactcccttccatatatacatatatccagccgggcacgatggctcatgtctgtaatcccagcactttgggagg

SEQ ID NO: 204237 - DNA, 1000 bp, Homo Sapiens
cagaataatataaaatattaaaagaatagcacaaacataatgaagtaacaggatcttaaaatattttaatgaaagaaaaatgagtgtagaatactgtgtacaattattctcatatatagatatatgtaatttttatagtaaatgggaaaaatcaaatcagaggtttcttttggaaaaatcattttacaatcaggtacatgggtgagtggataaaaatttattttgttaagagttatatgacctactgcatacattgttttatttcctttgaagtaaagttgttctaaaagactctaaagtaaaataatagtttcatttactttgccaactgccaatgcttactcttccatagacaatcattttcaattactccagtaatttcttttttacatacctccgtgttttttagaacacataaatactagttttcttttattgatgaattttagccattatatattggaattccacaaagaaagacaaggtttcagtctctatttcatctttcccttcactcctaaacatccaacttgcccataaacaatcacctacacacttctccacttcttatatttaccaataataatacatagtatattatcataaaggtatgatatgtttatattattaaatctgtgtaatagtagtcaagtataagacatgtagtaccaggactttctttctgatattcaagtattttgtgttattctagcattattctgctgtccttacttccccttctgtatttctctctcttccatttgctttgatatcaaagcaggtgttaaaaatacattgccaaattctccccagtataaatcttgcagtacagtcaaaatactttaccaaaatattttagttaatatatcatttttatttgaattatatgaccttgcttccttgatatttgtattcttctagttcagtctctgcttactgaattctaaggcaagtgcagagcaatgtctttgcttatcttttacatattcttttggaattc

SEQ ID NO: 204238 - DNA, 1000 bp, Homo Sapiens
caaacaaaaacaccaagtaacttacatgaagcattcgcctgaatgcccatgatagccattcctactacatcgccttctctttccctgcctgcatctatgttgatagaggaagggaagactcaggtccatgatatgcagacaccgcctggaagtgaacagttgcagtactgcagccctttctaggacagccctgaaggacagcagtaaagaacttccagtgggcagaattaccagtaggcaaaacttgggacaaggaataggttgttcattttgttagaaggagaaatggccagatgtataattatgtaccaattcctgggccgtggccagtggtttggctggatggtaagggacttggaaggaacatgattggaaaattggtgacaaggaagtctggggaagaggcatgtgaatagatctctgaatgggcaaaaaatgtgaagatatttgtgtctcatgtgaatgctcactaaagagtgacctcccagcagaggagtattttaataatcaagtggataagattactcattctgtggacaccagtttgcttctttctcaagctactgctgttgttgtccattgggctcatgaacttagtggtcatggtggcagggatggagtttaggcatgagctcagcaacatgaacttccactctccaaggctgacttggctaaggccaccactgagtgcccaatctgccagcagcagagaccaacactgagtccctgatatggcaccattccccagggtgatcagccaactacctgaatggattcctttcaccatggaagcagcattgctttgttcttactggaatagacacttactctgggtacaaattggtcttccttgcaagaaatgcttctgccaaaactaccatctgtgcatttacgtagtgtcttatccaccaccatggtattccacaaagcattgcttctgatcaaggaactcaatttacagcagatgaagagtggtgatgggtccctaatcatggaattc

SEQ ID NO: 204239 - DNA, 1000 bp, Homo Sapiens
ctgatggccatcaccaaacaaacttctgtgccaggattgtgttttttgccacatcttgtttttgccacagtaattactggccaaaagaaaaagaaaacaataacagtaacccacataatatgtttgtttgctgtccttctctatctatttccttcatttctctttcctttctaaacagatcaggcctaaaacaataacagtaacccatgtaacatgggttattgttttcttttactttgggccagtaattactgagaaattaaatatattggaataaatgctatactctgtagtattattccatagtatagatactgccacttacagtatctaaccagaatacatgttcttttatgactataagtaaatgaaatagacatatactgtcaattgcctctaagtttcagggcataattttgtttatttcctaggaatattattctctttaacaaaagtggtgttgtacaagccacatagcttgttagaacctgagccaaaactagaacccacagccctgacccttgggtcagtcttagttacagtaactcccagtttaagccacttcacatcctttcagaaaataggatgcttaaaacattttttttaaaaatcaaatctttcccaaataagcaatttgtgtttagtctaggtgtctcatgctttatttcagaacagatttttttttttttttttttgaggtagagtttcgctcgttgctcaggctagagtgcagtggcgcgatctcggctcactgtaacctctgcctcccgggttcaagcaattctcctgcctcagcctcccgagtagctaggattacaggtgcctgccaccgtccctggctaactttttgtatttttagtagagatggggtttcaccgtgttggccaggctggtcttgaactcctgaccttaggcgatccacctgcctcggcctcccagagtgctgggattacaggtgtgagccaccgcgcctggcctcagaataggttttttggaattc

SEQ ID NO: 204240 - DNA, 1000 bp, Homo Sapiens
tataaagctatggtattggcaggactgcgaccagagatcgtgttggacattagctcccgagcgctggccttctggacatatcaggttagtgcttagtctagtttctcttgagcatgtgatttatggcatttgtgggaacttctagtgtctttccttcattgtattattattaattttttatgagtatatgagaaactctttttattaaattgttttcaaaagcaatactgtttattgttgaaaatcaaaaggaagaaaattaaagcactcataattccatcactcagagataaccattgtttatattttgggtatacacacacacacactcacacactctctctctcttctgcataaaagtaagataacacacacacttttattgttaagagttgacagtatattatatctggtatgaatttttcttccttttgagacggggttttcttgtgttgcccaggctagtctctaactcctgggttcaagccattctcccgcctcagcctcctgagtagcctgtgcttcacttggtatgaatatcttgttaaatattttttagttaactattctataatcatattttaatggttatattgtatcataatttatttccaagttattaaaatgctatgataagcattcttatcaaatacgcatccttaactttttccctttatgatttctacttttagtatttcctttgaaagacctccctgtggatgactttaagcatgtccttgaatgtattgttatatcttacatatacacttatacttcttaaggatgtttgtcatctgtcaagtaactttttattatatttttctgggtaagttgtttctcttacatgctcctctatttttcaactcctttggttaaataccaaatagtgtttttgctggcttatgtggtgagagtatgtttatttttgtaagcaactgccaaattgtcttccaaagtggctataccattttatattgccagcagcaatgaatgagaattc

SEQ ID NO: 204241 - DNA, 1000 bp, Homo Sapiens
tgcttccgctttgccttccaccatgattgtaactttcctgaggcctcccagtcatgcttcctgtaatgcccgccaaactgtgagtcaattaacctcttttctttcctttttttttttttttttttttgagacagagtcttgctctgttgcccaggctggagtgcagtggcgcgatctcggctcactgcaagctctgcctcccgggttcacgtcattctcctgcctcagcctcctgattagctgggactgcagacgcctgccaccatgcctggctaattttttgtatttttagtagagatggggtttcaccatgttagccaggatggtctcgatctcctgaccttgtgatccacctgccttagcctcccaaagtgctggaattacaggtgtcagccactgtacccggtcaattaaacctctattcctaaattacccagtctcaggtagttctttatagcagtgtggaaatggactaatacattattcctcacctccactgtgaagcaggagtccaatttcatcttagcagtccaggtcaattatcccaatcaacaccatacctcccttcttaacttgttgacccagagatacaaggaacccagagtgactgggcagcagccttaacttccagttcagtggaatcattgttatatctcctggtagaagcattcttctctctggaactaagacctctaggctagcagaacatgatgttataggaacaaaaagcaaaattttgctagtggattactaggggtaataaaggtaaccggtgccactctcatttccacccctttattcctatctaggggagaaacagtaccatacattgagtgctgattcagggcatatacagccttctggagaaccttgctccagccctgtaaagaattttcacctagctggtgctgtaactgcaacttcaaaaatcattcattccaccattctatcaagccagctgcttcaggatgatggggaacacagtaagatcagtgaattc

SEQ ID NO: 204242 - DNA, 1000 bp, Homo Sapiens
agtggtattaaattttatttaacacaataaattcaaaatttcccagaataaatattccacacttaatttttaagaaaagatatgacaactttcgtttttgctaggcaatgcattttaaaatgttttccaagaagtttttattcccaaagggacctgcatatgggtttaaatgcaaacttgaaaaggaagcaagggccgtcctctaaaatgaagattttttttttttaaagttcacttcagtaaaatgaaaactgcattctcaaacacactgatgagctgtaaattggtacaattcttgtggaaaaccacttagtcttaaaactattcccatctttgacccattaatgcagcttctgcaatttaccttaagaactgtatcctaaacatatagagcttatcctaaatcttttgcacagtaaaacatctttactcactagactattaattaaaacatcacacattggaatacccttatctaacaaaggtatgattaagaaattaaaacaattcatcgtatacaatattatagagtaattacattacttttagaaagtatttgttacaatcaagaaaagaactgttataaaattttaaaataaagctggatatttgatattttatatatagcatatatattttaaaacactaaaattatgcatacaaaaacagacacagcctaaatcccccattgaatgtaactaaaaactctatatcaaattattcttaaaaaacaactcttaaaacgcatgaataaattgacaaggaattagggagtcaaactgtaaaatggaaatatacagaaataggcaaagttgtaggaccagttttttgccttgagggcacttgagtttcaattttctttgattcctactgaaaggtgggggacagaccataaagctgggagccaatcccaggatgggtgtctaatagaaaactccctctgcaagaatatttgtaacacatataactataaaggaccactctctaaaatatagaattc

SEQ ID NO: 204243 - DNA, 1000 bp, Homo Sapiens
taactcccaatcttgctatcttcaggattatgggaaggaaggaatgaagacatatttttaaaaagggatatctatttcatgaagaatttaaagcacttgttttagaatatagattccatgggagaaagaatctcagtgtgtttatttttgctttctcagggcacatttcattacatcatttataaacagaatggctgataaatgtctgcagattagacagccactttggttttatttcaaaaattgcattacagcataacttttcaagaattcacataagcaatgagccatattttaaaaatatatatttctttcacaattcagagaattggcaatgccattctaaaacagtattattaacctattgtacttattttacaggtattctgtggggatcattgttcaaatgtcttgcttctcaatcttcattaacctgggtgagagtttatatctgagggaattgacaattcccttgaatttctggatgtttttctgtgtcagcttttaaggtttataacacctctttgtgttaatgttttatctcatatctagaattacaaattatgcaagggctaaatactgtcaatatgtgagttggaataacttctgacaattcctagactagatttagagagttggtctttatccgtaactttaccttctcattccacattctgaaacactccgcttactacttggtctgatagatattgatggatgctaatgtcctgactgcttcaataaactggccccaaggaccaaggctgcatctagctctgcacttttcaatcaacttccacacatttttctttgttacaatacaaaattcctctcctcaatcccttaggttgtccttccttctaagtaaaatccgtgtctccaaatgcaacaacgagatcatgtgattgtgtctatggcagagactgctaagtgtgcaccaaaataatgtaaccttccgggtttagcacttgaaacgactagactgcatttcccagaattc

SEQ ID NO: 204244 - DNA, 1000 bp, Homo Sapiens
gggatgagtccatcctctctctgctgttcgaaccgccgtctcggtgtttagaagcactaggtagggtccttcccaagccggttcgagttttctttccctccaacttttgatgaggatgtggtcctcaggctgatgctggtgtattggaaactctaggggtggtacatgtgctaaaagacctttagttctgaggaaagagaaagtggaagataaaccaagtacataacttctgagaaatcgatcttttgttttgaaagtgggaaggtcaacagtggagtacaaacagggcaacctatatgacacttcataaggggctaagccaacatctttccaaggagcagtttggattctcaacagggcaatgggaaggcatctagtccatggcacccgagtctctaagactatagctaggcggctttttaacagtttcgttcattctttccactcttcctgatgaaggtgggtgccagggagtatgatattcccatgttatatctagtacctgggctaatttcttaatggcatgtgcagtgaaatgagtcctattatctgaatcaatgttttctgttaatctaaacttgggtataatattttcaactaatgccttgactgcattattagcagttgtacttgaaaagagagtagcttctacccaatgagtaagatgatctactattactaataaatactttagacgaccaattggaggcatctctgcataatcaatctggatcctttgaaatggccttaagcctggactcctaccccaaggggtaatcttatagtttgtttattggttttcttttatactgagcaaatgtctgcaacctgtttggccaggttataaattcctatgcacccataaaccctgaggactgcatcacacatggcttggggcccccagtgggtcccttaatgcagttggaacaagatttccctcatgaggggtttggataacacttctttctggtctggcaatatccattttccttctgaattc

SEQ ID NO: 204245 - DNA, 1000 bp, Homo Sapiens
gcgttttcccaaagactagtagtgttgaacagcttttctgtgcttattggctattgatcgatctccttaggagaaatttctatttaaatattctgcccacttttttaaactggagtattagtctgcctttctattgctgacttgtaagagttctttatatattgtggatgtaagacccttgtcaatattttcaagtatctcttagcaaatagtttctctcattctgtgggttaatctttcacttttttcaatcttcacttagtggcacaaaagttttccatttgaatgagaccagtttatcttttttttctttgctcacttgtgctttccataccatattgacggcactgttgccctgtgtatggtcatgaagaactatgcttatgttttcttctaagcgttttatagtgttactcttgcatttatgtttatttccattttgagttaatgtttgtgtaaaacatgtgactgagtccaacttcattcttttgcatgcagatggcccattgtaccagcactgtttgttaaaaagagtattctttccccattggctggtcttgatgccaataatcaattgaccacaaatgcaagggtccatttctggattttcatctcagttctatggatctctatgcctaccttcatgctggtgcttaataaattcttcacatgcctactaactctgtttagaccaagggttggtgaattgcagccctgggaatccagaggcagatgagttctctgggtctacttaggcaagtagtagtctttttcacaccaacagaagagtacccagggagcaacttccaaattgtgtacatcttgatgtctttcattccttgttaaaaatacttaacaaattttccctttatcctgaaggaaaatccaaactttagtagacttcataaatcttctcataatatggttgtggattgcttctccaggcttacaccccaaagaagattgcataaagatggccgttctgcatggaatggaattc

SEQ ID NO: 204246 - DNA, 1000 bp, Homo Sapiens
tgatggtgacttttatgtcaacttggctaagctatggtggcccagttatttggtcaaacccagcctagctggtgctgtgcaagtatattttagatgtgattgacatttaagttactagactttgagttaagtagatgaccttccatcatgtggctgggcctcatctaatctgttgaaggcctcaggggatagactttcccccaggaggaaggaattctcaagactgaagcacaaaaactttgcctgagattccaggcaattgccctgtggaatgtggacctaagacagcaatatctggcctaccagcctgccctacaaatttcagccagccctacttgccaggacccataattgcacaaactaattccttattccttaaaataaatctctctctctcccccaaccccacgcatacacacacacacacacacacacacacacacacacacacacacacacacacactatattggtctgtttctcttgtgaactctagtagtggctttttagggtgctgtgctggggtgtggagcccaggacagtgggcctggccccaggtctgccccccttgtcttcccatccacagcttgaacatcacttatttacttatttatttacagacggagtttcattcttgttgcccaggctggagtgcaatggcgcaatcttggctcactgcaacctccacctcccgggttcaagcgattctcctgcctcagcttcctgagtagctgggattacaggcatgtgccaccaccatgtgctggctaatttgtatttttagtagagacggggtttctccatgttggccaggctggtctcaaattcccgacctcagatgatccacccacctcggcctcccaaagtgctgggattacaggtgtgagccaccgcgcccggccagctggaacatcttggacatgccctttcctcatgtcacagacagctgctcctgaaccatggcagtcagctctcaaaaatacaaacacagacagaattc

SEQ ID NO: 204247 - DNA, 1000 bp, Homo Sapiens
tgtgaactgtcaatctccaacagaaaaaatcaatccaggcctgggttgtctggggttgatatcccagatcctgccccagtcatagcagggtgaaaaacttggcgtctcaccattgcttccccttactcacctctggctggctttttaacacattgaaagcacagaaaaccctttcctacttgcttctaattttttaaatattaaatatcaaatctaatattaaaaatcaaattataatataccatcctaatgtagttgcacagaatcatgtccaagatgaatgattcagttaaatattctcgaggattaactgattcagttaaatattcttaagtaaaactccaagtacaccttctcctttattcaataatatgtaacagatgctaaatcactttaaattagtaattcaaataatcttccaaagtcaccataacctcttgaacttccggtgttaactgctgaccaccttttccaactttcctgtataaatcattaatttaacacccagaaagagttaactcaagtttctgattttacttaaaacaaatccatggaatatacaatgcattgaaaacactccagttgtgagcatatcctgctacaaagacaagttaatttttgtcagaccatgccaaatatctggttcctccttcccatctatcactttcagggtttaaagaagaaaaagaacagaaacgttatgcaaatacagaacaactttagattctaaaataactatgtaaggcatggctcagcatctttaagaacttcaaatcagtaaattcaaatggccacaaataatctaccattttaaagtgttatataaacttttttcctcctgcctttccttcttctcattgatggtgggttatttctctaaggtataccaacagataagcacgtattgagatataaaggctatatgaatacacagtattagacacttatttttaaaatgaaaaataatgtttctcacaaaatacttatttgctcagaattc

SEQ ID NO: 204248 - DNA, 1000 bp, Homo Sapiens
gacaaggccctgggatcagtcaagctctttcaggagcagctggccacttggggtaaaccaggagcccctcctggacagcaacagcccctggcatttccatatcaccaaggcctggccgaggccaggcagcaggggctctgtcccaggctgaactgattgggaaacacagcccagtcactgatgtctctcttacctggccagatgtgtgataggcacttggccatgaaggcttagagcttcagtttctacctgtgtcaaggggagaccatcaccctgtggatgtgggactgcacatgaccattcttggtaagaagtaagatgcttccacatgttgaaattattactgtcattctgcagaaaagcgagatatgtctatgcaagaggagccaaaacagccgatctttgctctgtggctgtgcctgctaagagatattgtcagcctttcagaaggggaaggaccaggagatctgggccacccttgctgcccacttcggtgcaagtcacttcttggactgcagccaacatagacacccagtcgacccgctcccttatctggcaaaagccaccttcttatcttgaaccaccttctgggggtgggggataagcttcatctgaaagatgagagggcgctgagattcacagagctgctgtgagccttccaaggccacagttaggatatggggaagccaaagctggcgctggtgagacccacctgtctacccgctgcacacccagctctgttcttgctcagttactgccccatttggatgagcagcagaaggaagtggaggcatcttgaggggccacaatgaacagagacgggagacgaaggacccaggcaagaagggcctggccaggaatgcagggggcaaagggctcaaaagcaagcccctgggattagcaggacagcacgggagggagagccgcgcaggccaaggcacttctgggcaggctccttctgctctgggcaggctccttctgcttagagaatactcagagg

SEQ ID NO: 204249 - DNA, 1000 bp, Homo Sapiens
gtcgtgggagggaccaaatgggaggtaattgaatcatgggggcagttacctccatgctgttctcgtgatagtgagtgagttctcacaagacctgatggttttataaggggcttccccctctcccttcactctgcagttctccttgctgctgccatgtgaagaaagccatgtttgcttctccttccgccatgattgtaagtttcctgaggcctcctcagccatgaggaactgtgattcaattaaacctctttcctttataaattaccgagtcttgggtatgtctttatttagcagcatgagaacggactaatacagccgttggaaagaaactttcattctatttttctggatggtggttttttcatctcgaagtttattaaataaaatagaaaaataatgaatttgaaataaaccatttttatttcccttcgaaatcactttacatagatagatataacaacactgaataagaagatcacattagacactcttgtgccattacttggtgtagctcctggaccagcaccatcagcatgcccaggagctagttggaaatgcagactccattccagacctagaaaatgagaatctgcatttttttttcactctgttgcccagggtggagtgcagtggcataaacatggctcactgtggcctcgacctcctgggctcaagcaatcctctcacctcagcctcccaagtagttgggattacaggtatataccatcgcgcccggctaatttttgtattttttgtagagactgggtcttactctgttgccccagctggtctcgaacatgagctcaagtgatcctcccacatgagcctccgaaagtgctgggattacaggtgtgagcaaccatgcccacctaagaatctgcattttaacaagattgccagggaattccactcattaaaacgtgagaagagctggtttgggagatacacaatccagtgccctgattccacctggatagacagatacacgggctccttcatc

SEQ ID NO: 204250 - DNA, 1000 bp, Homo Sapiens
ttgatgactctgcacccaagggggaggagctgccaggagacggagactagaacacagcaagaggaaacacagtgagaacttgagagactcggcagacacttggctgggggaaaggggccgggagagagaagcaaagcagaacacaatcgaacagacactgcagtggggagaaaacctcttaaaaaggagctgccaactgtacataaaacacttgtggttttcaagctttctttttcaagtcctgccatgctttcaaaggagctttcatagctatgggccgtttttccccttaggccaaatgttgaaagaaaatacagaaaaggttgaaattaaaaaatcctaaatgaattgagctaaggatattacacaaacatgtttaaaacatttttttcttactgatgaagccaaatatttagggtaccgaatgtcttataaaattgcctgccccaaatgaaaaagtaaaaattaaaacacacatttttaaagaggtagctgggcctgattttgatggctagaaaccataccacctgtattttcctagtcaattcagatttcaaatattttgtctgatttagtctacaggctattgaaaattcagagacatttcagcattttaacatccaaacactaccctggatgctcttagaacagttcaaaaatcctttgtcaaacggtgtatcggaaaataaggcttagaaaaataggctcagggagaatggcctggttgggtgtggtattgcctgggctgatgggaccccagctccctgtgcaggcaggccctgctagacgtgtataggaagctcccaggtcagtgtacacagaaggtgctccataaacatcttctgaatggatgggcaaataaaacaagcaagcacagggatgggactgatacagacccggaaaacactccccagcctatagccaaacattgttgtgtgcttctgaaatcttgggagatgaaaggaatcctcaggtgagccacagagatgcttaagaattc

SEQ ID NO: 204251 - DNA, 1000 bp, Homo Sapiens
gcaaaggtaggagttgccgactaggccaggaatgggggccagacccagagcctggtggtgagtgccaaggtatccccacagaagggtggctttccaaggaccagccctgcctacattccggtgagcagtttgatcaggagatgggctctcaggtatcccaaaggcggtattggggtgtgggcatctctgaagcccagagctggggggttgatcatctcctgccggcaggagtacccacatcctgcagacaaacagcattctccatctgtcttgctccatgtcatggacatgggtctcccacattctaggaatgggcccttcagcatacaggctgatgggcaactgtgtcctgggcgtgggcaactctgctgaggagaggtgttgtagctccctggaaatcttccctagcttaggaggggcacgctcttgtctgaaggaaggccaggctcaggtctttgggatggaagctctggatctggaaaacaggtgcatgtgaatcccaatacctctgtggccttgggctgggcacttatgcacatcttgcatcctgtaacttgaccatgcccctgctagaggcccagacctcaggccctagtggcaaagccttctaggtactgaaggtcctggaggtaagaggggtgctgttggaagtaagtagtgggggaaggaaagcatctgttgggggagtaggcataatgatatgacctgggagaggagtgaggctccctgggtttcacctatgaaactgttacaccacagccctcccctccataaccccagtccattagtgagggagtgcccattagccagatacactgatctgtctgttaagaggtaaattggaatcctggcatttaggagtcactgtggagacactggcaagcttgagggagctatgaaaaagagcaatgtccaatgccttcttgctcagggctccatcatggcttcgtggcatccctccagctccacgtggaaaccaggtctgcttccctccgtctgg

SEQ ID NO: 204252 - DNA, 1000 bp, Homo Sapiens
ttgaaggaggtggtctaaaatatagaaaatgatgctgcagccaagaatctgttctttgacccactctggacaatgatacaaaaaggaataaatggtactgtgtttagccactgagatgtagggttgttatagcagcaagcctgtcctaatactagcactgaagccaactcagtaagcagaggtagctatgagcaaagatgataggaaaggataggagttcttcccaatgctgaaacttttcatccaaaataggcttaaagtaagggcagtctgagcttagtcaaatttaagtaggtctgatggaattccaagataatgaaaaaacatatttatacagaaaattctgtacaaaaattgtgactcagaatgagattaaatagctgtttcctcctggattttaagtatgtagcttcccttcatctttgttaacactcctattgcccgtttctagcccaatcttgtgttttcaaatcaggaaatgcctcaattcacttcttttaattcggctgagttttatctgagatggccgcttctcatctgcgtgaacttcagaagaaaatttaatgtattttggcatttgttatctcatctataaaatacagttaacaagacaatggttttttttagctgattaaaaaataaagtacatcctgaagattttaacggttaagaatactgtattgtatactggacattttctaagagtagatttcagatgttctctccacagaaataaaataggtaactattcaagatgatggatatgttaattggcttaactgtattcaatcaattcactctgtatacatatatcaatatgtcatgtacacaaatgcatacaaataaataaataaatgcttgtaaattatgctgcttgttgcatggtgagcatccaataaatggtagctgccacagtttgttttgttagtgtttttattattgacagatcctagttaggttttatcctttcaaatagcttattgtttcatataatttattt

SEQ ID NO: 204253 - DNA, 1000 bp, Homo Sapiens
ttcactgccacgctgtcttgcaaataaatacacacagtagattaccatttagccaacaaaatgtctgagagttaaaagaactgacctcactgttagacaattgccaacccccaccctttatttcatactctaatcatttttgcatattaggtttatgtgttcaaatgtgttttcatttgaacaaaaaattttacaactcaaaacacactaatgtggtccaggcccacctcccccaccacctcattttatagactgggaagcaaaaatccagaagatagaatgacctatccaaggtgatgcagctaatgaatcactggatggacccaatactgggacctgtatgggaggtcagctgtcctcaccagggccatgtctgcagaatcccagggctcctgggaacatagttagaaaaccgatgggcccttccattccatggtctcctgggctaagatctcccttatatcatatgccatgaaatacgttaacaattgacactattacagaagagcatggagttttcagggacgggtcagaaagtatgccaagatggagctgctttttatagccatgggtattggttttctggctatggtgctctagataaagagcaattccttcttgcctttttgctcaccttctgtccccataagtggaatagaagatccttctatctgagatacctgctctctatctgtcataagtttttattttccccaaaaatgttggtttgaatttttctaagacttcctgactgtctttcaagtttaaggcttttggctatggcaccccacccttttcaaatccatcttgactgatatcagtatagacagatcttgatgagacagcatttgcaaactccactcacccagtggcatctctcttttccaagtcactatccccagcctccaatatgactgagcagacagggatagcccttaggctgagggcacttctgcaactcagggtcccctgctcaggggacacactaagtaatgaattc

SEQ ID NO: 204254 - DNA, 1000 bp, Homo Sapiens
ggttagatgtcatttcctatgagaagcccgcctcgttcaggacgtccatgatctctcacagccttctgtgttccctcctcaacacggtgttttatagctttttaaaaaattctgtgatcatattatgctcagcaaacagagagagactattcttgttccctgtgcctaggatgtgcttgatgtatggtaagttctcactaaaatgctttgacttgaattgcatatccatgctgtactgcaggttcctgggattcttttaactctacaaatttctctcaaatttatctactaattgtcttcttagagacaactaatacatttctagttgtatactttattgttgatatagttaggaatgggtgctcagtgtcgcaaaaatcaatgctgagacaaaagacctctcagcaaggctagtttactttctgcagaaagagtgctgctcactagcagttttgccatgagagcacacacgaacaaaggaagcagggtcatttataacctgacgtgtccaccctactgctgtgtccagtttccattggctggaacgtgacctcacattctgtacttgtccctattggctagcaacttagaactttttaaaagaggcaaaggcagaggagaacaaaggaaggaggaagaaacctgtggaatgctgagaaaggtaaaaacaccctccaaataaggaagaggaacaggctatgacctaatgcttgcttggaccagtataagcatgccagggcaaatatctaggctaaaatgtgggagctaagaacacaaagtacattgatttctttattacggctagcagatatctaagaatgttcacacagatctttgaataaattttgcttctaagagaagttactatttaatgctaattagacagggaggaaagtccctttgaagaggaactctacttcactttctacaatatctacatttacagaagaattctgtattgtttacaaagtaattttccatggatgatctcattgaattc

SEQ ID NO: 204255 - DNA, 1000 bp, Homo Sapiens
tatatatatataatgaaatagctagagttaaaagaagagttttttaagttataccaagagatacattcaaaaacactataaacaaataaaaataaaattataaagagtgctcaagtaacccacagaaaggtaggaaaaagaaaacataaatgaaaaacagaacaaacgaaaaataaaaccaaaatgacacagttaagttataacatatcaataattattttaaatataaatgtactagttaaaggataaaagaaactgaacttataattcaaaaatttccccccaaaatctctaggcccagatgtttttactggagaattctaccaaacttatgtacaagaattaaaaccaattttacacaacctcttctagaaaatagaaaataaaggaacacttcccagttcatgttatgaggttagtgttatcttgataccaaaaaccatacaaagataatacgcagtttaaaaaaagagcaatattgcttatgaatatatgtgcaaaaatactttacaaaatattagcaaaaaaagtcagtaacatataaaaagaattacatactttgaccaagtggcatttattccagggatgaaagtctagctcaatatttaaaaatcaatcactgtaatccatcataagaggctaagaaaaaaacattgcataattgtaccaacttgacaaaagtccatacccatttataataaaaagtctcagaaaaattagaatagaggggaagtttcatcagcttcagagcatctacaaaaaatcaatagctaatactatacttaatagtaaaagactgaatgctttccccctactatcaagaaaaggatgtatactctcactacgcttatttcaacataacactggaagttccagtcaatgcaataagataagaaaaagaaataaaagtcatacatgtgaagaaggaagaaataacactgtctttatttgaacataacatcttgatctatattgaaaatcttaaggaattccgcggatc

SEQ ID NO: 204256 - DNA, 1000 bp, Homo Sapiens
gaacagaaagttgaaggtgttctaaggaagggagggagtgaggaaagaagggagggatatttccaaatgtactcccttatgagtggggaacagaaagttgaaggtgttctagggagggaggaagggaaggagggagggagggagggagggaaggaaggaaggaaggaagggatatttacaaatgtactctcttatgagtggggaacagaaagttgaaggtgttctcagctgatcctgttggatttttattctgtcaagtacaaggtgaagtttttgactgtgtgcatattggtcagttgaaaggaaaagttaagagtaaggccttgaagagggaggtgaaatggttcatgggtaagaaagaagcaccccagagggtcccagagaaggttgctgctcagtgatgatagcccatatgatcgtggagaccatctgcttgtccacagcactgagggagatgaaagttagactgcttgtacttttcaaagtatcacatccaaaaatgtattacctgcctttgatgaagtacttaagaattctcagtggccgctagcaacatggcattattattctaagcagccagttttgcaaaacctgggtagacatctgcagtgacacagtggcaatgtgtccaggctctgccagtgactaacattgaattaaagctttagtactttctttctgggtgaccttgggcaaactaattctgtacttgggatcctggtagggtctttatcaggagtaactgaggttaatcaatggaaaatgcttagaatagtgcctggcacatactaaacgctcaacaaatgttagctgctgctatcatcatcatcgtcatcattatcattaagtttattgtgataataggataaatttctaggatgatacaattcaagcctttagagcattgagagcgtaaacgtgtcatcagtactccacatttctgtgtagaaagaatgacaaaaggtattcctgttttggggaagataactttgaaacaagt

SEQ ID NO: 204257 - DNA, 1000 bp, Homo Sapiens
gtgggattttttttccttttctttgagacagggtcttactctgttgcccaggctagtgggcagcggtgaggtcatggctcgactttctgggcttaagcaatcctcccagctcagcctcgtgagtatctgggcctacaggcacatgccaccatgcctgcctacttttcaaaatttttgcagagatggggtctcactgtgttgcccgggctggtcttggactcctggcctcaagcagttctcctgcctcagcttcccgaagagctaggattataggtgttgaaccactgggcccggccttgcatggtttttcaaaaagggtgggctgcataggactgatacttggggaaacatgaaatcagcctgtcgttctagtcaggagtgactggcaaaactcttatggatatgctgcttctcattcttgcctctcaaataaagaaatggaggtttagagaaagacttagaagagccataaataacagtgctataataaaaagcaatagtaatagtaataatgactaccattaatgcactcctagtatgtgtgccaaggcacattgcacgtattatctgcaatcctttcaacagtcttgcaaaagcatcatcattatctctattttatagacaaggaaactggtagaatttagaaatttgttcaataccctggtttttctggtgctaaagcctacattctttccactaaactagtggttttcaaacccagttgtgcttcagaatcacctagggaagtaacccctgcccccaggaactcagatgccatcaggctctggagtggcctggaagcccacctttctgtctgtcagtagggccactgaagagcaagtggtaacatttaaaaaaaaagacttcttttttgttattgctaagacatgtaaaattgcattcttttttttttcttttctttttttggagacagagtcttgctctgtcgctcagcctagagtgctgtggcatgatcatagctcactgcaaccttgaattc

SEQ ID NO: 204258 - DNA, 1000 bp, Homo Sapiens
aatgagagaatatctataaactacacatggtaagtacttaattattaggggccatttttactttattattggggttaatctacaaattcagggccaggtgaggtggctcacgcctgtaatcctagcactttgggaggcccaggcgggccaatcatttgaggtcaggagttcgaaaccagcctggtcaacatggtgaaaccctgtatctactaaaaatacaaaaaaatttagcggggcatgatggcaggcacctgtaatcccagctacttgggaggctgaggcaggacaattgcttgagcctgggaggtggaggttgcagtgagctaagatcacaccacttgactccagcctgggcacagagcgagactccattaaaaaaaaaaatctacaaattcaggagatgtgtcagtatgcccaattcaagtggtatccacctagtacatatccatctggcacacgcagcagctaattttttttgtttgtttgtttgagatggagtctgtgttgcccaggctggagtgcggtggtgcgatcttggctcactgcaactgctgcctcctgggttcaagcaattctcctgcctcagcctgctgggtagctgggattacagacgcccagcaccaagcccagctaatttttgtattttcggtagagatggggtttcaccatgttgggcaggttggtcttgaatggctgacctcaggtgacctgcctgtctcagcctcccaaagtgccgggattacaggcataagccaccgcacccggccaagttttcttaaaaggaacattctaggtcggggaggtagggtgggcaactgaccttgcttggctaacatgatggtcagcttgcttggccagtatttacaccttaggggaataatatttaggaaatagactgaacttgctgtcataataagttctgggtctgttgatactaaacagaatgtgacctgtgggggctatgaaaaccagacaacctaatttgatcctgcctgaattc

SEQ ID NO: 204259 - DNA, 1000 bp, Homo Sapiens
atgctgtgggagagcatggaggaggcctcaggcagcagcaggaaggaccctccagagatagcagcctttgtgctgtatcttagaggctgaggcaaggggagagcaggagaacacagctttggcagcatgagtagagtttacagacagaacatgttacagatccaaactttttactacctgggatgggtggacattgctgctttttgtgtaggatacagtaatgattaatcttaaaaacatattgtgtctgtttggcgatgtcttattgaactttatctaagggtcttgttaacgtacacattgtgattcagcaggtctggggtggggcctgagatcctgcatttctaataagcacccaaggggtattgctaacctgaggacaacactctgagtaccaagggaccagatcatccaaaaaacctccagctaaaatacttaggaactctggatgatatatatatatatatatatatatatatatatatatatatatatatataatataagtaataaatatgtatatataagtaaattatatttacttatatatatattacttatattatatatatatatatatttaaaaatccatttaaacccttatctgagctccctgcaaaataaataaattctcatggggcatgaaatgggggtgggaagggaataaaaaaacaaaacaaaagcaaccactccagctagatttgctagtcattgaggcctaagagacatataaggtggaagagaagggcatgggcccacacatgttgaaaagagttgatgggaattaacactctcacacaaagtcaggaccaccagatgattaaagcatatataaaagtgtgaaaaatcttcttatggatacaaggtgaaaaggaacaaaagctcatcttattctgtgtagcacatggggaaaaatcctttcctgataatttgtagctattaccttgacctcctatagctttgagttccaatttatatgcttgtcactgtcttggaattc

SEQ ID NO: 204260 - DNA, 1000 bp, Homo Sapiens
ttctgctgtatgagaatacaatgggaaatcaacctactgcaacctggaagagggcctgctccggaaccaggccatgctggcaccctgatcttggacttctagctattagaattgtgagaaatttttgttgtttttaagccacccagtctgtggtactttgttatagcagcatgaactaagacaaccagtttctgtaagtctccaaaataacactctgactttttgcgtcttcacatgttgagtctattctttccacttgtaatatctcccctcagttctgtgtctgaacttctaaatctgtttctaaaggcctagcctcagttccacccactttatgacattttcctcacccattccaagcccttagtgatatttttctcctctggtttctatcatttactgcttttctctttatttggtagttagagacatatattcccttaaaacaacattaaaacaatctttccaattaggtagagacatcttaaggggaagcttcatttttactctctcggcttactgcaacttctgcctcccaggttcaagcgattctcctgcctcagcctcccgagtagctgggactacaggtgcgtgccaccatgcctggctaattttttgtatttttagtagaaatggggtttcaccgtgttagccaggatggtctcgatctcctgacctcctgatctgcccacctcagcctcccaaagtgctgggattacaggcgtgagccaccgcgcctgacccctactttataatttctactaccccagcagtgatgtcaatacaatatgtgcacttaataagtatttgatggtaaaaaaaaaatgccattgcctattgttagcttttacccatctttaacaattatctttctctttgtatcataagaatactagataagaattcagtttaaatacctgagccatgttcgttcaggacatgattcttcttgaaagccttctgtagccctgtgtacaggcattctgttccttaaagtaac

SEQ ID NO: 204261 - DNA, 1000 bp, Homo Sapiens
ttttgtagggcaccactcatcatgggacagatatgtagtaaaatgttccaatggaaaaatatttgaaggatgttattttggaagataatttttttgatgtactttaaaaacaaattagcggccaggtgctgtggcttatgcctataatcccagcactctgagaggccgaggcgggctgttcacaaggtcaggagattgagaccatcctgaataacacggtgaaatcccgtctctactaaaaatacaaaaaaattagccgggcatggtggcaggcacctgtagtcccagctactcaggaggctgaggcaggagaatggcgtgaactcaggaggcggagcttgcagtgagccgagatcatgccactgcactccagcctgggtgacagagtgagactccatctcaaaaaaatgacacaaaataaaataaaataaaataaaataaaataaaataaaataaaataaattagcatgcattatttccccaaaaccaatcggaaaaatagacttgttagtttgctgaggtgtaaggaattggcatttttaagtgccattgatagaactgtagattggtagagcctttcagatagcaatttggcagttctgtttctaggaatttatactacagaagtatgtgcgtctttacccaaagatatatgcccaatcatgctcattatagcattgtttgtgatagcaaaaatattttttaaaaaagtattttttgtgtctttttctcctaggagaagtttccttatggacctggtgcaaaagtagacatacaattctaaattatgtgatcattaaaaattaggagagagaaagttttttgtatattgacaaggataaaaagccataatatgctgctaaataaaaatagcaagttaaaaaacattatttatagtgtgatctcattttacaatcagtatttttatacactgaggaaaaaaaatgaaaaggatgtacgcagcaattatctttgagtgatgggactacagaactttcat

SEQ ID NO: 204262 - DNA, 1000 bp, Homo Sapiens
tcggaatcaaaggaggagggagtcagagataaagagcttcatgtttgaaattatggagaaacggtaaggtctagggtgtggcctgaccactgggaagctgagttgtagcactgcccacaggcacttaggggacaaaggaggttacctctgtaggaccactgtgccagtgaaaagcagaaagtaaacagtgacagtaggagatggtggctcaggtaagtgttgagtagtagaaaacaccaagctagggcaactgtgtaagaaactggtggaaatggaagcagggaaagctcctgcttctcctcccagccgtgcaatggaggggacaactaacactttctgctctcactgctttcttccccttgtggaggagatggagattcaggtactgataggatgcagtctgtgctttcaccaaagtctgttttgaatgcaattgcccaaataataaaaagaaaagaaaaccacttcctctagctatttactgacatataaatgttgttcttggaatcttggaattccccaaagggagaaaaatatcagcactgcattttcaagttgacttatggtaaatagaccatagagagactaataatacctgtagatcttcagattccagagatggggcatgaggggagacatacagcacacacacaaatcactgtacaaattaggatcatgaagttttccattttctcattcattcattcattccatgattattacatggacattgcctttgtgtcaggaactgtacttgggttaggggatgaaacagacccagtccctgccctgagagcaacatgcaataaacaagtgaacaaagaagtaaacctacatctctaacttgtgagtgccatgaagaaaacagggggcagagaacaataagtggaggggagcaccctctgacagagttcagccaaatcttggggtgggaggattgaactgaatttaatgaatgagaaggaggcagccatgcaaagagcctggagaaagagaattc

SEQ ID NO: 204263 - DNA, 1000 bp, Homo Sapiens
tgggggtaattttagaggtatttccaaggatattttaaaaacttgtcctactgccaacaatgcgatcctagcaaatgcaaaggtgggatatgaacaagaactaagatctcgagggcccttcagacctccaatcactttatacaaatgcctcctgcaatggactataaatatgctctgattattttggtttttttttttctccttcaagatggattaaagcttttccttgccggagagttatggctgttataactgtggcaaaaatttctgcttgattttgttttccaacctggaatttccacttatttctctaataatgacaacgacactcattttactggtattgttattaaggaactctgtaaagtttgccttttacccaaaaactttactgtccttatcatccacggtcctcaggaaaaacagagagaactaatgaaatttgacagctaagatgaacaaagctcccttaaactccaatggtctaaaatcttctcttttccagctggaaccatagagggtgtcaaagagaagaagaagaaggttcctgctgtgccagaaacccttcagaaaaagaaaaggaattttgcagagctaaagatcaagtgcctgagaaataagtttgcccaaaagatgcttcaaaaggcaaggaggaaacttatctgtgaaaaagcgaataggcagatgtacagaactgaaatttgaatagtgaggggggcaagaaaagctggcaacttctatgtacgtgcagaacccaaattggcatttgtcatcaggatcagaggtatcaatggtgtgaacccaaaggtccaaaaggtgttgcagcttcttcgcctttgtcaaatcttcaatggaaactttgtgaagcttaacagggcttcagttaacatgctgaggattgtagagccatatattgcatgcgggtacccaaatctgaagtcagtaaatgaactaggctacaagcgtggttatggcaaaatcaataagaaaagaattgctt

SEQ ID NO: 204264 - DNA, 1000 bp, Homo Sapiens
acagcagcaacttccctgaacatggctactaccaagccggagtttggtgtcccatttgcagtgagcattgaatttggcccagggccaggaaccaggcacctggtgtttggagggctccatcagggaccctgggcgggaagcacagcagccacctttgccatggctgagctgcgaaagggtgagagagtgtggttggagttaacccaggcattggtaacaaacagaaaccagcgaggcactgcatttgggggcttcctgatgttcaagacatgaaccctgggcccagctctgattggacatcatggacttgcccagctctccttggtctagggctctggccaaggatggtctgcagatcatcctgttggtctatctcttccctggacagcttctgcgagagagtgtggtgtacgtggtctctgtctagcgcactgggtttggctatttctcaatgacaagggggactggactacttctctgggtgggacctggttctgagcttggtatgccttctcagacagcacaggctggactccagccctttgccatactgtgtattctacagctgctttggtggcgtgctcctcttgtggatggaagcttctgtgcagcactttaactctttctcctgcttcctattctcttctccctaattgttggctacaaagtcatctttcccagaaggagtctctaagatggaggtgacatttggacagtattggaaagcagtctccaacgactagaggacagtggaataaagccaacctgtttggtctctgtcagccagaaatggagaagaaaacctggttgagtcaacaagagaaagaaaattagtatctttcgtttcagttattccttgtatttatctgtaattttaatttcatatctttctctccttgccatacacagagcaaaggcccaaacatgccaaatgtgaaccaaaatgtatatggccttcaccatttttacttcctccagtatctttgggccatctgaattc

SEQ ID NO: 204265 - DNA, 1000 bp, Homo Sapiens
ccagttttatttttatttatttatttagagacagagtcttgctctgttgtccaggctggagtgcagtggtgcgatttcagctcactgcaacctccgcctctcgggttcaatagattctcctgcctcagcctcccgagtagctgggattacaggcacccaccaccatgccaggctaatttttgtatttttcatagagatggagtttcatcatgttggccaggccgttcttgaactcctgacctcaggtgatccacctgcctcagctttccaaagtgctgggattacaggcgtgagccattgcacctggccaaaaattcctagttttaaagtgtacaattcagtggttttcagtatattcagaaggttgtataaccatcaccaccatctaattcgaggacatttccatcaccccaaagagaaaccctgtacctgttagcagtcactcccagttcctccctccttccagtctctggcaaccactaatttactctgtctctatagatttgcatattctggctgggtgcggtggctcgtgccttaatcccagcactttgggaggctgaggtgggaagatcacctgaggtcaggagttcaagaccagcctggccaacatggtgaaaccccatctctagtaaaaatacaaaaaaattagccaggtgtggtggcgggcgcctggtaatcttagctactcaggaggctgaggcaggagaatcacttgaacccaggaggcagaggttgcagtaagccaagatcgtgccactgcactccagcctgggtgacagagagagactctgcctcaaaaaaaaaaaaaaaaaaaaaaaaagatttgtttattctggacattttacataaatggaatagtatgtggcttttatgtctggtttctttcacttagcacaatgttttcaaggttcattcatgttgtagcatgtattaataactcatttctttttttgtcttccaatatgatctcaagactcattttttatggtgaataata

SEQ ID NO: 204266 - DNA, 1000 bp, Homo Sapiens
tttttaaaaagtagttttaccattcacagaatttggtattattaatagttattatcctactctagcagtatgcacaatgataatcttaatgatttaaaggtgttagagggtatctagccttgtcccttaatttgtagaggctggagacacactccgtggggcttgtttcctcaggctgacctagacactttataacagaagagacatgggtgctgattatgcccacattctatttataatttctgggtgtgttattggtttgtctacttttgtatttaaaaaaattctaaaactttgttatactattaaaaactagcatgagtatacatcgtaggggtgcattctttgccctttactattcagttattttccgaattaaacatgctcatcatttagctactctgatagaactctcattcacgaatgcttggctctggctatttatgacgtataatagcttacttcagaaatggtaggctgaccttttaccatattttaaataatcttttctagcactttaatattaagtttgaattattgagttttcagggaaaaaatatatgcaagtgaaatctctgacctttgtgtggatttcatataaattttctcgtttccaaccgctcttgaaacacaaagatattttgcttatgtttcttaattttcagtcaataaattcatcattgggtgatttataacattattgcttcttcaggtgactgaactttaggacacagctgtaccattgttctggccaacgtaattgtttgtaaagctggggaaaacatttgcagatgagtacattttgggaaactttgtgtaacatgcaagtataaataagctttctatgcatgactcactgccatatctttgtagacagaccgaggagaggaaataaaaactctgcattttggtaattcttttcttgcggaatgacttgttaatacacagaaaggcatttcaagttttgatttaaatgggaatggataaatcaaatgagtat

SEQ ID NO: 204267 - DNA, 1000 bp, Homo Sapiens
gatgggatggtttactgtgagaatctaatatataaacttccttgatttcccataaaacttccagtaagcatttttaagtataattttcctcaaatttcttctgaagaattcactgattttaacatatcactgacagtaaggcagtaaaaaaaggggggaaggtgtttactgccttttgtataaacccaaggaaccttgaaatttacaacttaaatttgagtcacagtctagatttcatttcttctgtagcttgaatgcaattaatagaactttgaactcataatttgtgcatagctcttttggtctctttccttcccccaatttatagttttcatgtgtgtgtttttatttgtcttgtatcttttctcctatttgctatttatttgattaacttttgaatctaagtatgtaagactgtccataccactgtctgtcctgtgctctccaacacagtagccaccagcaacatgtgattgtttggtgcttaaaaagcagctggtctgagcgaagctgtccatactgtaaattatgcactggatctcagacacttggtagaaaaaagaatgtaaagtttactaatggcgtataaattacttgctgaaatgacaatagtttggatatatcgtcatatcttgtccccagtttattagagttcttctgtgggggaaagaggagagagttactgacagtaaattcttctggttagacagtggaggtgttgctgctgttgctgctatcctccctgacctgttttgtgtgctaatagattccatggagagcaataactgaaagttgaatttaggattgcttctggctttgaggtttctgcctaatggctaaaggatttaaaatgtaaaccagtatatttatattacttgtttttcttttaacttgtatccttattaaatttcattatttagatggtgacagtagtgttagtttagacttgaatatactcagatgtataaaggggccaggcaagtaacaaaggaatgaattc

SEQ ID NO: 204268 - DNA, 1000 bp, Homo Sapiens
cacttaatttcctctgggtcagggcccaaccgggtctggtacttcattgaccctggtcatctctgagttcaaggtgatgacattaaatctctgttgggaattggtacatagggagcccaagggggctctgacaggaacctcggctccatgagtagtgagggcagctgagaccacccccttcctgtatcttagtagtggggccaccaaagggaaatgccttctttttcctgcattctccactgttccaaggaatgtttatctcccttcaccacacgcctaccacctacagagaccccaagactcctcatgtacccgggattgatcccacccttgtcaaatgtcatcctaaaaacagggaaaagataaaatatttgtcagcatcttctgttgaagagtctgtgagtctgaggcttgggcaggcagaaacagattttaaacacttccgggggctatgaacagaggtccctcaaggaggggaagactgcccccacccctcacctgacaggtacagaagccttggtcaggactaccctgtcccccacccaaggcccagagcaaggagtggcccacccagcttcggtagccactacacaccctttgtgaagtccctcagactctgcccagtgcttcacgccacgctggtttggttgaacagtcagagcggggcattgggttgctgtgtgcagcctgggcgggttcctgggtcatggggagggacggctgcctggccagggccctgtcacagggccatcactgttgctcgcagcaactgggagagattagtgcagctgtcggatgtcagttctctgccccgagatgggcaggggagggtgggctgaggagagaagaatgtgtgagttggttgggactctagaggagaggttgtttgcacttactccttctggcctctggagacagaacaggaaaaatgaagcatgaaatcccttttgagaaggaatgccagtctctccattaaaacacaataatgaggaaggaattc

SEQ ID NO: 204269 - DNA, 1000 bp, Homo Sapiens
tgcagcctctgcctcctgggctcaagccatcctcccatctcagcctcccaagtaggtgggaccacaggcacgtacgaccacacctggctattttttaattttaatttttattttttgtagagatggggttttgctatgttgcccaggctggtctcaaactcctgaactcaagcaatccacccacctcagcttgcttttctaattacaaattgtctcatttgaatcatggtctcattgtgtgatgcattcatgaaatttgaatgtttaagccctgtgttacttgacatccattattttcttttgtaatcagtaaatatggaaaagaatgtttaggcttatatgaatgctttagaattgcctggaggttaatgtttccaacatgctgataaatttctgacaaatcatttgggaaaagaaatttctgagattattacagaaactagtttctggtgtaaaaaaatgtttatagacatttatatatttatacatctaccatttggattttattctgttcctgagaggttcagaacagaggtaaaaactgctctagtccttttctaagaggaaaagatgtgacatttttgatgaagagtgagggaaaaggatttgtttaaatgattccaaactttaaaaaatgtaggtgggagaacaaggatgaaaaaggaatttgggaagaaacacttttttggtggggctggaaacatagtgtttcattgtaggtatctggagttagatgcccgcaggagccatgctgaggtgctgggtatcagtggctggcttttgggccagggatacgaggctagagttagagttagaactgtgagccctgacggatatagtgagtcagttaatatttaattgaataaatgcttcgttttataaccctaaattaggatttggaagaaggaagaagagacaagaggagttagaggtatggtttgagaggagccaatgtagtgtagtgttaccaaacctaggaaagaaatttcaagaagtagtt

SEQ ID NO: 204270 - DNA, 1000 bp, Homo Sapiens
attgtgctcaaggtcagcacatgtcagtgtggggtgtcacatgctgttgtgaaccatcatttatcaccaattatggaagacctcctatgggcatcttgccatatgcattataaagatgtgtaagaagacatttccctccacttggtgaggagaattagggctgtacacagatactgtagagtgccatgtgcctggtacagataaggtgtgttagaggttaaaagatgaggctcttaatattaatgatagatcccacttacctgagtctgacttacaatgtgcctagcattaagtgttttacctgcattccctttgaccttcagaacaacccattttacagatagggaaattgggtcagaaagtttcagtaacttatccaaggtcacacaattggcaagtgccagagctgagccaggaactgaggtccttctaacaccaaacagcttgtctccccaatcactgtgctattttccctcccccagaagataatactctgatggaaatgaaggatagtgtaataggagattcggtgttcctttttttaaaaaaaattcagcttgcatattcctaaagagtcaattcatgtttaaaaaaaatttcccttgtgcttgcatgtgacatgtatttttaggatctgctgttagcaagtgtatttttgtgtgattgagtgggagagtgggaaaagttttgcagagctgttgaagccagaatgcaggggggctgcgcagcagagactgtaaaatctctgccatctcaggtcttggaacaagcacaaagagatgtgttctcgatttattattctatgtacatccccagatgaatgactagttaaaggtattgttaaagcattttaaatgacccacttccagcagcgaacaaaatcacttgctgtgccaagccaactggcatttctgagatgataaaaccacaaagtgaggaaaacgttaaaactgctaaagcaaaaatgatacacaataatggagaaggagaaaaattgagc

SEQ ID NO: 204271 - DNA, 1000 bp, Homo Sapiens
tccagtagtccctgaacgatctgattgttttcttttacctaatgaatagttaccctggtaaaaggctgtaagcccctttggggaaggctgggagaaagattaatagtataaatttttggtggtgtactggagtcctctcaaggggacccatcatcttcctcattcaaaggattctgggtctgtaaactggctcaagtctggggagtgattgaggggccattagtcttcatgattcagggtagacttttgttctcttgacctagcacttttctgcttatatagatcaagtaagaatgtagtaggcttctttttttcacttctaagaacaccatatcaactagccaacacaataggtgtgtgcaagtcatactattctgattgcggctttgactctgctgttcattatggtaattctgctcgccttgctttaatgattgagtgctgccacttggtccctgccaccccaggattcaattattccctttgcatttaggtttcccagttcagtgactgcagttcaagaccagcctgggcaacacagcaaaaccttgtctctacaaaaaaaatatatatatatgtttatatatatatataaaattagccaggtgtggtggcacactactgtattcccagctacttgggaggctgaggtgggaggattgcttgagtctgagaggcagaggttgtagtgagccatgatcacgccactgcactccagcctgggcaacagagccagaccttgtctcaaaaaaaaaaaaagacttgaaagtcaaaattacttcttgatccacaggttgcagaatgaatgttgtgatggcaggcatgaaaacaacattcatctttttgtacatctccatcagagctctttggtaactaggtgcatcgttaataagcagtgttgctttgaaaggaatcttttttttttttttttttgtgagcagtgggactcatcaatagtcttaaaatattcatttaaccgtgctgtaaacatgtcctgtca

SEQ ID NO: 204272 - DNA, 1000 bp, Homo Sapiens
tttggggaaactctgaggacatgagacttggattcagtccaggctgatggctcagcacagagtgggtcaggattcagtccaggcctatggctcaacacagagtgggtcggcatgcggagggagagggatctcccgccagggatctgccgaaagatcatactgcaaagtgacgggaccagctcaccgaacagcgtggcagtctctttcctagtagctttctatgttggttacgtctgttacggatcctcccccaacatacttttcctctaaagcaggaattgaaatgtagtacacactgcaaatgctgtccttcatccttgtttctgtatgccacattaccccaaattacgcagcacttttaaaccttttttcttagactgaaagtgttttctgagcccaagcaacacaaacaggtgcctttgacaagagtttgcagtacccagaatccctaaatgaggccacagctgcaccctgagccaggaaaggcgggcacgtagctcagcttctgatgcagtggactcctgccacgtatttcatgcagtagctacaaaatttcaggcatagtcttgaaatagttctgggtaatgtgatgtacctaccccgtagtagtttaaagattccaaaacgcacaggaaagttgaaaggcctcaggctgtgatgtctctgaataagacaaaagagaatatcaaagttgttgtgatcaagggaacagatttcacaaactgtcatcaagaggaggccatcatggtatttttctaatgaaaagtattgcactgaacccaggttagaaggttcatctgagtgactcagagcttggtttgacaaagactctgtccttcaaagaccgtcaaagagggtctgggcgagctgcttgatcgtcctaagcagttttcttgccactcctaagaaatgggtttatgggctccttgaaaatagacaagaaaatgtccttatccatacattaaaacacaaataactgcttagacgtctgcctgaattc

SEQ ID NO: 204273 - DNA, 1000 bp, Homo Sapiens
gcccgcttgctcctctgcccttcagctttgagagcgagaaaatttgagatggggaggggttgtgggttccttcctcactggcagggtggggagcatttgtcaccattgtctcatgtgtaggagatgtcttatctgctgatttcgtggctgcctctgtctaggccagtgctttccaccttttatcatgatgtacccctaaatgttttagacatttcctcccaatcatcagtctaccccacgatgaggttttttttttttttagaggtggattttcactatgttgcccaggctggagtgcagtggctattcacaggcacaaacacagggcactgcagcctcgaactcctggcctccagccatccttctgcctccgcatcccaggagctggggctataggtgcttgtcactgtgcctggctttcctcatgcaattttaataccacagatatactgaatatctgtttatacactgaatatccatctgtgttttatatattcaaaggtgtaatatttttgccttccccagaataaattttcatcccattgaaggtggtagggccctcatggagagggcttatctacatggtagttggttctcatagttgagcatgcactagaatcacctgagcaccttgtcaggtgcgcagaatctgcctctcaggggagggaccaggatctgatcattaccaaactctgcaggtgaactgattcaagagttcctgagagcggacttcgagaaagcagattgtcagggcagctgggggagcctaaggccttgtcaggtgtctgggctgagcctctgccgccagcccactctggctctgcggctctgtgccacaggggcccttggtcaccccgctggctagagctatgccatggccacaagttttggtggaaaatcccaagtgatgttaggaatcatccagggatacagtatccatgcaggtagagagaaagtgctggtgcaagccagcagctgaactgaattagatggtgaattc

SEQ ID NO: 204274 - DNA, 1000 bp, Homo Sapiens
ggctttagatttacccatttgttttctattttctttcttttttttattatactttaagttctggggtatatgtacagaacatgcagttttgttacacaggcatacacgcaccatggtggtttgctgcacccatcaacccatcacctacattaggtatttctcctaatgctatctctcccctacccccccaccccctgacaggccctagtgtgtgatgttcccatccctgtgtccatgtgtactcacgattcagttcccaattatgagtgagaacatgcggtgcttctttcagtagctcttgtaaggcaggcctggtggtgacaaaatctctcctcatttgcttttctgtaaaggattttatttctccttcgcttatgaagcttagtttggctggatatgaaattctgagttgaaaattcttttctttagaaatgttgaatattggcccccactctcttctggcttgtagagattctgccgagagatctgctgttagtctgatgagtttccctttgagggtagctcaaactttctctctggctgcccttaacagtttttccttcatttcaaccttggtgaatctgatgatgtgtcttgtggctgctcttcttgaggagtatctttgtggtgttgtctgtatttcctgaatttgaatgttattctgtcttgctaggttggggaagttctcctggataatatcctgaaggttgttttccaacttagttccattctccccatcactttcaggtacaccaatcaaacatagatttagtctcttcacataatcccatatttcttggaggctttgtttattccttttcattgttttttctctaatcttgtcttcacgctttattttattaagttgatcttcaatctctgatatcctttctttcatttgatcaatccagctatggatacttgtgtatgcttgacgaagttctcatgctggtttttcagctccatcaggtcatttatgttcctctctaaactggttatt

SEQ ID NO: 204275 - DNA, 1000 bp, Homo Sapiens
gtaaaaaaaaaaaaaaaaaaaaaaaaaaaaaaatacatttcaatgcataatgaaaattccaaaatgagctagtctcttcttttagtgaaaatacagacgcgctgactggaggtcagtctttcctggggaaggaatgtgcccatcacgccacgagtattaataggacgaattccttcataatagcaagaggcggcaaatgctttcctggctgttgttttactggggagaaatagcgcaatccttgcctgctttaacttaatgaaaattgccatgcttcatttgcttaagattttgtgcacagtactttgtcatattatattagtgattttggactacctccctctatttagtagacaaattctcaggaaataagacacagattttaaaagagaatgggaatgaaagtgagagcttggatcattgaattatttttctctcttttctaaagaaattggggaataaagtaggggtactgtaaatgacatgttaccagattaatatttgactctccattggattggtccaatcctaagaatttgtgaatgaaaacacttgtttgccataattttctgaaataattaatattctccttttggtatttcatgatcctaagagtttcttttgttaagccattctgagcctgtccacctatgacatttgaaatactactctatttttcaaagctcaatgcaaatcaaatgtcacctcacctattaaagttttttcattctctcagtattctaattttgcctctttcaaacaccaatcaaagctctagcagagatatttatatgtcgttactactttatcacattattaggacaaaatagaggcactttttaaaataaactaacaatgtgcattctcataaaatatgagcaactgtatcataggagtgaaaaaataattattttatatcttcaaaggaaggagcattagagaatgaaagagaataaatgaagccaaagaataatctgactgaataaaaataatagaattc

SEQ ID NO: 204276 - DNA, 1000 bp, Homo Sapiens
atagtaaaattcaatggttagctgtttcttctaatacagaagccagcatttattatattagttatgatatccaatttatgaagtaaatataatttttttttttttccgagacagattcttgctgtgtcacccaggctggagtacagtggtgcaatcttggctcactgtagcctccacctcccaggctcaagtgatcttcctgccacagcctccctagtagctggaaccataggcatgcaccaccatgcccagctaattttttttattttttttattttttgtagatacaggatctccctatgttgcccatgctggtctcgaactgctgggctcttgcgtcctcctgcctcagcctcccaaaatgctgtgattacaggcacgagccaccatgcctggcctataattatttctcaactcctaaaaacttgttaactgtggattttatttgatatctcttaatagtaaagatttataactagtttgattattgggtgcttcgtttactttaaataaaatatgtatttctctaagagacctctttgaagtaccaaagttaatcatgagctttgggtatgtgattatattgtgggtctcaaggtattggggcagggagtggacaacaaaaatattgcccgcatttttgtcatgtagaacgttttctcctgcctggttcttaaattaacatattttcatttcctagaggaattaaggaatttgcaagagcaaatgaaggccttacaagagcagctaaaagtaacaacaattaaacagacagcaagcccagcccgtctgcaaaaatcccctggtaagaagactgtcattctggcaatcgtgtgcatttattttattagaaattatcacatcatttctgcatccaactcctgtccaaacagccctttgaacctctttctgaatgggtttttactcacttattttacttttgattaagtagagaagtctccccggccacctcttaaggagaggagagttcagagaattc

SEQ ID NO: 204277 - DNA, 1000 bp, Homo Sapiens
ctctcagagaccacttggccttgtctcctgcctgtacacaggtctttgtcttatccccaaacagatctgaaacacctcgaagcagaggtttccactcctctgcattcctacaatgtccacttcaacggccaggatcaatattccttcatttcaagaaatagaactgatcttagcactttgggaggctgagttgggcagatcctgaggtcaagagttcgaaaccagccccaacatggtgaaacgctgtatctactaaaaatacaaaaaaaacaaaaaattagccaggtgtggtggcgtgcacctgtagtcccagctacttgggaggctgaggcaggagaatcgcttgaacctgggaggtgggggttgtagtgagctgaaatcgtaccactacactccagcctgggtgacagagcaagagcactccagcctgggtgacagagcaagactctgcctcaaaaaaaattaaaaagaaaataaaaaagagatagaactgccacataataaagaggtttgctatgtggatagagatgagaatgagaaaaatgttctcttttttttctggttttctttttttttaacttttattttcaagttccaggtacatgtgcaggtttgttacataggtaaacgtatgtcatgggggtttgttgcacagattatttcatcacccaggtattaagcctagtacccgttggttgtttttcctgatcctctttcttctcccatggctccactctctgatagactccagtgtgtattgcttccctctgtgtgtccatgtgttctcatcacgtagctcccacttataagtgagaacatacaatatttggttttctgttcctgcattagtttgctaaggcaaatggcctccagctccatctgtgttcttgtaaagaacatgatcttgttcctttttatggctgcagagtattccatggtctatacgttccacactttctttatccagtctaccattgatgggcatttagcttcattccat

SEQ ID NO: 204278 - DNA, 1000 bp, Homo Sapiens
tatatgtattatatactatattcttacaatagcaagctggagaaaagaaacttattaagaaaatcataaggaagagaaaatgtacttactatttcttaaatggaagtgaattgtcataaaggtcttaacctttgtcatcttcatgttgattagtctgaaaaaaagggttggtcttgctgtttcaggggtggcagaggtggaaaaaagtccttgtataagcagactggcgcagtacaaactggtgttgttcaagagtcaactgtagtgatatatcctggaaatcactgcattctagtgtatagaagtagtcttcaattctttcaacagttgccaagtactttattatgttgatgtaccatggtgtattccatcagtcctttattgatggatatttgggttggttccagtctttagctgttacagagtgctgtgatgaatagtcttgtgcatactattatcttatttttaaaatttttgctagtgtatctttgggatagagtcccaaaagtagaattgctaaatccaagggaaaatgcatatgaaatgtgctggatattgacaaatcccactccaaaggcattgtgctgagtattcagttatttttttctcgtttctatacttcccattttatcctctgttctgtgaaagggccgtatgtgcaaaatgacctccaaacattaaaggagtcaagcaagaaaagaccaaggcaaatataataaatccagtttatcagtctggggtgttttattgggggagcttacagatagaagcatggtcttgggcagctgcaagataggtagatctctacaatgttactccccagacccaaggcttctataccataggggaagggcatatgtacaccagcaagataattaaaggcactttccagaacaggcaagaatgctatgtgcataagagctataatttgtgcaataacatcaaggttggcttgttctttcactagggacagtacataaagtggaaaccaggaggaatt

SEQ ID NO: 204279 - DNA, 1000 bp, Homo Sapiens
cagtacacttactgtgttacaacttatctctatatgcatgttccctgatgaacttcttgagctgcagaattgactaatcctaaaatctgatgtggtcattcacagctaaaggcatctgtagccttttgttcttcatattgtaataattttcttacagatacttcccccattaattcttgagctcttccaggacaaagagactcagtcttcttgttctttgattctcccttgggatataggctcatgtctatcactcagtgaacattcaaaaatatttgttgaattgtgaaaaaaaaaaggcagttttaactttaagatacttagccatagttacaaacacttaaaaggaacagagtattagctgtgtctgatggaatataaattgatgagatcagttcaacaagccaaatttcaaatcagttttgctcctctggagttgacctcacagcgactaatgacttcccaattctccagttgcttcatcagtagagacaatcagccacagcactggggccatactgggaaaaatgacaaaagtgatcacatctgcctctgatccaagaacttcctaaggtgcatggtatgagataccaggagccaaagtccccgtgagatcatgggcacagttcaacagggtcccataagcttcctaatgactcctaatctgtgggacagggaaacattaggctcaaaaccctgcaggtccctctgaagtttatttgttttgaaggtgagatttctttcttttcttttttcctttttagatttaaagattttaaacatatgacgtcttgcctcgcatagtttctatggaaagggaggcagtatatctgaggatggaaaaagtaattattctgccaaaactgtctttcaccaatgctgaacgactgggcaaattcaccacattttccaccttctcacatgtcttaaaaacctagtcgttgccagtttcaccactggtacaatattggttatgcacaattcaaatgttcatctgtaa

SEQ ID NO: 204280 - DNA, 1000 bp, Homo Sapiens
attttattacaggcttgtatttcacaggaacttctaagactgtactcatatatcacaatgcgagagttatgtcatcatatagtttcctcttatgcctctttttgaaccttttcttatgaacatttttaaaacacacaaaagtagagagaatagtaaaatgaacccctgtacccatcacccaactttaacaaacatcagcatgttaccaaccttttgtatgtttttatctattccccattttttcctagagcattttaaaacaaattccagacaccatatttcatccataaatactccagtatgtctttacctgtaagaactcttttactaacataaccacaaaaccattatcacaagtaacaaaattaatgctcaatgccctattattatctaattctcagtttgtatttaaatttatctgattccctaaagaaagggtcttggtatggttgatttgcttgaatgaagattagaagagtccccaatcacattccatttttatttcttgcttcttttaatctccagtgtctgcctccacctcttttgtgatgctgcatatatgtgataaatcgctggtcatttgtcctatgggatttctctttttctgtattcctttttttttttgagacagcgtctcaatctgtcacccagagcgcaatggtgcaatcacagctcacttttggactcaagtgattctctcacctcagcctgccaagtagctgggactacaggcacacaccagcatacctggatcattttttgttgttgttttttgtagagacagggtcttgctatgttgctcagactggtcttgaactcctaggctcaagccatcctcctgcctcggactcccaaagttctaggagtacaggcgtgagccaccatgcccggcttacggctcattaaaaaaaaaaaaattctcaaagctttttcacatgaaatttaggatataaattagaattacagaaagataaacagataaatggatattatgtaattt

SEQ ID NO: 204281 - DNA, 1000 bp, Homo Sapiens
agggcccaagcgggttgccactgctgggtcgggctgcctgcttttattctcttatctggccccacccacatcctgctgattggtagagccgagtggcctgttttaacagggtgctgattggtgcgtttacaaaccctcagctagacataaaggttctccacagccccatcagactcaggagcccagctggcttcacccagtggatcccgcacaggggctgcaggtggagctgcctgccagtccagcaccatgcgctcgcactcctcagcccttgggtggtcgatgggactgggcgccgtggagcagggagtggcgctcgtcggggaggctcgggctgcacaagagcccacggaggcgggggaaggctcagggatggcgggctgcagtcccgaggcctgccccgcaggaaggcagctaaggcccggcgagaaatccaccgcagcgccggtgggccggcactgctgggggacccagtacaccctccgcaaccgctggcccgggtgccaagtccctcactgcccagggccgttaggaccggccggctgctcggagtgcggggcccgccaagcccacgctcacccggaactccagctggctcgcaagcgcggcgcgcagccccggttcctgctcgcgcctctccctccacacctctcttgcaagctgagggagccggctctggccttggccagcccagaaaggggctcccatagtgcagcgctgggctgaagggctcctcaagtgccaccaaagtgggagcccaggcagaggaggcgccgagagctgtgaggactgccagcacgctgtcacctcgcaaaagtaaggaagatcgattatttttcacccattagctgggcaattcaaaaaaattctgttgcattccattttgggggagtatgcattggtaatagccttttgaagattgatttggcagtgtttattaaaagtaaaaatacctattttctttgcatcatcacttctgtatttctgtccaagagaattc

SEQ ID NO: 204282 - DNA, 1000 bp, Homo Sapiens
gtgactgaggaatgggtgttgagggactctgctctcctgcaaatattctgaactatcttcaggatccaagatcctatcttaggatccacttaagacctgcacgcatgaagtcattgtaccatggagcacatccttacagggctgccccaaaaatatgcccaacatagaaactaaaactttgctggttatcagcatcactgaggaatagtatttagacttgacaaagtagaggagctgaatctaagaactgtacttaaagccaagcacccaaaagggctatatcacctgttgatgaggtgaagagaaaaatctgcatactggtaacgtgaaccaacaagaaaaccagtctgtccctggtaatagtaagaatagggaggagagaaacatttgagaaatagacaaaaatggcaaaatggggtggaaaggactaataacattaatcattttccctaatcatttataatcatagccctagtctcatgcagttccagcatttgaatgtacaccatactcagagtctgataaaccccaattcaagaaataagtagaaatacagtcctaggttgatagtgttcccagctgggcacagtggcccacgcctgtaatccctatacttcgggaggccgaggtgggcagatcacttgaggtcaggaattcgagaccagcttgggcaacagagtgaaacgctgtctctactaaaaatacaaaaattagctggatgtggtggcaggcacctgtaatcccagcaactcaggaggctgaggcaggagaattgcttgaactcaggaggcagaggctgcagtgagccgagatagcaccaccgcactctagcctgggagacagagggagactctgtctcaaaaaataaaaattaaaaataaataaataaataaataaataaaagatagtgttccctagcacgcagaagaaaccaagacaaatcatctcaacccagacctctcaggattcccaaagttgaagtttaaccaaatatgaattc

SEQ ID NO: 204283 - DNA, 1000 bp, Homo Sapiens
tggcacatgaaacatgatccagaatacacaatatgataggccataaaagaacctcaataaatttaaaaaaatagaaattatatgtatttattctctgaccatgttacaatgaggttaaaaatcaataacgagaaaatttggaatagtcacaaatatgtgaaaattaaacaacacatttctaaataactaataactcaaagaagaaatcaaagagaaattagaaaaatagttcaagataaatgaaaattaagacactacataataaaatttatgaaatgctgcaacatcactgcttgggggaaagttatagtggtaaatgcctatattaaaaaaagatttagataacacagttttccaccttaaaaaattaagaagagaagtgaaactcacagaaattgaaagaaatgataactaaagctgaaataaatacagtgcaagctccccctcttccttttatagcaccttaaactttccaggtgattccagtgtgtacacagcatgatgaaccatttgctatacaagacctatcctgtgaataaggttaaccctaactattcaaagcccatgggccaaaagcctactcagagaaggatgatcatttgggaaaaaaaaaaaagttatgctaccattttaccacattaaaagttgaatataaaaatactgtatatctactgttttaaggtgaacaaattttgactccttcttcttggtatacatatgcaaaatggtggaatatggaatatggaatatgcaaaatggtgcatattccaccattttgggggcatgggaacggtaagatctcccacagactcttacggataaatggttcaagaaatcaaatagccagagttgagcttgagcccggaaaacaaattggtgtcacatttgacttgctctcaagaagttacagtctttatacttgacattagatgatgaaaaatactttgctacaagttatgcctgatgaattgtcttctctcacagaattgtctgtgaattc

SEQ ID NO: 204284 - DNA, 1000 bp, Homo Sapiens
gtcaggtgaggatgactgggttttgaatcccgccctgcagtgggctgcggattccagaagaaaattggggaccattgacctacctcctcattcagatgaggagcctgaggcctagaaataagaagttacttgctcaaagacacatttgcttaattatcaggaaggacttagagagcaattttctctttgtgcgagggtcttacaggttttgagtagccacagttaccctcaggtatctctagacatttcagaaatgatgagatactctcaaagtaaggttaattttaagttcttattatttataacctttttactcaaagtgtggcctatggactgggaacaccagcattacctgggagcttgttggaaatacagaatcttgagtctcaccccaaacctagtgaatcggagtctgtttttttttttttttttgagacggagtctcgctctctgtcgcccaggctggagtgcagtggcaccatctcggctcactgcaagctctgcctcccgggttcacgctattctcctgcctcagcctcccgagtagctgggactacaggtgcccgccaccacacctggctaatttttttgtatttttagtagagacggggtttcaccttgttagccaggatggtctcgatctcctgacctcgtgatccgcccacctcggcctctcaaagtgctgggattacaggcctgagccaccgcacccggcccagagtctgtgttttaacaagattcccatataatgcacgttaacatttgagaagtgcttgtttgaaagatgaatttgttagctgtgcattaagaaggagagagaggccgggtgcggtggctcacgtctgtaatcccagcgctttgggaggccgaggggggcagatcacgaggtcaggagattgagatcatcctggctaacacggtgaaactccatctctactaaaaattcaaaaaattagccgggcttgatggcaggcatctgtagtcccagctactcgggagg

SEQ ID NO: 204285 - DNA, 1000 bp, Homo Sapiens
tatctcctccaggacatgttccttgacacctgtaccccaaggctgactaagatgcccctagttctccttccttgagaacatcctgatcttacctccatctgagcattttcctactgcataattggggacaaagaggggcctaatatgaccaaagcagagaatacaaaagaatgaggctgaagaagtttggggggatttttttttcttttgccacgctgaagtctaggctggattcttggattgtgggaaaccagggagggttgcaaggcaaggtgtggccatttggccctttattgccaggcctggctcagcctactgttggaatgacataccattaagctgaacctacatgcatgcaagcagaatgctgttctaaacactgcgttgtcagacagtggttttgcatggcagggaataactccaaagctaaggacatcataatttccacccccaccccaaacacttgccattgccactttgattcagacaatctggtataccaggtcacaccatcctttgttcacctgggcagccacgatgaaaggtgaaagtggtaatatggcatcctcaggcctggaaatctggggtggaggtagctgtgggctaaagcacagctacaggagttccttttcttgctacagctacctcgcacactcagagagattttgcagaatagagctggtaaatttaattcagtgtctacctctccagtccctgcctccactcacctcttcccttcctcaccccatttccaagttagtggctacctcaaaggagcctcagagatgacccaagggccttcccagctctccagaggcagttcacagccaacaggcctggctcagaggcttcctaacctccctcccagcccactctctttgagcaggacaagtggtcacgtgacggcagctccagggagggccagtcaaggcctggtaccccccacctctgctctccttccctctcatacacaattccggaggcggaattctagacgatc

SEQ ID NO: 204286 - DNA, 1000 bp, Homo Sapiens
tggccaacatggggaaaccctgtgtctactaaaaatataaaaattagccgggtgtggtggtgggtgcctataatcccagcaacccttgaggctgaggcaggcaaatcgcttgaacatggaaggcagaggttgcagtgagccgagattgtgccactgcactccagcctgggcaacagagcgagactccaactcaaaaaaaattagaaacaccgagtgcctgctgtgtgccaggtgttagggagacagatgaccaagacttggtcctttctgtccctcacagcactttcaggaatgggggtcacagaggaaacactaggatgctataagaacacagaggagcccccccacccaatcaaggtcattggtcttcaagataaagtgcctaggcctggtgcagtggctcatgcctgtaatctcacactttgggaggctaaggtgagggggcacttgaggtcaggagttcgagaccagcctggccaacatggtgaaacctcatctctactcaaaatacaaaaattagccgggcgtggtggcacacgcctgtaatcccagctactcaggaggctaaggcaggagaagcgcttgaacctgggaggcagaggttgcagtgagctgagattgtactgttgcacttcagcctgggtgacaagagcaaaactctgtctcaaaaaaaaaaaaaaaaaattctcaaaccgtccgttggacccaaccactgcatgctgatttcactcatgcatgctccagctcccagacttctgggatccctttggaattcatccaattcagagtcctctactgctctttaatcatttgtgcttgttggttttgcttctccctctgtctttcccactggtgggaggctcccttgggagcaagcatagtattgctatcaccctgtggcatagtgtgcagaactcttgcacacccaggagctcagtccccgtctttgatagccactctacccatactacaggtaagaaaactgaggtccagagaattc

SEQ ID NO: 204287 - DNA, 1000 bp, Homo Sapiens
ataaaataaaataaaatattttagcacgggatcttttgattcacacaaagagtagaaatacaggttgcaatcccatgtgaggttacgaattctcagagatgctttccccctctgcccaccatgttcacgatggagaaatttctttgctggtgccctctgcaagatttttgcagtccgctctttctttcttttttttttttttttttgagatgaaatcttgctctgttgcccaggctggagtgcaatggcgtgatctcggctcactgcaacctccgcctcctgggttcaagtgattctcctgcctcagcttcctgagtagctgggattataggcacccaccaccacgcctgagtaattttttacttttggtagaggtggggtgtcaccatgctggccaggctggtctcaaactcccgacctcaggcgatctgcctgccttggccttccaaagtgctaggattacaggtgtaagccaccacacccggcccagtccactctttcaatgaggatgcaggctttccagaccctggctttatgtgggggtcacctaacagctttttcaccctgggtgggccctgggtttctctcttgccccataattccaaatgtgcatcaaaactgaagctttgtggccgggcggagtggctcacacctataatcccagcactttgggaggctgaggtgggtggatcacgagctcaggtgatcaagaccatcctgaactgggtttcaacatggtgaaacccagtctctactaaaaatacaaaaattagctcggtatagtggtgcctgcctgtaatcccagctactcgggaggctgaggcatgagaatcgcttgaacccaacaggcagaggttgcagtgagtcgagataacgctgctgcactccagcctgggtgacagaacgagactctgtctcaaaaaaaaaaaaaaaaaaaaggccgggctcagtggctcacacctgtaatcccagcatttcaggaggccgaggcgggcggatc

SEQ ID NO: 204288 - DNA, 1000 bp, Homo Sapiens
cgccaagtactcctacagataacatcactattgtgaaacctaattaactggtctttgagatatttttcaaatttagcattttggcagaccaacagacacaacctggacctgtgaaccccactcctcagaaatgactcaggttcacgaagatagttctgacacacctgtgattcatccctgacccaaccaattagcatttcccatttcctagcctcctgcccaccaaccgatcctttaaaaacctagtctctacattcttggaggtggatttgagaaatatctcccatcctcctcgttggctggccctgtgattattcatctttccctgctgcaacatttgtagttctcagtgcattggttttttggaaggcagcaggcaattacacagggaaatgtgaaattacacatttccctgtgtaaaagaacacaggggcaattacagcacgaggggaaaacttttataaggggttggtggaagcaagactaagaaaatatacttacttgattggttaaagtggaaagtccttagttagaggtttgtctgtttctgttagttaagcttaagtttcattttactgtttacattgagttgggctccagagctggaactatctcaacctaatggcctccaaattaacattttttaaacaaggcaaattcttcatgtgtgaaatgggaataatactatctaccttgcagggttattgtgagaactaaatgagagactgtgaaaattggtaaactgaatactataccaagttgaaaaacatttcctattatataggaggcagtaaattagatggttaagattcatgtaaaataaaggtcttgataataataaaatgtagtccggtagaaaagacagacataaaagaacatattagaatgcagtaaatactatattgacaacagacaaaactgcattggttccccagaggaactagaaaaaaacagaagataaactggtgttgaactatgacagatggagaaagtggaattc

SEQ ID NO: 204289 - DNA, 1000 bp, Homo Sapiens
tttgtagttaggcttgattttgaattccacctctatcattcaccactagctgtgtaacctctcgggaaggacacctaacctctctcaactgcagtgctcttagaggcaaaatgagaatatgtatggcctaccttggaagactatcatgaaggttaaacaaaaccataagatataacagtttacaactctgagctccataacagactgctagctttcctttttcttgcaggtgtgcccgctcggacatttccccaccctctccaacattacccttctctctaggagaccctctccattctaagaaaaaaatgctctcggtaatctagttgagcatttctaaaatgtttccttttttaatgcatccttatgtttaatgacatactttaaatcaaataatactaaaagacctatgatgaaaaatagcaacctcccccaccccccacatccatcaaaactactccccagaagcaattcttttagctatttcctcttaaattattccaaattgttttatttgaatatacttatatacttacactgttactatttctctctcacagatataagacttcataagattgtaaagaaagaggctagtatatatatttgtaattctctcacacatttaaaagaaggtagggaggacagtaggaaattttcatgtctgaaagatgttttttgcattgaaaaatgtttttaaaaattgcatgagttatataccatcactttctcataatgatgatctattttctcaacaggaatattaggcaaagatggttagaaaaatcagatcgtccattcaactgtttcttgcctcctcagggaagaaaaggtaactttggataaagatactttgttgtaagatacctggcctttccttagctggtttgtatggtcacactattcatgaagttaagggcaaggaaatccaccatgtgaaacaatattcccatcccaaatgatacaatttgcctggtttctacagtacagataatccaaa

SEQ ID NO: 204290 - DNA, 1000 bp, Homo Sapiens
tctttttttttttgccctgctctggctttacccattattccttctttcttctccaagcatgctttctctggcctttgcatatgttttcctcctagttgagaagaaacgttcctcattcattgcatacacaagttattcaagtgccactgtgtatgtgtgtgtgtgtgtgtgtgtgtgtgtgtgtgtgatctcccatgactcccacatccaccacgaccaccagtcagaattaacttcttccttatctttgctccctctgtaagttgtttgtactgtggtcatgagattgtgcttacacatctgtttcccataccagacagtgtgctccttgagatcaatttctacgtcttacttacattctattcctagggctttgcacagtacctaacacacaataggatactcactaatattttacttaatgagtaaattaatgaatgagtgaaagtataactatgtaaatctagtgctattactcacaaagataaatttttcacaagattctaagccagcatggatttggcaaggtgtaaaagatgagcaaagtaccgcaacatgtaaatatcttccctgaaatcaaacagatattggatttgatgcttctgtcgtttaagactgtactgatatttgttttccatgctctacccaccattttttccacttaacaaaatctttttcttcttagtcaacaatggtaataggtcatattttgcttttcatgtacattattccatttgatactcacaccaaccctgcaaagtaggtattgttattgatttcactttctaggtctagaaactaaggctcacagaagttaaactttgcacaaagtcacagagttagtagatgtagtatggagtctgacctcacatctgctgtctccacagaccacaacacatactccatgcaccaactccttcattattattgccttaagatcataggactgtgtaaggtgagaggacacagtgtaagagctggaccatagtaactcatatac

SEQ ID NO: 204291 - DNA, 1000 bp, Homo Sapiens
acagtaagtaaaacttcatgtttctagtatttcttatgatatcccttagtataggccattagtgtaatgccaaagtggaattcattaaaggatagccaaaaagtggaaataaccaaaatatccatcaatgaatgaatgaatgaataaaatgtattatatctatgcaatggaacattagttaaccacacacaaaaaaatgaagtactcattcacgctacaacatgggtgaaacttgaaaactattatgcttagtgaaagaatgcagtcactacagagacccaaaagagattattgttctaggggatgagggtggtgttgaagaaaaaggggccacaattgctaatgggtatgtttttggaggggggtgacgaaaatgtttcaaagaataactgtggtgatgattgcacgaccctgaagatgtattaaaaaccactgtacatttaaaatagttgaaatctaaggtatgttggttatatcccaattaaaaaaagcaattctcggccaggtgtggtggctcacgcctgtaatcccagcactttgggaggctgaggcgggtggatcacctgaggtcaggaattcaagactagtctggccaacatggtgaaaccctgtctctactaaaaatacaaaaattagccagccatggtggcttgcacctgtagttccagctactcaggaggctgaggtaggagaatcacttgaatccgggaggtggaggtggcagtgagctgagatcgcaccactgcactccagcctgggtgacagagtgagactctgttaaaaaaaaaaatgcaattctccatagactaggagaaaatatctgcaaaaggcatttatgataaaggactgttataaaaaatatgtgatatgatttggatatttgtccctgcccaaatctcatgttgaattgtaatcctcaatgttggaggtggggcctgcttgggtcatgtgggcggatccctcatggcttggtgttatcttcatgacagtgagtgaattc

SEQ ID NO: 204292 - DNA, 1000 bp, Homo Sapiens
gtttgtttatttatttgtttattttttagagatggggtcttgcagtgttgcctaggcttgtcttgaactgctgccttcaagtgatcctcctgcctcagcctcctgagtatgtggaattacaggcatgagccactgcacccaacttgcctaacaatttttagagtaacagttattttgcggttcctttacgtggagaacctttagaagtgttccatctgactaccttggacaaggcactgtgaccttctttgtagcagagactaaagacacctgcccatttccctcaaatggagggatatccctcagtaaaggaaggagctcagaattagattgggggtagagaaaggaagcattgagtccctcctagccctgcactgtggaaatgtaaagctattattatgataattgctgttggcaaacaagaaaattctcagcctctggtttgtacctacacccagtcacaacctcaggttgggtggatgcagactttaaatattggggtcacctgtagctgttggaaaaggtccctgtggtttctctgggtgttgtgcaagcattacttttttggctcttttccctgtatccatcagtaaaaagtaggaagtttgaggagctgtgctttcggttggcattaggcattggagtgcctttatttcctacatttaactggtaaatatccaacactccataacaggatggccctgcttggaaattcttacctagggagtgactgaagcctaagaggaactgcacagccccctgtattgaaaacggagtagtcatttcctagagcatggcttggatcctgatcagctgatttcctgtctctacagggatgtgatgtgattcctcccccttccttctggaagaaatggatattttttttcatttcctgtttgatagcatattttctgagtaccaggagacacttgatgactataaaacatttgatgtgtggggggtgggaaggaaggaggcttttgttttcagcagaatggct

SEQ ID NO: 204293 - DNA, 1000 bp, Homo Sapiens
cgatattgattcttcctatccatgaacatggaatgttcttccatttgtttgtgtcctcttttatttcattgagcagtggtttgtaattctccttgaagaggtccttcaaatcccttgtaagttggattcctaggtatattattctctttgaagcaattgtgaatgggagttcactcatgatttggttctctgtctgttattggtgtataggaatgcttatgagttttgcacattgattttgtatcctgagactttgctgaagttgcttatcagattaaggagatttttgggctgagacactggggttttctaaacatacaatcatgtcatctgcaaacaaggacaatttgacttccttttttcctaattgaatacactttattcctttctcctgcctgattgccctggccagaacttccaacactatattgaataggagtggtgagagagggcatccctgtcttctgccagttttcaaagggaatgcttccagtttttgcccattcagtatgctattggctgtgggtttgtcataaatagctcttattattttgagatatgtcccatcaatacctaatttattgagagtttttagcatgaagccctgttgtattttgtcaaaggccttttctgcatctattgagataatcatgtgggttttgtctttggttctgtttatgtgatggattacgtttattgatttgcatatgttgaaccagccttgcatcccagggatgaagcccacttgattctggtggataagctttttgatgtgctgctggattcagtttgccagtattttattgaggatttttgcatcaatgtccatcagggatattggtctaaaattctctttttttgttgtgtctctcccaggctttggtatcaggatgatgctggcctcataaaatgagttagggaggattccctctttttctattaattggaatagtttcagaagaaatggtaccagctcctctttgtacctctggaagaattc

SEQ ID NO: 204294 - DNA, 1000 bp, Homo Sapiens
ggaatccctgtgtcctgcatcctcattgctggctctgctgctgacatcataatgctggaggtaggagaagagcccatgtggatttcgggtccagcatgccccatcaggctggtgctctgcgctcatgagtagtgggtaaaaaaaacaaggacttgggagctgaaggcttggatttaaaccctgactctaccacacacttgtctgtgaccttgggcaaatcacctaacttgtgctttcagtttctctgtgcctcagtttcctgatctataatcaggggatgataatagcattgatgcccgtcaatagtatcgatgtgcagattaaactagtaatatgttaaaaatgcttataatagcaccttttccaataaccaaaagtgatggaaacattagctactatggtattattatttccttacattctcacaacgactgtatgaggcccacattatttccttcacttcaataacacaggctttggacttacccaggtctcggtctgaatcctgactctgaatccacccctagctgtgtgaacccgggaaagctgcttcccctctctgcgtttcagagtccccatgcatggaatgaggttgctgtcaggaatgaatggaatgatacatgcaaggctctgagccgggtgcctggggcagggtacacacttctgacgggtcataaaaggtgaggacccagaaccagtgtggttaagcagcttggccagggtctcagggccagtaaggagcagggccgggactggaacatggagggtctgaccagaggcccaggtgcctctcccctgccaggctgcctctcctctgggtcttggtgtctccatctgtaaggtgagttgctacactgagagggcctgctggatgggtcagcgaggagggagggtgctgggttcagactgcagggctggaagggagtggaggaggcccaaacccccaacccggaccagaattatggtcccgtgaccacagccttctgctctaccagagatc

SEQ ID NO: 204295 - DNA, 1000 bp, Homo Sapiens
ttttaagaactctcaaaattattttatgcagtcattttcttctccacctttctttgtatcttactgaaaatttcaaattttaaagtaatattatatcagatgaaattttacttcaataaaatctcatttattatttatttttaatgcatttaatgcattgattcatccaacaagtatttaaggcacttttgtgccttctaggtgctaggactgttttagtaaaaaaaataaccaaacaaaacaaaactcctgccttaataaaacttacattatagaaggggaatcaaataataaattaacaaatatataatgtcaaataatgaaaacaataaaaataacagttaatagttattggggccttactatgtgccaggcactacttaaagtgttttacatatatcatttcatttaatcttcctcataatcttttgaagtagtgactgttataatcctcgttttacagatgaggaaacagggacacaacaggttaagtaacatgcacaaatcacaagctttcaacaccaagaagtctagctctggagcttgcactcataaaaggtttagaggttgatgtagctgagtgtgggaaggggtatcagttcagttcatccagtcaatggttttctacccttgagcattaattccctcatttcacaggtatttttgagtacttattatgtggtaggcattcaggatgtaataaagaatcaaagctgatgatattcctgttctttgaaacttgcactacagtgggaggaagaaactttaatcaaatgtaaaatatccgctactgtaggggctacacaagatggagcattttttaaaaagctccccaggtaattctaatgcacaatcaaggttgagaactactgctttgcttttaatgaggactgcagtggtctctggatttagctaccactttgtatttctgtaagttctctgcttcaatagcattaacaattagacttgctgagcatggggagaaaatattctagaaggg

SEQ ID NO: 204296 - DNA, 1000 bp, Homo Sapiens
tcaagagagttgatggtgtagttccagtctgagtccagaagcctgaaaaccagaagtgctgatggtgtaagttttagtctgagagggcctgagaaccaggagagccatttgtgtaagttccattctgagtttgagtccaaagtcaggagaagactgatgtcccgactccaagacagtcaggcagtgagaaattctttcttagccttttattctattcaggcctttaatggattgcatgagttccgctcacattggggagggcagtcttcttcagtctactgattcaaatgctgatctcatccagaaacaccttcacggttacaccccaaaataatgtctagccaaatacctgagcatcccatagcccagccaagctgacacataaaattaactattatagaagtgtcctgggactccctcatacaagcatacttcagctttggctctgtacagactagaaaatgagccttttccagcctcaagctctttccagcacatcttatgtttcattgataaattggatacattatatcctacctcaaagggtgctgtgaagaataaatgagaatgtatgttcatttatttcattcaataaaaacaattgcttcctatgtgccagacgctgtgccagagggggatatgtggtagacacagggtggcatgagatgtggcccaaggggttagcagggcttgaattatgcaggggttgggaggtcatggttagaacttatttttttttttggatacagggtctcgctcagtcacagcccaggctggagtgcaatggcacaatctcatctcactgcaacctccgcctcctgggttcaggtgattcttgtgcctcatcctcctgagtagctgggatcatgtgcaccaccacacccagctaatttttttggatttttagtagaaatgggatttcaccatattggccaggctggtctcgaactctggacctcaagtgatctgcccctctcggcctcccagagtgctaggatta

SEQ ID NO: 204297 - DNA, 1000 bp, Homo Sapiens
gccaacatggcaaaacatgtgtgtggtggcgcatgcctgtaaatcccagctactcgggaggctgagggacaagaatcacttgattccgggaggcagaggttgcagtgagccgagatcgtgccactgcactccagcctgggtgacagagtgacgatctgtctcaaaataaataaataaataaaattaaaaaaacaaaatgggcaaaaacaaaaaaatgaacaggcattccacataaaaggaactacaagtatgtacgaaaaggtgctcaaccatatttacaataaaagatgtaaattaaactacacagaaactttttaagaaaatctaacagactggcaaagacaaaaaacttagcaatatattatgtttggtcatgatattcagaaacagacattcttaaacattgtaggtaggattataaactggtgcaaccctatattgagggcaatataacatctttagaattccaggtacatataggctttaacccaggaaagctagaagtttatcctctagctatctagtcatcttttggtatatacatgagagactggctccaggacctcctgaggatactaaaatctgtggatgctcaagacccttatataaaatggtaagagtatttgcatacaaactatggacactctcctgtatactttaaatcatctctagattactcataatacttaatacaatctaagtgctacgcaaatagttgttacattgtattgtttagtgaataatgacaggaaaaaagtctatacatgtttggtacagttgctattttttcccccaaatacttttgacctgcagttgcttgaatcaaggatgcagaacacacagatatggagggctaactgtactgtgaaagtgcaaaataatgcatgtataacgttattcaatacagcattattcgtaacagtaaatgactgcaaacaacacatgcccatcaataagaaaccagttaaatgaattatagtacatccatacaatggaattc

SEQ ID NO: 204298 - DNA, 1000 bp, Homo Sapiens
gtttacttagcactctacctgttgacattgaaagagaggtgttaattacatagcatttgaaaaagatctggaagaaaggtggtttatcagtgggtgtacttcagggttaaccagatgttaaaatgagaattctattcagtgcgcttgtgtcatccacatcagtagatctgactatggcagtatcagaaagcaaaaaacagacgtatatcaaaccagtccctgcttattttaattcaactatcaataataatacttcatttaaaataaggcatccaaaacaaatttaaattagatggtttgccaggactataacctatattaagcaaaataccccttttttgtaaatataagtgaataatcatgaggaataacatgaagaaggaggaagatgagctaataaaatatctaaagtaattgaaggacaaatatttggtgattaaatcaatgttgaattaaaaaatgatgacatatggccaggcccggtggctcagacctgtaatcccagcactttgggagcccaaggcaggtggatcacttgaggtcaggagtttgagagcagcctggctaatatggtgaaaccctgtttctactaaaaatacaaaaaattagctggacatggtggtgcatgcctgtagtcctagctactctggaggctgagaaaggagaattgcttgaacccaggaggcagaggttgcagtgagccaagatcgtgccactgcatggcagcctgggtgacagagtgagacttcgtctcaaaaaaaaaaaaaaaatgaagcatgaaagtatgcactttagtttgttgtccaaagtcagtcacattttacaaatgcttgtctttgaagaaagactttgaaaatcaatctagtgccttacaatgtattgaactagtttgtaaatgagtcctctattcatttttgttgcaatttgttcaaaatcagttgtggatctttaatcaaagtgtttattggatagaatttcaaccaaacttaaagttttgaaa

SEQ ID NO: 204299 - DNA, 1000 bp, Homo Sapiens
ctcctcctatagtttattgaatatgtatatttggccatctcattcagcataaaaccctgtcctatttgtcccaccctcaaagcagtctgtttctggcatctggccagaggccgtgcctcccagcctatcagaatagccaccttgcaggctgcaactctttatgagaaataaagctctcctttccacttgtatgaaccttgtcattcttcagctgacctgcttcaatagataccactgaaagatacaaagaaagtgggcaggacacataaccttgatatttagattacacattccaccactttacccgagagtttcaagtcattattaaatccagagagccactaaggaactgctgtttggatgatgtcagcagatttagagggagctagttccccagagatgaccaagttccacagtcaagagatcttttctagttttctaggtcaggccatctgagaaagggaaaaatgatcattttggtgaagggaagttgcagctagaggcaaataaatcctgtatgctggagaaaatgagatatatgaatatgagtcaaactgaggagctatagagagaccagacccactgcccatgtcactaagcaggtaaatgtgtgcattcagctgttgtaagccaataaagagtggtgaggtcaggcttggagtgtgccttccacagtaaaggaatgcaaattaaaaaaaaaaattgttaaagcattgcacaagccacactaaatacacctgtgtccaggaccaggattctatctgttttataatcctgtgggctcatggcctctggcctatgctgagaggggagaaatcacactgtggggcagaactgataatatcatttgttaataaatatgcaattaggtagataaatggaagaaatagaatttataggtgtatgtcctcaggaaggataagagtgaacttcagttggagagaggagaaagagggaaagtggtcaagcaggcagttagggtgggtccttggttgaattc

SEQ ID NO: 204300 - DNA, 1000 bp, Homo Sapiens
tttcatggattgtgcgcttggtattgtatctaaaatgttattgtcatactgaaggtcatctaaattttcccctgtgttatcttctagaagttttatacttttgcattttacacttaagtctatgatacattttgagtaaatttttgtgagaggtctgaagtctgtgtctagatttttttttgtttgttatgtggctgttgagagttgtcctagcaacatttgttgcaaagactttattttcttgtctttgctcctttgtcaaagatccattgactatctatctatctatctatctatctatctatctatctatctatctatctatctatctgggtctgttttaggctttgtgttctgttccattgatctgtttgtccaggcttatgccaacgtcttgattactacagctttatgataagtgttgaagtcaggcagtgtcagttctctgactgttctttactatcgtgttggctattctgggtcttttgcctctccatataaattttagaattagtttgtcaattctcctgtcaatttttatttttctctttcatatttaaaatctgcttaagattcttcattcaaaaacaagactaagcatacaacaacaaaccccaaagcagccctctcaacctcccttccaatttctgctctctctcctttcttgtcaggttttaccctcatcaatttgaccaaaacagttcttgaggatttcattagtgactcttatgtagcaaaatcagctgatattttagagctcccttgatttggcttctgagctgcgttcatcactgttgacctttgcctctccttcgctgttttcggcagccgtgccttcctcagcctggatatccgaggttgcagtcctcagagctccatcctggactttctgatgttcttcctgtcttcgcttcctgagtggttctgaccatgcttcagtcacttccctatcacatcctactgttgactaccaatgtttacagatatcccaggtgaattc

SEQ ID NO: 204301 - DNA, 1000 bp, Homo Sapiens
accaggtgcactacttggcagatggtgcttggcctggacttcacctgtcatttgcccccacagtcaggcactctcagctgggcccaaactgcacagcaatatgcattggccagaatcaacagcatcttttccatactgttatatctcccctagtattgatcgaatcattccccaagccaatggtttcaagtttgaactcttagttaattctcatcatatagttcattttgcaagaggtgtgcagcaccatgctgctttgaaccatttggtaggtgttgcaaatagttgaatggtggaaaagttgaatctgtttggccacagatggactgtaagatgtgtattggattccctttgctgctgttaaaaattaatgcaaacttagtgacttaaaacaacacaaatttattatcttatgcttttggatgtcagaactcccaaattcaaggtgtcaggagttgcattgcttctggaagctcagtgggacaattcatgtacctgccttttctgacttctaggagctgcctggattcctggactccttgacccttcctccagtttcaaagtcagcaatgcagcaccgtcaaagggttctctctccctctctgtcacacacacacacacacacacacacacacacacacacactcacccctgctttcatcatcaggttgcctcctctgactcagaccctctgcctccctcttataagaacccttgagatgacaccgagtctgcctgaataatccaggaaaatccaggataagctcgccatttgaagatcctacatctaaaaagtccctttgtcacattcggtgacaaggcagcgtctgggaattaggatgtggacatctttcgggggcattattcttctgaccacaagatataataaaaaagtacactccctgagaaggccccttgtttgacactgttcctggccttaagaattgttttagatgttcattcttcacctcttgaaggctttctgatttttaaagaattc

SEQ ID NO: 204302 - DNA, 1000 bp, Homo Sapiens
tcaggggctggtctgaggaggaagatgatgattccctgttagagctgctgactcagagatgctaagatttaccttctggtgagatattttaacctcctctcaaactctacatcctatcaatctctggctgggaaacttccagtgggttttcactgccctctggacaaaaatcccagttatttaacttggcattcaagggcctccacaatcttgcccagtctgctttcctgcccccgtccccaggtgaaccttcaattctggctgtgatgggctcctcacagtctccacctaggctacatccctttgtgcctccttacctgggtcctaggagagtctcctgaactctccagtccacagccgtcctgctcttctcaggacccatgcctctttttctgcctgcttgccctcttagattgtttaagtgtcttataagcaagggcccaactctccaataagaatgcagtctcctcaagtgataggctggccccttcaggatcctctcttcattggatttgctccatacacttgcccagaattgcactgaggggctttacagataagtatcttcttgtgtgaaatgaagaaggagagacaaaatggaaagaacccagaagacaaaagagcttcccacccaaattcaggagtcagatgacagaattcagctgtggtcaaaagtgtttggaagctggccaggtgtggtggctcaagtctgtaatcccagcactttgggaggccaaggggcaaagatcacttgaggccagcagttcgagactagcctgaacaacacagtgagactcccatatcgacattagttaaaaaataatttttaaaacataaaaaattacaaaaatgtgttctgaagcaattagcaaagaattgattcattttgctggaggaatcagcaattggaatgaattctatttgccttgagcatatagggataaacctgcctaacactggtgagcagagcaatggcctgagaccagaagtcctagaattc

SEQ ID NO: 204303 - DNA, 1000 bp, Homo Sapiens
ttatataaacatgcttttaatagctgcacaatgtttttgattggatgaagagtcttttaattggtttcctattgttggatacttaggttattttctatttttctttttagtggtaaccttttccatactcttggcaaactattttcttgaaccacctgtatccaaaatgaacaaattctgagattaaaaattgaccaaaggccaggcatggcggctcatgcctgttatcccagcactttgggaggccaaggtgggaagatggcttgaggcaagaagtttgagaccaatctcagtgacatagcgagatcctatctctaaaaaaaaatacatatatatatatatatatatatatttaaattagccagcagtggtgatgcacacgtcctagctacttgggaggctgaggcgagaggatcacttgagcccaggaattcaaagctgcagtgagctaggatcatgctactgcactccagcctgggtagcacagtgagactgtctctaaaataataattttaaaagtgaccaagatctatagcaacagatttttgacctcagaatgcagaataattagcctcatcagagaatgccgtttttattgggccttccatttgtttaatagtatgaggttaaatagtctggtaaaaatcagatgaggtctaatctggacaggagggttcccttcaaacctggtaaaagattattcatggggtatacttagggaagaatacagtcatacacattttatttcttaaaatacttaaattaggttttcattaattaccttttcagtgctttttttttttttttttttttttggtagaaacagggcttcgccatgtcagccatgtgatccaccggcctcggcctcccaaagggctaggattacaggcatgagtcaccacacccagccccatgatttttaaaaaaatttgtttaaatgacagcattttgtcttttaggggttagtgttggtcagcctcttgcgataacagtggtgatc

SEQ ID NO: 204304 - DNA, 1000 bp, Homo Sapiens
atgggcaaaggatatcaacagacacttctcaaaagaagacatttatgcagccaacagacatatgaaaaaatgttcactggtcattagagaaatgcaaatcaaaaccacaatgagatgccatctcacaccagttagaatggcagtcattaaaaagtcagaaaacaacagatgctggagaggttgctgaaaaataggaacgcttttacactgttggtgggactgtaaactagttcaaccattgtggaagacagtgtggcgattcctcaaggatctaggactagaaataccatttgacccagccatcccattactgggcatatacccaaaggattataaatcattctactataaagacacgtgcacacgtatgtttattgtggcactattcacaacagcaaagacttggaaccaacccaaatgtccacaatgaaagactgaattaagaaaatgtggcacatatacaccatggaatgctatgcagccataaaaaaggatgagttaatgttctttgcagggacacggttgaaactggaaaccatcattctcagcaaactatcacaaaatcagaaaaccaaacacctcacgttctcactcataagtgggagttgaacaataaaaacacatggacacagggaggggaacatcacacaccagggtctgttggaggtggggggctaagagagggataacattaggagaaatatctaatgtaggtgacgggttgatgggtgcagcaaaccaccatggcacttgtatacctatgtaacaaaactgcacgttctgcacatgtatcccaaaacttaaagtataataaataaataaataaataaataattgtattgattttgttttctgaagttgttccctgtgcatattatggttcaaattagtcagagattcaggtggagtttataagcagaatttagggctttctctccctgactccatctttttcagaattttctcctcactttccagcagctctggttgtcttgaattc

SEQ ID NO: 204305 - DNA, 1000 bp, Homo Sapiens
tagagatcagggtgccagcgtggttgagttctactgaggaccctgcccttaccttaccttacctttcttctcttttcttttcttttttttgagacagagttttgctcttgttgcccagggtagagtgcaatggcgcaatcttggctcactgcaatctccgcctcccaggttcaagcgattctcctgccttagcctcctgactagctgggattacaggcatgtgccaccatgcctggctaattctgtgtgtgtgtgtgtatatatatatatatatatatatttttttttttttttttttttttagtagagacggtgtttctccatgtcggtcaggctggtctcaaactcccgacctcaggtgatccactcacctcagcctcccaaagtgctgagattatagccgtgagccaccgcgcctggcccggggccattttctaagtagacgatggccaacttctcactatgtcctcatatggcaggaaatgaactagatagctcttagatagctctctggcctcttttttttttcttttttttttttgagacggaatctcactctgtcacccaagctggagtgcagtggtgcgatctcagctcactgcaacctctgcctcctgggttcaaatgattctcctgcctcagcttcctgagtcgctgggactacaggcgcgtttccaccatgcccagctaattttttgtatttttagtagagacagggtttcacctcgttagccaggatggtctcaatctcctgacctcatgatccacccgcctcagcctcccaaagtgctggaattcaggtgtgagccacagcacctcacctgtggccttttcttataagggcaccaattccatttatgaggactccacccttgtgatctaattacctcccaaagacctcaactccatacaccatcacttttggattagggtttcaacatattaatttgggaggggtgagggcacaaactttcagttcatttgcatcaaacatatgtct

SEQ ID NO: 204306 - DNA, 1000 bp, Homo Sapiens
tactctattcctacatatgtacttaagagaattgaaaacatatctctacaaagacttgtacatgaatgttcactgcagctttatttgtaataaccacaaactagaaataaatcaaatgcctgtcactgggtaaatggctaaataagctgtgaaatattcctataatagaatattattcagcaataaaaactgagctattgatacatgctttagcatgaatgaatcacatattaattaatctgattaaaaatgtccaacaagaaaagagtgcatgttgtatgttgtaatgtgtacacaatgttagaaaatgcaaactaatatatagtggcagagcaaagcaatgttttcctcagaagtaggatgtgggaaagggtatgagggaggaactccaaaggatcaaaagaaaacttacagggcaattgaaacatttattatcttgaatgtggtgagttttccataagtttatatatttttcaaaagttatcaagtcattcactttaaatatgtgtggtttattcaacgtcaattatacctcaatgaagctatttttaaaaaataactagatccagctcctggggaaattaatatctcaccttagtatctgtgaaataaaatattttttaaaatatttatctatttttgttgctttttaatagcaaggtttttcaggatttgtagtttgtcatattgttagaaatggaaacatcttcctagatttttttttctccacaattttggccatgagctattgacgaaatatggctttcaagcctaattataagagcacagttgtacctgtcattttttttctagtttttcttcctcatgaatatgtgccctggacttttgaaatctttattattttttaaatcacaactcattaactaatcttaccactcttgggaaccacctctcaactaaatattccctctgtgcttgtgtcctgttcaccagaaaaatgttaaacaggacagagacatggagaaaggctaaagaattc

SEQ ID NO: 204307 - DNA, 1000 bp, Homo Sapiens
ttgggcacatcagcctggtaccactggggaagtgaggcaggaaatcagctgctaattagagtatatattaacatgctgcaaattaatcaggaagagcacgtttagtgtcattttctaaaagagaattaaaattaagaggcatcaggtgaaactaaatttaacagaaaatgagagatatattcctcctgttaagtatcacgtgctctgtgagcacaggcgaagacaaggatgtctgcagctctctgggtatgggaaaaaaatgattctggactaccaatctctcattttagtgtttagtggacaggactggctacagaatctgcaggtcccagtgcaaaataaaaatgtggggtccttgtttaagatggccacagacagaagagtattaaaccaagtgcagggccctgtggaactgcatgaggttgcatgtctgtgaagctggccctgttagtggaagaaatgttgcatactgaaacatacaaattgagctgaatttatggctatggttgtttctgaaaattactttaccttaaattgtgtcacagaaagggggaaaaacagcaaccacccacctggactctccaatcaaaaacaacaaaaaaaaacccaccctggaaggctgaggagccagctaattcccatctgctgctgtgtgccactctgcattcacccttccgcccaatgcctggactggagtgaagaataagatcctagtagcaagcagattaccttcccattgacaacagtagtttacaattgaagagcactgtacggtgtagacctgtaaactttaaaaattatgacccatattaacaactatgttttatattgtacctagtcccccaacccacacacatgtaaatataatggaaacgaaagtttcatgaaacaataattcacctgactgtgatatcctttaacattttctattcaatttcatttaaatgtatttatttcacttttttaaagatgctgctcatgaccccatcatatggaattc

SEQ ID NO: 204308 - DNA, 1000 bp, Homo Sapiens
cccatcctgcgatggagttgggtggatggggtattcattaggaaccaactcttccagaaggactgagaggagagggaacagtgactgctacaggggacaaagccccggtcatgggggccttgagcgtggggcctgagacaggtgttttgtgtcagactgaaatggccaagccttccttcccagcccggcaccacccagtgttgcctgcggactgcctgggcaagggtgtaccctgggcagggctgctccctgcagctgaggcaaaccctgggcagatgacatctggaacatggagtcctccggtggtctgggggccttggggggatctgagctgtgcaatcccgtatccccacgtgtgactcagatccacttcatgcccagtcaaggagcagcccctgcagaattctgcaggcctctcttcctggggatgacttggagcaaaagggctgtggggcacactccaacccccagaactgcagttgtaccagggccaccatcagttccacccatatccatcccaggtccccctgtcctcagctagcacaactctggccttgtggcctgcccggttgtgtgactgtctccgcccagggtcaagccctcggtctccatgccctttttaggcaaggccgttgcacccctcctttcaccctcacggttggccaggggagcaccatgaggcacccatgtggacacttctccttcctccctagttgtgtcgcagcagcttgacctcctcctgaggaccaggctcaatctttctgccaggatggtgactgtctctgtgcctgctggcatccaggtggtggccacagcttagagttccatgggactcttatggtgtttcttggggaaattatgtctcctttggggaccaggaccgtaaccctgcagaacgaagaggtaatgggttaaaacaccaggtgccccaggaggtctctgcgagttgacagtcagtggcgccattcttgccactgcacagtcactgctccatgaattc

SEQ ID NO: 204309 - DNA, 1000 bp, Homo Sapiens
ggctcttttaattttttaaagtgccaaatgacaactatgtctttcttttggtcctggctcttaataaacaacaacaaaaaaattggttatttgtccccacccatagagatttggctttaactggtcccaaatgatgtgcaggcattggtatttgaaaaaatattttttgacgatcctaaggctcagccagggttgagaactactgatttaaactgtgaatctttgtgaatctttgcctctatgacatatttagtatctgtgatttatctgatgccaagtctttggtcaagaatgcaacatccaattataacacagatcccacgggtaagaccagttttaggattttccatgtggtttccagaaatgtactgcagtattgttggatattttatacttggccgatgctccaataccctcaaaaaaagtacctaggagagacctgtttccttgatgtttgtagagattgtgggagtgcccaagaaaaaatcacaatatgggtctcctacaaaagcctaatcttttattatcagtgagacatggtaagaagagtagcctgaacaaggaaaatgaagttacccaaggaatctctgatgcctatgttgaaagaggggagttgtgctgctaagacaacagcccctgtccctagggtactgggactccaggtccctccagcttccctgcatccctatccagcaaggggacctagaatcagtactttccccaccactgctctattccaaagcacgaggaatctgatttttttgaactctaagcaaagattcagatgtgagaagatggagtcttacctgattaaagccaggagaagagactattctacataaaggcagagatgtggatagatggatgccatggcatcagtgagagaagcaagagtgggccaaggaaccaagagagttgagataatgtccatttggcaagaaggaggagaatgaagagacaataacgtctcagaggcttaaaatgttagtgattcaagatc

SEQ ID NO: 204310 - DNA, 1000 bp, Homo Sapiens
ttatcttctttttacaagataagattaatctatttttaaagttaatacaccactggctttatatccttgtcgtaggcttcgtgaataggttaacgcctctttgtgttgcattatttactgtgcagctacattcaaaaattcaatgaataaactgaaattaataactctagaagggtgaaaagtgatagtattcacactcaattacagaaatgatccattacattaatataatagtgatgctatccaaatgcaatatgttgaataaaaataaagtgacaggctaacaaaattttagcttttgagtctgggaaggaagataaatagttagaaggcatggttaatagctcaaatgaatgtgctataagcccttatttcagtgtcaactctttgcaaaggacaccaggcaagtgaacttgaatatccatttgattaactagcttcttaagaactgaaataagcttttatatgctttggaaagaattgctggcaaaaaggctaagagggtgggttttaacggaggtaatcctctaataaattatgccttagcagttagaaatatagaaaagcaagataaacttgaagtaatcctggtaagtcctgttttattcattgtcttcacttaatagatactctggatttggattaaactgtgttcagtcattaccctgagaaatcctattctttatgtattctttttccctcttcttacccagttaatgagtactttcttacctgtcagttgtgaatgaagtcaatgaatgggtggagtcctgattatttaattaagatcatagatctgtaaggagcctttatatgttctataagtggtgactacgagctttgcttggacatcagattcacctgtgtagcaagttagaaatatgcatacctagatgtctctctcatagatatttgttctgcatatctgagaggagccaggacaatagtatcttttaacaagcttcactgttgactatgatgtaggaacaaggttaagatc

SEQ ID NO: 204311 - DNA, 1000 bp, Homo Sapiens
tctgtgatcttacttgatgttttctgtacttgaatttttttttctgttgaattaagatttcctgtgattttaaagttatatattctgtttctgtttgtctgggagttactctaatattttaatgcacattctttgtatttcttatacagagtctagactttattcctcccccaaccaccacctgattcccctggagtttttttgtttgttttttgagatggagtctcgctgtgttgcccaggttgaagtgcagtggcacaatctcggctcactgcaagctccgcctcctgagttcatgccattctcctgcctcagcctcctgagtagctgggactacaggcacccgccaccacgcctggctaatttttttgtatttttagtagagacggggtttcaccgtgttagccaagatgatctcgatctcctgacctcgtgatcccgcctgcctcagcctctcaaagtgctgggattacaggtgtgagccaccgcgcccagcctttatttttcttttgtaattgaacgacattgctctcttattacacaaaacatggcagttctcagcctgtcccttcaatttaggcgtgcttatccataacagttttacttcccctggcagctgcaggatctcccccatcgctgcccacctgcagtcattctgttaggggtcttctcagggtctggtccaataagagttccctactttcgagggtgcctgtatatttttgtttttatttcattatcttgtctgtattctcattggattaggttaggcctaatttaaaataagaaatgagataataagttgtaggacaccaactgctatttattttttttctattcaagaccatgttaaacaacatttagatattactcatgccagtttcagctgtgacatttttcctcccgctcagccattttgggagcaaagctatcagtcactacttcagaaagaagaggtgttcgtcccttttaattcccctgggcagggcacttagaattc

SEQ ID NO: 204312 - DNA, 1000 bp, Homo Sapiens
aagaaattgagagatgtactttcttcatggattagaagcctcaatattgttaagaggtcagttcttctcaaactgatttacagaatcagtgcaacatcgatcaacattttagtaatcttttagttagagatcagcaaacagcaaaggactacgataatccttcaaaacaatttctttttttttgagacagagtctcactctgtggcccaggctggagtgcacgatcttggctcactataacctccacctcctgggttcaagggattctctcgcctcagcctcctcagcagctaggactacaggcgcatgccaccacactggctaatttttgtatttttagtagagatggggtttcaccatgttggcaaggctggtctcgagctcctgacctcaggtgatccacccatctcggcctcccaaagtgctgggattacaggtgtgagccaccttgtccagcccaaaacaattttcaataagaaaatgaagttgaagacctacacaacctgacttcaagaattaaagctacagtaatcctgacggggggtatctggcataagcacagacacacagatcaatggaaccgaacagaatccagaaataggcctgcaggtacgtattcgactgattcttgtcaaaggtgtgaagggaattcagtggagacctggtgctgcaatgactggacgtccacaggggaaggaaatgaaccttcccactacctgaccccttctgcaaaaacgagcccaacatgaaccatccactagaccatcagagcaaaactgttaagacttttgcaagaaaacacacacagactcacagacacacacacacagaaacacacacagacacacagacatacacacacagacacacacacagacacagagacacacacacagacacagacacacacagacacagagacagagacacacacacagagacacacagacacacacacacatagacacagtgttgccccatcctggataggcaggaattc

SEQ ID NO: 204313 - DNA, 1000 bp, Homo Sapiens
attaacattaatatttgatgtttattaattaatattgattaatattaatataatattaatattaatagttgatgtttagtaattaaaattaatattttatcatatcaaacacatgttgcaattaatgataatatgaatattctaagacataaacaggtaaagattacacaacaaaaattccaaaagaaaaccgtgtaatgacgaataagcgtataagacatttgcaataccaagagtaatctaaaatatccaagtaaaattaaaatgagaattttcacttaccaaatagctggatattttttaaaatgatgatactcagaagtaaataaattatgaacggaatgcctatatgaagcgggtgggaaggtttaatctgcaggttctttcagctgatgctaatagaaaacaactaacaaagtctaacagataagtattgttgtgtatcatgaaacagccttggccaggcgcggtggctcatgcctgtaatcccaggactttgggaggccgaggcggtggatcaccagaggtcaggagttcaagaccagcctggccaacatggtgaaacctcgtctctactaaaaatacaaaaattagccaggcatggtggctggcgcctgtaatcctagctacttgggaggctgaggcaggagtatcgcttgaacctgggaggcagaagttgcagtgagccaagattgcgccattgcactccagcctgggcaacagagtgagactctgtctcaaaacaaaacaaaaccagaaaaaaaagaaaagaaatagacaggataggcagttctgaactggtatgaaagcttgaagatatcacccactaggaacttcagtctgtctacttttttttcactagacatatcttttagcttcatttttggcttcaagatcgcaaacggatatagcagaattttgtagctgtatagttcgttttcttatcactaagtaatagctaatttgtttttatgatgtttaatttacaaaaacagaattc

SEQ ID NO: 204314 - DNA, 1000 bp, Homo Sapiens
atgaaacgagtaagtataatatatggttttatgttcaaattatgtagtagaggctaattttttcaatttgtatttaagtataatgagaataacaagagtaacatttactgagcaatttatatgttccaagaactgtgcaaatgatttacaggtattgtatcatttactcctctgtgtggtagcactattgttatgttcactctgtagttgagatgtagagatgtagaaaaacaatttaatagctaataaggaaagctgctgggttttgaacctagaggtcaaacacccaatacacataacctaaacaattattaaatcattagattttaataatactttcaagatgttactagttaaagattagatatatctattacagatttttaaatgagtgcattgattttatttctccaagtctttgtatacaaattatttaggaattttatttaatagcaaaacacttcaaactatttaattttaaaagtagttttgtggaagttttgattaaatacggtggattacacatgtgtgttaatctctgcaaaatagtctgtgctattttgttacacagcatgaagtgacaaagacagcggaagttagacctcaggtctctttccctgccctaaataaattatagttaagaagaaagcaagaaaatgattgactttttttttttttttccgagatggagtcatgctctgtcacttaggctggagtgcaatggcgtgatctcagcccactgcaacccccgcctcccgggttgaagcaattctcctacctcagcttcctgagtagctgggattacaggcgcccaccaccgcacccggctaatttttgtgtttttagtagagatgaggtttcaccatgttggccaggctggtctcaaactcctgaccttgtgatccacccatcatggcctctcaaagtgttgggattacaggcgtgagccactgcaccaggccatgattgactttttatattacccaagttatcatgacca

SEQ ID NO: 204315 - DNA, 1000 bp, Homo Sapiens
acagatgataagtgctggagtcaagatgagttcttgttcttaaccaatatgctatagtccctttctttcactcttaaacaaaccagaaagcattacaatttcatttgagaacataacacatacctatatcgctaatgtcctttgcatgcctatgtacaaggacagattttttaaaagatacatatcacagattagaaaaaaaatacctccagtcaaatagcttatgataaagccatatttatagagattgcagaaaattgaagccattatttaattatgtacctctactgcaacacatatatattttccaccaacctaaaaatgccatatggttgtagaacaaatgtcagtagaaattggaggtagaaattttccacattttctgctaagaaaaaggtcatgcatatctcaattgattaagtatattcttctggtcatacttttttgttgttgttgttaaacctaaaggcactgagcaagacaggtattatctcatccgccactgagtcacaaaacaaaactagtatatttttacttaaatccttaactaaccaaaacttatttttattaaaattatcaaccaaaggcactgactgcagtagtggtatttgtggtttcatgcagtgacaataccaaatattgccccaggttattttcactgcttttatttatttatttatttatttattgagatagagtctcattctgtctcccaggctggaatgcaatggcacaatctcagctcactgcaaactccacctctcgggttcaagtgattcttctgcctcagcctccccagtagctgggattataggtaagcgccaccacactcagctaatttttgtatttttagtagagacggggtttcaccatgttggccaggctgatctcaaactcccgacctcaggtgatctgccggcctcagtcttccaaagtactgggattagaggttgagcccccgcgcccggccaaaacatgtctatttttgaaaaatgaattc

SEQ ID NO: 204316 - DNA, 1000 bp, Homo Sapiens
gaagaacattgtaactggaagttgttgtctcttttttattaactcattgaagtattgctgcagaggttgtagtgcttcagtgatcatatgggtgactttgatactgtgccccattaaggatcatattctataattttgacatttaatgtccgtgccatttgaaacacttcagcagattttggtaatggccacgttactgattctgcttcattttcttcttcatcttcctcttcctctgtagatgactctaattcttccatatcctcattattaacacttcttgatggccatcagtatgcccttctacttcttcatcaagcatattggcaaatccttctccaccaacttgtcttgctgtgtgattttcctggcttctctgctgatccccaagaagcctttaaaatcattcataactttactccaaacattcttcagggagacatctacagtttctggttttaattcatcagttgcagctttgatgaatgttactgcatcagcaatagtgatttccagcactgtattatgtcatgttaggggctgcatcgattgctgatcaaatgtgattaaatactaggcaagtgtatgtggccttgactgaccagatgatgcactggtcaagggactgaagcaatgaggttatatttgcaggtcaaagtaaaaccttgacattttcattttcatagcaaacagattcaggatggtcagctgcattgtctattattaataggactttaaatttcaactgttttcttccaagtagtttttcacttgggagatgaagcattggtggaaccattccataaacaagatagctgtcacccatactttctaattatgttgccagaatttgggcagataatttttcattttttctttgagggcacatggattcttcactttgtacactatgcttggctctgtcatatgccctgcagtgtcaccacacggtacctgagttaatctgtccttccatgttttatgccttgatgcctccttt

SEQ ID NO: 204317 - DNA, 1000 bp, Homo Sapiens
gaaggatgtttttagatatactattataggataaaagatttttttcttctgcatttcaaatatgtcatgccactctctcttgctctgtaagttttctactgaaaagtctgttgccagatgtattggagctccgttgtatgttatttttttcttttatcttgctgattttagaatcctctctttatccttgacctttgtgagtttgattactaaatgcattgaggtagttttctttggcttaagtctgctcagcagtctataaccttcttgtgtttgaatgttgaatttttctctacatttgggatgttttctgatattgtccctttgaataaactttctacccctgtctctttctctacctcctctttaaggtcaataactcttagattttccattttgatcctactttttagattttgttggcatgcttcattcttttttattcttttgtctcttctgactgtgtattttcaaatagcatgtcttcgagctcactagctttttcttctggttgatcaattctgctattaagaaagagactctggtgcattcttcagaatgtcagctgcattttttaactccagaatttctgcttgattctctttagttatttcaatgtctttgttaaatttatctgatagaattctgaattccttctctgtgttacattgaatttctttgagtttcctcaaaacagctagtttgagttatctatgtgaaacttcacagtattggtcccttgtgtcttgtttagtttgcttcatgaggtcatgtattcctgtacggtcttgatacttgtggattttcactggtgtctgggcattgaagagttaggtgtttattgtagtcctcacagtctgagcttgtttgtacccattcttcttgggaaagctttccaggtatataaagtgtcttgggtccaaaccccaataatgctatggtttttgcagacttgtagaggtaactttgtgttggtcttggataagatccagcagaattc

SEQ ID NO: 204318 - DNA, 1000 bp, Homo Sapiens
atttctttaatggttaaaatatattcaggttagttttttttttagttttgctgagttacatttttggaggtgattagtcttctctctgtgtttttgtagtttttgttgctgctgttgttcttattgctgtcttacttttagtctctgtctctcatgctgtgcctttggttattcctagagtggtttatttgtgccttctcaatttgggttcttttccccccttgcaatctatgttgactaaatttgtctattttatttgttgtcttaaagaaccagctgttggatttgttgactctctctatttcatacttgttttctatttcatccattttcctcttatttcttgtgccttcatccttctatattctgtagttttacttggtttttaaaattttatgtcttcctgagttttctgctttgctattaagtttgaacatttcttcttctccgaaataaatatgtattttcttccaaataccagtttagctgcattcctgatatggtttgcatctgtgtccccacccaaatctcatgttcagttgtaatccccattgctggaggtggggcctggtgggaggtgatttgatcatgggagtggtccttcatgaatggtttagtgccatcccctcagtgctgttctcgtgatagtgagtaagttattgtgaggtctggttgtttaaaggtgtgtaacacctctcctgtctctctcttcctcctgctccagccacatgaagtgctggatcctcacctcaccttctgccatgtttgtaagtttcctgaggtctccccagaagcctggcagatgccagcatcacgctttctgtacaggccgtggaactgtgagccaattaaactccttttctttataaattacccagtctcaggtatttctttatagcaatgcaggaacaaactaattccaaagttttaaaatataatgttttatcactccattctaaatatatgtatgcatatatatgcatatgtacatactaagtga

SEQ ID NO: 204319 - DNA, 1000 bp, Homo Sapiens
aagtctgtgcttatggctgtcttcctacctctagagagagcagtgttattggcatgccccacctctcagaggaagaacaccctggggttcagtgtctccaagacatgactctgttccctgaggggagggcagggacaggagagatccagattatggagccctgaatgggggaaggaactttggaccacacggtggtagccttgggtcactttggctcatgggtggggagggtctgaagggtgccagcttccacgttacctactctgccagccaaatctggaactacagggaatttcagtgacatctgggtcttagtgagttattatttcgaagctgaactcactgagcaaaagggaaagttgaggaaaacctaccatcctggggagaaagtctgattcagtgaaactaacactggacctggaagcaaaaaagacacattggaggctcatttataattgagataatactatccaggttactgggttacaagaaggatacatgcaagtaaatgtgctgaaacacagaaaatgtttaatgaacattggtcaaaattgagtctcactctcaaatgttaaaggaagaagagcattcacacccctccgcctcttcctaacattagatggtgtcccacaccccatgaggaactcagcaagtgccctgagatggtgcttataaatttgcaccccaaacttagcatgcaggcacccacttgcttggtgtgaggctgcatcatttgctaaatatacatatggaaaaagtctatcacactcattccatgaataacacaaaggccttgatttgttcctccacgtgatgagcatgcgtaaggtccaaaattaacattgctgtctggctggggagtgtatgtgtttttccaaaaagagaaaacttctaagatcttactcagccctaatcagaatgtctaatgcacagtgttcgttgaagagaaacgagaaagagactaaaactaaaggtcgctccgttgtggagtctcaaaaaa

SEQ ID NO: 204320 - DNA, 1000 bp, Homo Sapiens
gacttttactctataggtggcttgtggttgttaaaagggagttgaacaaaaatgcagctgtgctcagcagccaggtgttgttaataaaattggttgcaaacagaatccctcaggcttggctgcacattagaatcccccagggagattcaaattttccaatgcaaaggccccggccccagatcaactaaatcagaattccatgtcctcagcatcagtggttataaaaagctcccaggtgagtctaatgagtagccaaagtttggaaataccagtttagagaaacttctatgtcccagtcatgcccatccccactccctcctctgggcctcagtagcagttcacttcttttattctacttagtctttttctcttcaccaccaaagcatttagaaaataatgaatgaagaatgtaagcctctgggtgtattcttagggtggggacaggaagtgaggggtggggaaggaagaagttacatgcatgatctctcacactgctaaaactatgcaaagtttgccagaatggatattaaactgaccccaacatcccccagtttaagttgcaccattactgcagaagaatcatagaaagcgagaacatggaactctagaaggcaggcagacaaagcatcagagaagagatttaacatggcacagcccacgatcttcccacttgcaatattccaaacaaaaaaaaatacccccaaactttgtgtccgtaagtggaagttctaaacctgtgtctttcgaggcaaagcagaaagggcaccaggtgttctggtgaagagttaatctgcccatgccccaaatcaaggtgagatggagaaggcagcagcagtgcaatccataccagggctcttggcctgggacccttccttgggtgggtctgagcctgcactggaaccaggtgagaagagctgcagaaggcaggttgaaggaagggagccagggtgctcctcacatgctccctctgcttaccttttctctcctgggttaggaattc

SEQ ID NO: 204321 - DNA, 1000 bp, Homo Sapiens
gtgcaagaagacatcctatagaatatcaactatgcatctataatctaaactaaatattcatattaccactcaagtgattctttttggacagctattgcactgagcctactggcttgatggagagtatacatggtgatgaaaaacatacctcttatattcttttgaaactaaaaacccccaaattacaactatgagagaaaatatttccaatcccttaacgaatatttatggaaaattgattgggtgttaaacagtatttggtagtttggggaatgatatgattcaaattcatgaaataaatatggtaatatctcactttgcaagaagtttcttctccagtaacttcattaagattgtagctaaccagaaaataaaaagtcagcaccttcactgaacttcatatactatagtcaacacaaatctaagcatttctatcattagacaaaactacaacatgatttattagacagatcttcaattcattgcagattgcaaacagctaactagatggtgctgtttaggaaaagattattgtgttagatactgttcattcaacatatttattttatgtagaatttatgcatgcataagaaaactttctggaatgttttaaaactgaatgtaaaatgcattcagaagttctaaaactttctggaatgatggaagtgttctaaattctaaattagatggaagtgttctaaattagtggttcaaaatggattaaatacttaaatgtaagatctgaaactataaaactactagaagtaaacataggaaaaaaacttcgtgacacttttaagggcaataattattttggatatgacccaaaaagcacaggcaacagaagtgaaaatgggcaaatgggattgcataaaaataaaaatcttccgtatagcaaagtaaacaattgacagagtggagagaaaatttacaaaacgggagaaaattttacaaacatacatgtgataaggggttaatgtccaaaatatgtaaggaattc

SEQ ID NO: 204322 - DNA, 1000 bp, Homo Sapiens
ttaacttctttgtcattggtttgaacttcctcctttagctcggcgtagttggtcttctgaagccttcttctctcaactcctcaaagtcattctccatccagctttgttccattgctgctgaggagctgtgttcctttgcaggaggagagacactctgatttttagagtttctggtttttctgctctgttttttccccatctttgtggttttctctacctttggtgtttgaagatggtgacgtacagatgggttgttggtgtggatgtcctttctgtttgttagatttccttctaacggtcaggaccctcagctgcaggtctgttggagtttgctggaggtccacttcagaccctatctgcctcagtatcagcagcggtggctgcagaacagcggatattggtgaactgaaaatgctgctgactgatcgttcctctggaagttttgtgtcagaggattacccggccgtgtggtgtcagtccgcccctactagagtttgtctcccagttaggctcctcgggggtcagggacccacttgaggaggcagtctttccattctcagatctcaagctgcatgctgggagaaccactagtctcttcaaagctgtcagacagggacatttaagtctgcagaggttactgctgccttctgtttgtgccctgcccccagaggtggagcctacagaggcaggcaggcctccttgagctgtggtgggctccacccagtttgagcctccaggctgctttgtttacctacccaagcctcagcaatggtgggtgcccctcccccagcctcgctgctgccttgccatttgatctcagactgctgtgctagcaatgagcgagtctctgtgggtgtagcaccctccaagccaggggcggtatataatctcctggtatgcatttgttaaatccattggaaaagcacagtaatagggtgggagtgacccgattttccaggtgccatctgtcacccttttctttgactaggaaagagaattc

SEQ ID NO: 204323 - DNA, 1000 bp, Homo Sapiens
tgcttaagattgaacacacaacacaggctcatgatactacatctctaggacgaacagtgcctaccttatgcaaatcaccagctaccttctgtctttcattttgttcagttctaagttttgtgagtgtttcatttaactgtgccttcaactgtaaaaataaaggaacaccacaattaacttaatttgcatcattctttgattatgctgatacctctaggactgaagaatgaatgggactgctaacagttattatgtacagtggattagccaatatgctgcaccagatgtatagaaaggctaagcagtagaggttcccatctgtaaagctaaacataagaaaagccacagaaatgaactacagtttagagtagaaaactgcaaatgcaaaaacaaaaccatcaaattccagtaaagtaccttttaaagatatcactatttataacagtcactgaaattatttcaaattaaaagccaaatagatactttacccgttagtttttaaaggctttcttaatctatacagttcaattaaagagtcaattatacaatatttttaaaaacactgaatagaagactacaaatccagtcaaattaaaactcccaaaatactgaccatcgtttaaggcttcactaaggggtagtacaagaccacactggcctgtattataccatcaagaaatgctttacgatatacctatgaataacccaatctgtcaaaacagaaagttctgtaactccaatgcgaatatataatgccgcttctctgattttccaattaaatatgagcaaggaaaatgaactatactgctcccaaaaaactttcttcttattctcataaggtaattgtttttgcttcccacccatgggcacttttgaaacagttctagaggcccaaagggggaaagacaaggcagtgacatttaaaattggagggagaattaaaaaggggtggcagtggggcggagggaaattccacttggaaattttatctgaggaattc

SEQ ID NO: 204324 - DNA, 1000 bp, Homo Sapiens
ctcaagtaatcctcctggctttgcttcccagagtgtagggatcacaggcatgagccactgaacctgcccctttccccccaacaacatcttgactgcaacctcctgggagactccgagtcagaagtatccagttaagatgttactgactttctgaaccacagaaactgtgagataataaacatctattgttcctttaagccttaagtttggggcttttttttttacatcaatatataactaatgtagacacctgcagtccctaagattgaatgcaaaattgtgttacatacacatgagtgtgttcttctgggaaaagagtccataaacttcaaaagattctcaaaggaattcaagacccaaaaagattaagaaacattgcatcagacaataaattgtcaatgagcaaggtcctgtccttttagattgggttttgaaatcacccatcccacaaatacatgataccacttaactagtttttcaagatatttcttgttcaaagatgctcccactttttctttgtgctcaagtcctagataaacctggctaggggcaggaggtatgactcaggagttagtgagcagggaggggtcactgtgtctgggaaagccagcttctcatgcaatttttggaatatgccttggctcagaaacctacctctctaggcacaggatccaacttatatgttcaagatgcgtgactgagcatgtgaaagtgtcagagggatcgacctcaccattttacatctacttttccagttatggcctctacaatcatcaaagctcattcagcaccatgctcctccaaattctgcatgcgactcagccacactagtatctttcttcatctataagatgaaagtaatacaacataccatgtagcaaactcacaggagaccctagagatcaaataatactgtgaaagccaccaaatgaatattttaaaattttatctcatttctgccaaggtgagatatcaatatataaacaggataaatctttgt

SEQ ID NO: 204325 - DNA, 1000 bp, Homo Sapiens
acatggttttgattttcagattctcttgaaaactggtaagatctggcaaatctgagcctactttgctgctgaaataatcatttggtgctgagtaggtgctgtcctctttagggaaggccttgtactctccagcccttagttcagttatttgtatttccagccaagctcccataaatgattgagttggctatccctgccatatagaccaaaggatcaggctctaggaaagcaagcaggaagatggaaaaccttaaaatcatgtcatttaagaagtgacttcaagtagttgggatattagatagaagagaaaactcaggtgggttcttcgcattcttggagcactgtcacatagcagaggaactggtcttctttgggccaaaataaataactagaaccacgggtagaaactatagacagacagatctgggttccatatcccagctacttttcaaataagcagaactgtctaaaggggaagggggtgcgtttagagatagtaagttctcagttatggagatgtgtcaggctaaattcctgacacctctgcagggagagtgcaggtttgggataggcacggggatggcaattgcagctggcttgtgggtctagaacctgatgccatttgaccaggggccctggtgtctcgaaccaaggggcagttactgaatctgcttttttttttttgagaccgggtctagctctgtcaccgaggctagaaagcagtggcaccatctaggcttactgcaacccctaccccctgggctcaagcgatcctcctacctcggcctcccaaatagctgggactaccggcatgtgccactacaccaggctaatttttgtatttttttgagacaattttgctatgttgtccaggatggtcttgaactcctgaattcaagtgatcttcccaccttagcctcccaaagtgctaggattacaggcatgaaccattgcacctggctgaaactgcttttaataaagtgttggatcataactaaaa

SEQ ID NO: 204326 - DNA, 1000 bp, Homo Sapiens
cataattgtgttcaagaccagcctgggcaacatagtgagactttgtctttacaaaagatttttaaaattatcccaacatgatggtgcacacctatagtcccagttactatagaggtggctgaggtgagtggatcacttaagcccaggagctcaagactgctgtgagctacgatcatgccactgcactccagcctggacaacacagcaagactctgtctctagcaataatacttttgaggtggggccaagaatttttatttcagtaagaagtgtctgggtgatgctggtctgaagactcacactttgagaaccactgtttctgagaaaatgtagaaccaaacccaaagcttagctttgatctcaccaaattactcaactatgcaaacctgcaagagcttttaagtgtctcgtaatcgcttatgagatttatgtactaactataagaagaacagcaacaatgatagaaactacaaccgctatcaccacttactgagtgtttaacacacatcagacatttggcaagcactttgcacccattattttatggaatccttacaaagcccactgaaatattccaattttacagatgaagaaactaaggccgtattatggctaagtttcccaacatccacagtaaatgaaaagctggacccatgtctttcagaatccaaaatccttgctcatgctcttaatagctaacttctccccatcctctcaggtggccaagagcaactcctcatcccaagagaaataatagtctctcttctttggctccttattattttatttattccttttataaaattattgttacatagtatagtgctaagttatttttatgtctgtcaccctcttcagactttaaactttattgattcatttaacaaatattcaaggtatgaattctagcaatgacctaacagagagtttgcattccataaatgcttcttgagctaatgagtgaatgaaatcagaagggaaaaatcagggcagaaaacct

SEQ ID NO: 204327 - DNA, 1000 bp, Homo Sapiens
tgatgtgtgcaaccacaaaaacctgataacagaaattagctgatctaagtggatataaccttccagaaatcatttttcatggatacaatatatttcaaatctaagaaaagaggcgaggtatttgtaataccttgatactgagctttccatcaacttttccatcttgcctcctataagagctagcaatcatgctcagccctcctgcatttgcagctttgtatcttcttttttttttttttttttggagagggagtctctttctcgctctgtcgcccaggctggagtgcagtggtgcaatctcggctcactgcaatctccacctcccgggttcacgccattctcctgcctcagcctcccgagtagctgggactactgttggccgccaccacgcccggctaatttttttgtattttttttagtagagacggggtttcaccgtgttagccagcatggtctcgatctcctgacctcgtgatctgcccgccttggtctcccaaagtgctgggattacaggcgtcagccactacgcctggccttgtattttctaaaatagttatttgtgtgtaaagtttaagtagtaagatttacttaaagtacttctcagaaattgtcaaggtgaaactttcccatcattgccattttgtaactggtttgttagctaagggccttttcttttccctttgttttttcttaattcatttctttattattttaaaacacagagacatggtctcactatgttgcccgggctggtcttgatgagttcctggcctcaagcaattttcccacttcagcgtcccaaagtgccaggattataggcgtgagccactgcacctggccttacaaaacagttttataatgattatttttgagatggggtctcactgtgttgcccatgttacctgtgaactcatgctcaagtgatcctcccacttgaggcttccaagtagctggaactatcggcatgtgccactgtgtctggctttatcttataatgatc

SEQ ID NO: 204328 - DNA, 1000 bp, Homo Sapiens
gctcactgtgaggggcagaatcagtcagtatggaaaccgtgttcatctattaataataataataatataatatcgcggggcctctgtcttagaaaggctttgctcctcacaaggaattctatgctttttccctatgattgagctttttttttttgcgacgagtctcactctgttgccaggctggagtgcagtggcatgatctcggctcactgccagctccgcctcccggattcaagcgattctcctgcctcagcctcctgagtagttgggactacaggcgcatgccgccatgcccggctaatttttttttgtttttttgtattttagtagagacggggtttcaccctgttgcccaggctggtctcaaactcctgagctcaggcagtccacctcccaaagtgctaggattacaagcatgagccaccgcgcccagcctgagtctttttttttttttttttttttttggagacagtctcactctgtcacccaggctggagtgcagtggcacaatctgggctcactgcaacctccgcctcctgggttcaagtgattctcctgcctcagcctcacaagtagctgggattacaggcatgtgccaccacgcccggctaattttttttttgttgttgtttgtttttgagatggagtcttgctctgttgcccaggctggagtgcagtggcatgatcgccgctcactgcaagctccgcctcctgggttcatgccattcttctgcctcagcctgcggagtagctgggactacaggcgtccgccaccacgcccggctaattttttgtatttttagtagagatggggtttcaccgtgttagccagtatggtctcgatctcctgacctcgtgatccgtctgccttggcctcccaaagtgctgggattacaggcatgagccaccatgcccggtctaatttttgtatttctagcagagacagggtttcaccatgttggccaggctggtctggaactcctgacctcagataatccgc

SEQ ID NO: 204329 - DNA, 1000 bp, Homo Sapiens
tctgctgtcagtctaactagtttttttcttggtgtaagttatttattttgttcagttgcttgtaataattgttttcttaattttaatgttttatagttttactatcacaaatctaggtgtggactttattatatttattttgttcaagactgaattattttttaaatctagatctaggagacttttgtttttcattagtattgtagaatacttaatcatgtttaaaaatatggtgtcctcttattttatcctttctttcttctagtggtcccattgaatatatgctgaattttctcattctatcttccatgcttctaaacatttttttcttcacatttttctacttcctttaaaaaatctgtattacattttgtggttatcatttcaagcctatttttcagttcatctgaaaaatgtatcttcagctgtttctaatatgctggttaaaactcagaaactgagttttaattttagtaactgtgtttttcatttgtaaaagttctgcttgtttcttttctcaaattacctttttttttttcctaattcttggttcttttatcatggttctattgcttctttatatccttactcatttaaaaatatatttatcttatggccattttcacatcctatgaaatgtatcttctttatgcattattgttctttcaattacttgttatcttttattatgagatcatcttcagtaggatttgtttgttatgtggagtctactgtacctggggttgtttgtgtgttccttcagaatagattttttgcataagtttcagagcatgcagtttagtgggactttcagttattaatttattcagtttaaatttattgtctacttcacctgtaacttcttgttggtctcttgtccctctgtattttattctgaatgatccttcttccccagttttgtaatttattgtaggttgagaaatcagataatcaagcctatgagaagtctatttaaaaggcaatttcttttgggaaatac

SEQ ID NO: 204330 - DNA, 1000 bp, Homo Sapiens
atccctttgcccaaggtcatgacttaccagggaagcccatcacttgtggctgaatgaggagggcgtataaagacccaggcattttagtctgaagtgaggcaactctgatggacgtcacttcttctgaatctcatggctaggttggctgaagctttgtcggagctgcatccaaactcagcctcttcctctgcccaatcttgctccctctttcctttcacaacagataatttctaattaacagcttgtgcccacacttcaattccacacctgcttctagggggcccaactcgtgacacagggaatggccgtgaccatgggctttggcagctacagtccagtccactttccctgcagacagggaaaggtcaggtcaggcaggggatgatgactccacagaagagtcaccctgataccacaggcttcagcttctcaacactttttacctcccttcttttttttttttttttttttttgagatagagtcttgctctgttgtccaggctggagtgcaattgcacagtcttggctcactgcagtctctgcctcctgagttcaagtgattctcatgcttcagcctcctgaatagctgagtttacaggcaccctctatgcccagctaatttttgtatttttagtagagctgaggtttcaccatgttggctaggctggtcttgaactcctggcctcaagtgatccacccacttcagcctgccaaagtgctgggattacagccatgagccgctgcacatggccaatctcccttctttatcaatgtgacagaaagttgaaatgaagatgaattactgggacatgagatcagattatgtttattgagtgtacactctgagccaggtactaagctaagtccttcacttgcattatcacgtttcattccctcaaacaacctcccagggaggtaatctcattatccccactttataaagccctttgcctctgtcttatgagagttggggcaggcctgagggcaatgagtgatgatc

SEQ ID NO: 204331 - DNA, 1000 bp, Homo Sapiens
ttgttctctctaacttttagtgggatggaaactatgtccttattttcttttgaaaagatgccagcatattgagcaggatggaaacaacaaacatactggatttaacaatgtaagtattttcagctattttttcagaaggcttactaatccttattttttttattttagtgacattactccattatttaattagattttcctcaactggcataggctgtgtcaggcatttatttttacccctgattacaagtgaaaaaaattgatgaagtaacttgcccaaggtcattcgatttggtatttgatggagctggggtgagaatatgggagatcatgaggattctcatgatcttgttatttatttttaaatgtgattttgtcacttcagacataagctcaccatttattcagttacctaaatcttttttttcttttaattgagacagagtctctctctgtcaccaaaatcttaaaactctcaatgggggtttggataaaaagggaattcctcaataggagcattgcatactcttagtacacattcacgctccattttttaaatcatgtctatcacctatccctctatctatcataaaaaaattcctaaggggaaaattcccatccatgtgcttaagaacttgaagaacataaagaacataaaaacaggccatatagaaacaaccaaacgttatcaattctgcagacaatagccatgaaaaatcattccaggcaagatttgctaggtaccaaaagagaatgtgaggctttctgaacaaggcatccaataagggaaacttatttgtgttattgatccagaaggtgaagaaaagggaaaacaatatacatatatatatgtatataataaacatatatttttctaagtgagaatgtctgtttaattatcattgtggtcatcataaaacattttacatggcttataaaatatcccaggatttatggccacttcaggctcagagcttccaatcataatgggaaagaattc

SEQ ID NO: 204332 - DNA, 1000 bp, Homo Sapiens
cgcagtggctcacgcttgtaatcccagcactttgggaggccaaggcgggcggatcacctgaggtcaggagctccagactaacctggccaacacggtgaaaccccatctctactaaaaatacaaaaattatccaggcgtggtggtgcacacctgtagtcccagctacttggaaggctgaggcaggagaatcgcttgaagcagggaggcggaggttacagtgagctgagatcgcgccattgcactccagcctgggtgacagagcgagatgctgtctcaaaaaaaaaaaaaagtgagaaagtggacgtaataagggcaaaactatttggggaagggagtgaaaaagaagggagaagaaagactggatgataactagagggggtttgtgtcttataaggtataccttctcaattaacccaatgatttgagttaaggcttcctaaatggtccagatagctcagagacaccctccacctcttccatggaaagtctctctgaactaacacttccacactctgtgtttagcaaaagctaggtaaaagttggggatacagcttaaagtttcctgcttccttagtgttcaacaacaacaaagtctctctaccccatcatcccctcccctgaaattgttacctcttctataggattcatgaatggaaaaaaaatagcctagtggcagggccaaagaggtgaccttccctaatacatctgaggccttaaggttctccatacatatggtcccagtttctgccatttccctcctttctagtcagaaactaacctgagtattttcccctgagtttcaggtttaggattccagggacatgtcttcacctccatctaatgaagcttaacagccccaatgaggtgcacactcaagccaaacaagatcctgtcttctggctccaaatattctccatcttgtgtaacttccaggaagcctcctaatttataaccaaaccatgattcctcctgtcctcttcatcataaattacccaagctt

SEQ ID NO: 204333 - DNA, 1000 bp, Homo Sapiens
aaagaatgagaggatttgtcacactttgctcttttctaagagcacagggctcaggtcaaatttaagattgtcgatagagtaattatagagataatagggctgtttgtttaaaatcagatcatcgcagaaaaatccagtttgaatacaatttcttttagtgtttgggcatggtgttgtggctcttcagtaactggacatttattttataaaaatagaagtccacaacatagaacctttccaggatgccgttagaatactgcattaatccaacaaagccctcaatttgaatatattatagtgtaaaaagtaattgtcatggtaaagaaacctctcatttatgaccaatttggtaaatattaagagcctatgatgtgtatccagcttattacttacatttttatgaagacaaattccaccactactcatttttcaggcccaacttttcagttaaaaaaaatagtttaaagagctagttcaagtaatcctacaataaatttagaaaggaattttgtgaagaaaaactgttcctttttctaagtctatcttcatctaggttggctttatatgagttgtaccaagtgatatttcttagctgttggataaaaatattctgttatcttccaaaaaatcctgttagagaatactacagccacaggggcatgggaaacaatatacagaattcaagtgataaaaaattaattacaacttaatccctaaaattctttgcaacctatacacataatgtactgagccaacataataagcagtatacatttagataatccatttttaaatattacttctaaactataatctccgtcaattatggaacaagaataaagcatcatttagcatgtaacaatggaagggtgaactggctgggttgcatgttaagaaagcaagtcccccaagtaaaggctttggaagggccctcctgcctcttcacctaccccctaattatgtttctccttcttctctctccacccaccacccagaattc

SEQ ID NO: 204334 - DNA, 1000 bp, Homo Sapiens
gccctcagctcctttccacatgggcctctcagcatgatggctgacagtatggtagcttgtatcatcagaataagcaagcagggacaatgtgagcaagacacagaagctccagtcttttgtaaccttatcttggaaatgaaattctgtcacttttactgtattctatttaagaaacaagtcactaggtgcagccaacactcaagaggaggagatgatacaagggcatgaatagtggacgcagagatagttggcaaccattttagaagctgcctacaacagcatgtggcatattaattatataaagaattgtaaatgggtctataaaataatgtaacaacgtcaatatataccacataataatttgctgcatggtatgctgaggtgcctcaccactgatgattattttatttaagccttttccagtattctctgggagaggtggtatttattatctccagtttacagattgatgttcagtgaggttacctagctatgatgtagcagaactgagactccagtctagacactgctgattctagcacccatacttttaatttctatgtcttgtcagcattaaaataaaattactttttttggagcacttcttctgtgccaagcattatgataagtggtttatatatgttaaccttatttaaggctcgtggcaactctattaagtctccttatcttactgatattacactcgagcttccagattcagaaaaagtactttgaaaaatcaaatatgtttattgttccagagacattaaacaaatattacccaaagaatctctgtaaatactgaaagaaatgaatcatttaaataccttagtaccttaaaaaggtgatatcaatctagcctaggcaacatgccgagattttgtctctctctccccttttttttttttttgagacagagccttgctctgtcgcccaggctggagtgtggtgttgtgatctcggctcactgcaacctccaccttccaggttcaaggaattc

SEQ ID NO: 204335 - DNA, 1000 bp, Homo Sapiens
cagcagcaaattccaagggaagccctggggttatcgcaagctccagccgcctgagttaggtcacgttgccaacttcaacagagcttgacctcaagctgaactccgcattgccaggctgcagagagctaagccaagcagctataacaagtacaggccttcccagccaagcaggagcccacctaaaataaacctgtaacctttccccagaaaatgttgtgtttgtttataaatagcctaactgcgtagcccctagagttcactcatgggagcaggaagagtcaacttgtgttaaaccctcagagcttctcaggtaccccccaaactccaggcctgtactcaccaaaaatggatcattctcttcttggacttcctagaatcccaagacccagggcagaaaggagaatagcttcaattttctagcggctaggaggaatctaactctattttccctatgggtaacaaagcgcctgagttaaagttcgagatttggtataaaaatgatagccacccttaccacgtgccaggtactagcccatgcattgcacataataacacattagcaaacatcaactcatttaatcctcagaacaaccttgtagaaacacttctcaaggctatttacagtcagctctattcccagctgggagaattccggcacagaaagggtgagtagctttctcagctaacaggcactggaggcaagaactgatccaggtattttgaacacagaatttacaccattatattcattctttgcaagcctgggtgatggagcagaagggaattggtgtcaggatcctaagtcagatgtgccaagcccaggcatctccaaatcttgaagtccacagaaatgggagaaaatagcaaaaggcactataggatggatgggggtctcagcagaatgaaggctaacagagcttaggaggggaggatctcccccttcttccccatcctaccgccacctccagcctgcaggcagaatttgattgtaaaggaattc

SEQ ID NO: 204336 - DNA, 1000 bp, Homo Sapiens
gaaggaccataggtaagctgtcctgcctgggggctgtgcggggagtgagtagcaggtgatccgccaagccgtttgtgcattaaggcaaatgggtgagccgccaagctgtctgtgcagtgaggcaaatgccaatcagtggacacagtattgtgcttccaggtaggggctccaggctgacctttttgctaatcaacataaacaggcaaccagtattcattgaatatatggcatgtgccgggcagagtgacctcctcccagttatcctttgaggcaggtgctattatttaatatttcacttcacctttcagatggggaaactgaggcacagagtggttctgtaacggcccaaagtcacacagctgatgggagggtggtggaggtgggccaggcccaacacagagccaccgctcataacttctcccctttcttcctggagcctgtgggtcctgccctcagggggcagcccaggctttgggagctgagagtcaggtggggtgggggatgtggggtgaggtgggggaggtagggctcccctttccacttgctggggatgtcagtgctcctgaggagccactgggctcagtggcacagcttagccccctgtatccagcacacacacaccaggcacctccaagagcagccaaccaagtgggtctgtgcctggtcccacgcaggacacggctgtggtgaggaggcctgggtgcctgggcgagagcgcccaggggacaggcatgatgtgaggccccactccagagtgtttggggtcccggcccttctcccctctgtgccctggggtgggtccttccccatcactgcctgagggctccccatccgcttattattgtcagaggtcatggacgtgctgaacacgtttaagaagactcaagtccactgaaggctgggcacggggtggtgctgcccagaactccataggcccagcttttctggggacttctgcccagggcctcgggtgagctgccccgtgcctgccctggaattc

SEQ ID NO: 204337 - DNA, 1000 bp, Homo Sapiens
tgagatttaccattagcctcatttcagagggaaaaactgaggcttgaagagggtaagtaatttgtctcaagttcatatagtaagtagtagaaccaagattcaaacctagcatgctggctccagagcccctgtgttttttcattgcacttaaattcattactatctcccataggtgttttctgccctcctataaccgcacacacacacatacacacaaacacacacacacaccccaccctctccccaaggacctatctagcagtctctctgtcctttaacagctttattgaagtataatttatataccataaaatttacctattataagggtactgtttgattttaagtaaatttatactcttgtacaataatcacaattataataataattcaactttagaatacttctatattttgccttttctagaaatttcacataagtgaaattatacaaaacatttttatctgactttttctacttagcatgtttttgaaattcatccatattgttgcatgtatctgtagttcattcctttttattgccaagtagtagtccattgtatgaatataccacattttgtttatacaccagctaaaggacatttggattatttccagcttgggctagtacgtataacatggctatgaacatttgcatataagtctttatgtgaatctgtgtcttcatttctcttgggtagatatttaggagtttaattgctgggtcatatagcaaatatatttaacattttgagaaacttccaaacaattatctaaattagctgtaccattctatggtttcaattttgccacatccttgctgacacttgatattgtcagtgggtattaatagttcattatagttttaatttgaatttctctaatgagtaatgatgttgaacatctttttatatgcttattcaccattcatatgtctgctttggtgcaatatatattcaaatcttgctcattaaaaaaatcagtttgtcttattgaattc

SEQ ID NO: 204338 - DNA, 1000 bp, Homo Sapiens
aagaaagttcttctacattcccacttaatcatcttttggatttttgctgtgcatcttaaagaactgccataaattaatgtaggcaaaattaggtagtgactccaatttcaacttatgtttcatatacagactctttggtgggataaatcaataaagctaagtatctggcaaataaccaatgattttgtaaatgacttctgtctataaaaatacacaggagaaaatagaggcaatctcttttctcatggacaatgacaacaaagtaccttcattcaaagctataactttgctctggcctttatcacttttccagctctgctttatgtgcaagggtcttcattatgctgacccacagcactggtgatctaaagatgaaagtatcatacataaaaatttaaagcccccccacctcattgaaacgtctgagctgcaggtttctgaggcatgttaacatagctccttcaaagtgaataacaaattgatttgtcctgagcccagtatcaataagaaagtgttacaagacaagtctctgtattttgagtcaacatgtaccgaatttgcatgtattgctctagttcattcatataatgaccattaatagtctcagcataaagagatacctagagcaagaaagtgttctccagcttttctgggatgcagtgctaacagagttttaatttagcctggaaccaactgtgcttgaagtgtctattgcagacggtatgctttatgtaaccttaggcacacactaatagaagaaacatagagtaggttctgatagttttagagcaaagcaaacaatatcatcttagaaaatgaatatttccttttaattaggtagtgaattctggtaatttgaaattgcttccagaagttaagactagagcctgcacttccagctattccaaaaaagttttaatcacctgatgcttgcttatgtatccctgtctttccaaattatctattctgttatataccatgaaatctgaaccaagaaacc

SEQ ID NO: 204339 - DNA, 1000 bp, Homo Sapiens
tagtaaaagggaagatttccttaggtcaccactttgtgtgttttggattttgagcaatgtgaatataaacttaccaagaggaaaaattaaaagtactttaccttgcaccattgttcctaatgacttccacagtttcttcgacaaaatatcgatccttgacatatgcaaagatatcatcacaaatttcatgtaagcgcgaacgatgggtaaggctggtcaagtataaaactggaataattagtggttctggaaaactctgaagattctgtcttgcttttttttctgactcaagtgcttcctgatacgtcagtccaggtctacccgtcacagcacaactccacacaaggctgttgcacagaatggttcgttcaaaaaagtcactgattaaaaaacaaaaacaaaaacaaaagcccattacctatcatttcacaaattttacattaaaaactgatagcattatcaggttatttttgtgcctttaatgcaaaattttatgtagactcacagaactcaagggtttggtaactggtcaacttataacattaatacaaacataagaaaaagtatatttaaactaaatatttatattttgcaatttaaaggtacatcagtcaaaaccagactttgagttccatctgcttttcagtgaaaaactgaaaactttaagcagctaacaagagaaaagctaaataaagtagtactttatataatgaaaaatcagtcattaaaaagtataaagttcttaattaacatttccattaatgttaatagaaaaatacctattttcagtttgatctctcctgtattttcttgaaactatatgatgatctcatttgtgttataaaaaaaaaaaaagaggaaaagagaaaaaggaaagaaaataaaaggtacctatagaagcataggtttccggaatgtcatacaaaactcgaggtaacaggcagtagtgataagactggggaaccattctattcagtgctcttctattctgctggaattc

SEQ ID NO: 204340 - DNA, 1000 bp, Homo Sapiens
aatggaagaacgaataaaagcaaagacaaaacagataataagtaatcaaattggtttatgtactttaaaaaatgtgtattgcatctgtctaccaataaatgtatgtaggatctgtgtggaaaaatatttttttctcaatcaacaatataagttaaactacattggaggaaactggaagagatttttctgttcttatataccagaaatttgttatcttaaatattgtttgaaatagggtgttatgaatgagttagaagcatgtgttgtataaagataccaattttatgactaaaatactattcgaacagaataagatacttcaaagaaaattatgtgaaattatgacttttgtgctatatttttataaaagtagtgagtggctggactaatatttacctgtttaaaaaacttcattgtattccatacccagtgagtggtagatgagtttttgatcactgtatttccacagctaaatggtgccgagccagtattgtatactcaatacatatttgaaatgaaccaatgaatgaatgaattgaatacattgtgttgcttctcacagatgtgtttatgaggtaatgttaccttgtctctggtgttacttttacacataatgccctttccaaccagagaagtaggtgatacttacatcttagacaaagtatcgtatcagaaatggcttcatgagtgttttcatcaaaactggaaaatggttagccatcatcctccatatgctcttttcatatactgacaatctctttttgtcacttttgacctcattccaactaatttcagtcccattacgaattttccacaggatttttttccaggtttttgtaacctggagaaaagccccacagcagaaaccaggggccaagatttccagtctctcttctgcagaggactccctggatgtggtggtggaaaagttactgcagctctgggctccactcactgattgaaacaaataatctgtagcgtgcttctcattttagaattc

SEQ ID NO: 204341 - DNA, 1000 bp, Homo Sapiens
ccccatgattaataatcttcaactgttttctattataagattttatgactcagatttacatttctggaaggtaggttctgattgtcttatcttaggtaaaacaacaagtctttttccagcaggctagaggacactttgattagcagttacagtaagattgcacaaaatgagatatgggtacttccctagagaaatcatgtttttcttacaagaataaaagaaaatagaaatgaactccatagtatcttataaattgcagaaattaagtgtgagtaaaatattacccagtcttgcaagatttgtaatctaagttgttaaaatctattgatagcaaaattctttgcgtcatcttaataatatcaaggactgttagaatgcctaaagctattttatatttatcttctaaactcttgcattttaaactgaaaaactactaaccctagaactatagcagtgtatcaggggaaacaagactagacaagtggttgcatttttctagatttctcctaccagcagaataaagatatgattgagatttatttggaaattgactccattctaaatcttatggaatggggaaggttgagggatagataaaagtctttgagtacaaaatattatccataatattacttcaatgtaaatccccacataaaatattaaacaaaaacctatctaatatccctggaataaaatcacaagttataatacttctattaaaatatagacatgaatatgtcttccaaaccaaccagtagtatactttctccactcttgtttatttttaaataagaagggaaatgaaactgcatcttaggaattttaatataaaacatgtattcactacgaaactcattggcaaaagttgttcaaaattctctttcaaaaaccacttggcaaataaaactcttatctgctcttctcacaaaagaaactaaatttctgttctctcctgccctttgaaaacagataattgaatgagagattcataatggaattc

SEQ ID NO: 204342 - DNA, 1000 bp, Homo Sapiens
tctgggtctaattgcctgaatcctcataagaaccctatgaggtagggatcattattcatcttgggtgaggaaccgaggcattgagagattaagcaacttgcccaagctcacaactattcatccttttcaatatatacccgggttccgggtgcagtggctcacacctgtagtcctagcacttcgggaggccaaagcgggtagaatgcctgaggataggagtttgagaccagcctgggcaatgtggcaaaaatcatgttgatttaagagccaatagtaataataattaataaagccctaataataataaagatgatgatgatagctaacatctactgagcattctactggaccacaattgtgcaccaccatacccagctaattttaaaattttttgtagagatgtgggtcttgctatgttgcttaggctggtctcgaactccttactccagtgatcttcttgtcttggcctcatgaagtgctgggattataggcatgagtctccgtgcttggcctttctcctcattttataattgagaggcatgtgggcaggagtgaagtgtcccggctaataccactcaggtagttcaagacagagccaggactaaaatcaaagtctgctctttctacctgtataaaagaagaaactcagttagaaccatttattacatacttactgaaaactgaattaatatctatactaataagtgtcctggcagggatttgataggaaagaaatagaatgtatgattttatgatttctaccatcccaaggcttgtgattttcctgaggacacacaggatgcataaatacaagccttgatggacataatcttaccttggcaatccagcacacacgtaagaacagagggaatgtgacttccaggatcacctgcttaggatggtgataatccaggaggagatagacaggaggagtgtgaattggtacagagaaagtaaaaagcatttgtgagacgaagtagcaaacagaagccatatctgc

SEQ ID NO: 204343 - DNA, 1000 bp, Homo Sapiens
agccagcccctggcctggggcgccacgcggtcctgcaggcacgcagggtggaaagtccctggctgcacctttgagagctctggaaagtccctgagaggagccgggtttggtcatgtgggaggggcgggcactgctctggaataacttggctgtggcctttgattttgttgataaaacctctcactggctgtaaatgtcacacatggggacggaaatcaacccgtctatacagttgggagccgctctgcccctcggagccgcctctctttgctctccgggtgctcggagtgtgctgctagttggggccttattgtaaacacagtacggaggctaaggctgcctttcctccttgatggtcggaactttattggaaaaggggaaaatcctgcttagcttttgaatgtttgtcctttgcaatgatgcctttctaggaactgaatgattttatttatttatttttatttttttgagacggtcttgctctgttgtccaggctagagtgcagtggcgtgacctcggctcactgcagcctccacctcccaggttcaagtgattcttctgcctcagcctacaggcgcctgccaccacatccggctaattttttatatttctagtagagatggggttttaccacgttggccaggctggtcttgaactccttacctcaagtgatccatccaccttggcctcccaaagtgctgagattcctggcataagccactgcacctggccaaatcgaataattttaaaactttaggtaaatgttgatggagtgcttgctgagtgccaatagcagaactgaattccccagtgggcccctgagctactcgttctggcagctggatgcgggggtgcggggagactttccagagaggacataggctggctgcacgagcagcggaaaggccaggaaaagccaagtatgctcggcctcatggacattctagtgacattcagagggatgacgactgtatttgcgtcaaatgtgtagtttgaattc

SEQ ID NO: 204344 - DNA, 1000 bp, Homo Sapiens
tccctcgtggcttcccttggctaggggagggagcaccccttgtgcttcccgggtgaggcaatgccccaccctgctttggcttgctctctgtgggctgcacccagtgtctaaccagtcccaatgagacgagccggattcctcggttagaaatgcagaaatcacccgccttccatgttgatctctctgggagctgcagaccagagatgttcctatttggccatcttgccaaccacctctataatcatatttttctaattaataatataaaatatgcaatgatatatatttggctggccatatatatatgtgtatatgagtgtgtgtgtatatatatatagatatatatatacgtgtgtgtgtatatatgtgtgtgtgtatatatatatatgtatctatatatatatatacacacacacatatagagagatggatctatttctctatggccagccaaatatgaatactttttttaagcctatatttcagttaatactggtaatttatgttttcccaggaaaaaattttgattttattcaagttttcttattaccagatggtcgaacataatagtcccttacaattgctttagtgtcctttgtgtttggaataaattttcttttctgatttctaatttggggattgttttctcattttgttatttattcattgactcatttcataaataagtattgaatgcttaacatacagttattattgtaggtctttggaattgtgtgggatttttgtctagttggggagagatagacaatgaccaagtgacttagtccattttgcgttgctgtaaaaaaatacttgagactgggcaatttataatgaacataaatgtattggctcacagttctggaggctaaatccaatatcaaggcactggcatctgttgagggcctttttgctgtatcatcccatggtggaaggtgaatgggagagagaaagagagagagagagaaagtggacaaagtcacccttttataaggaattc

SEQ ID NO: 204345 - DNA, 1000 bp, Homo Sapiens
tgtatattgattcaaaactagtggtaagcactgggcaaaaatggaatagagcttaatggacagccagtaggctcagccatcatattcttgaaaacctagaaaatgccagtattctgggtctcttaaattcattattttaaagtctggatgatctggctgggtgcggcacatcacttgggctcaggaagttcaagatcagcctggacaacatggtgaaacctgtctctacgaaaaatccaaaaaaattagccccgtgtggtagcgcacacctgtagtcccagctattctggaggctgaggcaggagaatcacttgaacctgggagttggaggttgcaatgagctatcacgccactgcactccagcgagggcaacagagcaagactctgtctcaaaaaaaaagaaagtctgaatgatccatattgctggactttgttttttgtttattatatattgcatatatttttattatattttatttggcttgatagactttttggcttaagactcctgctcatagctagcagtgaattttaagaagctagtgctgattataactactcttcatatctgtgtttgcctaagtttggggccattataagtagtttttttttttaatattaatgcttaagaagttaaatttattctataatgtgccatgtgtgaagttgagagataatggtctttttctacatatactccctctcttatttttaatgtatttcgccactttaggattaaactgcaaatatctcatgaagctgctgcctgtatcactggtctccgggcagccatggaggctttggttgttgaagtaaccaaacaacctgctatcatcagccagttggaccccgtaaatgaacgtatgctgaacatgatccgtcagatctctagaccctcagctgctggtatcaaccttatgattggcagtacacggtgagtaccaatatacttcttactgaaccaagtagaggggagagatcttatgtaggcctagaattc

SEQ ID NO: 204346 - DNA, 1000 bp, Homo Sapiens
agcttggctggacgtggccgggagtctgaagaactggctggaacttgtgggttagatgctccagtgtgaggatttgcaaactctgttccccggaaccttaggcttcagcagagcagctttaggacaccctataggggagagggggatggtggaggcagctgatcccactgcacccgctttaatcagagaggctcagctcttactggcctgtacagtcacccctcagtatctatatgggatcggttccaggacttccctcaggtaccaacatctgcagatgctcaagtccctgatatataatggcacagtatttgtatataatctatgcacatcctcccatatacttaaaatcacctctagattacttataatacctaattcagtgtaaatgcaaagtaaatagttgttatactctatcgttcagggagtaatgacaagaagcaactctgtacttgtttagtacagatgcagttttttttttctgaatattttttatctgctgttggttgaagccacagatgtggaacccacagagaaggagggatgactacatttacggttctaggtaatgctttgcttgaagaaaggtttctactgtctaaacaagcttgataataactccttttaatcgcaacagaatctctgggagcagggtccagaaacttgcatttttcttcttcttcttttttttttgagatgagatcttgctctgtggcccaggctggagtgcagtggcatgaccacggttcactgcagtctcaaacccttagctcaagtgatcctcccatcccagcctcttaaatagttggaactacaggcacgtgccatcacgtctggttaattttttaaactttttgtagagatggagtctctctgtgttgcccaggctggtctcaaattcctgggctcatgcgatatcctcctgccttggcctcccaaagggctgggattacaggcgtgagccaccatgaccggccgaaacccgattcttaataagctt

SEQ ID NO: 204347 - DNA, 1000 bp, Homo Sapiens
agttaaattgcaatgaaaataaaagtaaaaaagaaatataacatgcacgtttttatcataaaatactgcacattttattatattccttgtatttattataattgatatattgatttcagttactcaataatattaattgtgctcgtttgtccggttttctaaaaacgctttaaggacaaaggtaaagacaaaggtggttacagatcttgctaacgtcaaaaataatatatacgtgggccaggctcagtggctcaagcgtacaatcccagcactttgggaagccaaggcaggcggggtcccttcaggtcaggagttccagaccagcctggccaacatggtgaaacccagtctctattaaaaatacaaaaattagccaggcgtggtgattcaagcctctaatcccagctactcgggaggctgaggcaggagaatcacttgaatccgggaggcagaggttgcagtgaagtgagatcgcatcactgcactccagcctgggggacagagcaagaatctctctcataacatgtatatatataggccgggcgcggtggctcacccctgtataattccagcaccttaggaggccaaggcgggcggatcacgaggtcaggagttcgagaccagcctaacatggtgaaatcccatctctactaaaaatacaaaaaattagctgggtgtggtggcgggcgcctgtagtcccagctactcaggaggctgaggcaggagactcgtttgaacccgggaggcggagcttgcagtgagccgggatcgcgccattgcactccagccggcgacggactccgtctcagaaggaaaaaaaaaaaagttgccttggccctccaggtcgatagaaaagaacactcgcacacctttatcccaatagccccgctgagtgagtttcctcaggtatgtcacctggcagccacagttaagattaagaggcctattttacatccggcagagtagggggcagcgggaaagcagaggagctgggaagctt

SEQ ID NO: 204348 - DNA, 1000 bp, Homo Sapiens
cacaataataatgggagactttaacaccccactgtcaacattagacagatcaacgagacagaaagttaacaaggatatccaggaattgaactcagctctgcaccaagtggacctaatagacatctacagaactctccaccccaaatcaacagaatatacattcttttcagcaccacaccacacctattccaaaattgaccacatagttggaagtaaagcactcctcagcaaatgtaaaagcacagaaattataacaaactgtctctcagaccacagtgtaatcaaactaaaactcaggattaagtaactcaggattaacaacctgctcctgaatgactactgggtacataacgaaatgaaggcagaaataaagatgttctttgaaaccaatgagaacaaagacacaacataccagaatctctgggacacattcaaagcagtgtgtagagggaaatttatagcactaatacccacaagagaaaaaaggaaagatctaaaattgacaccctaacgtcacaattaaaagaactagaaaagcaagagcaaacacattgaaaagctagcagaaggccagaaataactaagatcagagcagaactgaaggaaatagagacataaataacccttcaaaaaaatcaatgaatccaggagctggttttttgaaaagatcaacaaaattgatagaccactagcaagaccaataaagaagaaaggagagaagaatcaaatagacgcaataaaaaatgataaaggggatatcaccattgatcccacagaaatagaaactaccatcagagaatactataaacacctctacacaaataaactagaaaatctagaagaaatggatacattccttgacacaaacaccctcccaagaccaaaccaggaagaagttaaatctctgaatagaccaataacaggctctgaaattgaggcaataattaatagcttaccaaccaaaaaaagtccaggaccagatggattcatagctgaattc

SEQ ID NO: 204349 - DNA, 1000 bp, Homo Sapiens
cctgctagagtgcagtggcacaatgatagcttgctgcagcctcaaactcccaggctcaagtgatccttctgcctcggcctcccaaagtgctaggattacaggcataagccaccttgcctggcatggttttgaggtttttagatattgaactggattcttgtaggtaactcagttctgatttcattttgtgtgtttcttttaccaatcttctaatcatacttggccaattgagaacgctctccggtggttttatgttttagttcttactatgtagaactttaggtgttgcaagttgtgggaaatacaaaaaagtaaatcatgttctcttcaaggagttaatgatctccctggtaatataagaataagcatattaaaagttcagaacactatataattatataagtgctgattgagtgattagcccagtaagtaacatagatatttggaggacacagagactgttgagaactggagttgtcagaaaaggcagccaaaatttttcttaaacacaaatctgagcatgtcattctccaatttaaaatctttcaatgcttccccttacctataggataaagttcgggttccttaagcttgtcatgaaaggtcttgatttggcccataccatcctatctcgccactacctagttgtctttcagctattcctaattatgtgcagttctttgaacataagctttttcttgtctccatgaatttgcattagctataactttatgtagcaactttattccttcccttctctttctggcttatactcatcttttaaggttagatagagtcactcctccttgaaacttcattaagtcccccatatttcctgtccctacccaggtaggcttaacctcttatgttcatgagcactctgtgcttacctgttatagcacttaatcaacctgttttgaagttgtttctcttatttaaagaataaatgaggccaggtgcctgtaatcccagcattttgggaggccaacgcgggtggatc

SEQ ID NO: 204350 - DNA, 1000 bp, Homo Sapiens
aggccgaggcaggtggtggatcacctgaggtcaggagtttgaaaccagtctggccaatatggtgaaatcccgtctctactaaaaaaacaaaaattagctgagcatggtggtgggcacctgtagtcccagctacttgggaggccgaggcgggagaatctgttgaaccctggaggcagaggttgcagtgagccaagattgcgccattgcactccagcctgggcaacaagagtgaatctccttctcaaaataaataaataaataaataaataaaacaagatctgtgaatttaatgggattaacatctttaggatatttagtaaaaatgacatagtctcaaagacagacttattaagtgcagttggttatttatgggtagagtcttgcagatagtatgtgatatgtaatttggaattatttaattttgtaaaacgccttccacttctactgaccaaagcagggaatgagattttaatcagttttttttttctcttcaattttttttgtttggagagattggatgtcgctatgttgcccaggctggtcttgaactcttggccctaaagagtcctactgcgtcagcctcccaatgtgttgggcttacagacctgagccaccatgtccaggtttagtcagtttttgttttccaaaagaaactacacttaacataaaatttttatgaaaatttatttacagtattctctactaaaacagagcagtattgagattctagtttttagagagttaggttaataaaatgttaatctctagtttttatcatgaaaattttttttatcttattcagcatagtgtatctgcattttgttcgtaattctcacagagttccaagataaatgtttcttagctgatggaaggcatatggtaatagctcagaacatacttctgttcatattttaatattggggattttaatagtaggaatgtgttttttctgttttagtatcaattttatgagaggaaacagcacttttccatggaattc

SEQ ID NO: 204351 - DNA, 1000 bp, Homo Sapiens
caaaacccaattttccagagaagcagcttctaaaataaatgccagttggtgaggatagatgagaaggccaagtcagggccaagtcaaatgggccagattctttgaaatatgggataacagtgacttgggcaaaatcatggaagtgggcagctgataaagccactattaccaccacccactatctcccagtatctatgcatggacagactttgtttctccaattgtaaaatgggaataatacaggcacctacttcaaagggttgtgagggttacatgaggtgatatatatatataaaatatttatccaagtggtctgcacatactatgtgctcaaaatatggtagctactgttaatatttcataattattaggcactgtcattcagaataattgcataagatggctcatttaggtagaatgtatattttttagttatcagttctgtaaatctctcttccagaggcaggctataaaagttgtgggtctctaactccagcactttgggaggctgaggtgggtggatcttgagaattgagaccatcctggccaacatggtgaaaccccatctctactaaaaataccaaaaaatttagctgggcatggtggtgcatgcctgtaatcccagctactcaggaggctgaggcaggaaaatcactttaaccaaggagccagaggttgcagtgagcctagattgcgccattgcactccagcctgggcaacaagagcaaaactctgtctcaaaaaaaaaaaaaaaaaaaaaaggtgtggaagagctgtagtgtttgctaatgtgacctttgtatgtaatttttaaccagcaggtgagacctttttctgagggaaaatactgctcaattctttccagtctggatagtctagtatacatgtgtggttttcacttgatttttggtttgttttaaccgaattgagatatggggaaactttaggggcagaaacatattctatataccaccattggagatgttttttctcatggaaa

SEQ ID NO: 204352 - DNA, 1000 bp, Homo Sapiens
ataaaaataaaattaaaaattaggttatagaactgaatgaggccatttctgtttaaaatatttattgatatatgcctagaaacagtcggaagaatatgggccaaaacgttaattagtggccatctcttagtgatggaattactgatttttctttttattttcgagacggagtctcactctgttgccaggctggagtgcagtggtgcgatctcggctcactgcaacctccaacttcctggttcaagcgattctcctgcctcattttcctgagtagctgggactacatgcacacgccaccacgcccagctaatttttgtatttttagtagagagagtttcaccatgttggccaggatggtcttgatctcctgacctcatgatctacccgcctcagcctcccaaagtgctgggattacaggtgtgagccaccgcagccggcctgattttaattttctactgtaaatttttctgtgttttcaagggggaaaaaaattactaaaaacagaccccttccctttccccctaacaactacaaagccaaacttaaatgtactatgatttttaactgcagcagtaggattctgagtgagtcaatccaccagattaatatttttttaaatcgagacagggtctcactctgtttcccaggctggagcgcagtggtgtgatcccggatcactacggcctcaacctcctgggttcaaatgactacaggtgtgtggcactacacctggctaatttttttatttttatttttttgtagagacagggtctcacgatgttgcccagactggtctcgaactcctgggctcaaccgatcctccctccttggcctccagaagtgctaagattataggcatgatgctgtccccagtcagattaatattttcaagagaagaaagcagtaatgcaacttttttactttttaaggtgcatttttaggaataaaggggcaacaggtccgcaacttactctcaaatggttcatgtggggggaaaacc

SEQ ID NO: 204353 - DNA, 1000 bp, Homo Sapiens
ccccagctaccccagcccacagagccacagtgaaactgcctgggaaatagggggcagggagtaggatttgagccacccagggtctcttaccgaagcctttcatggccttccgcaggacctcggcatctcgcagggggtcaaagccgggagcatcagtgatggtgcctcggcttccaaactactcggacaaacagtctcaggtaagatgtcgtgcatgccgccttccccacattcaaggctgctccacccctagactctgggaacagccctttctctaagagttggagtatctaaaggagtccacagtcaacaatgcagaggactttacgccgcgtctacctaacttgactgttatctggccttgtgttctagtactgaagctttttcctggctccagtggctgggagctcacctatagctgagtcctgatgctgaaaatctgcccagtgcccaggtcctccagggctggggctcaggctcctgatgaagggcaggtctcgggagcaggggctgtggcctctctcatcgatgcctggcctccacagcacatgtgagcacacatgggtactcctaacagggctggctagcccatgtgtcccctccagtggatgcaggtattgagcctccacaactgtgcatggcagcctgatgacctcttgatctagcactggttccctcgcactgttctctagactagcatctgccggacttcctccagaccctgatagctgcacaaacccgcaaactggaactttccaggctaaactgtctcccagtggattgtcttcctaggggctggtacaaactggttataacacaattaagagggcagctcagggaaaagataagggagggaggctggaggatggcacagggtgggggaacgtgtgggtatggaagggaaggaggaaaggagaccctctgtctaaaaatagtcattgagcacataccactacccctgtgctggctggttgggccacagaaccatgacaacgaattc

SEQ ID NO: 204354 - DNA, 1000 bp, Homo Sapiens
ttttctaaatattttttgctgatatagagaattaaaattaatttatatatattaaacttatacaagcagaagttttaatggtaaatttcactcattaattgctaacctcacttattaaatgaatttatttttgtatctattattttacattttctaagtgcataatcttatgagcataatgctgttttatttctttctctctaatcttaatactttaattagctttaaatgccttattacattgttgaatagaaattctttgaaggggcatgatcacttcaatttcagtttcagagaagtcagtcaatatttgaacattaagtagggtattagtctttttaaaaagctattatttatttcattaagacaatttctagtttactaagcgttgatagatccaactttatcttccttttactgataagagctgttatttttatgacctaataaatcctcttttatatttgatccttgcccatttggtttttaatttctttactttaaaattttataaatttataatagtttacatacttatgagatacgtatgatattttgatacaagtatgcttgcttttccattttctagtcttaatgtttgtcttttcaaaatcattatgtcactgtgtttgttactgtatctcataaatgctaaaataggtagccacccctctatgttattttcagaatgtttctgtgttttcccatttatttaattttttaaataaattttaactcttgtttgatttcaaacaaattattgttatttgatatactcataagtaatttttaaagtatgattaatatttaatttttatttcagggcttttttttccagtttcattatcagtgttgactaatttacaaaaattatggtagatttctttttttcatgctctcaaaataatattctatactttaacttttttctctaatttttaattataatttatctattaaatgttttttaaataagagttttctgtaggtatatgaattc

SEQ ID NO: 204355 - DNA, 1000 bp, Homo Sapiens
gacacttgccactattatgttcccaaatctgttaggaactttaatcacagattgcattcagggggcttgtgcaaagcctgaagatgaaaataattaaactacactaagattccatactgaacaattcagcagcatctatttttatgtgaatattaataatgtttaaggggatagcggatgttcatttttcatttcttttttctggaatagcttttattgttcaaatttgtaaacaaaaatgtatatttttgcatccacttattaatttcaatctattcttttgtgatttatttatgtcttgcattcagaattattcaaatccaattgctactatcaaaacttactatgtaggagaaaatatgttgttgtcagattggtgctttttctaatgtactatttgagggacattgtacagtctatattttgccaagctcatattgtaaatttcgcttcaaagggccatttgtagctaactgttggtttccatttgagaacttaagtttcacattcaggcacaatagcctccaagggttgatgtccatctacaatcccaattcatactttcattttacttctctaaaataatactcacccttcttctattacctcacttttaggtagataaggctaccgtctctataggtgatgggtaaaaaagttgattgtcctgtttcacctgtttttaataaaaacatagaaacagatcccaagctcatcattgaatatggaacaaccttctctaatgtttgatagaaataactttgctatggaattattttttgatttggccagattattattattattattattttgagatggcgtttcacttttgttacccaggctggagtgcaatggcgcaaccttggctcactgcaacttccacctcccgggttcaaggaattctcttgcctcagcctcccgagtagctgggattataggcatgcaccaccacacccagctaattttgtatttttatagagatggagtttcaccatgt

SEQ ID NO: 204356 - DNA, 1000 bp, Homo Sapiens
actaagcatctgctgagtagcaggtgttgtgccagatagtatctcacttaaccctcagaacaactatgaaaatatgtttcatgaatggaaaacaggttcagagaagataaaggacttgcctgaggtcccagggttggtgagagccagagctaggacttgaactcagattctctgatgccaaatccaacagccagcctcactaagccagcctggctctgagtgtttcctgacacaagcgagtaaaatgcagtgcagacaactatttatacgtctgctggccaaatgcacaggctttagaatcctgatgctgacactcactggggccatgacctcaggtaacatatttaacctcttaaccccacgttcccttagctatagcagaagtaactattacacgggattgttaagagattaaatggtagaattcattaaagcgtttagcacagggcacacattaagtgcttaaaatatgttagctattatttttatcaccaccatgggaaaaggggggcttaagttgctcccttgtattcatctagcgtttctctacctatgacttaagggacatccttgttagaaaagacacatattcaaatcaaatcactgatggagaaactaatgtctaaaaagattaaatcacttgtcctaggtttgggacacagttgacattctaactttaaccatacaactctttaccaggtcctgctatctgccgcctctctgaacttttcaaaaatgtctagcatttcagagcatacaacctctcgttcagttccaaaggaaggccttatattcctaccactatcctaatcgctccttttgagctttaaggattcactctgctccccaaccaaaaatgggggctgggcaagttgctccaagtggaaaattcaactccatcccaggcggaaaccccaaatctctgctgtaccagcagatttccaggacgtgctggctctcagaaaccacaattacaggcaagctcaaggcagggagtaat

SEQ ID NO: 204357 - DNA, 1000 bp, Homo Sapiens
atcctgatgggagaacctgctactaggagtgtagttggcagactttcttctcctttactccagtctggggctcttccttcctacccaatcctctttcctgccccttttcctttcacagatatctgattggtacaatggtctgaaggctggccctgccttcttttgctccctctcttctttatctcttgcaggcatttctcccaataatgcctggtacctctcattcccttttggtgtctgcttcttggagagactgaactgacacagaagtcattgatatgcaggtagctaataattaaaagaatgggagcaaatcggacatccctgggagaacatatagaatgaaaacaaaaatgttgaaatgttaaaattaataaaaagattgaggagaagaactcacacgtaggtagtgataagggtttcctggggctagaccacgtgggtttgaggcaggtcccacctcttctgagctttgtcactcttagcagattgcttagcctttcccagcattgctttctttgtataggaaaggggggaaataatagtactcattaaagatttgggtgggcatggtggctcatgcttgtaatctcagcaatttgggaggctgaggcgggaggatggcttgggaccaagagtttgagaccagcctgggcagcatagggagaaccctatctctacaaaagataaaaatgtattcaggtatggtggtgcgtgcctgtagtcctagctacttgggaggctaaggcaggaggattgctttagcccaggagtttgaggttacagtgagttatgatcatgccagcctgggtgacagagcgagaccctgcctcttaaaaaaaaaaaaaaaagtttgttgtgtagattaaaatgagctaatatatgtaaagtgcttagaaaaccacctgcacaaattaaggccagagtgcaggttggtcactatcatcaggtggaatggatgaggagctccagagtagccaggaaggggaggactcaaatg

SEQ ID NO: 204358 - DNA, 1000 bp, Homo Sapiens
aaggaaatggtgacgtctttcttccattccactccttcaagagtcttgccattatgagaaaggtgcatccactttaaagtgggagagctttgacttagggtttggattccttgtcaatattcagccatgtcatctcacagcatccttagaaagggaacaattttggtccattctgccctaaaaaattacagcttaatacaatttctttaatgtgtgtgagccagtgataaaagttctaatctctgcaaagcatgagaagtgttaatacagcttgggaaaatacccgcacatcctcaatttcctggcataattctgtcccttgccagcgcagagcttatctccagaaggcagtgggtgccagaatgacactttttagaccaagaaatggaatatattttttctttgcctgcagtttcctttcagtattttggggaagcaatgggactctcagaggggagaaacttgattggtttggctatctcctccttccatgtcctttcctgcttgcatttcttgcagttttactagtcgttggcatcctataggattctaattttgagagaaaaaaggaaaatgcttgaaaagaccttcctagaaggaaactaaactatgtagctggtgagctggactctttagtacccaattattatggtcactctctccttgtatgtcctattaggttacttaataggacttacctatacacgggttcagtaagagcaggggccatgtcttatttatttatgtgacctcagcacctagtctatttattggggaggcatgttgagagaatgaataaatgattgaattagaaataggtccaagaacaagctcgtctttagctttaattggctttcccatgtaattaggtgtttaggtaggtttttattcacttactagacaatctttgagcatctcctgtgtgataaacactttgccaaatgcagaggaatcaaaggtaagacaaggcccttgtcctggaagaacttgttatgaattc

SEQ ID NO: 204359 - DNA, 1000 bp, Homo Sapiens
aagtgggacgcttcgggaaaataaggcaggaagaggagttgaggtcacatggtgaatatccttggataccatgttgagataaagatattttagaagatgtcccacattctggaactgattctgagacgcaaaagataatgaagatgtgtgggcacaagtgtgacctgccaactgcaccctgctttttgtaaaatgtgagtaagagatcttggttaaaatccacattcctttgcaaagccatggaggtgaaagaacccttcagtgttcaggcttctcagggggacactgagcattgcaaggttcatatcgacactcactctggcacaggtttcagagctcggcacctccccctcccaccccacacccccatccagcatgtggatccattctaaccctgtgatggcattcccttcggttgaggtaaagacgggaatcttttttctgagctgcacccagcacgcttcaacatcttcaagcagatggtcagcctaaaagtgtgaggatagctcaggttgccctgagaggatgcttgcaggagatggacagagctaaatgcaggatttcaggagaagtatgcttcaagaaagagagcatggcatctatgaatttggcagaagtggacatatagcttctgccaaatgatgagttgtaacttttaggcaaattgcttggactttctgagcttttatttccttatctgtgaaatggggtcatagtatccatctgacaagagatactgtgctgatgagatgaaatacatacacatggtttctgacatatggcaggcatcctataaatgcatttctctcatcctcatcccttcttcataaaaagggagtttgggaggcagagtcccctggacaacctctgggaatctggagcagccagcactaacttggagcgaggaagcctgtgccaaagcatgcggaatctctagaaaccatgtgggcttttgttcatcatcatgccaataaaacgccatcggatattaagagaattc

SEQ ID NO: 204360 - DNA, 1000 bp, Homo Sapiens
gttttcttgggccttcgttatttttagcactgaaaacttcgcatcctaggaaagccttcagttccagacaaactgggctgttttgattttaaaactgagggcaggtgtggtggtgcacacctgtggtcccaactactcaggaggctgaggcatgagagttgtttgaaccggggaggtgggggttgcagtgagctgagatcgtgctgctgcaattcagcccaggtgacagagcgagattctgtttcaagaaaaaagaaaaaacaaaggcccccaaactgaaagttccatgccccaggatcccctcagtcccagcaaaccaggacagttagtcacccattacagactttatttggatttctgcagtttatccactagtgttttttgtattttgtttttttcttgtttggttttctgtttcaggatccagtcaaagatactgctttgccttcagttgtcaagtctccttagtctcctccaacctatgactattttcagactttccttgagttgcatgatcttggcacttttaaacatttatttattcatttatttatttatttttgagacggagtttcactttgttgcccaggctggagtgcaatggcgtgatcttggctcactgcagcctctgcctcccggattcaagcgattgccctgcctcatcctcccgagtagccagtactacaggcacgtgcccccaagcccagctaatttttgtatttttagtagagacggggtttcaccatgttggccaggctggtctcgaactcttgacttcaggtgatctatccacctcggcctcccaaagtgctgggattacaggcgtgagctaccacacccgtctgatcttggcactttttagagtgtactggtctaatcaggtctccttaatctcctccaacctgtgactgttttcagactttccttgacttgcatgatcttgacactttttagagtgtactggtcaattagtttgtagaatggccttgaatttgaattc

SEQ ID NO: 204361 - DNA, 1000 bp, Homo Sapiens
tgaaattcaagttcaaaatattctgatcagaatttattctttattctagttacacttaatatcaaatcatactataagtgaagtgattgttcttatcagaaaagtagagaaacttaaaaatatacaaaggacagtttatagaatgaaattacaaatagtccttacatatatcaaaacacagtaaaaaacactcttttgtctttaacaagagaaagaaaaaacctcgatataaaaaaaaaccttaaaattacattgatttctgttaacctttcatattgccaaaaattcaaacattcaacagggcaaaaatttgaagcctaagtactctatgaaaaacatctaagattgtggtgaacaacaactagaaaaaagagtcatagattgaaggactaggttgtataggaggagagaactgagtaaagagacaacagagaggagcccattgggttcaggataaatgtcaacactgacctctaaaatcattctttcaaaggggccacagagttattggattagtttgtagagaaatttatgtccccacaaaatgttgcaaacgagacagtaataagcttgagattgatagtttcaaagctagttataatcagtaaaaggagaaagagccctgccaaaaccataccagggtaactgtggacatacccaaagatgcatctccgtaacaaacaacatcagaagcttaatactgtgaagtgagaggggatgaaatcatctccactaaaataatttagcaaagtgatttaaaaagaaaaataagcaagcaggcaacaataactagccccagtggaaacatgggacaaatatccagcgtatccacaatatattaactaaaatgttcattttctaatgaaaaattataaggcatgtaaagaaatggagaagtatgatccatatactagagggaaaaaagcaagcaacagaaattgcctgtgaaggtaaccacatgtcaaatataatagaaaaatacttcaaagtaggcattgta

SEQ ID NO: 204362 - DNA, 1000 bp, Homo Sapiens
gcttccacatcaaagaatagttctagctatttgtgtaattgtctggctctagagcagtggttctcaactggtggtgattttgcccccagggaacatttggcaatttctatacatgtttctggttgtcacaagtgaggttggaggaagtgctactgatactcagatccaggatgctggtaaacatcctgcagtgtacaagatagtgctcaacacgaggtgctaatcactgacccaaaatgtcattagtgctactgttgagaaactgtgctctagagggtagtagcagctgtgatgatgacagttaagcacctacatctgcctgtggcttgtactagtttgaccaggctttcattctggttctatttcatctttcttcatgaatctatgtcagtttctcctcagtttctcatcagttgagtagaataggatgggatatacctcattctttttttttttttttttttttttctgagatggtgtctccctctgtctcccaggctggagtgtagtggcacgatcttggctcactacagtctccacctcccagatttaagctattctcctgcctcagcctccctagtagctgggactacaggcgtgtgccaccatgcccagctaatttttgtattttgaatagagatggggtttcaccatgttggccaggcttgtcttgagctcctgacctcacgtgatgcgcctgcctcggcctcccaaagtgttgggattacaggcttgacccaccgcacccagccagaatatacctcattcttaatgaaataagccacctaaactttctgcattcttttagtgaatttcacaaaactatttatattattattacgtattaatggaaagtttaaattttgcttaactagagttttctggattaaaagtattgctgacattcttatttcttttctaatagaagtaaaataagtgaacttacaactgaagttaataaacttcagaagggaatagaaatgtacaatcaagagaattc

SEQ ID NO: 204363 - DNA, 1000 bp, Homo Sapiens
caataggggtctgtcatgaccttatgcagtaaacattcattcttctagcttttaaaataatagtgattttacctatagattttcaaattactaaaaagtgactgcattttggaagctactttagttctgtgttaaaggccattgtattttccagctgggctcggtggctcacacctgtaatcccagcactttgggatgctgaggcgggcggatcacctgaggtcaggagtttgagaccagcctggccaacatggcgaaaccctgtctctactaaaaatacaaaaattagccaggcgtggtggcacactcatgtaatcccaactactggggaggctgaggcaggaggattgcttgaacctgggaggcagaagttgcagagccgagattgtgccattgcactccagcctggatggcagagcaagagtccatctcacaaaaacaaacaaacaaacaaacaaaacaaacaaacaaaaaaccattgcattttcctagatcctattttcctgatgctctttgggtgccttcagtgcagccaatgtttccacagagagcagtttctaccctgcatagaccacaaagagctgtgggctgggtccctcctcagcctcatcctactgtaccccctccctactgttccccggctaactggccagagaaagctgctaccagaggcacagaatgaccgaggacaatttgtacaggatctaatttagaaaaaaatccattaataatatatattaaaagacattttgtgccagtattcagagctcactcacgatgagccttttattggctttaatgggtaggcagtgccttcctgaaagcttgagggagttaaagaggctcatctctggaatgttagcagaggattctgcattggcaggaaagaataggggccactgccctggaagaggggagggggaaggcctgaaaacacctgtatagtctgggtagcaagttattccttctttatgactttattttttccaattctgaattc

SEQ ID NO: 204364 - DNA, 1000 bp, Homo Sapiens
attttaaactgcttctgctgcagaaaactctttgggcattttgtgcccctggtttcccaaatctcactccctggcatgcttggcttgagaaaggtaaaaagcccagggtggcaggctggtctggcattaaatggtaagtgaatttgccaaatcaaaacggaagcatctggctcgacaaggataagtaatgcaaatgaatgaaaagagcatgtatctatgcttttcccttggttattagatattgcattcattgttatttgttgtaactgtatgaaattacaggaaaattacaaaatacagaaaaaagttaaatgataatcaccagaaagcccctttcctgcgctgccgcctgcctcccctggcaccgccgcctgccgccccggaagactatttgggtatttacaagagaattagaaattgagattgtggcttacctatcctacatggtcaccatagtaaaagcttctaactctgcctgcctcttctgcctctgtgtatgaatgtgtcatgaggcaggtaggagggagcacaaacacatcctattggaaaaccaactccaggagtgcgctttccaacactggggactcttcatatgggacgcaatattataatgctagaggaagttgtgttagttgaccagggtttccagcagttggaacaatgctcaaaattcagcatctgcccttccccctgctatactaccccctgtcccccaccgaggcaactagaacacaatcatgccttcttctcatgtttgttcacctgttttcaattaatggcagggacctagtcccttagcttagttggattggtacctgcaggataggagacacagccaggtgggtgggaggagctgggtcacaagacacattggagctcagttcttcccagcacagctgggctgggtgtttgccttggcacccagtgccactccactcagctctgacatgatggctggaaacactggcctggaataaagtgggaagcattcatgcatatt

SEQ ID NO: 204365 - DNA, 1000 bp, Homo Sapiens
acttcttgcaatcagtggaaaccaatataacagtttaagcaggaagataatttattgaaagacacttggcagctcacagaatctccgggatggcaaagaaccatcttggatactggcctaccaagacaaattcccaaaaatcacactgtggaactggtctagaggtggccagtgtatcagttagacttctccttgcaatcaatggaaaccaatataacagtttaagcaggaagagaatttattgaaagatgcttagcaactcacagaatctctgggatggcaaagaaccatcttggagactggcctaccaaggcaaattcccaaaatcacactgtggaactggtctagtgggaacatcactactgtgcttgctggtatatatgctattgcttgcaccaataatgatactgctactgctgactcttcaatttccatgtatctgccaccttaccctccacccttatttatgacactagtttccaatttaaagtctgcagaagtgactccctcatgtagatcctatatgtgtttgcacatttgtactggtatttttagactaaattccagaggaacagttgagtttaaggagaagcacatttacatatttttttaagacagggtctcactcttgttgcccaggctagagtgcagtggtacaatcatggctcactagagcttctacctcccaggctcaagtgatcctcccacctcagcctcctgagtaattggaactacaggcacgcaccaccgtgccccgctaatttttaattttttgtaaaggcgagatctccctgtgttgcccaggctagtcttgaactcctgggctcaagtgatcctcctgacttagtctgccaaagtgttggggttacccaacacttgttattacttattaactctagatttatgtttcagggtaggattgcagagctgcatatatttggacttcatcctggctctgtggcagtaattatgcatcattgggcaaattagtctacttctc

SEQ ID NO: 204366 - DNA, 1000 bp, Homo Sapiens
ttcatcaccacagaacaatttcatcaccacagaatctcttctatagccacatccaccctgcccctccctggcagctacgattttgtcctccatttgtataattttaccattttaagaatgttacataaatgaaaatgtaaagtatgtaacattttgggattagcttttttcacttatggtaattccttggagattcactgagcttgttatatgtgtcaatagtttgttactttttattgctcactagtattccatggtatgcatgtaccacagcttgtttaaccattgacccattaaaagatgcctgggttgtttccagttttgggttgttacaaagtaaagctactgaacattccttttataggtttttgtgtgttttcattttttctgggataagtacacaagagtgcaactgctgggtcatatggtagttctgtgtttagttttataagaaactgctaaactcttccagggtggttgtaccagtttacattcctgccagtgatgtaggagtgattcagtttctcggctacatcctcattctgtcaggtgtgtagtgatatctcattgtggttttaatttgtatttccctaatggctaacaatgttgaatttcttttcatatgcttgttatctatgtatctgtttcagggaaatatgcgtttatgtcttttgcacattttaattttttttttttttgagacagaatcttactatattgcctacgttggagtgcaatggcgtgatcttggcttactgcaacctctacctcctggattcaaacagttctcctgcctcagcctcccaagtccctgggattacaggcatgcaccactatgcccggctaatgttgtatttttagtacagacagggtttcaccatgttggtcagcctggtcttgaactcctgacctcaggtgatccacctgccttggcctcccaaagtactgagattacaggtgtgagccactgcacccgccagtttgtttgttttttaatgct

SEQ ID NO: 204367 - DNA, 1000 bp, Homo Sapiens
gattacaactgaacatggggtttgggtggagacacagatccaaactatatcatggaggtaggcatgacgtagccaccatcagagaggcactgagccatgctctgagagttccaaagggagaaaccacatttgtgtgaagacagtggcagcggaaaggggcaaagagggtgggatcagagatggctttctgcaggagcggctcagccccttgaattcattgtgaattgcacatattacgtactactaatcttccagagagggtagtcattcttcttcccttgatcaattttattgaagggatatatgggcctgtggaaagttgtggatgttgtctaattatactttcttaagaacgttccaaaccaaaaatgattaaggtgagtcattagattgaggggagcactgttttgtcgcaggcagtgaacttgttcagaatcacatgcttcattaggatacatgagccctctggagagtgggcttttctcactttcaataataatcttttattaaaagctcagggagaatatacagaaagatatccaagtttagagagaatactaaattcttctaggtaatgaaaatccaagatggtcctcataagccaagcaggaaaatctcataaggcagagcaactgggcagaaaaatggaaaaagaagaaaactgcttgcgttgttttaacagtctgtgattgacacagcacccaacaccattgccatcccagacctgctgtggcatttctaattccgctatgctcttggcaaagcactaacctcatataagtccagatggtggttctcagacatgggtacctggaccaactctttcagactcattaatttaacagggcgggggcagacaggctgttaaggcacagatcctgggccccattctccacttactgaccagactctctggagtttgggcctgggaatctgtattttgaaccagaacccttttaattctgatatgcagacagaatctctccctgcagcagaattc

SEQ ID NO: 204368 - DNA, 1000 bp, Homo Sapiens
tggacttgcccctgccttcattcatgtgggtactttttatttaacttttcattgtaggtaggctcccctctacctaaaaaaccaaagggaaaaaccccaattctttaatttactcacatcctgttacgctttcacaagctgttcattttcataccaagcctcatcttctgctgccaacatcctagtttgaaggaaagggggagacaggtcaactggtagtggtcctgtcctcaaagggagagaactcctgggtacctctttccagcagccctaggctatttcaaaatgtcagcaggtctaatcctagaagaaaacaccatttacttctcaacctgctggggcatggtgaggtctaaacaatacattaaccaacaaaatctgccagttcctgagaactgccagagaactgcctgagaactcagagataaacagtaagaggtatggtcaaccttcaggggaatgaagagactatctcaatgcagcaaaaataaaggaattaatgtgctctgcagctttagaaaggaactctccttcctgggggtgcctccgtgtccctggctctaggagactacctaaccagcaaggttgatagcatgaccctggctccactgaaaacttgggcctatagactgtcttattctaaagggtgctttttaattctaatttttttttaatttttatttatttttttttgagacaagttctcactctgttgcccaggatggagtgcagtgatgccatttaggctcactgcacttttgacctctcaggttcaaacaactctctcacctcagcctcctgagtagtggggactacaggcattcaccaccatgcccggctaatctttttttttttttttttttttttgtagagacaggtttttgccatgttgcccaagctgatcttgaactcctgggctcaagcgatccacttgcctcagctgggactataggtgtgagccaccgtgcccactcgaaccactggtcttttaatgttttca

SEQ ID NO: 204369 - DNA, 1000 bp, Homo Sapiens
gagcaacacaaaatggactaacactgtgacttactctcaaatggtgcactcaacacacacgtagaaaatgagtaagaccgctattcgggagacggaggccgggaggatcacttgagcccaggaggtcaaggttgcagtgagccatgttggtgccattgcactccagcctgggcaacagtcagactctgtctaaaaaataataataaataagaaaaaaaatagatgcagctaaagtaatgtttaatgggaaatttatagttttaaatccttatgttaggttggtgcagaagtaattgtggttttgccacatttaatggcaaaaaacgcaattacttttccaccaacctaatacaaaggcctaaaagcaacgacctaagtgagcttccttcttaagttagagaaggctgagaatagtagctcatgcctgtgatctgagcactttgagaagctgaggtgggaggattgcttgagcccaagggttcaagaccagcctgggcaacaaggtgagactctatttctacaaaaaaattaaaaaattagccaggcatgtggtgtgcgcccggagtcccagctactgggggaaatgaggtgggaggatcatttgggctcaaaactgcagtaagctgtgatcacaacactgcactgcagcctgggagatttaagaggaaaatatatagctttaaacatttaccaggaaataaaaaagactaaaaaaaagaaaaagaaagaatattaattggtaaagctatatgatgagcaaaataattttctttgtaacattcttacaacattcttaaaggtctgaaatttttccccaaaaaaagcaaattaaaagggatttaaaaatacatgaagaagaggctatatagtgatgaaaatgacagcaaaatatatctacccacttcaaacaggtcttaaaatatattcaacaattaacagaactgtcagagaaaaatcaacaattactcttaatcaactctgttcagactactgatagatc

SEQ ID NO: 204370 - DNA, 1000 bp, Homo Sapiens
aaaaaaaagaaaagaaaagaaattacccaatatgcaaaatgtatacagtgacaaaaagataaaaaatactaaggagaggttaaaaggcaaggaggattgaggggaaagttctaacatacatctaaagggagcaccacaggagataatggtgagaatggggaaggtgagacaaagagatcatgaatgagaccttccagagctgattaatgacaatgatcctcggattcataaagcccaatgaacatcaagatttcctaatgaaatcttcacccatacacacccaatgagaatgcagaatcacaaaagacaaagaagtactcagagaaaaagacagataacctacaaacaatattagctcaacagctaattcatgaacagcaacaacactgagagaaagtcattgtcaacccagaaaaactctccttcaaatatgagggtgaaattaacacattttttcaaataagaaaaacctgagagatttttaccaacaaacactcagtacaggaacttctaaaggatgaatttcaggaagaagaaaatgatctcaaaaggaattaaatggttctcaagaagaaatcagaagtaaagaaaataataaacatatgggtaaatattttaaggtacaaaatactaaatgtgatatccaatttgtgaagttaaaaaaagagatagaaataaaatactaaacaaaaatagcgtatgagtcagaaacaggtaattaggcaacttatctcaccctaggagtgacagttctctaccaccataaatgtgaagtagcagccattttcaaaatgatctctggaatctagttgtttctacctcagatcagtttttgatatcttgctcgaagcgttaatggttgcattttctatgagccaaatttcctaattgtggcacttgggtacaaacccaaagcatttaagtagctcaaccaagtgcaacacatccaaaaactcctagatttttgctttttccatttccgtctccatttaattttgaa

SEQ ID NO: 204371 - DNA, 1000 bp, Homo Sapiens
aaataatgagttatcccgagggaaacaggctaaaatgtcatcagtggtgagtctgagtgattacttcctaagttcctttatcttttccagattttctatgatatggtataatacgcatttactgcttttacagcccgaataaaaatctaaataaccaaaataaaataatagaaatagtactagtaacatttattgactattatataccctgtgtgctacatgcttcacatgcattatctcacttaataaaatcaccctattaaaaaaagactgttatccgtatttcagagaagagggagtcaaaatatgaaaaaatttgctagaaatgtatttttcagctagaatttttacttatttcctcagaaataagcaggggttgggacaaaaacaatcagttgtgtaaacagaaagagtcggaaatagatgccatttgttggatgtataaccataagcaagcaacttaatctcagcgagcctcagtttctcctattgcattgtattgcaaatgacttagtaggccctaactcatttaggttcccaagaataactcatttagggttctcaagaataaatgatattatgtataagaaaaataaagaactctttctggcaaataactgacaacagaatgttatcagtagcttcatcagtataatccgaaaaacctggacaaattatttaacatctctgagttcagtttctctacctgtaaactggggataaaaatacctacaccatgcagtaactatgagaattacatgagataatacacagtacagtgcctggcatgtggtaaaacagtcaaaacagctattataattatccacaggacaaacaaaatggagctggctaaataaggtacagtgcatgcatatgacgaaatactttgctgttgaatatgtaaggacatgataaaaatattgacaatgtatagctgtttaaaaattatgtagagtaaaagtcttctttaaaaatatataaatatatgttacaaaatata

SEQ ID NO: 204372 - DNA, 1000 bp, Homo Sapiens
acatactttgtgaagaaagtatactaactctaattttcagaccacattgcttagacctagagattacatgcctaaaactatatagctagtgagtagtagaaataggactgtttgcttactactaaagcctatctcttaactgagttgaattgaacgagcctgtgatagatatccgtggtgtcttatttgtgttagcaatgcctccccaacctgataagttccttgaagacgagttagttactcgtctaaatccccacattatcacaatagaaactaaacacaaattatgaaattataattttataaaattataaaccataaaagtgaattgattagagataaaacaacaaatcatagctttgaatattcccaggtttgtctctgaagttgatcagagattcttctgataagcaaaataacttagcaggtttctgcccaatggcacaaaacagacacatgaaatgccaactgtttatccagatgattagaaaacagccagtttgaagaagtgaaaagcctgagtttcaaagtggcttattaaaatcaagtacaacaagaaactaaaggtaaactttttgacattaccatggcaaagtgagaaagaaaggatgacatgtgtaagtaggttgtgttttcaatgtagtgttatcaatttctctttcttgggaaggatgatccctcattgtgaaattatgtccatcctactttttaggcttaaattttttaaaattgaaatgtagacgatagtcaagtggtatgtgtgtgtgtgtgtgtgtgtgtgtgtgtgttagtatcctttcatggtagaataaaaattaacaacttattagtacctaaacattccttgaaattttactagtccatgagatccaagtctgataacctctgcctctgataaaagatcaacttaaacaagctgatgtatttatcatatcacttacttgttaggataatatttacattgttattaaggtatcatagatatatgtcgatataacta

SEQ ID NO: 204373 - DNA, 1000 bp, Homo Sapiens
catactacactacaaggctacagtgaccaatacagcacagtccaggtacaaaaacagacacgtagaccaatagaacaagataaagaaccagaaataaagctgcacgcctacagccatctgatctttgacgaagttgacaataacaagccatgaggaaaggtctccctattcaataaatggtgctggagcaactggctagtcatatacagaatattgaaattggacccctccctttaatcatatacaaacattaactcaagatggattaaggacttaaatgtaagacctaagattacaaaaaccctagagaaaaaaactgggaaatactattctggccattggccttggtaaagaatttatgaataagtccccaaaagcaatggtaacaaaaacaaaaattgacaagtgggacttaattaaactaaagagcttctgcacagcagaagaaactatcaacagagtaaactgataaccaactgaataggagaaaatatttgcaaaccgtaaatctgaagaatgtctgatatccagaatctataaggaacttagataattcaacatgcaaaaaacaaccccatttaaaaatgggcaaaggacatgaacagatacttctcaaaagaagacatacatgtggccaaaaaatatatgaaaaaatgcttaacatcactaatcattagataaatacaaatcaaaaccacagtgtgataccaactcacaacagtcagaatgcctgttattgaaaagtcataaaatagactgggcatgtggcttatgcttgtaatcccagcattttgggaggctgaggcaggaggattatttgaagccaggaggttgagaccagcctgtgcaatgtagcaagactgtgtctctacaaaacatcaaaataaatggaaaaaaaaaaagaaaaagaaaaagaaaattaactgggtatggtggcgtgtacctatactctcacctactgggaggctgaggtgggaagattgcttgagcctaggaattc

SEQ ID NO: 204374 - DNA, 1000 bp, Homo Sapiens
tctcaatctgctctagtgtacaggcctatttcaggaacttagcacatcaagttgatgtttgtcattatacactggcttggtagctacaccttgatctttgccctactacaacgagtctaataagaaaaatggcctgaagatattttcagtctgatgatatcctgtagagttttatgtttggagagatggggaacatggatgacttagttcccaagagcagaagtggcaaattgatggacctcaggccaccacgctagctagtatagctaagctaatcaggacgaccatggatacagccattacagatgcaccctgcatcctgcagtccagacagtagctgatctcacactattccttcctccttcccacatgcttcctggtgacaggaggagcaattgtatcatgtgcttagatggcccaaagaataagcaggcagcaaccatttgagtaacagttttgcggttctgtagattccataaaactactcaaataaacaaacaaagtggttattctaagcagagtccacaaatccctatgtcatatcagcatcagaacatcaacccctgacttctggggagctgccaaaatgggaactcagaggccagacctctattaacagtgcagcacttggtgtcagcaaaactctgactgctaaggttattgtaggctgggacatcctgctgcctagcaaaagtatagtctccatgttgtgacattaatttgttaagttttgaagagagagattattgggactgtgtttttgtaaccctaaagggaaaacgtcccatgtaatgtagaaggaagagaatagtgtaaattctgactcgtttttgaggtcagaagtgatagattcctaattgggagaagggcaataccaaatttaagaaaaataatctaggaaactgacagataatggcaaaattagaaagaaaactgacatcacaataaataccaatcaagttccaaagatttccggacatttcccttgccccagcaaaga

SEQ ID NO: 204375 - DNA, 1000 bp, Homo Sapiens
ttaccttttgaattgcaggaagctttataaaacatcaaaacatctaaaatttgatatgtcttagcaaatttgacaatgggttggtgaacagtgtttggtgaattatccgagataaatcatctcttctgttccccccacagtaggaggtgagctaggaaggcagtccttgctcgaaacacttgcaggctcacccaggtgatatttctctcagctttctttctcaggtgctgatctgaaccttcacataagaaaggagaccctaatatgtgtttacatctgaaaaaaaaatcaaagtacttttctggctaacaaagtgaaagactattaactacttatagacagaattatttatttgatatttgtttcattttttaggtgtttggaagtgttttttgtttttttgtttgtttgtttgtttgttttgagacagagtctcgctctgtcatccaggctggagtgcagtggtgctatctcagttcactgcaagctcctagttttgtttttgtttttgtttttgttttgagatggagtcttgttctgtcacccaggctggagtgcagtggcatgatcgtggctcactgcaacctccacctcccaggttcaagcaattctcctgcttcagcctcctgagtagctgggattacaggtgcccgccaccacacccagctaattatttatttttagtagagacagggtttcaccatgttggccagtctagtctcgaactcctgacctcaggtgatctgcctgctttggcctcccaaagtgctgggattacaggcatgagccactgtgcctggcctggaataatttttttactgtgctctgacttagccctggaatcaagctattggtaaatgaggtggatgttagtgtttctaaattttaagaaatttatttaaaaatctcatttgaacaatataagaaaataggtggtttttcatttttaattgctgagttttcatcttaaatgaaccaaacatatcttttctgggaattc

SEQ ID NO: 204376 - DNA, 1000 bp, Homo Sapiens
ttgatccagtatgttaatttcctatttgaggattttctagatctcatattatttatttctaacttaaaagcacagtagtcgataaacatactctataatttgggtcctttgaagcttattgggacattttaatggcccagcatacggtctatcttggtgactgttccatatgaacttgggaagaacgtgttctctagctttgttgggagtggtgtttaagagatgacagggtgattgatggtacacttgggaagaatgtgtactctagctttcttgggagtagcgttaagagatgacaaggtgattgacggtattcttcagagcttccaaatccctatgagtgttctgatctatctgttttttcaataattgagagaagaagagttaaaagtctccaaccatgattatgaatctgaatatagttccctttagttctgtccaattttgctcttttgtacaaaagagttatcagaacagaccttactgttatgctttgaaagaccagcttagaagtctgcccttttgctggagtctgggaacttagatttcaagagagttcctaccacctaactggtaagaggagctcactgtgcctaaactgtttatgtactgtggcttatgctaaacacgtgtttcccttctgagagtctggaattttggacatgctacacaacatttcacgtgtgttgttacaattcattgctggaggaatcaaacgcatcctgtgtgactcaactgagagaggactcttggaagcttgtaccctcttccctcagacatcccccatatgcctcctccctttgctgatcttgctctgtatccttctgctggatcaaccttagctgagagtatgactacatgctgagtcatgtgagtcctcttagagactcttcaaacctgggaggtggtcttggaggcccctaacacaagtgcatacacatttagagattgttacgtttccttgatgatcactgtctttatgaggtgcccctttatttct

SEQ ID NO: 204377 - DNA, 1000 bp, Homo Sapiens
gaactttgccttttattcatttgcctgaagattaagctgtccacaggttaatctgcaggtccgttcacaggccagggacacaaaatgatcaagacagagtccccttcaaacaaacaccacacatgtatgttcactgtggcatcattcacaatagcagaaggtgcagacaacccaaatgtccctcagtggatgaatggagaaacaaaacatggcacacccacacaatggaatgctcttcagccatagatggaatgaagtactgccccacgctacagcatggaccaacctcgaagacatcatgctgcgtgaaagaagtcagccagaaaaggccatatactgtatgattcctttcatgtaatatacccagaataggcaaagccacagagacagaaggcagagtggtgattgtcagggcttggaggagggagaaatggggagtggctgcttaatgggtatgggtttcctttagggtggtgaaagtgttctggaactaggtagtggtgatggttgtctaacactgggaatgtgctaaatgtcactgaattgtgcaattgaaagtggtaaattttatgtaattttactacaattttaaaaaaacaacagagtgagagaagacaatcaacagagaaatagatatttaacatatacactatgaagaccaagaagatgggctaaggaggcagagagtgatgacgagggtgctattttatggggtggtcaaggctggcctttctgaggaggatgtgtggggagagccaggcacatggctgggaggagacccttccaggatgtggaggaggagcagcaaaggcctggggcagaagtgagaaggagtgctggggaaccagcaagaggctaccgggactgcagctgcagtgggagggggtggtgaagggatggggtgggggggcagcgggcagaagaggccaagtgcctgcaaccactgtcaggggtgggagcagagtagtggagggaggggcgagtgtggaagcaggaattc

SEQ ID NO: 204378 - DNA, 1000 bp, Homo Sapiens
gtggtacagaaatttcttctggaaacagagttatgattattttcaaatagataaaatgttagcaataaatactccgtagcttagaaaaaattttattactgattctcaaattcattattttttcatttgaccatcacttaaccagcttgcattctatgtatctgtaaagcacgctgacaatgctctaggccaacaggctgtgtctacacttaagccttcaccagttgagccataagcctgctaaggttcagcctggtaccaaaaacaatgctaacttttaaattatgattatataattagacattaaaagtcaataaaatggaggtggaaagaaagctatgtctacatttaaaaagtttaatactttggaaacttgttaaaatagtctaaaggttgtatttccaattaggtatggagtagacagttggaaaagactagggatttgcctttgttttgcagatcagattctttaaattctggctgtaaagaaggggaaactcaaaattcaagatgatgcattaaggatatgttttatagaagaaaatgacttggaaattcactcagtgcacccatcaaaagactggtgaattaagttatatatcaagtattataagtctttgattagaaaatatatttctaaaggacaaatcaccctaatctccattgcatcaaaagagatgactgcttctgaattcttaactgtacaactatagtcattggccttttctctcagagttttagaacaaagtcttgccactatctactcttcacctctccaaatcccaacactcaccattaagaacagccactccagctcctcgcctagccacattcatgggtgcaattaaagtccaggtattattttcaggattgtatcgttctactgtgttcagacaattccaagattctgcacctccgattatgtacaaataaccaccaagctcacagactgcagactggtgtctccctacaagaaaagtcaagtcaagattattgctac

SEQ ID NO: 204379 - DNA, 1000 bp, Homo Sapiens
gtccttttagccaaattcatctctcacagacatctgtaacgattgtgcctgctgctcactgcccgggatggaggctttaatgatgttagcaaactctgaaacctcgggagtggtaatgagcctggcacagctggaaaccagggctgcatccagcgaggcatggggtgtgctctctgtcttctgcctaccccatacctgaagtggtggttttctggggcgaccaccagcctctgcaggaatgcatggggattgttcccctccccaggctcctttcacagcctcacgtgcagcttctctcgacactttcttccccgtggccctgggtgtggggtgagtgcagtacatttcctttcataaatagcactgaaattccttacatttgggcagcacattaggctaatgaaggtcacagagactgaacagcttgctaaggtcttggggctggtcagtagaggaggcaggtctaaaacacggtttcattccaaacctcatgtgattctgagggccagttgcccaggaatttgcacttctcagctaaaagccttacctcccaccctcaccccataccctagccctttcctttggattcctgtggcatctcaccaagttggatacaggtctgtgtccaggggcccaagggaggtccttgaggttgaggtggatttggggtcgtgtaactgagcaccttgcctagtctggcagggtgcggggctctgtaaagatggtctgccaggaggacctctgtgggtgccctggctcctgccacaacagctttcacctcttttttggctcagaagcactatttgtttcctttccctttttccatcttcctcatctctgtcctataggcccagccagcctttcctccaggactcattccttgcaggaataaggctgtcattgaaggatcagacctgaaggatctgagagatcaggccagctctttcttctccctgctgtggctggcaggcatcacacagccctcagagtctgggaattc

SEQ ID NO: 204380 - DNA, 1000 bp, Homo Sapiens
aggtaacatagcaaaacctcatgtcaatttttaatttaaaaaacattagtaaataaactgctttacaattctatgtgaattttaagaaaattccaattgctgtacattctcaccactacttagtattatcagacctttatactttagcctttctaatgagtatatagtagtatctcattgtggttttaatttgcatttctctgatgatgaatgatgttgcttatcttttcatgtgcttatttgacattcctctatatttttgtgaagtgtctactcaaatcttttgcccatttttaaaggtttgcctttttattattgaattctagttctttatatattccaaatgtgagtccattgtcagatatatgtatcagtaatattttttctcattctgtggattgagttttgttgttttaatgtcctctaaagagtaaagacttttcattttgtaaacatccaatctaccagttttccttttacgtcccatgaattttgtgttggatctaagagatctttgcctttctcaaggttgcaagattttatcctatgcttttttccccaaagtttttagctgttttatatttagttctacaatccattttgacttaatttttgtgaatggtgtgaggtcagagtaaatgttaattttgactcatcagactatccaattgtctcagcaccatttgctgaaaaaacaaacaaaaaccctcaacctccgcccttttcctcattgaattttcatggtacttgtgttgaaaatcaattgtagtaagtcccatgtaagtgtgggtctatttttgtactctgttccactacctgtctatctagtcttatgccaatgccacactgtcttgcttagctttagagactacccacaatagtctagtccaaagtcaggtctagcagttttgaaagtaaggtagtttaaggactctacctgtgttcttttttaaaacattgcttttgctattctaggtactttgcagtgccatatgaattc

SEQ ID NO: 204381 - DNA, 1000 bp, Homo Sapiens
atatgatatttaatggaccatgatattccctcacaaatttttccatctctttgcaaatgcacttgagtaaactgttgtataaaatatgtattttcttaaagttgttgctttccaaaatttgctgagaggtatatatacattgttgtctaacattgacttttctttgtatgtaaaatgtccaggttagtagcaaaagcatcagtacagttgatgatacaactgtaatatagttctctgttgttaattacataaaatgatgtggactaattgattgattgtacacttacgccagtcatcctgacagtcttaatttaatcttaaagtatattctgtttgatcatctggtctgggttccaccacactgttcataatatattgagaagcacattcagctatgtggaaatgtgtttttaattcctgggtagtcataaatgacaattataatgatgagcatgatgataatgatgatgataacctttgtgtggtgtgttagaatgtgggaagtaccaccactccgggtatataaatactctttacaatgtctccttttccaaattaagagactactgttccaaatatttcatatgaggagaggttctaatttgatttttatcctcaaatagtttcctgaacacagtttattgaataactatgtttcctattagttattatgcatttgttatcatactataagctcttatgaatagagactgtttcagagctacatgttgtatctacctttctgttgcctcttttgctagtgttttagaacccaacatttccaattataataaatttatcattgttttcatatatatatgccagtcccccgattaatttttgcctttacagtctattatgaaaattttcaaatgcatattttaaaaacacgaattcttcatgaagttgtgtgtcatccttataaggcgccacgtcaatcttttctgattttccagttgtatcatctgtactgctaaatgaacataacatctgagaattc

SEQ ID NO: 204382 - DNA, 1000 bp, Homo Sapiens
gggtaggaggccaaggccaaggcttagctagagggaagacctgggccctctgcacctatatcaggggaactggtgtgatccttgtgctctcatcaaagacaaaatataaaagtacataacaagacactaaaatagattaaagaacttagcaatttagcctatgacttccaacactatattttacaggtagttagcaatgtttcattggcaagccacaattatggaatcgaataatagcccatgttaaggtggtgtattcttttcagcaattcattttcctacagactaccccttcagaaccctaaggttgcatccacaagaacttattatctactactcagcaggctgaggcaggaggattgtttgtgcccaggagtttgagcctttagtgtactgtgatcatgctgtgaatagccactctactccagcctgtgcaagatagtgagataccctctaaaaaaatacattatctaacattatctaaatattaacagcaatagcagcatttgatatgccattttaagattacagtggtctactgccttgatatttttcaagatgcctttgtttctgccatgtgctccaaatccctgatgcctcctggtgccaaaaattacacagaattacaagtgaaacagaatatcttggaaattgactcaaaaagatattatgtgatgatactttaaagtcagaataacctgcattatgctggaacaaacttataataccatccctttaaaatgttatctggccgccctatcagatctcttcttttttatctttttattttttgagacagagtctctgttacccaggctggagtgcaatggcatgatcttggctcactgcaacctctgcctcctgagttcgagcaattctcctgcctcagcctgctgggattacaagcgtgcgcaatcacacctggctaatttttgtatttttagtagagatggggtttcaccatgttatcccagctggtctcaaactcctgacctcaagt

SEQ ID NO: 204383 - DNA, 1000 bp, Homo Sapiens
caattagaatattaaaatattttgaagttgtcttctgtatacttaattttacctgtgggttttatattttcaaatgtttctttggcatattagtgcttttttctgtcagattaaagaactcctttagcatttctcataagacagatgtggtggttgtgaattttctcagcttttctttgtctggaaaatactttatctcctcttcatatttgaagagtagatttgctgaacacagtatttttggatagcagttattttcttttagcactgtgaaaatactgtttcattccctcctggactgtatggtattgagaagtttgttgtcagatgaatgggagctcctttatatgttttttgcttgttttctcttgctgcttttagaatcctctctgttattgaccttgaaagtttgattattacatgcctggagtggtcttaattgggtggaatctggtgttctctaactttctagtacctaaatgtttatatctttcttaagttttagaaacttttctgccataatttctttgaataaacttcctactacttgctcttgctcagctcccttttgaacaccaataattctgattttatttttgaggtatttttctatatcttataggcaatctttgttcttttttattctttttttcttctctgtgtattttaaaataatttgtcttcaagctaattatttcttccctcttcttgactcattctactgtggataacctctaacagattttcagttcaccaaatgtatttctcagtcccaagatttctggttttctggcggggcggggtgggggggttgctatttttccatttctttattaaatttttgaattggttttctgtgttatcttggagataacttagtttccttaacactattattttgaattcttggtcgaagatctcacatatcactgtctcattagggttagtcaccgtttcttggcttttgtggaagtcatggtgtcctgttgttgtttcttgt

SEQ ID NO: 204384 - DNA, 1000 bp, Homo Sapiens
atgttacaatgtatgaagggaacatgaagaaatagaatctggtaaaaaagagttcttgcttttgggaggccaaggcctcctggctaacatgatgaaacctcatctctactaaaaatacaaaaaattagccgggcgtggtggcacacgcctgcagtcccagctgcttgggaggctgaggcaggagaaccacttgaacccaggaggtgtaggttgcagtgagccaagcttgcaccactgcactccaggctgggcaacagagcgagactccatctcaaaaaaaaaaagaaaaaaaagagttcttgctttcaaaactatggattaggtaacttttgtgaatgagtaagatcatgagtattataaaaatagcacctttcttttttgtcttggggaaattatcttattttttaattggatttcagaaaagagtatttcagagaaataaatctctgaaatgctttttgaagtgtgaaagatttagaagacaaaagcaaacctcctgtctagataaacattaaagagatctgccctcccctcctctacctattcaggttgcaacactttgggggtggctgccttggtagagcttgatcgtgactctggtggcttgggagatggcatgctgcacaagggattcatggttacagcgggcttgtgggactggggctctccaatacgtggttgggtttgtaaagaaatcagagctatggtgtgaacaaaaggatatgcatgggagacagtgagacaaggaaatgctccagaaattattggaatataggtcagataactaactgtacttgtgccattttctgggggaaaattctctgaaggctttttgggaaaagaatggaagtgagaattctcaggtcctcaaaatatttccttttactcagtcctaacctgaggccgttaaagaattcccagagtcacgatggaaggcatgtttgggagtaagagccagagtgagggttagaaatgtgttgttggccaggtatggtggatc

SEQ ID NO: 204385 - DNA, 1000 bp, Homo Sapiens
gggcatggacacattaatgctaggtgaaagtccagactctccactagccttcctctgatcatatccaagtggggaggggaagagttaccttattaccacttagtggaagtccagactttccatatggtctccactgacacctcaggaacagaagtgtcttttagggatttaaattccaactccccacttggctttttctgacaccaccctggcagggggccatttgggtattttgtgatagcttgatgaggccagaaatctagactcctgacatggccttttctggctaagtagagccatagtgttttctgtagtatttgacatagagcagttattttctcaagttttctgtgttactaggctcttttctggtcctttggctagaaagagatggcttctatttgtggcttttttttctgttcccgtgttatgtatgggttgccagcttcttcagctccaagtctgggttatatgaggcaaaaagaaaacccatgaaactcacaatcgtgttgttccttaggtcctgtggaccctagtcaatctgccttctactctgaatttttcatgatgggttaatatttgtttcataatgtccatgggctttagttttacttagtggggggagtaggaaaaatatgttgactccatcttcccctaaaactagtttgtttggtttggtttggttttttgtttttttttttttttttgagatggagtctccctctgtcgcccaggctggagtacagtggtgcaatcttggcttactgcaacctccacctccagggttcaagcaattctccagtctcagcctcccaagtagctggggttatttttgtatttttagtagagacgggatttcaccatactggtcaggctggtctcgaactcccaacctcaggtgatccacccgccttggccttccaaagtgctgggattacaggcattagccaccacgctcagcctaaatctggtttttatatcttaaggaaatgcagaattt

SEQ ID NO: 204386 - DNA, 1000 bp, Homo Sapiens
cgcctcccaggttcaaacagttcttctgcctcagcctccctcatagctggaatcacaggtgcccgccaccttgctcagtttttttttgtatttttaatagagatgaggttttaccatgttggccaggctggtctcgaactcctgacctcaggtgatctgcccagcttggcctcccaagctgctggggttacaggcgtgagccaccgcacccagcccctctgtttgcttttttttcttttttgtatttttagtagagacaggactttgccatgttggccaggctggtctctaactcctggcctcaagtggttcaccggcctcggcctcccaaagttctgggattataggtgtgagccaccatgcctggcttgttcatgtgtttctctctctctctctctttcttttttttctttttgagacagagttttgttcttgttgcccaggctagagtgcagtggcgggatctcggctcactgcaacctccgcttcccgggttcaagtgattctcttgcctcagtgtcctgagtagctgggattatgggtgcccaccaccatgcccggacactttttttgtatttttagaagagacggggttttgccatgttggccaggctggtctcaaactcccgacctcaggtgatccacccgcctcaacctcccaaagtgctgtgattacaggcataagccaccgcggccagcccatgtatgtttctattcaccatttatggagcatctattggctaccaggccttggctacaggaactgccatgtggcgtcagaaccctgaagaagttcccagtgtgattcactggatggggtgggaagaatcttctatctgctatggtaggaacagagggctgtgtgcaggtgacaggccaggcctggaatgtgaacctctaattccccatcaagtgtgatagaagatgctgagtgcggtggctcacgcctgtaatcccagcactttaggaaaccaaggcaggcggattgctcgagctcagg

SEQ ID NO: 204387 - DNA, 1000 bp, Homo Sapiens
gcaggggaaaaggagaaatccacctgccggctttaagatttattgaaggctgccagcacagcccagatcatttctgtggcactaggctttgtcccttccacttcagggtccagttctactaagtccttggctcgattcattgccacatcatacttgtcatctgtcagagaggagaagacattctctagcacatcagaggagtgggctagcaccaggagtgctagtgttcgcttgtccatacgctgagggtcatttacccaccgctctagtacactatcttgaagttttttcactagtcgctgtttctctgttgtattggtcactggatgagtagtcatgtcaaatagcaggaaattctgcttctcagtggttagaatacctttctctactaggttctttgcgatgcgctctcgtacatttctcagctggtactgtaatttgaaggggttccaggtctcacctatgagaaaaaagaaataggacataatgaactgaaagagaaaagcaaaatgaaacatgtagttgtttggaaacttgaatggctaaaatgtttaaaagcataatcttcattcctcaattcatttaatccttagtcctttataatctggctttgactccaaccacatttcacattaaaccagcttcaaaaaatgtcaccaaggacttccatattgctagagcttatagactttatttctgttcttatgtgacctctgtgacactgtaattatttatgtatttttcaaattctatttaggacaccagtctctcccagatgatttctactctatattgtggaagttctatttgctggtgaagctaagaggactgaggttccctaccctatttgtagagcagaagctctatcccaggcctggtaggctgacaatatttagacttcaattgctcccattccagcttgttcgtagattagagattctgcaacagaaaaggcaagtcaagaagaccaggggctaacacctctttcccccagcaccta

SEQ ID NO: 204388 - DNA, 1000 bp, Homo Sapiens
ctggaatggaggtcttatgacctacaattaaatgagataggtcaggaaatttatttatgtccagtttttacacagaaagactggagggggacacaaagtcatatttttcggttttatggctggctgtggggaaaaggagttccggtttctatgacctgccttggagaagagggattctagtttctatgggtagccttgggggagttgggattgaaagacaggagggtagaagaaggtcagagaataacttttgcttctgaggccttcatttggggtattgttttctgattccaacattaggaaaggttttgcgggacacctggtccttggagattgagagtgagggcatttgaggaggccagtacaagccaaagtgaaggccccagccaggcagcagtagaatggttacttgggatacagcatagtggctcaaggtggagatgccaccaccaggcacacctgtgccagtctccagatgtggcaccctgggcaagcctctcaacctcagcttcctcacctactagccacccccttgggggatataaagatcatagtgacttcttggaaagcgcttagcacagtgcctggtccattatgtatcataatacaatttaattgccagtgttatcgaatgaccattctgaattttttcattcagcctgtttattaaataataatattggcaactaaagtatgttgaggagtagtgacagctcgcatcagttcaggagagtgagagatgggggcttttgaagacttgacggaagttcctgagtactttgacctgaggattgacctgagtccggagtgcagtcaagtgagactgtcattagtgtgtagaaaatgaatatggaaggcatggtgttaggaaggctggcccacccagtgatgcacaggctggatcattgagcggggtactggagctggcaaatacagctgggacgcagttctagtaatgaaagtccgaaagggaagcaaagaagagcagatagaaggggga

SEQ ID NO: 204389 - DNA, 1000 bp, Homo Sapiens
cctggcttgattgtcaaactgggaaaaattgtgtaagttggatgtcaggctataaaagattgtggaaggcaatagtgagtaaaataactgaaataataaaatgtactagagaagatcaatatcggatttgagcaggtagaagagagaaacagagaacttaaagataggacaattgaaattttctagtctaaagaatggaaagtaaaaagaattttaaaaagtgaacagtgttttaaaaattcaaggtggcagactaagggttttccagcacaccttgcccatttggaaacagcaaagtgtgtgtagcaattcatgccatgaacttttatcttagaaaaaatatagaagttaaacaggaaagaaagaaaatttcaaatactggtattgggggaaattcagccagatatcgggtgaaattcacccctgatatttcacgtaagttcttttctattttccctaagtgttggctggtctgagaaataaagggagaacaaaagagagaaattttaaagctgggtgtccaggggagacatcacatgtcagcaggttctgtgatgccccttgagtggtaaaaccagcaagtttttattagtgattttcaaaatgggagggagtgtacgaatagggtgtgggtcacagagatcacgtgcttcacaaggtaatagactatcacaaggcaaatggaggcagggtgagatcacagggccacaggactggggtgaaattaaaattgctaatgaagttccaggcacgcattgtcattgataacatcttatcaggagacagggtttgagagcagacaaccggtctaaccaaaatttattacgtgggagtttcctcatcctaataagcctgggagcgctatgggagactggggcttatttcatccctacagcttctaccataaaagacagccacccctgaagcggccattttagaggcctaccctcagggatgcattctatttctcagggatattccttgttgagaaaaagaattc

SEQ ID NO: 204390 - DNA, 1000 bp, Homo Sapiens
gacatcctaggcagacagcctgcgggacgaaccaggagggctggctccagtaaggcaggagcttgagatgaaaatgaattctcctacgcaacagtcccacaatttgtgccagtgagacacaggatttgcaaaaaaaaaaaaaaagaaagaaagaaaataaaaaaaaatgttcatttataagagcaggcttttacctaaatgatgccttccagctgaacagcctaaagcttctcatgccacctcaaaatgtgagcataagcaagcaaggaggtttgggatctttccattttgctgacagaaagaggaaaagcatagaaaagacatgtagtttgtttaaatctcaccaccagccacagacagggccagacgtcagtgaggttttatcctgcagtctcaccttttacctatggtgtgaaggggatttttggtattacagcctttaggaaaaaagcacaaaaacctcagacacacaaacatgtaccaatcagcagatatctgaaaaacaaaaatttacagaagttttgcctcttttcctagtttctctgttgttttcacaggtttgggtttttttgttttgttttttttctgagacggagtctcgctctgtcgcccaggctggagtgcagtggtgcgatctcggctcactgcaagctccgcctactgggttcacgccattctcctgcctcagcctcctgagtagctgggactacagctacctgccaccatgctcagctaatttttttgtatttttagtagagacggggtttcaccttgttagccaggctggtctcgatctcctgacctcatgatccacccgcctcagcctcccaaagtgatgggattacaggcatgagccactgcgcccagcctgttttttgtttttaacatatgccatttgtctcctatgtcaggacaaaagcaccttatagacagacggcaaaatggcagctgcccattttctctttcacctcaaacagtccctggcttgcctgcaaagatc

SEQ ID NO: 204391 - DNA, 1000 bp, Homo Sapiens
ccatgcgaatatacccaactgatttttgacaaaagtacaaaagcgatttaataaaagaagaataatcttttcaacaaatggtaccggagtaattggatatcagtagccaaaaacctcaacctaagttttacatatcatacaaaaattaactcaaaatggaccatggactcaaagtaaaatgtcaaactataaagccttgtttttaaataggagaaaatcttcaggatccagggctaggcagagttgttaggtttgacactgaaagtgcaatctataaaagaaaaagttaataaatttgacttgatcaaattaaaaacttttggtctatcaaagactgttaaaaagatgaaagtcgcaagctggtagaaaatatttgtagaccacatatctgagtagtattttgaatatattattaaactctcaaaacttaacagctaaaatatttttaaaatctaattagaaaatggcataagacaaaaagacaccaaagaggatgtacgatggcaaattccacttcaatgtatttaccaaatagaaaacatgtccacacaaggacatgtccacaagtaatcatagcagctctaatcacaatggccagaatggaaacaatccaagtgtccaaaaacagataagtaaagaaattgtaatataaccctacaatggaacattactcagcaataaaaagtaacatcataacaacacactgcaagacacaaaaacatggaagaatctcaaaattattacaacaaattcaagaaaccatatataaaagagtccatactggataattgtatttatacaaaattctagcagaggcaaaactatgttgacagggagaagatcagtcattgcctagagttaaggtgggatataggtggggactgacttcaaagagacctgagggaaatttggggtaatggaaatattatgtatcttagttgtgggaatgttgcttacacaggagcatacaattgctgaaactcatccagctagaagatgt

SEQ ID NO: 204392 - DNA, 1000 bp, Homo Sapiens
ttgggaggccgaggcggacagatcacaaggtcaggagttggagaccagcctgaaaaacaaggtgaaatcctgtctctactaaaaatacaaaaaattaaaaaattagccaggcatggtggcacttgcctgtaatcccagctactcaggaggctgaggcaggagaatcgcttgaacccaggaggcagaggttgcagtgagccgagatcttgccattgcactccagcctgggtgacagagtgagactctgtcaaaaaaaaaaaaagaagcaggaaaaaagacaagcagtctaaaaagacaatataagcattataaccagacccagctatgacacaaattgttttttctaggctggaaattttaaataactatgacctgttaagggctccaaagaaaatggtagacaacatgtaagaccagattggtaatgtaaacggagagatgaaaactctaagaaataatcaaaaacactgtgacaaaaataaagaatgcctttgatggtctcaatagactgaatatggctgaagaaagaatccatgaactcgaagatgaattaatagaaactcccacaacataaacgtaaagaccaaatagagtgaagcaattacaatagaacatccaactgtgaaacaatttcagtaagtgtagcacgcacaactgaaataccaggagaagaaaaagaatggagcagaagatatatttgaaataaaaatgtccaagacttttccaaaataatgacagacatgaaactgcagtttcagttagctcagagaacaccaagcaggataaatgtaaaaaaaaaacccactatacataggcatatcatattcaaacttcagaaaaagagaaatctttcaaaaaagccagaggaaagaacaacttacttacagagaaacaaggaagagtattacagataacttctcatcagaaaccacacaagcaggaagagaatggagtgaaagatttaaagtgttgagagaaataaacccactaacctgaattc

SEQ ID NO: 204393 - DNA, 1000 bp, Homo Sapiens
ttctttccagtattgttgatatccccctctgacagcatgcagacaccttttaaaacaagagggaaaaaccgaacccttcctcaaccctgtacccctggacagcctttgaaagatgggatggggccgggcatggtggctcacgtctataatcccagcactttgggaggcctaggagggcggatcacgaggtcaggagatcgagaccatcctggctaacacggtgaaaccccatctctactaaaaatacaaaaaattagccgggtgtggtggtgggcacctgtagtcccagctgctcgggaggctgaggcaggagaatggtgtgaacccgggaggcagagcttgcagtaagccgagatcgcaccactgcactccagcctgggcgacagagtgagactgtcacaaaaaaaaaaaaaaaaaaaagaaagaaagatgggatgggagagcagaagagggtctccacgtttccctcatggggctggctactaaaaggaatattatctgataaatgatggcaagtcccaaacatagcccctaccttatagcaagcacataaatattagccattcttctcgtcgctgttgctattattattttaagtgttcatttcagtgcttgctgccacagagtggaatctcttacaaagatattttaggcaccaattagggttccaaatttaagagacaattcacagaactcacttgaagtaaggaaaggattgcgaatattgcctgttcccacttgatcagccagacgctgtcttcctctgcctgccagctggcaagttttaatttgcttgctcttttagttttttttttttttcattaatatgtctgcatataaaagtgaggcaggagactggcaggacttgttttctggtcacaaccctgatgagcaaaacaggatctggccgacaggataaagtgaagaaaccactgaaaccagcagatggagacaaaagccatccctagctgtcctcgttactcattagcataagacattc

SEQ ID NO: 204394 - DNA, 1000 bp, Homo Sapiens
gcattctctgcaccacatggctattaggtgaagaacaaaatgcccacgcagcccctagatccttccaaactccagagtctgaggaagtctagagaggcagagccctgcggaggcgtgtaacccacgcctccatctccagagctgcccttggccttgctcagaggaagaaagctcctgtttggtcaaaggggagggcatttccttgagccatgggtcctcctcctacttctatccatcctgccaggagcacagtctaaccctaatctttcttgctgtacccaaggcccatctcctttcctgtttccccaggggaaaagagaaaagctgatttctcatccttggcctcactgtgtggtcacacagacactccttgggcctggggctgggggatcctctgctgtgacccagtgagagtggcaccactgtgaccgggggcagtggtagaagggagcacctgatccagtgcttttcagatgggttcctccagaccctcaagttgcacagagcagcccagggatttcttggttgggggagtggtggagaggggcaaggccctgaccccctcacttcaacccagcagcactactcatctgttctatattctggccttccacttcagatttcttttgaagaaaagaattctactgctaaataaacatttgagaaccattcaccttattcaatcccctcattttacaaaaagggacattgaggcacagaatttgagcaaggtcacatagctgtggtgttggaggctgggacccaggcccaggcatccccccaggccagggcatccccccagggactacctgactgggcccctggctgctccaggatgtagggaagccttttctgggtcgcctgcacggctcctgcctggctctccgtgtggtccagcttcatgtctggtcctcttggagaacccctggaatcctgcacaccctctcaaatgaagctgccttggagagggtcaggagcccgggtaccaggtaggcctcct

SEQ ID NO: 204395 - DNA, 1000 bp, Homo Sapiens
aatggtttgttaaataagtattaatacaaccaatatcaaataaattgacttatattaaaaagatttatccaggatgattatacactactaccactatattacaaaatttcattttttggacatgagtcataaattgcattgatgtgcagtgggcaaaatgtaacttctgtttaaatcaagaagcaaagctaagataattaaaagtctactttttttttttttaatggccaggttcaggtgaataacgctgaggatactgaaagaggaattggaattctgaatctgtcaattagctgctgaaagagaccaaattgattgcttaagtgaacaatcaaacaaggagtataataaaagttattctttagtgggaaggagaagaaattggaaattcaggtcaaataatcaaagttctgagaaagtctcatagatcccaaagaattagagaccatcattacctttctcaactctcaacaaccagtaggaaaacaaattccacaaagagtcgtgaatgaaacatttaaaccgttaaaatctcttgtttttggaaacgattgtaatttccatgtcagttttaagttacattcagaataaggattgtactttgattttggggatatacttacatggcttcttaaacaactttgttcctcttcattataagttaaagagtgaacattattactttaggcaattaacgacaaataaagattaaagaaatatttcccccatcccaaagaaaagaatgttcttgagggcatgtctctgtctgcattcatagatcccttccaagcgttctccaggcattggaatatcttaagtcttcctaatacctctatgtacctgatcagaattagaaaatattggcagatactggactgagtaaaagaagggcaataacatgaattctggcctttatttgttcttctcttgagaatgtaatttttaaaataatgttttggagattttactatttaccatgctgaatattttttagtagata

SEQ ID NO: 204396 - DNA, 1000 bp, Homo Sapiens
atttttgagtccttttcttcttgcaccagcattttctctgcttggaaaagccttcctgttggtggttcctgtctctacctatctggcaaaggctcctggcttttccgggttctgattgtaactggatcatgatcacattgcttactgtgttccttcctgggttcacaacatacaactcatccacttaaacaaatggagagaaaacagcaatgcttttcagaccttgtgtttgtattttagtcttaattcaaatttatcatttgtctctaccacacccccttaacttactttgttcaagttgaaaattacggtttatcacatttttggggggagaagggaagaaaaagaatttacaaagtgtcactagatgaattagtcctacagtttagtttgaattcccggtctcaattttatattttgtctagaaaacgaagcatttaagagttcattttttaagtgtttatggtgaagagttaaagagttttataaagtgtctatgctacaaatactatcagaagaagaacttatcatgcaaaaatggttgcatgtttattcttccttggagaattgttcttcaccaaaaaccctgttgcaagaagcagttaggtacagttaagagcttgttgtgcagaactcaggttacttcatatccctttcaagaagctgtggtctgcctcatcaaaatgctttctaacgactgtgaacagtagatttctccacacaacatcttaagaaaacttatacttacttggaaatttgctgtaagaggattgctggtgtggatttgctgaacggaaaccatttctgccttctagaaaagaaaagaaaataatgaagaaaatttgccttaaccacgctcaagcctagctattttctctgaatgtttctattcactttaccagaatatgttaaacaaatatttattgagtggctaccattttcagacactgtgctagaagctgaaagaaaataagacaaatagattccttagggcaagatc

SEQ ID NO: 204397 - DNA, 1000 bp, Homo Sapiens
ggcagatcacctggtcaggagttcgagaccaccctggccaacatggtgaaactagagactagcccgtctctagtaaaaatacaaaaattagcctggcatggtggcttgctcctgtaattccagctacttgggaggctgaggcaggagagtcgcttgaatctgggagacagaggttgcagtgagccaagattgtgccattgcactccagcctgggtgacagtgcaagactccatcaaaaaaaaaaaaaaaacaaaagcagcttgtttatacaaaggccctggaggtcggaactgcagggtgtttggatgtggcaggagtatgggtggtaagaacagtaataacccttttttctttttctttttctttttttgtgacgcagtcttgctctgtcttccaggctggagtgcagtggcgggatctcggctcactgtaacctccacctgccgggttcaagcaattctcctgccttagcctcctgagtagctaggactacaggcgtgcaccaccatgcctggctaattttttatatttttagtggagacagggtttcaccatgtcggctaggctggtctcgaactcctgacctcatgatccgcctgcctgtgccccacaaagtggtgggattgcaggcgtgagccatggcgcccagcccccgcccccccccccccctttttttttatacacagttttactcttgttccccagtccggagtgcagtggctcgatctcagctcactgcaacctccgcctcccgggttcaggcaattctcctgcctcagcctcctgagtagctgggattacaggcgtctgccaccatccccagctgatttttttttgtgtttagtagagatgggttttcaccacattggccaggctggtcttgaatttctgatctcaggtgatccgcccgcctctgcctcctaaaatgctagaattacatgcatgagccaccatgcccagcaagaacagtagtaaccctgcaagcttattgtgtgccagg

SEQ ID NO: 204398 - DNA, 1000 bp, Homo Sapiens
gaccagcttggccaacatggtgaaaccctgtctctactaaaaatacaaaaaattagctgggtgcgttggcaagcacctgtaatcccagctactcgggaggctgaggcaggagaatggcttgaacctgggaggtggagcttgcagtgagccgagatcatgccactgtactccagcctggaagatagagttagactgtctcaaaaaaaaaaaaaaaaaaaagtgagaaaaagaagtaggagagaaaggataagaaaattagagagctggtcaaggaggactaacctctaaataacaggagtccagagagaacagaggaagtggaagggagaaaattaaaaatgaaaaattcataaaaatgtcccacaatcaaaggacatgagtttccagtttgaaagggccactggagcatcagcacaatggttaaaaatgggcccatgccagatatatcatcatgaaatttcaaatttctagaacccaacagatgattctacaagcttctggagagaaaaacattcttacacacaagatccataacaatcagaatgccttgggcttttcaatagctgaagcattgaaagctggaacagtggagtgatactttcaaaattgccggggaacactgggcatggtggtgtatgcctgtagtcccagctattcaggaggctgatgggggaggatcgcttgagctcaggagttctgggctgtagtgtgctatgccaatcgggtgtccacgctaagttcagcatcaatatagtgacctcctgggggtgggggaccaccagattgtctaggaaagggtgaattggcccagattggaactggagcaggtcaaaactcctatgctgatcaatagtgggatcgtacttgggcatagccactgcatgccagcctgggcaacatggtgagggtccatctctttaaaaaaaattaccaggaaaaatggtctccagctggaattctatacacagtcaaatgtcaagcaaaagagaagggagaattc

SEQ ID NO: 204399 - DNA, 1000 bp, Homo Sapiens
aaggtgggtgggtcagctaaggtcaggagttcaagaccagcctgaccaacatggtgaaaccccgtctctactaaaaatacaaaaattagccgggcattttggcagacacctgtaatcccagctactcgggagcctgaggtaccagaatcacttgaacctgggaggcggaggttgcagtgagccgaggtcatgccagcccaggagacaagagtgactccgtctcaaaaacaaaaaacaaaaaacattgaattttactaaggaaaattaatcacaggaattctgttcatatgagatagatcttttgttatgcttgaggtagtgggacataaggagtatttgtttagaaaaaaattttaaattaagtggtattttggataagagagatatcagtattttttaaatgtgacaataaagttaaaatacaataataaaagtagtcatgcttatttttaaacacatacgctagaatttatgtcttgggagtatcattcttgagtgtagttaccatgaagataatatttgaaatgtaaactatgtagctattggccaggcgcagtagctcacgcctgtaatcccagcaatttgggagactgaggcgggtggatcatttgaggtcaggagttcgagactagcctggccaacatggtgaaaacccatctctacttaaaatacaaaaattagccgggcgtggtggcgtgtgcctgtaatcccagctaccctggaggctgaggcaggagaattgctagacccctggaggcagaggttgcagcgagctgagatcgtgccactgcactgcagcctgggtgacagagcaagactctgtctcaaaaaaaaaaaaaaaaagccgggcgcggtggctcatgcctgtaatcccagcactttgggaggccgagacgggcagatcacaaggtcaggagatcaagaccatcctggctaacacagtgaaaccctgtctctactaaaaatacggaaaattagccgacctggtggcgggcgtgcc

SEQ ID NO: 204400 - DNA, 1000 bp, Homo Sapiens
cttttttgtgtttaagctaccatgcatttttgggtctgctcattgtaggaacccgcctgctgtaacttatatatataagatgcactggttaggagtgatcctggaggtatggggcccagtctcccagccacccagcatcttcatttagtccttcataatctagataatgtgttttattagagatttcagaatccttgttttttttatagcagaatgtaaagtaaattaaaataaaaaatacaagagggtaaagggaacagaaatgctaagttactcacataccttccatatgcttggggatatataagttatgccatcctaagattgatgacttgcctagatatgcctactgttaaagaaaaggttctgctgacccttaagatggcatggaagatcttattcaacgggactactgcaatgactaggaaagacacattgggttcaacttcaaatacaaaaatgaaaagtgagaatttacagccttggagcagggtcgggggtcagtgaatggaaaattactaagagggaacatcgggggaaaaaattctggataaatgggctggacaggagtcttgttgaaggcagttcaatgtgggcagatgtcaactgagggatgctgaggagtgagggttgtgatcagctacgaagagtgattggaatcaagggtaggggactctcattgaactgacttgaacaagattcttgttcttaagaaataggcccaaggacaggccttgaaagacagcttaggggaggttgaccaaggtcaggtcagggagagagccttttcagtattcagggtctagattagacagttggatgggcatcttcattgttcagacagcactatctttgtttgctagtgtattaaaaataagacatttaacaaaactcaaaataataatttaaaaagttggtagccacttggtttgtgtatcgttttatgtttagtgatgatcctaagtcttagcttacaaatgtccatggctaagaagaattc

SEQ ID NO: 204401 - DNA, 1000 bp, Homo Sapiens
gtttcctcaccaaatttatatgttgaaacctaatccccaatgtgatggtattaggaaatggtacctttgggaggtaattaggtcacagatatagagtcctgatgaacggaactaatgcccttataaggggctgaagaggtcagagttcttccttccaccatgtgagaatacacaccaaatctgccagctccttgatcttaaactttatagtctcaagaactgtgagatataaatatcttttgtttataagccaccagtttatggtactttattatagcagcctaaatggactaagacaaagtggtactgaaacagttgaatatccagatgcaaaaaagtaaacaatgatttttatgtcataccacatacaaaaattaatacaaaatagatcacatatccaaatatatctaaactataaaaaaaggtctagaagcaagtatgtgagatattcattgtagttttgggttagacaaaatttttcttagatacaaccaaaaaaacaggaaccataaaataaaaaaatgataaattggatttcatgaaaatgaaaaactctcactcttcaaaagacaccaatggaaatgaaaagaaaagcaacacagtctgataaaatacttgtagacgtatgtctgataaagaacttgtttctaaaatatatcaagaactcttataattcaataatggtaagacatgacacaatttaaaacaaacttggctaaagatgtgaagacatactttgttgaagaaaatatatcagtggcaatggtatgtgaaaagatgttcaatatcattaatcatttataaaatgcaaattaaagccacaatgagatagcactacacatctattatatggctaaaatttttaaaaatagttgataaaatcaagcacttaagaggaggtatggagcaaatgacattctcatacatttcaggtggaaatgcaaaagggtacagccactttggaaatgccatttgacaatccttacaagttaaacagatc

SEQ ID NO: 204402 - DNA, 1000 bp, Homo Sapiens
gcactctccctcttagagaggggacactccagcaggaactccaggtagagagctgttctgcagtgggcatttctagctcagggccagcctccgagactctccaggagtggcatgaaatgaggtggatggggcttccttgtcctggccatcatgtgcctacagcaggcattggcaagctttttctataaagggccagaaagggttatggaccatcttctttgatgtttttattttacaactctttagaaatgtaagaatcatccttagtttgaggtgccatataaaaacaggcggcaggcaaatttggctcacaagcaggctgcagtttgcagaccccctcctagaggaagatgctgaggcctcaccaagcagcccctccccaccttccctctctagcctgactcctccagactcattccagctgcacgtggcacctgtactaggccgcaggatggccttcttgctgcaggcatttcaatgagaaaatatgctgcatggatcatgagtgattctgtctccctcgtgcttaaccttggaagcacaaggccctgctggcctcacctcaaggtctcacctgcccatactcatgcgaccttgtccaccatctctccactacgaggtgccatctggtaaatggcctaacttgggttcttcctcccacgcctcctgtgtaggttcagggcagggagaccaaggtaaatcctgtcagttctatctgaaggcagagcctggatccaatcacttcccacccctccaatgctatcacctagaacacagccacagcctcccatctggactccctgcttcgatctctgccctcccccgtccccttccaaaagctcccagaggcttcccatctcactcaaaataaaagccaatgtctctgagcagtgaaagccacccaccatggtcatccaggtcctatcactgacctgctgagccccaactggcccgcatggccacctggctggcctcagtgcctcctctttcccctagctga

SEQ ID NO: 204403 - DNA, 1000 bp, Homo Sapiens
ttagctctcctactctgttaagcctcaaatagagcgagacacatttgtgactgctgtttcagctctcagaagatgctttttgcaagttccttccactgctgcctgctgaaatacatccagcttcccagatccaaagtaatagaagtaatttcctatggagttaaatttgttttgttttgctttgcttttgcttaaacaagttgatttctaaaattcagcttggacaaggaaattaaaattttggtgacaacaataaaagttaaaatacttaaaaacagtctttttatagcagaagcaatcaaattagaataacaagcataggaatacacaaagcactgctgcagaagactctgcctccaccccgccccaaccaagggaaacaaaaactttaaaaactgtacacatttgatataaatttgaatgaactcatgttagcttgtgttgtgagccagttaacagaaatattgacgttaaaggttctttttgagtcatttagctttcactgttttgggagaaatcaggatgaaaagggttagcatgcctaggaaactaaaaagaaggacacactttactttttactttttaataatataactgctaaagaacatcattatttattacgtagaaataaaggcttagaagacaagagtgacttttcaaaatacctacatttcctgagctctaattttgtcatatttccatttttatttgtaaatctaaatgtaccattttccagtaactagcaatcttataattcacaacaacacatcttatgcaacaaataaccaagccaaactgtcatattctacctacggagcagttgttctggcagcccagcaagaagaaggagaataatgttctccacttgtagcatgcagaaattcactaatccccttcttttcacggaagatctttctgtcttgtgtcctctggtctagacattgggtttatcctctttactgaacaacagaattctcaagctactcaagatgaatgaggg

SEQ ID NO: 204404 - DNA, 1000 bp, Homo Sapiens
accagaaccgtctcttgtactctacataaaggtgaaacctctatcctaatttctctttagattagtttttgaactttatgtaagtgatgaaatcatgtagtttgtattatttttgtctggcttctttcgttatatttttgtgacattcactcctgttgttgcatgtagcaatgctttattcatttttattcctgcatgattttttttgtattactattcatttacccattatactgttaatggatatctttgtattaactgttagactattacaaataaaactgttaagaattcttttttttttttttttttttgagatggagtttttctcttgtcgcctaggctggagtgcaatggcatgatcttggctcactgccacctctgcctcccgggttcaagcgattctcttgccttagcctccagagtagttggcattacaggtgtgtaccaccatgcccagctgatttttgtatttttagtagaaatggggtttcaccatgttggccaggctggtctcgaactcctgacctcaggtgatccacctgcctcgacctcccaaagtgttgggattacaagcttgagccaccacgcccagcccagaacattcttaaacttgcttgctctatatttctgtacatttctgttggatataagccagaagtagaattgctgattaatagggtttatgtgtgttcagcattagtagattctgcccatgtccaaagtgattgtaccaaattacactcccaccagctaaggataattcccattgctgtacatttttgtcagcacttgaaattgtcactttttaattttagccattttgtagatgtgtataacaagatgtcattgagcttttaatttctattttcctgatgacttaagagattgagcacctttcttgtagttactggccattggatagcctcatttttgaagtgcctgtacaagtcctttgcttatttttttgtgctctttttgtattgattagtaggaattc

SEQ ID NO: 204405 - DNA, 1000 bp, Homo Sapiens
ggtttattttcataattgttctctatccccaagtcataaaggtatttacattttttaaaaatgttttttgagttttggtttcatggttatatttttaatcaatctcggcatttattttttgcaaactgtgaggtaagtttccaattttattcttttcctcatggctggtcaattctcccacaaagtttatgggattctctatccttgctgtgttagttgagtgacacatctgtcacaattcaaaattctttttatacatgatttatttctgtgctctctgttcagatttgtattttttgttatctttggtttatgcattttatttataaagttgtaaaatgctggagtaatttccatttaacaatatagtaacttagattattacaatttgaatagagattattttaagtgtagctatctcatttaagtgtgtcaaattggcaataggttttcatgataagagtttaattatattcatatttaaagttatgtatgactagtattttagagatcttactagggatacacagaagaaaaaagaaaacttagacttgaagatagtagaagtgaatctattataggatatagttaaaatttccagtctttcacctcctaattatcttacttgtactggggttgatgcaagttttagactcacaaactcacatttcccagtaatatgagtccattctgcttgtcccttctataatacatggtcatgaaaatttaatgaagcattgagcaactcttactcattgaatgaaaacctacctaaaaacttttttgagaggcaacccaggcagtccttctccaaatgaatttatttattagaatatgtaactaacaattgtaaagcaaatatggggaggaaaaaataaataaagtcaaagaatagacagaagtagaatgattgtgaagaaaaatgtattggaactaattaagaagagaaaggtcagaatgagccaggtgctgttttttcatttattataaggttgaattc

SEQ ID NO: 204406 - DNA, 1000 bp, Homo Sapiens
ggatgctagctgatcaaagcagcttggagtgctgctgcaaaaggctcagacctggagagtgactttgcatgagtgagaagtttgtaagccactggagttttttgtcaccaaagcataacttaactgatcctcactaatgtccccccatatcaactgtgggaattcagtaaggtaacacaaataaagcacttcctgatacataatatcgtctcaatagagttcattatttcctaatatttatatgatttgccaatattatttttcttcctagactgctgtttcacttttctctgacatctgatacattgatacccatttcaaataagatcagctgacttgtaatgtatagctatgcatgtgctttgcattcttgactatatttattctgagaacaaaagagtaaggcaagttttaatatcctgctactactgctactaatacaataataaaaattattgttgtcactgatgtgtttccattttggacatgaggaaatcaaagatgagggaagtcacacacctagaccaaggtcatacagcaggtaagtggctgagataggatttaatcccaactatgtcagactccagtcctagtcctaaccaccatgttataccatatcccacttccaggatacatgacaaattggagaacttcaacgcagtgaaatacagaactgaaagtgctgtaacaattaagagctttcttggcaccagaagcagccttccatcagcttcagtgctcagcctgcattcccccaggcagcctgacctcctgcaaccaaccttgggaggaagtgaacactgaccgtgctgctgggacaggactgtgaaatcatcctccacagcatgctgccacatttcaggatagctgcgttgtgctctttcgcattctgcttcctctcttccaacctgacttcagtctctccctcgcatacataccactgcttgcctactgctttctgcctttactgcctccactatagaagtagaaagctgaattc

SEQ ID NO: 204407 - DNA, 1000 bp, Homo Sapiens
gaggaaggagaggtaaaagaaaatttggctaaacccacaaagataacttttaaagaattcatgttattttggggtgtatatatatatatatagtgtggtagaactgaccagaactgattgtggaaaaaaagtaagccattttgttgttcaagaattaaggaaatgtttgataagcacatggtactaatgtttaactaggttttttttggtttttttttgggtttttttggttagacttatcaccacccaagcttgtttttccctagccagtacttaggcaatataggcagtgtagctggtcaaattctgacatctctgaaataacaaagtttcatgtattttcgacaaactgcacaatttctgaatagtcaaattaggataggttggttttatttcggattatttgatccgaaatatacctgatttggttagaactgaagttactaattaatctgaagcaacatcatcacgggtgtttccttcgatgcagctgacttacaggtttagaaactggagtgcccccaggggcactcgtggggtccattgtggtccatatgaaagcaagtctcagcattaatcctgaagattaactgcccactttttctttcaggaggatgaaggagaagatgactaaatagaacactgatggattccaaccttcctttttttaaattttctccagtccctgggagcaagttgcagtcttttttttttttttttttttttttccctcttgtgctcagtcgccctgttcttgaggtctcttttctctactccatggttctcaatttatttggggggaaataccttgagcagaatacaatgggaaaagagtctctacccctttctgttcgaagttcatttttatcccttcctgtctgaacaaaaactgtatggaatcaacaccaccgagctctgtgggaaaaaagaaaaacctgctcccttcgctctgctggaagctggagggtgctaggcccctgtgtagtagtgcatagaattc

SEQ ID NO: 204408 - DNA, 1000 bp, Homo Sapiens
agataggtgagtttttgcaagcctgtctttctagagttccctagtattctttagagtgttaggcctatcattctcagctacccaccagattgtactttactaaggcacaggcaactgtaagagtcagacaatacttgatagtgttgatattaacacttgagatttgtgatcacataggcattgatttgagtcctgactctatcacttactcctggattatatgaacttggatagattatttaaggtctctaggtcttatctgtaaaatttcctaatctgtaaaaatagtgtgacaataataaatagcctaaccaaaaaatagacttaaataaatgtatgaaaagcagagtaagtgctcaaaaacttagctctactcttatgcaaaaatgaactattttaagcagttacatgatacaagaaatcagcttgataatggaaaaagatcatagcattgtggtcaatttttttttttttttttttttttttttttttttttgagacggagtctcgctctgtcgcccaggctggagtgcagtggcgcaatcttggctcactgcaagctccgcctcccgggttcaccccattctcctgcctcagcctcccaagtagctgggactacaggcgcccgccactacgcccggctaattttttgtatttttagtagagacggggtttcaccgttttagccgggatggtctcgatctcctgacctcgtgatccgcccgcctcggcctcccaaagtgctgggattacaggcgtgagccaccgcgcccggcccattgtggtcaagttttacacaggcatgatttgtttcgtggcctagactgagttgaattagaatagaagaaaccatattacaagtattcaggaattaagcaaagacaaaaaaatagttatgactgtgataactgaaacaaaggaaaacatataagagacaatgcatttaatttgcaaattgacaaataaggtaggtgaggaaaaaaagaggcttatggaattc

SEQ ID NO: 204409 - DNA, 1000 bp, Homo Sapiens
attcacaattaatctgggtcaccattcttgtaattgtttttctgtgacaatataaaattactaatgttatgtatgtcctattttaaaacacttttattagtagataatatatgtccactgtggaaaaaattatcaaattccaacagacacagagaagaaacatctatattcccatcattcaagataaatataaaaagtatgtaaatttctcaattaaaaaaatctttaaacaatagtggactaatgacaacagtattctataacctgttcttttctgtaaaaaaaatgaagaatgaacacatttacatgtcaatcaatgtacattcacctaatatttgaatggataaacagggtatcagtaaatcataatttattcaaccaattctctattgttggaaatttaagtttgttataattgcttgctattataagcaacaatgcaaagaacatctatatgcactaataatctgaaatatatttcttcaaaacagaaatgataaagttaaaagtatacagatttttaggttttgccacacattgccaaactgcccttgtgctagatattcaatgtcgttcctcaataaaattacccagccttttatgttctgttccgtaacctgggaagctaacctctatgaactaaccaagattccttgttctctggcttctagatgggttcagccatggaaagcactggcagaagatcaaaggtgagggagacaggttggaatattattcctcccaaatacttctctgttaggccacagcttggaattggctgcactcttccaccaaaagttacatcttttgtcagacagccctactcctgtagttcttactaggttggtaactgcccaggcaccttgttccttcaaccttagggtggtaacaactttgtaaccgcccaacgggttcaccttgcccgctgcctagacaaagctgatttatcaagacgggaattgcaatggatagagacgcagagccagctgtgcgggacacc

SEQ ID NO: 204410 - DNA, 1000 bp, Homo Sapiens
aagaaaccctagtgtcttcatagtctgttctctttcttagcttcagttgggttttttattttgttactgtaatcagagagtagcaactaatacatgtgcatagaacaacatttaaagaacatagtatattttgtggctgggccctgtggttcacgcctgtaatcccagcactttgggaggccgaagcaggaggatcacttgaggccaggagttcgagaccagcctggccaacatggcaaaaccccttctctactaaaaaatataaaaattagctgggtgtggtggggtgctgaggcatgagaattacttgaacctgggaggtagaggttgcagtgagccaagatcatgccactggacttcagcctgggcaacaaagtgagactctgtctcaaaaaaaaaaaagtatgatttttttatttctgtatttttaaaattagtatcagaacataatcagctctccattttttttttttttttttttttaaatagaggcagggtctttcttgttgctcaggatggagtgcagcggctattcacaggcacaatcatagcttactacagccttgaactcctggactcaagtgatcctactacttcagcttcccgtgtatctgggattacaggtacatgtcactgcacctagctttatcttctccttcttccttcttccttcttccctcttccctcctccttcttccccttccctttccccttccccttctccttcttcttctttttggagtcagagtctcgctctggtgcccaggctggttgcccaggctggagtgcagtggtgtgatctcggctcactgcctcagcctcctgagtacctgggattacaggcatgcacaaccatatctggctaatttttgtatttttagtagagacaggattttgccatgttggccaagctggtctcgaactcctggcctcaagtgatcctcctgcctcggcctcccaaagtgctgggattacaggtgtgagccaccattcccagccc

SEQ ID NO: 204411 - DNA, 1000 bp, Homo Sapiens
ttgctatacgagatttacctatcccctaaaatctgaaaagaaacccattcataaaatcctcgtttccacatttgcaatatgataaggccaaatgtctgctccgtaaagtagtaaatatcattttctccatcataaagaaaaaggtgtacttttttgttttctcatggcacagagaaaaatatgctttttaaatgacgctttattgttattataaagtcatttgtgtgattaaatatatttgtaataaatttgcaggtaccttgtgtattcttaacactgcacaaactggatcattactgatacttgcttctaatcccaggtgaagtaaagctaagggatagattctgacttgcatttaaatgttcactgtcaatgtcactttactatgtagacaaaaataaataagcatgttctatattttattgatgaatatataggtgaacacaattcatccacagtactaagttgactatgtatgggtacctaataagttatcacattgctgaaaactgtatctttaacacgtttaaatgtgcatataaaaattgaaagctgttctaaatataaatttgctagtattgcttacaaactggagaactaaatatgtgacaaaaataaaaagtaaatgtaactcaccaggtttaaatatgtacttaatgctcatatttactgttcacaaatgcaaaagttacccaaagtagattccaaacatctttaggaatggtaattttatttaataaaattcttctatctaatttctttgttcgaagtgcaatttctaggtgatattattttttaatgactataatatcatcctgacatcaaatgatggttatgggtttatgagcatttttataatgtcagaattttaatattttaattgtgaattcttaataacatgaattcattcttctgtgctaacttcgacatcttttcttttacgagggaatatgtaattttattttaagcagaacagagtaagtatttgtgctcttaaaaa

SEQ ID NO: 204412 - DNA, 1000 bp, Homo Sapiens
atgatatcatgacccttcttgtaggaatgtgcttccagtggtgaggcagtctgagaatgtgtgaagcagtataatgaagccagaccaagatggaagcttggcctgggatttgagcatcaggaaaactgttgaagggttatgtatacatcacacacacacacacacacacacacacacacacacacacacacacactctcttccatactcctataacaacgtatagtatttactatacctggtgacaggtatttactatacattgttgaagatctataacatggaatgcctagtgctaagtgcagtgtccttagtgaaattgtattggtttggaattatttatgagtttgggattatttgtcactacccttaaatgatcttgacactcacctatttgaaaagatattgaggatttgccatttgatattgaccagggtgtattgtgcacaaatattgtgaatatacatctgtctgtccttaaatcactgtaagttttaactggaatagatttgctccacattactcggtagggctgatatttcatgcctcatggatgagaaaagaataggcaaaaattatatctcgggctgcctcacacatcttttaacaggataagggaaaaataaatataagacctatgagttatggcatcaggcttgaactttaatttatgaattaaaccaacaatattattgattattgcaattatctatcttaatttcatttgttctccttttaaaaattaattatgtttattttacctattgtgaataaagtcactcctcccatgtgcttatttcttgactctggcactaattattcttcagtgcctagatttcctgggactgctcagtttaagtaacttctgaacattggtctctgagagaaaagacagtgaagtgggatctgtggaaaaacacatctgcaaatgtctcatttttttcttcaggggtaagttttcttccttggagactcttgtcttgaaaaagtgatactagatc

SEQ ID NO: 204413 - DNA, 1000 bp, Homo Sapiens
cagcctcccaagtagctgggattacaggtgcccgccaccacgcccggctaattttcgtatttttttttttttttagtagagacggggtttcaccatgttgtccaggctggtcatgaactcctggcctcaggtgatccacccaccttggcctcccaaagtgctgggattacaggcgtgagccaccacacccagccttatactggagtttttcaaaggctacatgacgtgcagttttacaacagattgaacgcagaactagatatgagaatgcagctgtcctctgtgaagccaggtgttacatatttacattgaacgtatgtaaaacaatgtaaaacaatgccattcttctaaatatactttttgttttggaaaatatagtttaaaaaattaacaactatttatgtaaacatttgggttgatttatgatttttaaatgaattaataaatacatatttttaaaatgtaagctttaatttctaatatgatagtaaatatagatgcatataactcacacaaacatagacgctttgagcgccttgataatttttgatagtttgtaaaaggagttatcagaccaaaaagtttgagaaccactattgtgagtggacatttttaaagctcttagaacaatattagcttgggatttaaagctaagaacagtattagctattataattattctactttatatatatatagtttttattattattattttgagatggcatctcactgtgtggctcaagctggattgtagtggcccaatctcggctcattgtaacctctgcctcctgagttcaagcaattctcctgcattggcctcccaagtagctgggattacaggtgcccaccaccacgcccatctaatttttgtatttttagtagagacagggtcttgctatgttgcccaggctgttctcaaactcctggcctcaagtcatccgcctgcctcagcctcccaaagtgctgggattacagacgtgagccactgtgcctggcc

SEQ ID NO: 204414 - DNA, 1000 bp, Homo Sapiens
acaatggacggctttgcaggaccatttcaaaatatggcaaagaaacatgttttggggtaaaatatttttattttcttcatcgtctcgtaatgttttgccagagtcagggtgagttaaataaaacccatctgatgagaacttatgatttgtagggcatgactccccagaccgcttagataggaatttgggcaagaaaaaaaaaatcagagtttagtcctcacctcttaaaaacaaaattggtctcgtgcagcaccttccaaacacacaagacataaggaatgtctggcgctgccaccaagaaaatgaaaacatggcataatttggagagtgcttatagaaggtgtgtgaactggggaaaaaaagacatttttgatctgttttcatattgttaaatgcctagtctttgcagtgtcaccattcctctttatgtgccatagttatttttctagaatttcataataatgatctttgaaattgttatctgttttttacagttacatgccaataggtaagaatctccctataatttctagttgtcttatcccaaattcagccagaatcaaactatatctgcagtctcagttctcttacccttcaatattgagtgctaaccagcatttcatatgcattgtctaattttaatctccacgacagttacaaggaaggtaccattcattcattcagtcatcaaatatttgagtccctactaacaggcaggcactggagatgcaatgattttgaaaatgacaagccaggcacggtggctcaggcctgtaatcccagcactttggggggccgaggcaggtggatcacctgaggtcaggagttcaagaccagcctggccaacatgatgaaaccccatcactactaaaaatacactaaagaatatacggtagacaggaattctttgtgttgcttaattacctccatggacctttggtggcaatttctagaaaatttacgaattttttgggttagtgtctagcatttggaatgtact

SEQ ID NO: 204415 - DNA, 1000 bp, Homo Sapiens
tcaggtgatctgcccacctcggcctcccaaagtgctgggattacaggcatcagccaccatgcccggctgtgtctttattcttttaagaatgttatttgggctgcagaaatttttattttaatgaagttaaatgtgccaatttttaatggtttgtgcttttggtgttatatgtaaaaactcattgctaaaccaaagtcacctagatgttcttctattttttctctagaaattttatagttctgcaatgtatatttaggtctgagatccattttgagttaatttttgtgaaaggtataaggattgtggcaagattaattttcttgcataatgaatatccagttattccagtaccctttgtttggaaagactatctgcatttaattgccattgcttctttgtcatagttcagttgactgtatttgtgtgggtctacttctgggctcttgagtaatttgtctgtcttagacaataccatactgtcttgatgtctgtagctttatagtaagtcttgaagttgggtattgttagtcttttgaatttgttctttttcttcaatattgtgatgcctattctgggtcttttcctttccatataaactttagaatcagtttgtggatatctacaaaataaattgctaggactttgattttaattgtgttcaacctatagatcacgttgaggaggattgatatcttaacaatattgaatcttcctatccatgtacattgattatctctacatttagattttcatccatttctttcgtcagagttttgtagttttcctcatagatacactgtatgtattttaagattcatgcctattttatttctttagtgctaatgtaaatgtcactattttaatttcaaattccagttgttcactgctggtatataggaatgtgataatcttttgtatattaatttgtattctgtaaccttactataattgcttatcagttccaagaattttgttgttattgctgatttttttggaattc

SEQ ID NO: 204416 - DNA, 1000 bp, Homo Sapiens
gttaccacgcgcggcacatttttgtatttttaatagagacgggatttttccatattggccaggttggtctctaactcctgacctcaggtgatccacccccctcagccttccaaagtgctggggttacaggcgtgagccaccgcacccagccacaaattatatttcttaattctttttatcctattaccccttcccttggctaccaccccctaccctccacccacatccacagtgctttaagataaaggagattaatttcgcctgtaggaatccatgggaacttggccttcagacttcaggcaagcaccagagtggaaacatttggaagtctcattctaacatgtttttaccttaaaattttttaaaaattggattaggtttttatgtttttagaaccatcttgccctcccttttctagcttttgacgggacattgccaaattaataggctgttttgaagattactaagatgggcatctttcatttcagtagggaaaagaacatgtgctaaaggaattattcaggtgaaaatgcttttgtgattaaaaatgttcttcagaactgatacttctcatgaagtaaatttcaacagtacaagcaaaccctgttttcctgttgttatgactttgttgttctcacctgtcctccataccgccccaccacagcgtcactccctttatagcctcttcctactggtacctccttattccggttctctttctagaccctctactatcctctgtgtttattttgaactgaactttggattaaagtactacctttttgtagctgttactcaaagtttgtcttcacttgtgcttggaatttgaggttactctactgttgttcagactttacctttaaaattccaggagcatcctgttagtaaaacaatgagttttaaaaatttcggtaaaggtggtcataattcttacaggaaccagttttatcccatttagttcacagattttcattttgcctttttaatgggcatagaattc

SEQ ID NO: 204417 - DNA, 1000 bp, Homo Sapiens
ggagtagctgggactacaggcacccgccaccacgcccggctaattttttgtatttttagtagagacaggttttcaccgtgttagccaggatggtctctatctcctgacctcgtgatccacccgcctcagcctcccaaagtgctggagaggcatgagccaccgtgcctggccgataacagtctttttctttatttcagcctgtgggaatcagaaggcccttgtgaagatgttggttagaagagactttagcctacagtgataccacttgtgttagggcactgtatgtgctactttatgccatttgtctcaacatgtatgcttactggtgtcactgtgaacctcatcaataaaagtgctctcttggtttttactgtccttgtgtgcattgtttcaggtgaaaggtggcctttgtgctagatccagtgctatccttggccacaaaccattacatatgattaacttggggatttcctcttcatcatcctggagatcatcttctgttctctcctgtgttacatgtgttttctgcaatttcatgaatttctctttatttcttccctcaatttgggtggaacgtatcttccatagctccctgacagagaatgtgtggaaggtaagttttgagcattatatacttctgaaaatgtctttattttaccttcctacctgactcatcttttccaggttggaaatacattttcatttatcatttttagtcaattgatccactgtcttttagtttctagtatatgaagaactcggttttttctatgtgacctgtgttttcttggaagctcttaagattttaggaaattctttgtcctcagtgttctaaaatttcatgaggataacgtctgtttttgtctatttttgatatttaaaatctgtttcgttaggcactgagtggtctctttcagtctgctgtcttatatccttcagtggtaggaaatgttcttgaactatattattgataacaattccctctctttttccagaattc

SEQ ID NO: 204418 - DNA, 1000 bp, Homo Sapiens
aataaggtgttctatagttgcagcctcctgttgtaaaatgtggagaacctaaactttgaattacaagttgttaaatgtgttaaaatgacagaaaattcagttttgtttctttgccataaattcagtagactgaaaaaaattcttctaataaaccaaccaagtagcatctgatctagattttaatcctctcccctccagaatgagatgacctattttaccgatgtaatttcagagggaggaagtgcttttcatgcactgaagacttattattggggaaaaaagagggcgcaatattaatggtaaaaatctgagtattggtgtagaaagatacactgtagcttggctttactctagactattcaattgtttacacagactattcaattgttatccatccatgcattcaaatacttactgagtgcctattatatgccaggtattgttccaaatgcctcatacaaaatagtgaataaaacaacatccctacctcatgaacaagtcctctaccttttaatggagtttacactcaacaaatgattttttcataaagataagttttagtttatatcttagaagtctctactgtgtgttcaatttactgcaagctatggctaactttaacatgaggctaacagttcagaattacaagtattaacttggccggtgaacagaaatagaaatggtattttttttgcaattatatttagtcatgacatattttaacaaaaaatatacaactgcattccaaatttaccagttaatgttcatgttatataaaacttatataagaatatttagataaatatatttaaatataatcacttctggattatatttaccaaattattttattcctattttaaactcagaatttcataatcagtttttttcactcagatgtttattttaattatattttaaaagtgtgagacagatgtcacaaatgatctttaaattaaatgaacaaaaattcaaataaaaaaaaaacagaatagaattc

SEQ ID NO: 204419 - DNA, 1000 bp, Homo Sapiens
catgatttagactgacctgacccaatctgatactgaatataatgtaccagatgcagaaatcatagactcatataagggtgggtttatttatttatttatttgtttctttctttatttgaggcagggtcttactctgtcgcccaggctggaatgcggtggaaaaatcttggctcactgcaacttccacctgttgggttcaagcaattctcctgtctcagcctccctagtagctgggattacaagcgcctgccactgtgcccagctaatttttgtatttatattggagagggggtttcactgtgttggccagactggtcttgaactcctgacctcaggcgatcctcctgccttcacctcccaaagtgctgggattacaggcttgagccaccatgcccggcctataagggtttacttttaaaatagcttgcatttgcacagtggtaagcttgtacactgaaactgtaaactatgtttcactgataaaactataaactatgtttactgattgctgtagtcattagatataaaaaagctagtataacacttttattaataatgttgcttgtttttgcaatttattgatcaatacttttttataaagcattcatttagctagcaaacatttataagatatctatggatttaaacaggtattgtctgttgctgtctacaagttttagtctagcgaggaagacacaagagcaaaccaattattaccatacagaaaggagaatatttttatgaaatcacacacaggatgcatgagagatcaaagagagttacttgactcagggcgttgaaggcataaaggccttctgaaataggcaatgtctgagataaagagataagtattgtaagatatggcattctagacagagatgctatatgtgggcaacaccaggtaaacatgagagaaataggaatttcagggaactacaaataaccatgagatatatggtaaaaggcatgagagatggaattggagaaataaaactggatc

SEQ ID NO: 204420 - DNA, 1000 bp, Homo Sapiens
ctactttgaatgtttctacagtgtgtcgtgctattatttggcctccactgggtgtgactgaattacttccctgttaaatcccactctgttccctactcattagctcagtgcttctcagaatttaatgtgcagaggattcacctgtgggtcttgttgaacggcagatccttcagtatgaaacgaatgcttcagtaggtctggggtggagtctgagatgctgcgttaccagcaagctcccagttgacagtagcaaggcttagctgtgatgctccaagtaataccacgtggcaccagagtggccaaggcgggtgctggcactgacatctggtggtagcacttgattggaaaatggtcagtcagatggtccaaaatgtgtctaaattaattttgaccatcaatatttagaaaagtaaatttagcaaacttgctgagtctggccattccattgcagactccagattgaaagcattgctagagagtgtcggggcaccaggtctccccaggctttgagtgggcatctttgggtgctgcaactcctctctcggttaatacaacccagtctttgtgcccctggcatctcatcacctgctttcaggagtcaggcccccctgaatactttgtgatggcgatttaaaaaacaagaaggtgagcgggagaccaggtggctgctcagcatgtggcgcatggggaagtcccgccttgagccgcatgcactgatcccgggttggcactgtttgcaccagtgtggttgtgcccacgctggctagggaagtttaggattccactttgaagccagacatggcacgggctgttgagtaggttgtggacacttagaaactttgagaagaggttatctgatacctttgtccaaagaagggcaggatgctgtgagagatgctttactcaggaagccaactttgctggtccagtgagtccttcttccaagttcgtcagtttataagcatgaagccctacttccctctgggaattcttggaattc

SEQ ID NO: 204421 - DNA, 1000 bp, Homo Sapiens
tggcatgacttttctctgcttgttgggagcacttccagcatcactagtggcactttttatggatcccacggtgttattcgaggtttctagtattgcactaaacacaatgaaaaatatgtgagagccatgagagatcagtttttactgtgacacacaatttactggaaagatgaactgctcacacagagatgatgttcgtcacacagtgttttaagcagattcttgcaacacttgagctccccacaatggcaacagaaggtagctatgaaatcattacaatagtacagtatgttctacggtgaattttatgaagttatgatttaatactgcatctttatgtttatttccatttctctcaactgcaaatggcactatgtatagtctgtgtttgtgtaagttttgataaattttaactttttataatagagttacatatattttatgttagtaaacaataaaatagactaatatctacatatattttatgcattcatgacatacctaactttttcttagtattttcaatatttctaggctgcatggttcatctgcatgttttttcaaattgttgcaaatttctaaaaattttaaaatatatatatattttttgaaatccacatgtaagtggactctcaaagttcaaacttgagttgttcaaaggtacttgaattctctccagcctttctctttctgtccttaaatacatcaaatatcctaacattttaaatggagttcctaccaattatattcagagaaacacagtatgaagcatgaaaagtacctatatggaaagtggcttatcacttcatagagatttttagaaagtaatttcctttaactttattgggaaggaggttctactcaaaaactgtttcctggagtagtcagtcttaagctgctgtatgtgttatgcttcttaccaaagttcaggagggcactatctgtttcctcaggatggtgtcaaaatggagtgttggcagtgttccttatgtgaagtaaa

SEQ ID NO: 204422 - DNA, 1000 bp, Homo Sapiens
aggagccattcactgactaactgccaacgggtaaaaatatttccaactgtgctgcccttcccagaatgtgacaccctaatcacatccagttctgggcaccagaagctaagaggaataaagaaacttctaagaggaatcagatggccacagaactgacaaaagattagcgaattcctatgaggaagagttagagaagttccactattacaatggtgaggccactttgagtaagtaaagggtaatgatgcagaggcttcgagtgactcttctctacctctgtgaagaaggcgggcagacagggctctactgcagtcttcatcatttaattcaggagaggagggtatttaggcattggagggaggttttactgtcttctttcccagatatctttaaacatggagacaattctcatttgtctggaataaacctcctgaaaacagagaggtgcccattatttggagagaggccaatggctccagcatggagatctgcaaggccaggcgctgcaagccgggggcagtggcactggacacctcgcaggggcaaagcacagctgttggcaagcccagtcaagagtacactgacagtgttactctcagagagtgagagagttccagggctggaaagggcctctagattatctactccaaacccctccatttaagatgaggaaacaggctgggctcatgcctataatcccagcactttgggaggttgaggcgggcggatcacaaggtcaggagaccgagaccatcctggctaacacggtgaaaacccgtctctactaaaaaaaatacaaaaaattagctgggcatggtggtgggcgcctatagtcccagctactcaacaggctgaggcaggagaatggtgtgaacgcaggaggtgcagcttgcagtgagccaagattgcgccactacactccagcctgggcgacagagcaagactccatctaaaaaaaaaaaaaaagatgaggaaacagactcagagagcagagtgactt

SEQ ID NO: 204423 - DNA, 1000 bp, Homo Sapiens
aaagttctatattttaggtcgtaaagcgagatctgaattttaattcccacctggttcctttgtgtatttcttaaatttctgagaactcatagcgggaaacatgtttaatcaaaaatgttcctaaaacactaagtaatactttcttgaaaaagaaacgtcacaaacagaaaaaaagatgggacaaagaaatagctgacaaaggaatagtatccagaatttgtatagaactcataaagcaataagagaatgacaaataacccaataaaaatcaggtgaaaacttaagtaggtatttcgttaaaaagggaacttagtggttaataaatatatgaaaagatgctcgaaccgatgttttgtttttccgagatgagcaaaaactgagggaatttgtcaccaacagactggccttacaagaaatgctcaagggagtcctgaatctggaagtgaaaagataatcagcattatgaaaacacacaaaagtattaaaactcattagtagagcagatataaaaagaaacaaaaaagaatcaaccttattactatagaaaacaaccaaaccacaatgacaagcagtaagaagggaagaaagaaacaaaggatatacaaaacaaccagagaacaacaaaatgacaggagtaagtcctcacttatcaataataattttgatgaaactgacttcatctgtaaagacacatatagactgaaagtgaagggatggaaaaagatatttcacacaaatgaaaaacaaaagtgagcaagagtagctatacttatatcagagaaaagagactttaagtaaaaaactgtaaaaagagacaaataaggttattatgaaagtgaacaggatgttatgaaaaagaacagatcataagaatatattcttggaaattaaaagcataactaatgaaattaaaactttaacagaaggattgaattacaagaacacaaaccttcaatggatgggctaaattgcaaattagacatagatgcagacagaattc

SEQ ID NO: 204424 - DNA, 1000 bp, Homo Sapiens
tctgtgtgacaggcgatggggccttcctctctggtacagcaggggcctaagggatgtttgacctcagcaggtagagtatcatctccgtggtacagcaggggcctgagggatgtttggcctcagcaggtggaggatggctgcaggtcaggattttgcatcacaaacaacactgctgcagtcacattagtggattttgttattatagacaacactcgtgtctataattccaaggacccattctccatgcccagaggcacctcagtcccacagaccgcagcctgattctgagttcgcagttggccagtgttgcagaagctcacagaggagtctttggaaatgagaatgacgccaccattctcttttaattgtgtcataggtcttccttccttttatacataagttaactgaggctggtttgctttccacagccagagttctaagacaattttaagtaacacttttctttcgctatttctttatgaatgtgttgggttttagggatcacagatgtgcttgggcaaccaaggctgcctgtgtctctgtgctctggggggcttttcctacgagctttgcgtgagatgccagctgcccacaggcaactgggcacagagagcaggagaataaagcaggccagggcatcaggtggggctgattccatggagggcaacggcagtggtgggggcaagtgcggggtgggtgagtggcagcagccacccacagaaggacgcgctgtcccggccccgcatccccaggagtgcgtgtgtcgcaggcgaccctgtcctctcacccaggagccctctgagctcgcgcctttcttcaggtgtctgcgatatcatgctccccttgtgttcctcctgcctcctggctgctgccagtgggtggccccccaactcctccaccagaccctgactctcagaggactccaagcctctatttgtgttattcctatccagtccatggggttcagataccaagtggaacttttaacaaccatgaattc

SEQ ID NO: 204425 - DNA, 1000 bp, Homo Sapiens
cttttgatatgccttcttcactaagcataatcctttctagcttttgatttaaagtgagaaatgtgatttaaagtgagagattttcttttcacttatgtacttagaggccactgtagggttattaactggcctaatttcaacactgttgtgcctcaaggaataggaaggcccgaggagaggagagagataggactggccagctggtggagcagtcagaacataaacatttatcaattaggtttgttgtcttatataggtaaggttcatggcaccccaaaacaattacatcaatgaccactgatcacagatcaccattacagatatagtaacaacacagaagttttgaaatactgttaagaattaccaaaatgtgacataaagacacaaagtgagcatatatgctgttggaaaaatggtgccaactgacttgctcaatgcagtgttgtcaaaaaaccttcaatttgtaaaaattcagtatcaaaaattgagtaaagcttataagctttagtaattctcgcaatatttcaatatttttcattattattttatcttttatggtgatctcatatcactaatttagcgatataagacaatgcatgacatgatcagtgatctttgatgttactattgcaattgtttggatgccacaaaccacatccatataataagaacacaggcatgccgcattttattgtgctttgctttactgtgcttctcagatactgtgatttttacaaattgaaggtttggggcaaccctgcatagaacaagtctatcagcaccatttttccaacagcatgtgctcatctctgtgtcagcattattaagcaataaagcatatttataaactaacatatacacagtcttttaagacataatgtcatcattgcacacttagtagactacaatatagtataaatataacttttatatgcactaggataccaaaaattttgtgatttgctttattacgatatttgctttattgcactatttgctt

SEQ ID NO: 204426 - DNA, 1000 bp, Homo Sapiens
aaagattgataacttgacttcatcgaaattaaaaacttctgccctttgaatgacactatcaagagaatgaaaacacaagccataggctggagaaaatatttgcaaagtatgtatgtgataaaggtcttgtatccagaatacatactgacctctcaaaactctgttagacaataaataatccaatgaaaacaataagtaaaagcattgagcagatacttcattaaaaaacatgcatggatagcaatgatgctcaacatcattagggaaatgcaaattagcatcgcaaggatgtgccactacacatctatttgaatgactaaagtcagaacgaccagttaccaagtattggcaaggatgaagaagagctggaactctcatacacagctgggggtcatgcaaaatgatatagccattttggaaaagttcgattcttaaaaaattaaacatacacccggccgggcgtggtggctcttgcctgtaattcctgcactttgagaggctgaggcaggcggatcacctgaggtcaggagtttgagaccagcctggccaacatggcaaaaccccacctctaccaaaaaaaaaaaaatacaaaaattagccaggtgtggtggtgcacacctgtagtaccagctactcaggaggctgaggcaggagaatcacttgaacccaggaggcggaggtggcagtgagccaagatcgagccactgcactccagcctgggtgaaagaatgagactctatctaaaaaaaataagataaaaagttaaacatacacctaccacatgatccagccatttcacttctagttattttttcaaaaggaaaaaaaaaccatatgttcatacaatgaaagacttgtacatgaatgcttttaataacttattcacaatctcacaaaaccataagaagcctttaaggggtgccttcataagtatatgtgatgatggacaggcgagccccaaaactggggcttagcccgggctttgcccaggaaagaattc

SEQ ID NO: 204427 - DNA, 1000 bp, Homo Sapiens
cccagcgggatccatcaccacatgggcagtaattcagtgcagcccatgcagcttcccagcggggtccatcaccacctgcgcagtaattcagtgcaggcccgcgcagcttcccagcggggtccatcaccacctgcgcagtaattcagtgcagcacgtgcagcttcccagcgggatccatcaccacatgggcagtaattcagtgcggcccatgcagcttcccagcggggtccatcaccacctgcgcagtaattcagtgcagcccgtgcagcttcccagcggggtccatcaccacatgtgcagtaattcagtgcaggccatgcagcttctcagcggggtccatcaccacatgtgcagtaattcagtgcaggccatgcagcttctcagcggggtccatcaccacatgtgcatagctctgggtcactttaaagatcgcattacctgagtgctcagtgttgctgtaaggaaatgtcctgctgaagtttttttttgtttttttgttgttgttgttgagacggagtctcgctctgttgcccaggttggagtgcaatggcgcagtcttggctcactgcaagctccacctcctgggttcacgccattctcctgcctcagcttcccaagtagctgggactacaggcgcccgccaccacgcctggctgactttttgaatttttagtagagacggggttttaccgtgttagccaggatggtctccatctcctgacctcaggtgatctgcccgccttggcctcccgaagtgctgggattacaggcgtgagccaccatgcacggccagcctgctgaggttttcagactttatctctgtaactaacagttcaccatcagtttgttacctagtggtaccattataccatttagacattgcatttttgatgtgggaatgaattccacgttgagcccgtgttagatttccccgagtaccatacttagtcgtcttcctctgtgatgagtagatttgtagttttctagcagacattcactc

SEQ ID NO: 204428 - DNA, 1000 bp, Homo Sapiens
ggcccgggtgggccccactgcctctccctccctccatggctttctagctctgaatgggagtggactctggaggctgcagtgggctgcgggatgtgagccagggtgggggcattggcggtgggtggagtcacgggctgggtggccatgagtcaggaattgctgggcctgtgtgtcatctggctgcgtgctgtgctggctcctcccgcctgtctgcctcatctcgcccgccgccatctgggccccctgggctgctccaccaggtgatggtgctctgctctgtttataagagttcaaaacgtaggatggagtagtcaggggaccgggctctagggcccaggctcccccaacaccagaggtgaccttgggcaggtccccttcctcttctctgagccaatttcccccattgaagagtggatattaggctggccaagggatttcagccatggccccagatgagatccgaggcagctttgaaagatagcccagcccagtacagtggctcacacctgtaatcccagcactttgggaggctgaggcaagaggagcacttgagctcaggagtttgagaccagcctgggcaacatggcaaaaccctgtctctacaaaaaatataaaaaattagctgggtgtggtggtgggcgcttgcagtcccagctacttggagggttgaggtgggaggatcgcttgagcccaggaggtcgaagctacagtgatcagagattacaccactgcactccagcctgagttacaaagtgagactctgtctcaaaaaaagaaaagaaagaaaaaagataacccaccccaaacaagttaaatcagatctccggggcggggcctgcggccaggcttgaaagctctagtctggatggcctcagacgggctgctttctccgccctgcccggatccccaggcagcactgtgggctggtgcatgggttctggagcccagaggctgtgctgagtacagctctaccactttctaatactgggcaagtgaattc

SEQ ID NO: 204429 - DNA, 1000 bp, Homo Sapiens
atattaatgctttacctgccctgtaaaatgaactcataactttcagttccttaatattatcaataagaaattatttcttatggtgaggtttagtgttctgaaataatcacaatgtcccattcaattttatttatcactatatgatattgtactttttaatttaaaaagtaattaagttctactctatttcacaatgtaatgttgagtcttataaaatgctccagtgatttctttgatgagaaacctatcatgagccactaaccattgtaccgtttgttaatgcgtaacggtataatagaggggaccaaatgtttgattactgctctacagtataatagttgcatgcaaaaaaaaattatggtagatagatcatggtaaatatacataatgcacatcgtataggggtgagacaagggtgacaaatgagagtagagagaccagcagatgccagataatttggaacatccaacactgaagaccaggaataggaggaggctgccacctggaagactgaaacgttaagattagacacaaatggagtaaagtagatgagaagagtctcagaagagaggtcaagtactacagtgacggaggagtagagatgaaagaagtcatggccttgaaaaaagtacttgcaggaaaatggctaagttgaaatagagactgcagtcaatcaaacagtaagaaatgatgttaaggaagtagagaacatgaacacaagctgatttgatagtgaagggaagcagtctggaaagagaaggaatagtgagagtgggatataaggtgagtgaacactagctttacaagtgttggaagactggaatttcaagttagtttgtatgttaccaaaaagtttgagtaattagatccattttccatttctattttctgattcattttcatttattattttcagattcaattaacactgctacatttttgtacctaccacaatatagtagtgtagaagttaagaacttgggggtgctccgtagaattc

SEQ ID NO: 204430 - DNA, 1000 bp, Homo Sapiens
gtaaacagcgcataattatttagtttgtatttctcattttcctttctcaccagtacaatggaatggctagtttaaaccatttaagccatttcagctatttcctccatggtatatgtttgtgatgagaagtctggcctagttcaataagaaggtttacaaagttggcagactcagatgctgtctgtaaagggtgtgtttaagggggggtgtcaagtaggggcagtgtgtatgtatgggtggaatttacaatgctgaaaattttagaaaaaaggggaaatgcctttgctaactcaatcatcttctgctgacagtagcctagccttggggaaaaggagtgcatttatgtgattcttttctctagtaaccttcaaggtgtttcaaacgtgaattttcctcttttacttgacagaatgcaatgagccagatttcccctttctctttggaggacttgctgttcccagagctgatgaatctatgcaaagcagccccacagaacagcaaaaggccatcccagagcttctcacacagagtctcattttcaaatgccaagaaaggagagcagatggtctatctgtactttgcattttcttcctcctataggggaagtgttcagagcccagttctaacattctgatactctgtatttctacacatcagcaaatagtaaagtgcattttaatgccatgactgtgactgagctcattagaatgcttcctctgtctctagagcctttatctccagctcaacctatatatgtcatagagcctcaaatgttatagcgctgaataaatacatgttggattaataaatgagtctctcaaacaccataaccacacacaggttaactgtgcaaagatcagctaggttgctaatctggttcaggctctccaaggacaggtggatctgaaccttttctctctgaaatacacgaagtaggaagggtcattttccttcatatgcatgtgatacagggaactaaatacacaggagcaatggggaa

SEQ ID NO: 204431 - DNA, 1000 bp, Homo Sapiens
tatgtgtttgtgagttttttggtccttctcatttggcatctgaaaaatggggaagaatattacttgtcttattttaaacggatttttgaggatccacttacatgatagatatgaaagcaccttaaagtttaaaagtacatatacaaagtgagtggcattatgtgctattgtcacccccagtcattctcgaccactttcccctgttctatagttgtcaaaacacttactgccacctgaaattgtcatatttctttattaattatcatccttctccactagaatgtaagcttcatggggcaagcatcttgtctttcttatttaccattgtaacttcataccttgaagagtatctagcataaagtacatgcatagtaatgtatcgaaagaatgaatgaaatttagtgtttcatcaagtcttagatgctgatgcatttcttaaaaacaaatacgtttggttttggaaattcctacttttgatataataaataaacacaagctttttttcctaggaatgttgacaccactttttaaagtagccagacattcttaatttgccagcaatcagatttcagcttgttgaagtaaggagacaagctgggtttttcattttctgtcttggtagatgtacatatccccttgtcctctgaaatgtgtttacttttgtgacaaaggggacagagcttctttagaaacatttgctctgaggctcagataggactggatgtcagtttaatggacattggtttttgcctactgcggtatttgtgttcatttgttttgtttttgtttttgagatgaggtctcgcgcttgtcacccaggggtctcctgctgccactgtatgatcgagtgtagtggtgtgatcatggctcgctgcaacctcgaccttcctgggctcaggtgatcctcccacctcagcctcccaagtagctgggactacaggcacatgccaccatgtccatctaatttgtgtatgttttatagagccagggttttgccatg

SEQ ID NO: 204432 - DNA, 1000 bp, Homo Sapiens
agttccagatgaccaatgcatgatgttacaaagtcatgcacaggtaaaagatccattcaaatctcaaagtagaccaaaaaatttatgcacagtgaaaaggttaattgatacagattccattttgcagcttacctttaaggaatagccacttgttgacccttagtgtactaccaaagatggtatatacaagtacttaaaaagtctataaaatatacctccttttccaattatatgttggtgggaggacagattgtcttcatatatttcaatctaaacaacagatcacaacagattgaatatggagacagatatgagaatcaacatcttctattaaaccagacattaaagagatttgcaaaacaggccaggcacagtggctcaagcttgtaatcccagcactttgggaggccgaggtgggccgatcacttgaggtcaggagatcaagaccagtgtggccaacagggcaaaaccccgtctgtactaaaaaaacaaaaaaattagctgggcgcttgtaattccagctactcaggaggctgaggcaggagaatcgcttgaacccgggaggcagaggttgcagtgagctgagattgcaccactgcattccagcctgggcagcaagagcaaaactccatctaaaaaaaaaaaaaaaaaaaaaaaaaaaaaaatttgcagaagaaacaataataccactcttttcactttttttctattttagaagatagaattactcttcataaaatgttatttatgttaacaatttaattggttacatataccaatcataaaccaacaaaataattgtttttttaatgaagaaatccattaatattttccaaatttctgcttttcaatttctagtagcaaatcatggtagatataacttacatatcaaaaagctccttggcatcctgagtgatttctaagaatgtaaactttctgagataaataaatttgaaaatctttgctctagaaatagaagaagaatgaaagagatgaattc

SEQ ID NO: 204433 - DNA, 1000 bp, Homo Sapiens
gcactccagcctgggcgacagagtgagactccatctcaaaaaacataataaataaataaataaaaaagatgaggtatttaagtgacttatcatagtcactagtaaattgtggagtaatttcaagatctagagaaaaaattttagcagataaagatttaaagcaaactaaaattattagaaataggtccgggacattatttattgccacatttaaatactcactacgagaatacaatagcattagacatgtcaggaattttataaagcatgatcaaaatttgatttgatgtaatgcacagtaacatgtcaaacatatcagaaatattgtttaacagtgacctagtaaggatgattttgacccaagttgttatttgaagagaaaactggagactatttctagcagcatattctttttcctctggagacctttcacatgccaacaacctgacagatgatgaagaatgcattatgacaaaactgacctaaaactttcaataagattcacaatgtcattcttatttgcaatgctttttaggtactacattgcaatttagaaaacaatgactccagggagaagcatggtctactatttagtgcattgtgtaacattaagatctactgaaatttgctggttctttgaaataaaatgaatctttagtgtttgacattatcctgcatcataaattcctaaggaatggaatgagctttgactgccttaccttgagaataagcatattcacgtaaagtatataagacaaatactggtttagatgaagctgggccagtactcccggcctccgccatttcggactgggagctccgtggcgcaggcactgaaggcggcggcagggccagaggctcagcggctcccagacctgctgaaaatgactgaatataaacttgcggtagttggagctggtggcgtaagcaaaagtgtcttgacgatacagctaattcagaatcattttgtggaccaatatgatccaacaatagagaattc

SEQ ID NO: 204434 - DNA, 1000 bp, Homo Sapiens
atcaaaaatgctgtttcaacacagaaactctaggatactacagaattcagctggttacttttctgaagaaaacaggaaggaagacgctggggaaatgagagaaagagaagtaggagtaaatatgaaacttcatagtgggaaaggttactaaaagaacactgcattcctgtagcctgcacgtccttagaaacacctcataaagtaactgtggttttactttactcacaggactattgctagatctatgggaaagaactataagacagttgctaaaagtttgaaaaagacagttactaaacgtatgaaagacctgataatctacttttttacctcaggtattggcatattccacacatctgtactattcttgagtgtgatcacttaggaatgaatatgatttgaactcatgttaagagagggtgtcaaattgagaaccaggcagatccaccacctacagtaaaaatgaccctaaattgaagaaattagatcccaaagattcttggtgaattttgaagtcttcatcagtatatccatattaaaaggagatgacagaagccaaaataaaagaattatgggctgcctgtaatcccagcactttgggaggccgaggcgggcagatcacgaggtcaggagatcaagaccatcctggctaacatggtgaaatccaatctctactaaacatacaaaaaattagccgggcatggtggcaggtgcctacaatcccagctactcaagaggctgaggctggagaatcgcttgaacccagggggcagaggttgcagtgagccgagattctgccattgcactccagcctgggtgacagagtgagactctgtctcaaaaaaaaaaaaagaattatgggctgacaggacaactggattaaaataagcatcagtttcattaaaaacggctaacttgaagataaatcttttgactccagctctttaggagatctaaagtgaccttgatggacagtggaagaaatcacaacatggaattc

SEQ ID NO: 204435 - DNA, 1000 bp, Homo Sapiens
ctgagcactaaatctgtaacatggggacaataataatagaagctacaccaaagtgttggtgcatggataaagtgcttatcacagtgcctggagcaaagtaatgcttggtagaatgttctggaaaggctaggcaccccaagaagaaggatggctctaatctggaatggttaggtcttggaaggggtgtggcaaggatgacttagccaagtgccccccttctatctgctcgcactgcagccagagtgctccttaaggtggtcttcaagagcctgcccaccacctcatcgccccctcacttcctgccttctcctcttcctggcttcctttcagtccctctgcttcctttatccggaatcctcttcccttgttacttccttaagttagttcttccccaaacttcacacctcacctcaagtgtcgtttccccagggaagctgtcctgacccctgggttttgtagaccctgccactttctcaattcgtacctatatcttaatgtcattttagggttgctcgctctctctcctgcactgggctgtaagccccaggaagcagaggctgcatctggttttgtgtactagagggtccccccaaatacccggctcttctattaggcaccctcagaatttttgttgagcgaatgaatggggtgcaagaaaggcacggataatataggttatttacggagcatgtaactgtccgcagggcactgctctaagctctttgttcgaatcattttattcaatctccccaaccaccctctgagggaggtggtacgattttcctcatctcacagacaaagagaatgaagctgagggaggttaagtgacttacacaaggtcactccgcctgttagtgcaggggcgggaggcgggatccacacccaggtccctctgacaccaaagtggcaagggggtgggaggggagtccaggttgggacggggtcgcactcgagccggcggagcatccctagggagggggcgggaggcctcccctgccca

SEQ ID NO: 204436 - DNA, 1000 bp, Homo Sapiens
atcaagttggatgaataatagggtcatagaactggcttttaggtcttcaggttggatgacttattcaaaactgaacacttctaactttaatttctatttcaggtaaatttactttttttgaaagacttcagaaagatgatagacagcatctgaaaaacatggcccaaagtggactctcccttcttcataccagggcctcttcctctaaatataacaacattgacaataggggaagcatcaagaacctgtttgttttctggctgtttcaacaagttgcaacttgttggcttgcaacttcagaacaaaacgtaatagcttaacaggcactttgatttatttgttccttaatcatggaaaaagtaaactagtcagctattctttgtggcttttaataaaatgtttgtaattgcatgaaacaattatcaaatatttcttatgagcaaaagcaaggaaaaatgacctatggatgtaaattttgatcccaaatgttttctctcctttaattcaatggttattgaacaaccattatgtgcttggtagggcttagacaatagcgtttttttgattttttttttttttttttttttttttttgggagacagaatctgagtcgcccaggctggagtgcagtggcaccatctcagctcactgcaacctccacctcctaggctcaagcaattctcctgccgcagcctcccacaatagtgatttataaatgattttttttaaaagaaaactttggcacccaggaatgataggacattaagggactaaagaacagtaagttcatgaattttaggtcctttgtgcagccaaaggatccttggaagcctgggagcagggcgtgcagtggagtcaaagacttgggcaacactgagaagaatctcagtgttgtagactgaattcatgcctcagtctaaggagatatgacatgggagtgaatgtctagtatagtgtggaggacaagatcactaggaaagagaaggtcaagaaactctag

SEQ ID NO: 204437 - DNA, 1000 bp, Homo Sapiens
ctagaaaaaatagtaaatcagaaacaatatcaatccctgcagggacttcaaagattagtggcaccataaaggacttgaaagatgcaggtgtggtgatttctaccacatccccattcaactctcccatttggcctgtgcagaagacagatggatattggaaaatgacagtggattattataagcttaaccaagtggcgactccaattgcagctgctgtaccatatgtggtttcattgcttgagcaaattaatacatctcctggtacctagtatgcagccactgacttggcaaatgcctttttctccattcctgtccataaggcccaccagaagcaatttgccttcagctgcaaggccagcaatataactttactgtcctgcttcaggggtatatcaactctccagctttgtgtcataatcttatttggagagaccttcatcgctttttgcttctgcaagatatcacatgggtccattacactgatgacattatgctgactggatctagtgagcaagaagtagcaaacacactggacttattggtgagacatttgcataccaaatgatggaaaataaatccaactaaaattcagggaccttctacctcagtaaaatttctagggtacagtagtctggggactgttgagatattccctttaaggtgaatgataagttgctgcatttgacctctcctacaaccaagaaagaggcacaacacctggtggtcctatttggattctggaggcaatgcattccacatttgggtttgttactctgccccatttattgagtaacagaaaatgctgccagttttaagtggggtccagaacaggagaaggctctgcaacaggtccaggctgctgtgcaagctgctctgccacttgggccatatgacccagcagatccaatggtgcttgaggtgtcagtgtcagatagggatgctgtttggagcctttagcaggccaccatatgtgaatcacagaggagggctctgggatttt

SEQ ID NO: 204438 - DNA, 1000 bp, Homo Sapiens
tcttgttctcaaagagtttgcagttaagagtcaagacagaaaaccctcaactatatattagaattcagatgtatttacccccttggacatacctgccaatatcccagaaaatttcactttgtcaaaagccaaatgtttattgagacgaagttctccatttcaatataaatatttatacactgttaagctgttattaactctgtaatgtgaattaattaattaattcaatttgaaagcttttttccaaacatgttactaaaatcagatgttctgaaagattgcaactgtcatggagccaagaagagtagagaaagagcatgaggtaggtgataatgggggtggtgtctgtttggatgtgggtaagggcattgcaaggagaggcagtggttggagcaggctgaagggggcatcatcaggaaggagccttagactcgaagagaggtgcatcagttcagggtgtgctcttccaactcaaggaggcttgagtttgaactcaactcttcccctaatctgccttatgatcatgtatttttagtagagatggggtttggccatgttggccaggctggtcttgaactcctgggctcaagccatccgcccaccttggcctcccaaagtgctgggattacaggcatgagccactgcacctggcctgccttgtgactttaaacaaactgcttaatctctgcatctcaatatccttactagcaaaatggagataatacagcaaaattgtaagactgtagtagtataaaaggatataataagcttgatgcatagtaagtgcttaaaaagtatttgcagtcgctatatttatatgttttgctttgatttttattttggaatgggacatgggcatggtgacgagggtcataaaggataacaacatggcacactggaaaatatggggccagtatgaatccaagctgacgtgttcaggggaacccatgtctctgagcccctgtatcattaagaagtctttgtgactaggattgagatc

SEQ ID NO: 204439 - DNA, 1000 bp, Homo Sapiens
cttctcctcctctgtttaaactctaatacaatatgttgttttctgcaatacagccattatgcaacatgtgggaacacatgaaaatcactaaaaggaaaggaagcaatcagcgcccagcctcagccactttttgcatttggaggcatggcatgtgttgctggattggatcctcataaataattaggcatttaacagatgaagaaaggttcagagaggttacacaacttgcccaaagtcacacagcatgttaaggcacagttgggtctgtacccacaaataaagcattatcctccagatgaatccttagtgggggactgagtgtgcctcttagaccctgagacctcccctcctcagtcctggtccttggctgtggtcccaagaccccgaggagactgacagctggacatcccactctggccctgatcccaggctccttccccagaaaaagctgagctggcagtgggggggctggggggagaatgctggcaaggacctaggggctggtgtgggagcggcactgggcgcagaaggtctcactcggcaatggagctggagttcgcctgacatttggcaaggaagcccagagccaagatggaacagcaagctggggtgcaggagggagggaggagtgagaatgtgagactttgggggcaggaagcctgggtagatcagccctttgctgttttgtttcagaacttctctgatatcctcatctacagacagaggcttctccttccctcaggcatgcatgtgtaaagtaacaagataatgtgtttgtacgcaggacacactcagaaaatgaggagcttctgttagcctcctggctcccctggccaactgccgcacctcttccctatcacccaccctgacttaccccccaatcccttggcacaatgacaaatcttagggcaccatcctgtcaggtttttcccctgcttaacgaccatccgtggctcctgtcactttcaggttaaaggccagacattttggcctggaattc

SEQ ID NO: 204440 - DNA, 1000 bp, Homo Sapiens
aggtgctgctgggcccactgagggctgacaccattaacagcttcagccactacctgggcttccccccaagttctgtgcccacaagagcagaaggtatggaagacagcatttcaaacaggagaaactgaattatagcgcggtagtgccatacttttctctagacttggctttttggaaatgtggtacgtattctagtagagggatgccatggtgttaccctccaggacagaaggaagagtagtgtaggctgactgaaatcagcctttggggaaggagggaggggctgcaccaagcgctgcaaggagcttttagcagacttaggaaaaagattacttcccatttggtgcagcccaaatgggatcactgtaaaatcagacatgaagcctgttgctctctgcagctacctataggctcactaggaataaagacagatacagataataaacattgctgcagctttcctttggaggcctcaaaatagttgttgtgctcagtaagtttgggagtgcatgtgggactgaaaacatcaaataaatcctagatgtaaatatagccatcatccccattcctcacccactctaaacccacctccaacagacttatcttagtaagatgcagctcatacctttaccactctaaagccccctttcgtcaccaaagacacagtgcttccacattgtgttactgactttctggcacaaatgcctctatctatctctgctgatgccagttctgctacgtagaatgcccttctctgcctggtaagctcctattcatcttttaaaatccagcacaaatattaaccttgtgaaaccttaccaaaccatcagtcagtcctgcatctgtttgcacaaccagctccttgctcttgcacagtactctcatgccacacgtacctctttacacagcagcctgttccactagtctgtgagctccttgaaggcaaggaatcatgattgaatcctagttcaggaggtgtttgataatggaaaaagaattc

SEQ ID NO: 204441 - DNA, 1000 bp, Homo Sapiens
ttttttgtttctgtgaagaatgtcattggtattttgatatgaattgcattgaatatgtagattgctttggagagtatggaaattttaacaacattgatccttccaatccattaacatagaatattttttccattttttgatgtccttttgaattttttcatcagttttttttaaaagttattatgatagagatttttcacttatttggttaagttaatttctaggtatttagttttatgtgtagatattataaatcagatttgcttttttatttcttgctcacattgttcactgttgacatatagaaatgctactaatttttgtatgctaattttgtatcctgcaactttattgaatgtgcttatcagttataatagttttaatgtggagtctgtatgtttttctgatataacatcatctcatcagcaaacaagaataatttggcttttttctttctaatttgggtgacctttatattatttttcttgtctgactgctccctatgcagtatgatacttgctctgagtctgtcgtatatggcttttattatgttgaggtttgttctttctatacacagtgttttgagggtttttatcatgaagagatgttgaattttatcaaatgctttttagcatcaattgaaatgatcatatagttttatccttcattctgttgatattatgtgtcacattgattgatttacacatgttgaattatctttgcatcactttcataaatcccacgtgatcatgaataatgatctttttaatatactgttcaattcggtttgtttgtatttcgttgaggatttttgcatcaatattcatcagagatattggccataggtttttttttttttttttgatgtgtctttgtctgatttttgtatcaggttaatactggctgcatagaatgagtttggaagttttccctcctccgctacttttcagaatagtttgaataggattggtatcagttcttgaaatgtttcgtagaattc

SEQ ID NO: 204442 - DNA, 1000 bp, Homo Sapiens
cctgtcaggtttctcatactaaacagaaaattatggtatggcccagagcagtcaggtcctggaggcactcctcacattaaaatggtcactcgagaggaatgcacacattttacagagtgtgttgtgtgaggcactgtgggcgatgccctctgagttgagtgcagtgggtgggcaagctccacagtggtccctcggtatctgcagatgctcaagtctctgatggaaaatggcttagtatttgcatataaccaatgcatagcctcccatctactttaaatcacctctagattgcttataatacctaatgtaaacagttgttatgcttgtattgtttagggaataatgacaagaaaaaaagtgtgtatgttcagtacaaacacaatgtttttttctgagtattttaaatctgaggctggttgaatctgcgatgcagaacctacagatggggagggccaaagatacggtgacagacaagaagaggggcatgtggtggcagatgtgcagagggcgctgaaaggcacccagccaagcaggggcatagggttgggttccaaaagaggtatctcctaagcacagagccaccaacgtgcttagggtttgaacagtcctctcgtatgtctgttttaacctggagtcatttaagagagcctaaaaaagcaaatgttactcttacctgagcccctccttagctttcaattcactccttccttgggtctggaccatccactgggcaggggagaggtgaaccactccaggaataggagcagcagctccctgactcctcctctagtttccctggttctggtttttgcttcagatgatcaagtaagggcttgaagtaggaggtaggagagaaaaaaactaagccaggtgtactgagtccctgaagaaaagctgaggggggaggttttctcttttttggtgggggcaggggtgcagtggggagaggctagggtgctggtgcccacactgacacactatcatgtcctttcttgaattc

SEQ ID NO: 204443 - DNA, 1000 bp, Homo Sapiens
cataacagctacttctttggggcccatacagcatctaagagctgtaaaacttcctctttgtactttatttatttttccccagcagttattagtcctctctccttatatatagctccatgaacacgcaatgtggcaaaggcatacttggaatctgtataaacattgacttttttgtcttttgccagcaaaagagctcttgtcaggtctattagctctgccttctgagtggaagtttctgtaggcaaaggttgagcctctgtcactgagtccagtgttactactgcatacccagcttggcggaccccctccagcataaaagtgcttccatctgtaaagtattcaacatctgggtccctgaggggttggtctgtaaggtctccctggcttgagaacacctcgtctactgtttccacacagtcatggagggggatccccattcgattgggagcagggtagccaggttaaggatgtttactgtttccaaagttatgtggggattttcacgtaggagcccctggtactgagtcatcctcggattcgataaccaatggtgccgtctctgatccattaacgttataaccaagtgtggtacctggatggttagttgctgccctagagtcattttgtcagcttcttgtgccaatagggcagtggcagctagtgccctgaggcaaggaggccattctagcaccacagagtccaattgtttggataagtgtgccaccaggcgatgccatgatcccatgacttgagtcaggacccctatagctattccctttcattcatggacatatagaaagaaagtcttagttatatctggcagtcctaaggctgggacctgggttaagacttttttaatttgtttaaacgccttctcctggtcagcctcccagaggaggggttcctttccccccaactttgtggcttcatacaagggcttggccattagtgagaaatttgggatccagatacggcagagccctgctgccccgaagaattc

SEQ ID NO: 204444 - DNA, 1000 bp, Homo Sapiens
tgacatgtaaaaaaactgacctcctggggggccgaggcaggcagatcacaaggtcaggagatcgagaccatcctagctaacacagtgaaaccccatctctattaaaaatacaaaaaatgagccgggcatggtggcgggcgcctatagtcccagctactcgggaggcagaggcaggagaatggcgtgaacccaggaggcagagctttcagtgagccgagatcgcgccactgcactccagcctgggccacagagcgagactccatctcaaaaaaaaaaaaaaaaagacataatgatataacctcattttcttctatgttttcctgctttcctaccaatatctgtaaaacattaacgtcattatttaaaaaaatatgtaacctagataatatagtaatcagacatcattgttaaatttacagcttaaggaagtaagttgtcttttcaatcagattagtcattctgtttttttagtaatagttatatattaatgaagtgaaactttataggtaggtatacatcaatgaaatcttaggcttttaccatctatattgcatacttctgacattatatcttattttccttaggttctaagaattttagatccagttacctgcaaagagagttcacctgataatccattttttgagtcttcaccaaccaccttacttgctacaaagaaaaatattggacgatttcatccctatactagatatgaaaatataactttcaattgctgcaatcactgccggggagaactgattgccctttaacagtcaatatgttggaggcatgctaaggtacttccttattacccaagagtcattattatttgggagctggggttcttacaatgctagaaataatatcacttcctatttacataatgtatacacccaaagatattttatgtactagactccagattaccctttcttaataaatatctcagggtaaggaaagaaagaaactgtatagatatatttaaaatagagaatacttt

SEQ ID NO: 204445 - DNA, 1000 bp, Homo Sapiens
ctcccattctcccaccccatgctctgaggcagctcccttgacccaggagcctcatttgagccccacctctcccagtgcccctgtttgtgggctcggggtcaccaggggccagatcactgtcaggaaccctcaccgaaggagagaagcaggccttttcccagaccagtacccattgcagcctttgaatagaacacttcaaattactcctctttcaccattgctttaggctttccaagctccaaatgggccttcttactggtatccctaggctactttaccacccccctcaccccacccacacagctgcatcaggtgcagcctgtgcagagtgggcatttgtatgcccttcatggccaagtataagctcctgcttcctgcatttgagatgctcgtgctcagggagttggcatgaggcatcctcgtccccatctcaaactggactcaacagagatgccctttcctgggctcttacaactggattactagggcagcctcactaccgagccccaaagaaaggcgttcatcctcagagctcaccagatgggatgcaaccgtgaaagccacccaagtgcttgctttctgccccaggggtttgggtggcatctgcagaaggagtctgtgggcttcacagaccactgatgagggagtgtggctacagtgggtgtgatccattaagagtgaattcagggctgggctcggtggctcacgcctgtaatcccagcactttgggagaccgaggcgggcggatcacgagctcaggaaatcgagaccatcctggccaacatggtgaaaccctgtctttactacaatacaaaaaaaattagctgggtatggtggcacacgcctgtagtcccagctactcgggaagctaaggcaggggaattgcttgaacccaggaggcagaggttgcagcgagcagagatcgcaccactgtactccagcctgacaacagagcaagactccgtctcaaaaaaaaaagagagaaaaaaagagtgaattc

SEQ ID NO: 204446 - DNA, 1000 bp, Homo Sapiens
gcggagtctcactctattgcccaggctggagtgcagtggcatgatctcggctcactgcaaccttggcctcctgggctcaagcgattctcctgcctcagcctcctgagtagccgggattacaggcgtgtaccaccacacccggctaacttttgtatttttagtagagatggggtttcaccatgttggccaggctggtctcagactcctgaccccaagtgatctgcccacctcggcctcccaaagtgttgggattacaggcatgagccaccatgaccggcctggaaattaagacattcttattagaattgtggcttattttgtttggaggaaaagtatattgtgtagctgtgtgcatttttttatgttgcaaattaattttgtgtttgaacatttattccttgaggaagctttagaggtacctcaggatgtcataaaatcagtgtagaaattaaaaaggcttttataatttcactggcaaatatcaggtttatagtctttctaaaatctaatctccctgatgttttccctttgtatttctgtaaaaagaatatagttccatttatttcatcagaaattctgttttattgcattaacattgatttcatgttaatcttttaaaaattaaccaaagatgtgtatcagcatttcccaaggtgcttttaaaatatacattgctggccaggacccctaaacctaccaatccagtttctcatccagacctccatttttcttttctttcagttctataaatgtctttttttagaaagcctttcaggtattgtgatgtcaatcctatttaagaaccagtgccttaagagagttgaggcagttaagaagcactagtgtggtctggtacagtcagggagaacaggcttcccccttcctcttactttcagttccatgtgggttttgttgttgttattttaagaggcagggtcttgctctcttttccaggttggaatgcagtggagtgatcataattcattgcggccttgaattc

SEQ ID NO: 204447 - DNA, 1000 bp, Homo Sapiens
ataaaaatattttacatggttataaggtaaaattcaatcaaaaagcaatcattaaaatctaaaaatgaaacaaatgaagctaactcaatctccagttggtggcataatcacacagagaagatctattacaaatgagtttaagacacagtaatttgattttacattctcagtgggaaataatctaaaattaaaccatttttggtaatcagatttttggtggtagtagtggtattatcattctaaaactggtgtattagtcagggctctctagaggaacagaactaataggatatatatatgaaagtttattaagtattaacttaacatgaccacaaggtcccacaataggctatctgcaagcttgaggagtaaggacagccagtccaagtctcaaaactgaagcacttggagtctgatgtttgaaggcaggaagcatccagcatgggagaaagatgtaggctgggagtctaggccagtctcacctttcacttttttctgcctgctttatatttgctggcagctgatcagtttgtgcccatcagattaagggtgggtctgccttccccagccactgactcaaatgttaatctcctttggcaacactctcacagacacacctaggattaatactttgtatccttcaatccaatcgagttgacactcagtattaactatcacaattccaccccttgtcagcttgaacacatacacatctcctgagatcatacatagtcctcaaataaagacaataataaggttacaattacacctaacgtaatacaacttcctttgtacaaccaaaaatgcaccaatccccaacccaaatactattacataaagttaacaatacttaaatgccaatatgaagtcaaaacttatgtcacatgataaaggaaaaggaaataaaatgaagatattttcttagtacaagtgtatacatgaacaaacatgtttttaacaaaagaaggaggaaatactcatgacagctacagtcctcgtt

SEQ ID NO: 204448 - DNA, 1000 bp, Homo Sapiens
cacatgttggccaggctggtctcaaatgaactcctgacctcaggtgatccacctgcctcagcctcccaaagttttgggattacagtcatgagccaccgtgcccagcttatattttatttgtaaatatttcgatatatatctctagaacgtagaaatttaaattaaaaaaaaatcagctgggcgtggtggctcatgcctataatcctagcactgggaggccaaggcaggtgaatcaccggaggtcaggagtttgagaccagcctagccaacatggtgaaaccctgtctccactaaaaatacgaaaaattagccaggcgtggtggcgtgtgtctgtaatcccagctactggcggtggggggtgggggtggggggcggtgctaaggcaggagaatcacttgaatccgggaggcggagcttgcagtgagctgagatctcgccactgcactccagcctgggtgacagagtgagactctgtctcaaacaaaaacaaaaacaaaaacaaatttcattggcacacctaaaagtcaaaatcttgtttcttaaaattatattttagtagtgtttaagtttccctgattgttcacaggtgtgtgtgtgtgtgttttaacagttggtttattcaagtcatgattcaaataaggtctgttttgattgatacgtattttaatctatggtttcctcctcattttttttctcttaccttatttgttgaaaacctgggttgtttgtactttagagtttctctacaacctagatttttctgactgcttgcttgtggtgttaaggtgttcttttgtcccacgtgttttctataaactagtaattagagattaggtctgattcagattccaattttttggtaagagtacatcataagtggtggtatgtacttccatgagaaggcaaataatgtcaggttatctctctttgtgatttagtggccattgatggcctgcaaaaattttgaagtttcaagccagtcttgactagacctgaattc

SEQ ID NO: 204449 - DNA, 1000 bp, Homo Sapiens
gatgacatgtgagactgggaatggagaaaagctacctgaaaaccttggggcttatgctcagcactgagtcctggagctgtgcccgaccagctacatcacagtggatctacagggcccggctgcaaagatgccacctcttggcctagacaatgcatgagccccaaaaactggagccatgtggctactcactgactacagtcactgaaggatgcacttcctccttgtcaagctgtggagacgtgctgctcagggagtgatgtgggctagaccgggtgtggttgctgcaccagatctggggctgagtctgggaccgggcatcccacttggtctctaggacttctgtcactttactcatattatgcatcttcctcaagatactagtggggtaagaaagaagaaaaaataaaggtcacctaatgccacagctgtactaatctggaggctcacaggagatgtaaaggggaggtcaagaggatcattccttcagaggagaagccaaacaaatcatttctgtttcaggatagagtatggagggaaggcggggacagagagagcaacagttgtctggtgcattggctacaaacatcctgaggaaaaacgaagccataatgggccccttaaataacactcatgattccttcacaaaacagccagagacccataagagttcaactccaggtatgggtatggcggtacatgcctgtaatcccagcaatttgggaggccaaggcaggagaattgcttgagtccaggaattcaagaccaaactgagaaacatagtgagaccctctgtctacaaaaaataaaaataaaaaatgagctgggtgtggtggtgtgcacctgtagtcccaactatttaggaggctgaggaggatcacttgagcccaggaggtcaaggatgcagtgagcagtgatcgtgccactgcattccagcctgggcaacagagcaagacctcatctcaaaaataaaattttaaaaatgttaaaaaaaaaagaattc

SEQ ID NO: 204450 - DNA, 1000 bp, Homo Sapiens
tattccagacccattcattgtctgacagtttggtacttcagttattttcctacttctgcttaaactctccccaagggaataagctaattagtttaactctttttgcacctggctggtgtgtgtgtttatggctttgcttgcaatgtgtaatgacccctcccagtctcattcactcttcgtggtcagagggcccgaacctgtgcaggtgcatgtactagaaatatgcaggagagtccacaagtcctggctaagtcctgagcctaaggaaatccagctgaaaaccaaattcaggagttggggtgcaaagctgagaagacaggggctctgggctgagccagcaggtatgctcacagctgggtgtgaatgaggcaagggccagagacagccaggagaggcctggagaccagaggcttccagcagggagggagggggcaggtggcagcgtctgcagtggaggaagtgctgccccatgagaagcacagtccgtcctgtccagactgcccagggctgtgagggcccacagtcccaggagatgtccaggccagaaagggcagcctcttagcggcaatgaggcagagggagcctggccccgggcaaggggcctgcgcactgcactccatgctcccagctgcgtgactccccctcactgacgaacttatgtggtggagaagggcagatgctgaagagaccccggagggacatccctactccagcgtcaccctcccaggacggtgaactgtgcgagtgaattcacacacctgccttgatggtagggatgtccctcctccagcgtcaccctcccaggacggtgaactgtgcgggtgaattcacacacctgccttgatggtagggacgtccctcctccagcgtcaccctcccaggacggtgaactgtgcgggtgaattcacacacctgccttgatggtagggacgtccctcctccagcgtcaccctcccaggacggtgagctgtgcgggtgaattcacacacctgccttggtg

SEQ ID NO: 204451 - DNA, 1000 bp, Homo Sapiens
gtggcactgttgaagacagcccaacagagtacgaaagatgccactgcagagttgacagtaacgcttgccatggttccttgaggagggataaccccagcctaaagagaccccatccttttggcctagcgttttcagttcttagcacttgttcgttcagcaaatttcctaggaatgcaacttcctggaagacacacagccacttctcaaggaacaagccagtcccgtttgcactgtggtcctggtatctgactctgcccagacccaaagctctgtcccttcctctctcctagtatttattcactctgggtgtagggcagctttttcctcttgaactctcaaggtacggaacctcattctccacatttctcaggccagctgcccttccttccgcagttcccagctcatttctgttcccgtctattctgtgacatagcagccagtttctcttattaaataattatgactgtataataactatgcctctggcaaagcatcttctctaacaggcacctactagaattcttttaaggtgggggacagattttatcttaataaaggaagaacttttaaagcccagagcttgataatgcctgccgcaggaggtagtgaattccttgtctctaaaaatacttaatataggctgtctgtgtaaccctcacaccaacatcccaacaggtgtgcaggacaaaaacaccgtctgccgtcatgaaggtgtggctccggaaggacaaggctttttaagacaaggacaaggacaactgcctgtattaacagttaaatcccccagtcgcccaaatgtgcctacttcacagtttccccctcttttgttgaaactaatgagtcacgattggagtgatgtttttctgtgactctgaaaccattttgcttaatgaggtactaagtctttataattagacccagaaggaaacgaggacgtggcccttaagagcaataattatttcagttatttatggtaataaaaatttgaaaataggaattc

SEQ ID NO: 204452 - DNA, 1000 bp, Homo Sapiens
ctaggggtcagacgccgagagaggtaagagagttttttttttttttgctacagagttttgctcttgttgcccagactggagtgcaatggtgcaatctctgctcactgcaacccaggttcaagtgattctcctgcctcagtctcctgggtagctgggattacaggcatccgccaccatgcacggctaattttttgtatttctttttttttttttttttggtagagacagagtttcaccgtgttggccagagtggtctcgaactcctgacctcaggtgatccacccactttggcctcccaaagtgctgggattataggcatgagccaccatgcctggccaggataagagattggaagcataagaatgattcaatgtgccattgctggctgtgaagatggagggggtcatgtgataaagaatgcaggtagcctctgggagctgagaacaggccccagctgacagacagcaaggaaatggcaacctttaccctacaactgcaaggaattgaactctgcccaaaccaggtgagcttggaagaggattctaaactcctgatgagaacacaactcagcctacaccttggtttcagtcttatgtgaacctgagctataaacccaactgcactggggtagaatgacctacagaattgtgacctgactaataaacagggattgttttccacaacaaagtttgtggtaatttgttaccagcaataagaaaacgaatacattctgagcttttgttgcttagaaagcagtgcctgaggccaaggcttatgtgctacaacttaattagggagggcaattccctagtagggatcgggaattagggaaaagtagagtgaggcagggaaggagggaaatgcaattggaggatagctattaagaacaactgatcccttgatcttggggaactgttattgaaagggatatatatgattgcttctcaggacagtcctctgatgtgttaaagggagaattagttgttggctcctgtttccc

SEQ ID NO: 204453 - DNA, 1000 bp, Homo Sapiens
ccagaggccctggaaataagctggaataatgtttcatggtgccttccatggtcttggcagcaataggccctgattaaatttgggcttctgaaataaatgaagctggttatttcaaccagcacgagttaaaaatgagatctgttttagataatgccaagggtgatgcttactgtgttttatagaccatgcttttggttccagggaaaccaaaaaagggacagaaagtggttactcttctgtgagaaagttacagcaggtaaagtgcatgtagcttgctctcacctccaaaatctaagtcagcaggtcttacctattacatctccttgttcatgaatcatcattcccaaatctttaaatatttcattaatatccataatatcagcctaagagaaaacgcatatattattataatcagaaattcagtccccattccataaaagaggaaaaattttaaaaacccaaaccactactcacacatgggtgagcatgcatctataatacacaaatataatacataaactttggaaatatcaggaaaatatttgacaataattaagaagaatttgaacaatagccaccagttctctaaaatcagtttgtggcattaaaaataccaagtgagcgaggcaggatggaaatgaatggaaatgaaggatctataatagagaagagccatggattgctgagttcattttatacaacctgatagttttgttatcacaagcagtatctacttacaagggtataaaatattcttagcatgtatttctagtaaaatttacacatcaatttgacaatttaaagtaataaaacattaggtgtaaatttaaagtctcacattaataatttgaacatgcagtggattagtgaaatgtcactactgaataaagaagttataaacttggtgattaaatataaatttacttttcttcaatgacacaattaactgcttcataaagtttttataaggactaaatgagataattaacataaagaattc

SEQ ID NO: 204454 - DNA, 1000 bp, Homo Sapiens
aagctgagcagttgtgtttttaatcctggagaatctgaaagattcctggagcatctcccatgttgcttcccaatgcctagaacaatatcggacattctgtaaagatttggtaaattcatgttctttccattgcaggacacaattctcacattccatcagtgtctccaaagaacctacaaaactggaaaaatatattcgatcattttatttaacaggtgtttatatagggcttgcagtacatcaggccctgctgtaagtgctttataataattaactcatttaatcttcataacaactctatgagggagatactattattattatcattttgcagatgaggaactgagatgaggagcagccctggactgagtgaattgaaccctctgggtgtgttacattcaggatggtggaacaagacccctgggaagaaggtaattcaaaccctggttcttctggatgctttctgtttcagatgagggaagcctttggaattgaaaatcaattcaaactgagcaatattagttgtaatttttgtattttaaaaccatcctaccacggcatccccatttggatggttactatcaaaaaataaaaacagggctgggcgtggtggctcatgactgtaatcccagcactttgggaggccgaggcaggcggatcacaaggccagtagttcgagaccagcctggccaatatggtgaaaccccatctctattaaaaacacaaaaattagccgggtgtggtggcgggtgcctatagtcccagctacacaggaggctgaggcaggaaaatcacttgaacctgggaggcggaggttgcagtgaaccgagattacgccactgcactccagcctgggtgacagagagagagagactctgtctcaaaaaataaataaataaataaataaataaaaataaaaataggccgggcgcagtggctcatgcctgtaatcccagcactttgggaggccgaggcaggtggatcatgaggtcaggaattc

SEQ ID NO: 204455 - DNA, 1000 bp, Homo Sapiens
aaaccacactgagaaggtaggattcaagctgggccttcaaagttgagcatgggtattatgtttttaatagatgaagggtgagagaatacattgaaggcaagtaacgcttgttagttcagccagtaattaggtcaaagaatagaacaacagggaggggaaaatgagtctcacaggaaagcctgacaagtcaagaaatgtgggagggagtctggggacagcatggttaatggcctcttctgacacaagtgcacgaagctagcagaaagggtcctggggaaactgaggcacatcctaattacctgccttgatagggactccatgcttctatgaatgaagactgagcccacctgcatttttcctttttcgtgctcttacaactcatcttcaagcctgttttctcaaaacccactcccaagctagatgttatctctgccaaaattatgaaattatttgtgggaatctaaaatcagaatttcacattttaaaaaacttttatttctaatgaattgtttgtatttgtttttgtctcttcctttgggccttgaaatcatcttgaacatggattctgttgcctggcagatgagctgtccccaacagctgggactcaggggactttcctccaggttaacagcagtggacttctcagcaccctttaggtcgctgttgtttaatcaactatcaacgtctccttacactttaattcctccctcctttgtcaagtcaaacactttgaggaaatcacactgcctgtgtccttctgatctacaggtctcatggccccatcaaaaattcaatgaacttgtttggttggatgcctcctttattacttttaaaatacaacaaagctgtcaataaattattccatcatcgcttttcaaggtatccatattaaatgtagcagtctagaacgctaaattcattgccttgacctttcttatataaaatacggacatttgtgtgtctccagtgttcaggcatccctctttctttagtggaattc

SEQ ID NO: 204456 - DNA, 1000 bp, Homo Sapiens
aattttctaaacttttacactctgcttcctatttaatttccaactttaagtcatttttttgttcctgcattgaagtgtaggctgttagaagcagctatgccacttcttgaacactttgctgcttagacatttcttctgccagatactctagatcatcactctttagttcaaacttccacagatccttagggcataaacagaatgcagccaagctctttgctaaagcataatacatgagcttttgctacagttcccagtaagttccttgttttcatctgaggcctcaaaagcctggacttcactgtccatatcactatcagcattttggtcacaaccatttaaccagtctataagaagtttcaaactttcccttatcttcctgtcttctgagccttccaaactcttccaacctttgtccattacccagttccaaagctgcttccacattttctgatatctgtatggcaatgccctactcctcagtatgaattttctgtattagtccattcttgattgctatgaagaactatctgagactggctaatttataaagaaaagaggtttaattggctcacagctctgcaggctttacaggaagcatggtgctgacttagcttctagggaggcctcaggaagcttacagtcatggcgaagtgggaccaggcacatcacatgacaaaagcaggagtaagcaaaagagagtgacggggaggtgccatacacttttaaatgaccaaatctcatgagaactcactatcatgaagacagcaccaagccatgaggaacccacctccatgacccaaacacctcccaccaggccccacctccggcattggggattacaattcaacatgagatttgggtggggacaaatatccaaactatattagcaactgtccatccagtggaattttggtggcttcatggggaagacattccatccctctccttttcccataccttccttcagatgacctaccccattaccttcaaagaattc

SEQ ID NO: 204457 - DNA, 1000 bp, Homo Sapiens
tagagaatacatgtatgtgtacagaaatgcttacataggtgtctactcacagacacatgtattttcatacatatgcacaacctcacctacatcaatattcatttcttccttcttcacaatcctttaaaaatgcaataacattcttagcttgagaatcatagaaaaattggacatgggctggatttggaccccatatcatagtttagtgacccttagaatatatggtttgagtttcctctcattttttaatgtggtatacaatgttggactgtaaaatgtaaattttatagcactcttggccctttgagtctccaatttataacttaaatttttgaaacagtgctattttctggaagattccagttacttaaggtttaaattattgtttatgatcatgttcacgtactggagcactgctttgaaaacattcagtaagtactggatcaaagaatgaattactttaccttttttatcgaagaaagaatcatttcttgttttcccactctttaatataggcaagtacaggtgcctaatatcctaaataaacaaagtaatctgattaagtcatatggccttttctaaattgcaagagctatcatgtatccaaaagaaaaaaaaatttacacttctcataacagcaggttaatatatggcaatggttgtaaatctagggcttttttgtgagaaaaatcagatagtgaagatattgatatcagcatttcatatttatttatataaaaaagaaacagctatattgttttcctttttcataaactataaattgatgaaaatttgggcttagagctataaataaaaatgtaagttaaaaaatagaatgaaaatttatttttcatatttttaattgaccagtgaaaattatgtatatttataatatacaacatcatgtttggtttatgaggatatattgtggaatgcttaaattaacttaacatatttatcacctaacatacttatgattttttgttatgagaacatttaa

SEQ ID NO: 204458 - DNA, 1000 bp, Homo Sapiens
gtgtgagccactgcaccctgccaagaattattattgtattgctcttgcatttactagcaggctttgtactggggatttttttttttttcaggaaaaaaatttaaatagggtgttgtgaaagagtcatggttttcaaagtttcaagagaagtgttttattaaaagaggggaagaaatcaatgttacctttgtcaagagagttctgtatcttaaacaatcagcttcttgttcatcatcaggttcaatgaaaagtgcacaaagtcctagagacctgataataattaagaatattcacagcttccttccgaaggctccttttaatcattgatttttatatctgggtggtcttacaatgagctgtttttgttgttttatatatctcttgcattctcaatctgggataaatgaggaaaacttctaaattaaaacatttgctccaacagttgtccttctttcacattctggttttaataatgaggtactaatattctggagaaatctttcataaactgagtattgtttttaaatctgcttatttatgtttcttgtgcaactttctgtgatatgctgtgttcaggaggaaacatctgtctttggggttttcgtcaccgtgaggcagtttactacagggcatggcatgtctgggtgctcagagataactctccaacatgggcaggcccgggaacacatgttcacggtgacagccacggccgtatccccaagtacatactcatgtgctcatttgcaggaaacacatagaggtgtggtccatgtgaacatgtgtccagaggttccaaagaatgtgtctgttagtgacaagagggacagctgttgctaggacagagccttcaatacttaagtgacattgtagcgctgggtgctcttatgaaaagcgagctcaggtcctttgaggaatatgtactatggaaagttccaatgaactggaatattaactttccattaacgtgtctcattttcctggaattcctatgtgagaattc

SEQ ID NO: 204459 - DNA, 1000 bp, Homo Sapiens
ccccagtgggggacctccaagcatccttgactccaaaaaggtgactcccagtgccactgattccctgatgtgatccaaggcccctcaggactgctggcacccctgatcgttgtcccccaacccccagcccagcctcagcccaatatctctgacctctggcctgattcctagaggtgaccagaatttaatgtcagggcctaaatagtcattgagtagattgcattcctattggtgccctcgaagacctcacttgtgcacctgtgggacccctgccggggcagataggacacgagctaatgggtgctgggcacagctcctgtggacctgacaaaggggacctgagcagtatgggaagggggtgtggaaagacagtgcccacccctctgaaattgaaggaggtggatgtatctcttaggaggtagccacatttggtatcaggctggctgggagaagggcctaaagggtgtgtgaaatgtaaacaagggcttcctgacactgctctgacttgtgctaaactttctgggggtgggagacccagagtagtcacacccaatccgtgctttcccttacgaagttcattccaggcagggagatagtcatggaaaaaggcagttatagcacaaggtcatcaaggcaaggtgttgtcttggcagaagagggactggtgatggaagccttcctggaggaggtgatggtaacctggagtttgaaatagttactcatttaacaaatatttgcctcacacctaccttgggcacagtgctacattccccaggctaatagaggaagccagcctggataaggagaatcatatctggaagattctggaatgtgaacatgtatgatacataccgagagtctgaaactatttggttttaagatctctgaaggctgatagtgacagtggggcgggggaaagtcacgtctggatgttaggggtttttcttctgttgccctttcaccatgtacatgtcaggggtcttgaatacctgatgggagg

SEQ ID NO: 204460 - DNA, 1000 bp, Homo Sapiens
ttatattaagttattaaccaagaatttaaaaaggtgaactacatatgaacaatactgtttcagagtctgctcctactagagacacttcaagcacgagtgcttacacacagtgttctacatacctgtgccctctgaaagaaactcaaatttcataaccaatcactcagaactgctgctatgtgaaatgagcggacatacaggtacgaaaagcaatttcaataactgtgcttaaaaagtgctgctattgaatgaaggtggtatgtgaattagcaccatgaagttacagttaggttaaaaaaaaagactagaaaaataaacccaaatgaacaaacataaaatataaccgcagctctggctatcttaacacaccagctctgtgacctcactgacgcttttaccctattgtacactgacagtaacaaatttacatacctgaaatggttgttgtgaaaattaaatgagaaaatccacttaaagtgctcaggaacaatgcttgtcacatagaaaaaacgttttattatttcctggatcaccattaatatataaaaatagtgtgcatttatataaatgaactggttcctcttcatatacagaagcaattgttttaagtggggatttatttgaaatttgaatttcttacgcaaaacttttatatgttctgcccttctgaaaagatctagagaagcggtccccaacctttttggcaccagggagtggtttcagggaagacaatttttccacagatggggtggggcaggggggatggtttcgggatgaaactgttctacctcagatcatcaggcattagttagattcttagaaggagcacacagcctagttcctctgtgtgcacagttcacaatggggttcaggctcctatgagaatctgatgctaccgctgatctgacaggaggtggagctcaggcagtaacgctcattggcctgctgctcacctcctgctgtgcggcctggttcctaacaggccagggacctgtaccag

SEQ ID NO: 204461 - DNA, 1000 bp, Homo Sapiens
ggagggcagcccagccatgcaccatcatttcccgtgaagagtgtaccacagccaccccaagatgggagtggctctcagtgtggacagaccgaagccagaataagtatcccaagtctccactgggaaatgtgctttcatgtcctttggttcctctttgtgcctgaagctcgggtttctaagggagaaagagagagatcgctcctgtgggtggttgtagtagtagttgtgtgtgtgtgtgtgtgtgtgtgtgtgtgtgtgtgtgtgtgtgtgtgtgtaagggagtatgcctggttataccggtatttctttctgaccttgggataagatggcccaaatatggcttaaataaaccaagctttagtagtacattatgcttgtggccttgtgacttttagtctgggagcagggtaaccagagcaccaatgctggctttcttagcactaaaggcgtgcagaagtccctgctctgttggctcgttaccagcttcccttctgtggggtgctctgggtggatgaggaccgtcagactggctggaggaaaaccatagaagattatagtctcagcttaaagtaaggagccctgggagcggaagaaatgtgtgacatttgcccactcttccttgccctccaccttgtccagccccagcccagcagcatatctgcctgccccatgcacatgctgtgatctgagtattcataccacacgcccccgcttccttaaacactctgcccgctcagcgcatgactccagtggggcagcctggtcaggactggttcttctgccctccatgccctccttcccagaggagggacatgctccaggcacacctagcctggcagacagcctccctcgggtgccacagacacagggcactatgaggcttgctggtctatgtgggagggagaacagatctgggccttggctggatatccagagcctctctctgaagaacgccctagactttgatttggaagtccactgtagcaaagggagggaattc

SEQ ID NO: 204462 - DNA, 1000 bp, Homo Sapiens
agattgttctggagctttaagatgtaatataatcccagcagttagaaaggccaaggcaatagggtcacatgcgcccaggagttcaagaccttcctgggcaacatagggagaccctgtctctgtgaaaagtaaaacaaattagcctggcatggtggcacacacctgtgatcctagctacttaagatgctgaggtaggagggtcagtagggtccaggagattgaggctgcagtgagccatgatcgtgccactgcactccagtctgggtgacagagcaagactctgtctcaaaaaaagaaaaaaaaaaggatttaattctgcatgtctgccctgctgggtttcagatttacatggggcttattttttttttttttttggcctatttctcccttttggaatgggaaagtctaccaaatatctgtcccaccattatatcttggaagtaaataacttgctttttattttataggctcatagctgaaaggaacttgcctgagtcttcaatgagactggattttggactttagagttaatgctgggacaagttaagacttttgagactactgagatgaaatgacgtatgtgagaagaatatgagttgagggggaggggaagaatgctttggtttggatagcatttggatgattgctttggtcccaccacaacaccttgaaatttggtccccagtgtggcagtgttgggaggaggggcctagtgaaaggtgtttgggaaatggaggaggattcctcgtgaaaggcttggtgctattcttatagtagtgaatgttttttgtcatttattaatgtgctttacatttatttgatgtgttccttgtttttttatatttatgttacattgtttggaattggaaaggaatttaagagatcatttggcccagggatacaaaatgtcttacataaaagcttccacacttattcccttgtccgtgccagatactgtttaaatgattatagtgatctttcctatggagtctcagaattc

SEQ ID NO: 204463 - DNA, 1000 bp, Homo Sapiens
aaatgagaatctcttcaaagtgatgcacgctgtgtttttccctgtgagacgtgtgaatgccttgtggatatttgtgagtacacttaagtgtttttgttttccactatgctaggtcagttttcagatcttattaaaaagctcagggtttcgggaatccgactgttctgcaaatgcctgctgctgttgttaagtggcctgtaccatccttgagtaggcaagaagagctgagatttcaccagaaacagtgacattcacacccaggggctgaaataaggcggaatgcccacctggagataagtcttggctgtcacacctggaccgcctgctctggtcatgtgtgtgtgtgatctataatagggtcacagctttatgaaattcagtcactttgtagcagccactctaaggaggatgattcatggtccctgtgcaggcactgcacccagcaccttctcaggaacattcacattatttccagctggattgaggctggaagctccctggcaagcaatagaaaagcaccaggtgttcccagcagcgctctctttcacccttgcaagctgcaactggcaagagaattgtacttgatggcacacggtgtgatggttgcctcactgccagagcatttgttctggatgcctctgtccccaggtgtctcagaagtaatcctaatcattgaactttggccctctggaaacaaggccagtcgcaagacacgtcaggaagcaatttgtgcatcgagactcgagctgctttggagtttccctctggattttagtcaagctgtcacaaagttcatgacttggtttttccactcttgtaaaatgaaggctgctctgactcctgcctgcaatctccagcttattgcctttaatacttccctgttgctattgctaaaccccttaccttatacagactgtggagatgggcaaaggaaaaaaatctccaagctttttgatatggtgctttgaagacacagtttactaatggcctgaaagaattc

SEQ ID NO: 204464 - DNA, 1000 bp, Homo Sapiens
tatatgtgtggtttggttcaactatcaaaaaggctttctctttccttttccaaataaagaaaggtatgaataaaaatgaattcccatatgatcaattgtacttcctttttcctacatttggaattacaaatatatgccatggaatactacttagccacaaaaaggaacgaaataatggcattcacagcatcctggatgtaactggagactattattctaagtgaagtaactcaggaatggaaaaccaaacatcgtatgttctccttcataagtgggaacgaagctatgaggatgcaaaggcataagaataatacaatggactttgaggacttggagaaaaggcagggggaggggtaagagataaaagactacacttgagtacagtgaacagtgcttgtgtgatggatgcacccaaatctcagaaattatcactattcatgtaagcaaacatcatctgttcccaaaaacctattaaaataaaaaataaattcaaaaccaaaaaataaaaaataaaggtctgaatggggaaaaaaataaattacaaataaataaatgtaatttgctatttgtaccttggtatgataggaaaactcctctcagatgactgaataattatctctgtcatataaaacttggtggtttctagaaacaaaaaagaaaattaagactctccccaatacactaataattttattgtgggcaagttgactccaaattaggatattccaaactaaatattaaatatactggtaaaattaatattctgtaaacattttcccaaaactacttagtttcagaagacaaagcattggtcactacaaggagatagttctgaagcttctgtgtctttttagaaaataatgcccagagactctgcttacacatatggaagattataaaagttagtcacatcacaggcatagtgcacttagatagaaattagtcactgggtttcctcaattctacagaatagctacaaacctgtaagtcaatgaaaaag

SEQ ID NO: 204465 - DNA, 1000 bp, Homo Sapiens
cactgagcagatgggactctgagagcagcatcctgaggtcccttcacaatagctcctttggtggtctcgtggcccagtccccagaatccagtcaggtctgggtataaacaatctgctgtaaatgcctctacagagccagatgtcacccaattctggatgacatgtctcggcagcatttaggttcttccctatccagcctaagtgctactctcccagacaaacgaccctggctgtggccacttacattttggcttcatagtccttccatgccttctccagctgttttttggaatcctgtgggttaaaaaaggacaatttgcccagagggaagctggagcactggaataaacagtatgctctgctgcctgtaggaggacctgctagtgtgctcccctgagctgctcagagcccttctctaaccagcccctgcccccacagtcctgctgcaaacctgcccccaccaaacaggctcagctgaccccatttctcagagctaaggccctcctcccagcagaccttctcctccccagagatgccaagaatcagtcaggtttggtgggccatggcttggggtgtgaagagatctttgggctctaccctgagtcctcttgctcagaagagagatcagtcatgaccatgaggatgggaggatgaaggccaaattccccctgcctaactttagcccagcattttctcctgcctggtgctagatcatcctcttagagcaagggtacaggtcaaggaacatgcacagagaggttgagaagtctaccccaggccatacagcaaaccagggagacctgactaccccctgcctagcttgcctaagcctcatccagccaggctgctcacacccttctgaacaaccccgagactcccaaggtgaaaaagctgcctgtctggtttgtgtggttagcaggctggtgccacgctggcagcctagggcagggagggaaccctcttgggggagcacggctcctcccctgggccgtctggggca

SEQ ID NO: 204466 - DNA, 1000 bp, Homo Sapiens
gcccagccaaagccaaatacttttaatccatctattgggaatgagaatgtggaaggacatcaaaagacctataactgggctgggcgtggtgactcatgcttgtaatcccagcactttgagagactgaggtggaagggttgcttgagaccagtagtctgagagcagcctgggcaacatagcaagacccccatctctacaaaaattagtctttaaaataattagccagcctattggtatgtgcctgtgttcccagctacttgagaggctgaggtgggagcatcacttgagcccagaagtttgagggtgcagtcagctgtggttgcatcactacactctagccagggtggcagagcaagaccttatcttagggaaaaaaaaatgcataactgaatttattttctttttcctttgtagacaacaagggaggtgtcacagttttccatttagatcaacaacttcaagttcttaccatggaaaattccgagaagactgaagtggttctccttgcttgtggttcattcaatcccatcaccaacatgcacctcaggttgtttgagctggccaaggactacatgaatggaacaggtaggagcagtaaccaaaagtggcttaagactagagaaccagccgggtgcagtggctcacacctgcaatcccagcattttgggaggctgagacgggcagatcacaaggtcaagagatcgagaccatcctagccaacatggtaaaaccctgtctctactaaaaaatacgaaaattcactgtgcctgtagtcctagctactcgggaggctgaggcagtagaatcgcttgaacccgggaggcggaggttgcagtgagctgagattgctgcactgcactccagcctggagacagagcaagacaccatctcaaaaaaaaaaaaaaatactagagaaccggcatgactgggtctgtttcagaatacacatttcattgactgggcacaaacatgctgtcctgctcccttgtacagtgaattc

SEQ ID NO: 204467 - DNA, 1000 bp, Homo Sapiens
ctgaaccactacatacgaacataagagctcctgttcccagatagtcaggaaatccattggtcatggcaaccccagagagttgcagatgaggaaattgaggtcctaagtagttatatgagttgaatatatttaaaactaacagattatgaattcaaggcatgaaacattaatatattattattataatatacatgttatgccaaatataaaatatgcataatgccatacaggacatagaaatcataaagtagtgaaaacagataaatgcacataagtgtatccaatatataaagatatttcctgtagattatcacagaaagcaaatgttcacacaggtgattttcccacttgataactgatcaattccattcattaaaagtatatttcaattcatttctatttaagcataaattaagacccttctaaacatttataggttcttggtgttgaaaagaatctcaaaactcaaaactcgtcaaacctcccttcatatgtgatgtatgagtttggaaagcagaaacaatgctctatggctatttattattatcttattccctggaccagtaagggacgctcacataaaaataagaaacacttacatgagaacataagagaatctccaatggtttccctattaagaaaccattctataaaatgagtccattttggccgggcgcggtggctcacgcctgtaatcccagcactttgggaggccgaggcgggcggatcacgaggtcaggagatcgagaccatcccggctaacacggtgaaaccccgtctctactaaaaatacaaaaaaattagccgggcgtggtggcaggcgcctgtagtcccagctacttggaaggctgaggcaggagaatggcgtgaacccgggaggcggagcttgcagtgagccgagatcgcgccactgcactccagcctgggggacagagcgagactccgtctcaaaaaaaaaaaaaaaaaaaaaatgagtacattttttgaaagacattcccag

SEQ ID NO: 204468 - DNA, 1000 bp, Homo Sapiens
tttctctgggaaaatgattaagcaagaaaatctctgttaggagaagagtgtgcagtaatatgaattaatcaaacacaaatgaaaaaggattaaattcgatgaaggagctacatttctaaatattttttctatctcttcaatcaagacaagggtctttttcttaagagcttataatctaattggagagacagagcacatacataaaaagatgaatggctctagggggaatccaaatgaattgtccagacagtaaatgctacagatttcagaatctggagaagagcccgaaagcctaggtggctaagtcttgaactgatcttcaaagaaatgagacgggggatcttcaacaatggagtgtgactgttaatgagcacagagtttgttttgggggtgatgaacatcttctaaaactatggtgatagctgcacaactctgactataataaaagccattgaattacatattttgaattgatgaattgtacagtatatgaattacatctcagaaaagcttttatattaaaaaatattagctatggtcttggcatcagttacataaatggggactgaggctgctaaggacattatgttttcctctttttctttcctctactttttaataaaagggatgttggctgtgcttaactttacagttgagtttcacagtcgctaggccaatgagaaattacatctgaaatagatgtagataactgcatatcatgaggagtccctgagttattgagatagacatagggacagacacagaggtttgtatctcctttctttaggagcacacgggaagaactttctacaaagaatacttacaacgtattaggtggaagcttggtggtattgcatgagaggaaaagatggctgaatagtaaaaatggatacagaataatccatttttggcctattttgctgtcacatcctgtcttcactctcctctgactctggtccatatagcagagttgggtagggaggaagggagggatgaattc

SEQ ID NO: 204469 - DNA, 1000 bp, Homo Sapiens
aaaaataaaaacagctttgtcgtatattagtactctatgactcttagagtgaacaagctaacaagtattcttaggacttagctgctttgttaatagaggtcttaacttgaatatttagaaataatcagaaaaattattttttggtattgaagatgtattttggaaatgggttttaaagtacctacttaaggaagagatatctacagtttatatttaacgttagcatttgaaagcaatgaagaaaatttttccttaaccaggaagtgtaatgaatcattatattagagattaaattaacactttggaagcattttagctcctagagttaaggttagtatagtgaaattatggtgattagcttaattcattcatgtacatctatttgtatcaccatataattactagggaaaggacaaatcacttttcaaagcctcaatgttatttgtaaaatggaggcaataagttctgctctgctcccctcacaggattattacagaggctcaaataggataagtgaaggaatgctatgcaattagttaactaatgccagttcccagactgccagatttgcccacagtaaacttcattatccacaatacatgttatcctaatatgtctttttgctacaaagaaatactaatgttttaaaattatttactagtttcataaagcagaaagatgtaaaatgcagttatagagagcatcccaagccagatgaaaagaaaccatggatttagctttatattttctgtttgaacttgatagcccaatcataaaatgcacatatttaattatagactgcacttaagatttcatatgtataaaaaagttgctgtgaaacaggtaattttaacactcaggaatttcaaggctaaggaagaaagacatactctcatgagcagctctgaacttcaaacaggattttctggctgccttaatatattaaaatggagcctaaatctgaaaacgtttttttcattcagaagaaagtacagaattc

SEQ ID NO: 204470 - DNA, 1000 bp, Homo Sapiens
gaatctgttccatgcctctctgtgaggttctggtagcctcaggcattccttggcttatggatggctctcttctccccatgttttatcatgtcgtctttcctctgtgtgtgtctgtctttgtgtacatatttcccctttttataaggataccagtcacactggattaggccctactgtaatgacctcaacttgatcacctctgtaaagatcctgtctccaaataaggtcacattcttgtgtactgcaggttaggacttcaacatatcttttggtggtggaagggtgggcataattcaacccataatacaaggttaagtgacttgctcaagccttgttaacatggctttttagtgatgaaactggtcagggaggctaggattattggaagacaaatcccaagatgtaaaccccagtggaaaaccccaaccctgctaaacctctggagagaagcaactcaagggaaacatgcagagctggccactgttgtgctgatggcattttccctcccttcctccatagcctgcctgctccaggctgagctggtaaactatgaacgagtcaaggaatattgcctcaaagtcttgaagaaggaaggggagaacttcaaggccctttaccggtctggtgtggccttctaccaccttggggactatgacaaagcactctactacctgaaagaagcaaggacccaacaaccaacaggtaaggcggaaatagctgttttcttacttcctccctgctctggtggctcctgggaccttctcatttcagcagttttcttggctaggagggccaggcagggacagagatggcaaaattagggatcagatatatatgataagacctaagaggagcacacagcccatgcatttgcctagggtttgagttccagggagcacaggcccctcttctcttcaaatagagtatagaattcctcatctttttcaactcagaatccagctctcttcacttattcaacaaatatatatatattgaattc

SEQ ID NO: 204471 - DNA, 1000 bp, Homo Sapiens
aacattagaagtcaataggcaattttagcagtttcagataagggcaggcatagagagctatgcactggtttgaaaggtctggccaggcaggaaagcagcctactctgaggaggttacagctcagctagaggagtcaggcaggcagaggaagtgcaggagaggccaggtgctaactaatcctccagttagtgtgggagcattttggagaaccacagctcagtgtggttgatccagaggatatgagaggatgaggaagtggtgaaaaacaagactggaaaagtgagcaggaacctcatcatgaagggcctatgttaaggaattggcctttatgttgcaagtggagagttactaagcagataaacatataatgcaacattttaaaaaaatagctctgattgcagtatagaaaatggtttaaagggtagggaagcttaaaggctagtactcaaacctacagagccaaacaggaggctgccatgatattcatgtaaaagaggatggggatttatattacagatgatctagtgagcagttagtacatatttgcaagtcaggatcagcaggagttagtgtttaattgaaggataaggaagagggaggtttcaggcttggtcgagaagataggtggttgcactatttcctgggatcaggagcattctcttactacatgaaataatgtacatgaaagtgctttgtaaactgtaaatataacataaatatgagtcctcttgattgcaatggacagacatgaattaagattaaagaagctctcatcagctggaaatacagacatgcaaccctttaattatggatgcccttcaacttacaatgtcccaaaaagcccatcctaagttgaaaatgcatttaacacacctaacctaccaaacattacagcttaacctaacctaccttaaatgtgctcagaacacttacattagtgtacagttgggcaaatcatccaaagcaaagcctattttataataaagtgttcgatatctca

SEQ ID NO: 204472 - DNA, 1000 bp, Homo Sapiens
tacatgtgctgaaatgtgctgaacatgcaggtttgtcacataggtatacatgtgccatggtagtttgctgcacctatcaacccatcatctaggttttaagccttgcatgcattggggatttgtcctaatgctctccctcccctttccctccacccactgacaggccccagtgtgtgatgttcccctccctgtgcccatgtgttctcattgttcaactcccacttatgagtgaaaacatgcagtgtttggttttctgttcctgcattagtttgctgaggatgacggttcccagcttcatccatgtccctgcagaggtcatgaactcattctttttaatggctgcatagtattccatggtgtatatgtgccacattttctttatccagtctatcattgatgggcatttgggttggttccaagcctttgctattgtaaatagtgctgcagtaaacatacatgtgcatgtgtctttatagtagaaagatttataatttttttggtatatactcagtaatgggattgctgggtcaaatgatatttctggttctagatccttgaggaatcgccacactgtcttccacaatggttgaactaatttagactcccaccgacagtgtaaagtgttcctatttctccacatcctctccagcatctgttgtttccttactttttaatgatcgacattctaactggcttgagctggtatctcattgtggttttgatttgcatttctctaatgaccagtgatgatgagctttttttcatatgtttgatggccgcacaaatgtcttcttttgagaagtgtctgttcatatcctctgcccactttttgatggggttgtttttttcttgtaaatgtttttaagttccttgtggattctggattttagagctttgtcagatgggtagattgtaaaaattttctcccattctgtaggttgccttttcactctgatgatagtttcttttgctgagcagaagcgctttagtttaattgatc

SEQ ID NO: 204473 - DNA, 1000 bp, Homo Sapiens
tcctgcctcagaggatcaaggagaactcttgagggatgagcatgaatttggtaagtggcaaggaggggcatctggggcagaggcacagggtggcggtggggtaggtaggatgagtttggcaatggtaaatagttcagtgggccaggggagcaggttcactgtgtcaagtagttgtatacagcttggagagagaagcaaagatacagtgaggaagcgggcaggcactgaacccacacacattgctgagtggtcaagatgagtgggctgggagaacttggtgcagaatagcagggggcattccgagcctgagccaaaccagagccaaggaggaagagtcaggatcttcctggctctgatcttagccaagtgactctaattctctaagcctctatctaagcctcagttttttcaagtgcggcaaactatcacctgcctcttttgattgtgatgatcaaaataaataacatttaaaaagctcctagattggtgcctacctcttgtgataagaaaatgggattttttttcatagcttcctgttgcacagttaataaaaaagccaaattctttaccgcaatatacaagctcgtcagggctagcctctgcctacctccccaacctcattccattaggctctctcccatccacgatgcttcagcctttctggtgtgctgttcctggaatactccaagccatttctgcctgtgggcctttgctcttgctgctccctgtgcttgacattctcttccctcagatctttgcacagccagatctctctctccctttagttctcaactgaaatgtcagcccttgaagtggttttctttgaccacagaagtagatctcccacatctatcacagcatccagtttgtttccatcatatactatgtagagatttgtttacggcctgtcttcttcaatacattagccccatgacagcagaaatgtgtctgtcttctttattctattcccagcacctagattaatatgcccagcacatta

SEQ ID NO: 204474 - DNA, 1000 bp, Homo Sapiens
aagagttaagatattaagaactgtccagcaagatgttatgtttgcataaaaaattatattgcttgaattcccaagtacatgtattacaaaaaaaattacagtaaaataaaatctatctaaatacagaattcaaaaataataatagataattgttttcaagtctatatttttgttaaggactgtgataagcatgttacatgcattaattcacttatttatctctaaaagcctgtgcagtagattactaaaattagtcttgaatcaaatttattgacacgatttacatatgataaaattccctattttaagttcagagttcaatgaaatataaaaagtatatacctttaactaaccaacactactaagatattgtactttaatatactagcaataaaatataaaatttaaatttaaaaataaacttaacagcattcaaagtataaaatatttagtgataactaaatatgcatactcagtacaacgaaaattacaaaacgttgctacaaaaacaaaagcaagcataataataaattaagttatatataccacgctcatggaccagagaaatccatattgttacattcctgtgcttaaatctgacaaactagtaccattttggtcaaaggtagaaatgaatcattaaaaagaaattattactgtatagatggaatgggcccctgtgcctaaatggccccattgattgatcaatatttttatatgatttcaggcagctttaggataattttctagcactgtactgtccaatattttagcctcattgagacacagttattattttctatcagtgccttagacagtacatggtaaatgtcactttgaagaacttgtttagcacttcagtccactagtccacgtcatttgcatttctgctgcagttctgagagctataaccacacgtttaaaaatgagtcccaaagataacatacctcatttgatgcctactataccacaaaagcagagagctgctttgttactggtt
